United States Patent Application Publication US 2025/0074962 A1 - sequence listing, part 18

SEQ ID NO: 30887 - DNA, 1170 bp, synthetic construct
  misc_feature 1..1170: note = Description of Artificial Sequence: Synthetic coding sequence
  source 1..1170: mol_type = other DNA
atgtccgacgaggcagaagacagcgattccgacagcgaaggaggagccgctggcggtgaggccgatatggacttcctgcgaaaccttttctcccagaccctgtcgctgggctctcagaaggagagactcctcgatgaacttacattggagggcgttgccagatacatgcagagtgaacgctgtcgtcgggtgatctgcctggtaggagctggtatctcaacttctgccggtattcctgatttcaggagcccttccacgggcctgtacgacaacttggaaaagtatcaccttccatatcctgaagctattttcgaaatatcttatttcaagaagcaccccgaaccgtttttcgcactagcaaaagagttgtaccccggacagttcaagccaaccatttgtcactacttcatgcgcctcctaaaggataagggtctattattacggtgttatacccagaacatcgacactctagaacgcatcgcaggccttgaacaggaagatctagttgaggcacatggaactttttacacaagccattgtgtcagcgcgagttgccgacacgaatatcccttaagttggatgaaagaaaagatcttcagcgaggtcacccctaaatgcgaagactgtcaatccttagttaagcccgacatcgtgttttttggcgagagcttacccgcaaggttctttagttgcatgcagagcgatttcctgaaggttgacctgcttctggtaatgggtacctctctccaagtgcagccgttcgctagtcttatttcaaaggcccctctatcaactcctcggctgctcatcaacaaggaaaaggcgggtcagagtgacccttttttgggcatgataatgggcctcggaggaggtatggattttgactcgaagaaggcctacagggacgttgcctggctgggggaatgcgatcagggatgcctggcgttagcagagctgctgggctggaaaaaagaacttgaggatttagttcgacgtgagcacgcgagtatcgacgcccaggggggtggaggcccacagcctcagcacttctcattccctcaagaggtgccagctacctgccaaggccgagggcaagacaacagggaaggagagacacccgtgacggccgctagccctagaagagatgctgagctgcttagggactcttag

SEQ ID NO: 30888 - DNA, 1227 bp, synthetic construct
  misc_feature 1..1227: note = Description of Artificial Sequence: Synthetic coding sequence
  source 1..1227: mol_type = other DNA
atggctgaaaatggggacaatgaaaaaatggccgcactcgaagcaaaaatttgccaccagatcgaatattacttcggcgatttcaacctccctagagataagtttctgaaggaacagataaaactagatgaaggctgggtgccccttgaaatcatgattaaattcaaccgtctgaatcgcttgacgacagactttaacgtgatcgtggaggctctgagtaaatccaaagccgagctgatggagatttctgaagataaaacaaaaattcggaggtcaccaagcaaaccgctgcccgaagtgactgacgagtataagaatgatgtcaaaaaccgtagcgtttacattaagggatttccaaccgatgctactctggatgatatcaaagagtggctcgaagataaaggccaagttctcaatatccagatgaggcggactttacataaagcgttcaagggtagcatttttgttgtctttgactcaatagaaagtgccaagaagtttgtagaaacacctgggcagaaatataaggaaactgacttactgatcctctttaaagacgattattttgcgaagaaaaatgaagagaggaagcagaacaaggtcgaggctaagctgagagcaaaacaggagcaggaagcaaagcagaagctagaagaggacgctgagatgaagagtcttgaggagaagattgggtgcctgctcaaattttctggtgatctggacgaccagacctgcagagaggacctgcacattctgtttagcaaccacggcgagatcaagtggattgatttcgtgcggggagccaaggagggcattatactcttcaaggaaaaagccaaagaggctttgggtaaggctaaggacgccaataatggtaatctgcagctccgcaataaagaggtaacctgggaagtactggagggcgaggtggagaaagaggccctgaaaaagatcatagaggatcagcaggaatcactcaacaagtggaaatcaaaggggagaagatttaagggaaaaggcaagggcaataaggctgctcaacccggttcggggaaaggcaaagtgcaattccagggaaagaaaactaaattcgcctctgacgacgaacacgatgagcatgatgaaaatggagcaacaggtcctgttaaaagggcacgagaggagacagacaaagaggaaccagctagcaagcagcagaagaccgagaacggcgctggggaccagtag

SEQ ID NO: 30889 - DNA, 1086 bp, synthetic construct
  misc_feature 1..1086: note = Description of Artificial Sequence: Synthetic coding sequence
  source 1..1086: mol_type = other DNA
atggctgagaacggggataacgagaaaatggccgcacttgaagccaagatctgccaccagattgaatactacttcggcgatttcaaccttcccagagataaattcctgaaggagcaaattaaactggatgaaggctgggtaccgctcgagatcatgattaagttcaatcgactcaatcggttgaccactgacttcaatgtcatcgtagaggcactgtccaagagtaaagccgaactaatggagatttcagaagacaagactaaaattagaagatcccctagcaagcccctgcccgaagtgacagacgagtataagaacgatgtgaaaaatcggtcggtctacatcaaaggattcccaactgacgctacactagacgacattaaagagtggctggaagataaaggacaggtgctcaatatccaaatgagacggaccctgcataaggcattcaagggcagtatttttgtggtgtttgactccatagagtctgccaaaaagttcgtggagaccccgggtcagaaatacaaggaaacagatcttctaattctgtttaaagacgattatttcgcaaagaagaacgaggagagaaaacaaaataaagtcgaggcgaaacttcgagcaaaacaggagcaagaagctaaacaaaagcttgaagaggacgccgaaatgaagtccctcgaagagaagattggctgtttactcaagttttccggagatctagacgatcagacctgtcgggaagatttgcacattctattttcaaatcacggagagattaagtggatagatttcgtgcgcggagccaaagagggcattatcctgttcaaagaaaaggccaaggaggctctgggcaaagccaaggacgccaacaatggtaatttgcagttgagaaacaaggaagttacctgggaagtcttagagggcgaggtggaaaaagaggccctgaagaaaatcatagaagaccagcaagagtcgctgaataagtggaaaagtaagggacctgtgaagcgagccagggaggaaactgataaggaggaaccggcaagtaagcagcaaaaaaccgagaacggagctggtgaccaatag

SEQ ID NO: 30890 - DNA, 1227 bp, synthetic construct
  misc_feature 1..1227: note = Description of Artificial Sequence: Synthetic coding sequence
  source 1..1227: mol_type = other DNA
atggctgaaaacggtgacaatgagaagatggccgctttggaggccaagatatgtcaccagattgagtactattttggcgatttcaacctgcctagagataaatttctgaaagaacaaatcaaactggatgaaggatgggtgccgttggagatcatgataaaattcaatcgcctgaatcgcctcaccacagattttaatgtgatagtggaggctctcagtaagtcaaaggcggagcttatggagatttctgaggataaaacaaagattcgccgatctccatcaaaaccccttcccgaggtcactgatgagtacaaaaacgacgtgaaaaaccggtcagtatacatcaaggggtttcccacagatgctaccttggacgatattaaagagtggcttgaggataaagggcaggtgttaaatatccagatgcggaggactctgcataaggccttcaaaggaagcatcttcgtagtgttcgactccatcgagtcggctaaaaaattcgtggagacaccaggacagaagtacaaggaaactgatctgctgattctgtttaaagatgactacttcgccaagaagaatgaagaaaggaagcagaacaaggtcgaggctaagctgagggcaaaacaagagcaggaggccaaacagaaactagaggaggacgctgaaatgaagagcttagaggaaaagattggatgcctacttaaatttagcggggatttggatgaccagacctgtcgggaggatcttcacatactgttctcgaaccacggcgaaatcaagtggatagacttcgttcgaggagcaaaggagggaattatcctcttcaaagagaaagcaaaagaggctctcggcaaggcaaaagacgccaataacggcaatttgcaactccggaacaaagaggtgacatgggaggttctcgaaggagaggtggaaaaagaggccttgaagaaaattattgaggatcagcaagaatccctaaacaagtggaagtctaagggccgaagatttaagggtaagggtaaagggaataaagctgctcagcccggatcgggaaagggtaaggtgcaatttcagggcaagaaaactaaattcgcctccgatgatgagcacgatgaacacgacgagaacggagccaccgggccagtgaagagggctcgggaagaaaccgacaaagaggagcccgcatccaagcagcagaagactgagaatggtgcgggtgatcagtag

SEQ ID NO: 30891 - DNA, 405 bp, synthetic construct
  misc_feature 1..405: note = Description of Artificial Sequence: Synthetic coding sequence
  source 1..405: mol_type = other DNA
atggcagagaatggggataacgagaagatggctgcactcgaagctaaaatctgccatcagattgaatactattttggggactttaatcttcccagagacaaattccttaaggagcagattaaactggatgagggatgggtacctcttgaaataatgataaaattcaacaggctcaatagattgaccacggattttaatgtgatcgttgaagccctgtcaaaatctaaggcagagttgatggagatttccgaagataaaaccaaaattcgcagatccccaagcaagccactgccagaagtcaccgacgagtacaagaatgacgtcaaaaatcggagcgtttacatcagccaccctgtggctcatgttggagttcagtggtgtgatcacggccctctccagtcctag

SEQ ID NO: 30892 - DNA, 363 bp, synthetic construct
  misc_feature 1..363: note = Description of Artificial Sequence: Synthetic coding sequence
  source 1..363: mol_type = other DNA
atgatcaagttcaatcgcctaaatcggcttacaactgacttcaacgttattgtagaggctttaagtaaaagcaaggcagaattgatggagatctcagaggacaagactaaaatccgcaggtctccctccaaacccctgccggaagtaactgacgagtacaagaatgatgtcaagaaccgttccgtgtatataaagggcttccccacagatgccacactggacgacattaaagagtggctagaagacaaggggcaggtcctgaacattcagatgcggaggacactccacaaagcattcaagggatccatttttgtcgtattcgacagcatcgagtcagccaaaaaatttgtggagacaccttag

SEQ ID NO: 30893 - DNA, 555 bp, synthetic construct
  misc_feature 1..555: note = Description of Artificial Sequence: Synthetic coding sequence
  source 1..555: mol_type = other DNA
atggcagaaaacggcgacaacgagaaaatggccgctctggaggccaagatttgtcatcaaatcgagtactacttcggcgatttcaacctgcccagggacaaatttttgaaggagcagataaagctcgacgagggctgggtaccactcgagatcatgattaaattcaaccgcctgaatcgtctcactacagactttaacgtgattgttgaggcactctctaagtctaaggccgaactgatggagatttcggaggataagacaaagatcagacggagtccatctaagcctctgccagaagtgaccgacgaatataaaaatgatgtcaagaatcggagtgtgtacatcaaaggcttcccaactgacgcaaccctcgatgatatcaaagaatggttagaagataaaggacaggtcctgaacatacagatgagacggactctgcataaggcatttaaggggagcatttttgttgtgttcgattcaatcgagtctgccaaaaagttcgtcgagacccccggacaaaaatacaaagagacagacctgctgatcctgttctag

SEQ ID NO: 30894 - DNA, 252 bp, synthetic construct
  misc_feature 1..252: note = Description of Artificial Sequence: Synthetic coding sequence
  source 1..252: mol_type = other DNA
atgagacggaccttgcataaggccttcaaaggatcgatcttcgtggtcttcgacagtattgagtccgccaagaagttcgtggagacccctgggcaaaagtataaggaaactgatttgctaatcctgtttaaggatgactacttcgccaagaagaatgaggaacgcaagcaaaataaagtggaggctaaactaagagccaagcaggaacaggaggcaaaacagaagttagaagaggacgcagagatgaagtag

SEQ ID NO: 30895 - DNA, 5505 bp, synthetic construct
  misc_feature 1..5505: note = Description of Artificial Sequence: Synthetic coding sequence
  source 1..5505: mol_type = other DNA
atgaagctctctgttaatgaggcacagcttggattttatctcggatcgttgtcacacctgagtgcctgccccggaatcgatcccaggagctccgaggaccagcccgagagccttaagacaggtcagatgatggatgagagcgacgaagacttcaaggagctctgcgcatcattttttcaaagggtgaaaaagcatggaataaaagaggtgtctggggagcgtaaaactcagaaggcggcttctaacggcactcagattcgcagtaagctgaagcgcacgaaacagactgccaccaagactaagaccttgcagggaccagcggagaagaagccacctagtggaagtcaggctccaaggacgaagaagcaaagagtcaccaagtggcaagcttcggagcccgcacacagcgtcaatggagagggtggggtgctcgccagcgcccctgatcctccagttctccgagagactgcccaaaacacccagacagggaaccagcaggagccctctccaaacctatccagggaaaagactagagaaaatgtgcccaacagcgacagccaacctcctccaagctgtctgactacggcagtgccgagcccttcaaagccaagaacggcccaacttgtgctccagagaatgcaacagttcaagagagccgatcccgagagactcaggcacgccagcgaagaatgctcattagaggccgcacgggaagagaacgtgcccaaggacccccaggaagagatgatggccggaaacgtgtacggtctgggaccgcctgctccagaaagtgacgcggctgtggccctaacactgcaacaggaattcgcgagagtcggcgcaagcgcccacgacgatagcctggaagagaagggtctctttttttgtcagatttgccagaagaatttatccgctatgaatgtgacccggagagaacagcatgtgaatagatgtctggatgaagccgaaaagactcttcgacctagtgtgccgcagataccggaatgccctatttgcggtaagccttttttaacactcaaatcgcggacatctcatctgaaacagtgtgctgtcaagatggaagtgggtccacagcttctgctgcaagctgtgagattacaaactgctcagccggaggggtcaagctcgcctcccatgttctccttctctgaccactcaagaggactcaagcgacgcggtcctacttcaaagaaagaacctcggaagagacgaaaagttgatgaggctccctccgaagacttgctggtcgctatggctctgagtcgttctgagatggagcccggagccgcagtaccagccctgcggcttgagtctgctttttccgaacggatccggcctgaggcggagaacaaaagtcgaaagaagaaaccccctgtgagcccccctctccttctggttcaggacagtgagactaccggacgtcaaattgaagacagagtggccctgctactcagtgaagaagtagaactgtcgtcaactccgcctctgcctgcgtctcggatcctgaaggaggggtgggaacgggctggccagtgtccccctcctccagagaggaagcaaagcttcctgtgggagggtagcgccttgactggggcttgggcaatggaggatttttatacggccaggctggtacccccactagtgcctcagcgtccggcacagggactcatgcaggaacccgtgccacctctggtacccccagagcacagcgagctgagcgaaagacggagccccgcattgcatggtaccccaacagccggatgcggaagtcgcggaccatcccctagtgccagccagagggaacaccaggccttacaggacctcgtagatcttgctagagagggccttagcgcctctccctggccgggatcgggtgggctagctggttccgaggggaccgccggattggatgttgtgccaggcggtttgcccctgaccgggttcgtcgtgccatcgcaagacaagcaccccgaccgtggaggaagaacactgctttcacttggcctgctggtggctgacttcggcgcaatggtgaataaccctcacctgtctgacgtccagttccagacggattctggcgaggtgctatacgcgcataagtttgtgctgtacgccagatgccctctcctgattcagtacgtgaataacgaggggttctcagcggtggaagatggcgtgctgacccaaagggtgctgcttggagacgtctccactgaagcggcaaggaccttcctgcactacctatatactgctgatacgggattaccacctgggctgtcaagtgagcttagcagccttgcccaccggtttggcgtgagcgagctggtgcatctttgcgagcaggtgcccatagcgactgactccgagggcaaaccctgggaggagaaggaggcggaaaattgcgagagtcgcgcagaaaattttcaagaattgctgcgatcaatgtgggcggacgaggaggaggaagccgaaacactgctgaagagcaaagaccacgaggaggatcaagaaaacgtcaacgaggcagagatggaagaaatttatgagtttgccgcaacccaacgcaaacttctgcaggaagagcgggcagcaggcgctggtgaggatgccgattggctcgaaggcggatcacccgtttccggccaactgctggccggagtgcaggtccagaagcagtgggacaaggtcgaagagatggaacctttagaacctggcagagatgaagcggcaacgacgtgggagaaaatgggacagtgtgctctgccaccgcctcagggacagcactcgggcgcacgaggtgctgaggcccctgagcaggaagcccctgaagaggcactgggtcatagctcatgttcgtccccttctagggactgtcaggcggagcgaaaagagggcagcctaccccactcggacgacgcgggtgattacgagcagttattttcgtccactcagggcgagatctcggagccttcacagatcacttcagaaccagaggaacagtccggtgcagttagggaaagggggttagaggtcagccatcggttagccccatggcaggcaagcccacctcacccttgccggttcttgttgggaccaccccagggcggatcgccgaggggatctcatcacactagtggctccagtttatctacacccagatcccggggaggcaccagccaggtgggtagccctacgttgctgtcacccgctgtcccaagcaagcaaaaaagagatcggagtatactgactttaagcaaggaacctgggcaccagaaaggcaaggagcgtcgatcggtactggaatgccggaacaaaggcgtcctgatgttcccagagaagagccccagcatcgacctgactcagtctaaccccgaccacagttcttcaagaagtcaaaaatcgagttccaaattaaatgaggaagatgaagtgattctcctgctggacagtgacgaagagctggagctcgagcagaccaagatgaaatccatcagcagcgatcctttggaggaaaaaaaggccctagagatttctccacgctcatgcgaactcttctcgatcatcgatgtagatgcggaccaggaaccctcccagtcacctccccgaagcgaagcagtgctgcagcaggaggatgagggcgcactccccgagaacaggggaagcctgggtagacgtggtgcgccatggctattttgcgaccgggaatcaagcccatcagaggctagtactacagatacaagttggcttgttcctgcgacacctctcgcctcccggagtcgagattgctcctcgcagacacagattagcagtttgaggtccggactcgccgtgcaggcagtcacccagcacacgccacgtgccagtgtaggcaacagggagggaaatgaggtggcacagaagttctcagttattcggcctcaaacccccccaccccagaccccctcatcgtgtctaactccagtctctcctggaactagtgacggtcggaggcaaggccacaggtctccaagccggccacatcctgggggtcacccgcactcaagccccctcgcacctcatccgatctccggggacagggctcacttttccaggcgcttcttaaaacacagccctccagggcctagcttcctgaatcagaccccagccggtgaggttgtggaggtaggagacagtgatgacgagcaggaagtggccagccaccaggcgaaccggtccccaccgcttgactcagatcctccaattccgatagacgattgctgctggcacatggaacctctaagcccaatccctattgatcattggaacctggagcggacgggaccactaagcacgtcttccccaagccgtcgcatgaacgaggccgctgattcacgggattgccgatcacctggcctactggacacaactccgatcagagggtcgtgtacaacacaaagaaaactccaggagaagagctcaggcgctggttccctcgggaacagtcgcccttcctttctgaacagcgccctgtgggatgtttgggacggagaggagcagcgtcctcctgaaacaccgcctcctgcacagatgccctccgctggcggtgcccagaaaccagagggtctggaaaccccaaagggcgcaaatagaaaaaagaatttaccaccaaaggtcccaattactccgatgcctcagtatagcattatggaaacaccagttctgaagaaggaactagatcgattcggggtgaggcctctgccaaaacgccagatggtgctgaaattgaaagaaatcttccaatatactcaccagacactcgattcagattcagaagatgaaagccagtctagccaacccttgctgcaggcccctcattgccagactttggcgtcacagacatacaagccatcaagggctggcgtgcacgcacagcaggaagcaaccactggcccaggcgcacaccgccctaaaggtcccgcaaagaccaagggaccgaggcaccaaaggaagcatcacgaaagtatcactccaccctctcggagtcctaccaaggaggcaccccctggcttgaacgacgacgcccaaatcccagcctctcaggagtcagtagctacttcagtcgacgggtccgactcgagcttgtccagccaaagttcttctagctgcgagttcggggcagcatttgagtcagccggagaagaagaaggcgagggcgaggtatccgcctcccaagcggctgtgcaggccgcagacaccgacgaagcacttcgctgttatatccgctccaagcccgcactgtatcagaaggtgctgctgtaccagccatttgaactccgggaactccaggctgagttgagacagaacggcctgagggtgtccagccgaagattgctcgattttctcgacacgcactgtataaccttcaccactgccgctacacgaagagaaaaactgcaagggagaagacgacaacccaggggaaaaaaaaaggtcgaacggaattat

SEQ ID NO: 30896 - DNA, 1404 bp, synthetic construct
  misc_feature 1..1404: note = Description of Artificial Sequence: Synthetic coding sequence
  source 1..1404: mol_type = other DNA
atgtctagcatcctaccattcaccccacccgttgtgaagagacttctgggatggaaaaagtcagcaggagggtctggtggcgctggaggcggtgagcagaacgggcaagaggagaagtggtgtgagaaggcagtcaagtccctggtgaaaaagctgaagaaaactggtaggttggacgagctcgaaaaagccattactacccagaactgcaacaccaagtgtgtgactatccccagtacttgttctgagatctgggggttgtcaacccccaacacaatcgaccaatgggatacaacaggcctttattcatttagtgagcagacccggtctcttgacggacgacttcaggtgtcgcatagaaaaggactgccacacgtgatttactgcaggctgtggcgctggccagatcttcacagccaccatgagctgaaggctattgaaaattgtgagtacgcattcaacctcaagaaggatgaggtgtgtgtcaacccgtaccactatcagagagttgagacccccgttttgcctcccgttctggtacctcgtcataccgaaatactgacagaactacccccactagacgattatacccattcaattcccgaaaacactaatttccccgcaggtatcgagcctcagagcaattacattcctgagaccccccctcctggttacatctctgaagatggtgagacgagcgatcagcagcttaaccaatctatggacaccggatctcccgctgaactgagcccaactactttatcacctgttaaccacagtctggacctccaaccagtgacctatagtgagcctgcgttttggtgctctatcgcatattacgagctgaatcagagagtgggagaaacctttcatgctagccagccttcactaactgttgatgggttcactgacccttctaattctgaacgattctgtttgggattattgtcaaatgtcaatcgcaacgccaccgtcgagatgactcgtcgccacatcggcagaggcgtccggttgtactacattgggggtgaggtgttcgctgaatgcctgtccgacagtgctatattcgtgcaaagccctaactgcaaccaacggtacggctggcaccccgcaaccgtgtgcaagatccctccgggatgcaaccttaagatttttaataatcaagagtttgccgctttattagctcaatcagtcaatcagggcttcgaggcagtttaccagttgactcgtatgtgcacaatcagaatgtcctttgtgaagggatggggggcagaatacaggcgccagacagtgacgtccaccccctgctggattgaacttcatctaaacggtccacttcaatggctggataaggttctgacccagatgggaagcccctccgtgaggtgctcttcaatgtcttag

SEQ ID NO: 30897 - DNA, 1314 bp, synthetic construct
  misc_feature 1..1314: note = Description of Artificial Sequence: Synthetic coding sequence
  source 1..1314: mol_type = other DNA
atgtcatccattctcccattcactccccctgtggttaagagactgctcggatggaaaaagtctgcaggagggtcagggggtgctggaggcggagaacagaatggccaggaggagaagtggtgtgaaaaggcggtaaaaagtctggtgaagaagctgaagaaaacgggtcgcttggacgagctcgagaaggccatcaccacccagaattgcaatactaaatgtgtgacgatccccaggtctctggacggtcgcctgcaggtatcacacaggaaagggttgccgcacgtcatctattgcaggctatggagatggcctgatctacacagtcaccacgagttgaaggcaatcgaaaactgtgagtacgccttcaatcttaagaaggatgaagtctgcgttaacccttatcattaccaaagagtggagacacccgtcctgccacccgtcctggtcccaagacacacagaaatcctcaccgagctcccgccactggacgactacacacatagtatccctgagaacaccaattttccagccggaatcgagcctcaatctaattacatccccgaaacacccccaccaggttatatctccgaagacggtgaaacatctgaccaacagcttaatcagtcaatggataccggctcacccgcagaactgagcccaaccactctgtcgcccgtaaaccattctctagatctgcagccggtgacttacagcgaaccagctttctggtgctctatagcctactatgagttgaaccaacgagtaggcgagacattccacgcctcacagccttccctcacagtcgacggatttactgatcccagcaatagcgaaagattctgcctgggccttctgtcaaatgtcaataggaacgctacggtcgagatgacccgcagacatatcggtaggggggtacggctgtactacatcggcggagaagtgttcgcagaatgtcttagcgatagtgcaatcttcgtgcagtcacccaactgtaatcagcggtatggttggcatcccgctacagtttgcaagattccacctgggtgtaacctgaagatcttcaacaatcaagagtttgccgctctgttggcccagagcgtgaatcaaggattcgaggctgtgtatcaacttacccggatgtgcacaattaggatgagttttgttaaggggtggggtgcggaataccgccgacagacagttactagtacaccttgctggatcgagctgcacctaaacgggcctttgcaatggctggataaggtgctgacacagatgggcagtccctccgtgaggtgcagttcgatgagctag

SEQ ID NO: 30898 - DNA, 1404 bp, synthetic construct
  misc_feature 1..1404: note = Description of Artificial Sequence: Synthetic coding sequence
  source 1..1404: mol_type = other DNA
atgtcgtccatactcccatttaccccgccagtagttaagcgtctccttggctggaagaagtccgctgggggaagtggcggtgctgggggaggcgagcagaatgggcaggaggagaaatggtgcgagaaggcggtaaaatcattagttaaaaaacttaaaaaaactggaaggttagacgagctggaaaaagccatcactactcagaattgcaacaccaaatgtgttactataccgtctacatgctccgagatttggggtctgtctacccccaataccattgaccagtgggacaccaccggattatactctttttccgaacaaactaggtccctggatggaagactgcaagtgtctcacagaaaaggacttccccacgtgatttattgcagactgtggagatggccagatctccactcacaccacgagttgaaggccattgaaaactgcgagtacgcctttaatttaaagaaggatgaggtctgcgtcaacccttaccactaccagagggttgagacaccagtgttaccacccgtactcgtcccccgacacactgaaattctgacagagctgcctcccctggacgattatacacacagcatcccagagaatactaacttccccgctggtattgagccccagagtaactacatcccagaaacacctcctcccggttacatcagcgaagatggggagacaagcgatcagcaactcaatcaatcaatggatactggcagtccagccgagctcagcccgactacactctccccagtcaatcacagtctggacctgcagcccgtgacatacagcgagcccgcattctggtgctctatcgcctattacgagctgaaccagagagtcggggaaacctttcacgctagtcagccatctctgacagtagatggctttaccgatcccagcaacagtgaaaggttctgtcttggcctcctctcaaatgttaatcggaacgccaccgtggagatgaccagacgacatattggccgaggcgtgcgcctttattatattggcggagaggtgttcgcagagtgcctgtccgacagcgcgatcttcgtccagagcccaaattgcaatcaacggtacgggtggcaccctgccaccgtgtgtaagatcccgcctgggtgcaatctcaaaatcttcaataatcaagaatttgccgcactcctcgcccagagcgtgaaccaggggttcgaagccgtgtaccagctcacacgcatgtgcacaatccggatgtccttcgttaaaggctggggggcagagtatcgtagacagaccgtcacatccacgccctgttggattgaactgcatctgaacgggccacttcagtggctcgataaggtcctcacccagatggggtccccatctgttcgatgttcctccatgtcttag

SEQ ID NO: 30899 - DNA, 1278 bp, synthetic construct
  misc_feature 1..1278: note = Description of Artificial Sequence: Synthetic coding sequence
  source 1..1278: mol_type = other DNA
atgtcctctatcctcccatttacccccccaatagttaaaaggttgcttggctggaagaaaggcgagcaaaacggacaggaggaaaaatggtgtgaaaaggccgttaagtcgctggtgaaaaagctgaagaaaacgggccagctggatgaactcgaaaaggccattacaacacagaatgtaaataccaaatgtatcacaataccccgatcccttgatggaaggctgcaggtcagccatcgcaagggcttaccacatgtaatttactgccgcttatggcgctggcccgacttacattcccaccatgagctgcgagccatggagctgtgtgaatttgcgttcaatatgaagaaggatgaggtgtgtgtgaacccataccattaccagagagtcgaaacacccgtcctgccccctgtgctggtgcctcggcacactgagataccagccgaatttcctcccctggatgattattctcatagtattcccgaaaacaccaacttccccgctggaatcgagccgcaatccaatataccagagacaccccctccaggatatctgtccgaagatggcgagacaagtgaccaccagatgaatcacagtatggatgccggtagccctaatctttccccgaatccaatgagcccggctcacaataacttagatttacagccagtgacctactgtgagccagctttctggtgctctatatcatactacgaactgaaccaaagagtcggcgaaaccttccacgcatctcagccgtccatgacggttgatggttttactgatcccagcaattctgaacgcttttgtttagggcttctttcgaacgttaatcggaatgcagcggtggagttaacgaggagacatatcggtaggggggtccgattatactacattggaggcgaggttttcgctgaatgcttgtccgatagtgcaatctttgttcagtctccgaattgcaaccagagatacgggtggcacccagctactgtatgtaagataccgccaggttgcaatctgaaaatattcaacaatcaggaatttgccgcacttctggcccagtccgtcaaccagggttttgaggctgtgtaccagttgactcggatgtgtaccattcggatgtcttttgttaaaggttggggcgctgaataccgcagacagaccgttacatcaaccccctgttggatagagcttcatctgaacgggcctctccagtggcttgacaaggtgctcacacagatggggtcaccaagcatacgatgctcctctgtgtcttag

SEQ ID NO: 30900 - DNA, 1146 bp, synthetic construct
  misc_feature 1..1146: note = Description of Artificial Sequence: Synthetic coding sequence
  source 1..1146: mol_type = other DNA
atgtcttgcctacatcctcggcagacatggaaaggggctgcccttgtacatcggaaggcgtggtggatgggtaggtcccttgacggtcggctgcaagtctcccatcgcaagggtctgccccatgttatctattgtcgactctggcgatggcctgacctgcactcccaccacgaactgagagccatggaactgtgcgagttcgcgttcaacatgaagaaagacgaggtgtgcgtgaatccatatcattatcaacgagttgaaacccccgtgctaccgccagtgctcgtccccaggcacacggagatccctgccgaatttccaccactcgatgattactcccattctatacccgaaaacactaacttccctgccggaatcgaaccacaaagcaatattcctgaaaccccccctcctgggtacctgtccgaggacggtgaaacaagcgatcaccaaatgaatcacagtatggacgcaggcagcccaaacctgagtccaaatccaatgagccccgctcataacaacctggaccttcagcccgtgacttattgtgaaccagccttttggtgcagcattagctattacgaattgaatcaaagggtgggggaaaccttccatgctagtcagccaagcatgacggtggatggattcaccgacccatccaactcagagcgcttttgtctgggccttttgagcaacgtcaacagaaatgccgctgtagagctgactagacgacacattggcaggggagtgagattgtactacatcgggggtgaagtgtttgccgagtgtttgtctgacagcgctatatttgtgcagtccccaaactgtaatcagcgctatggttggcaccccgctaccgtgtgtaagatcccacccggatgcaatctgaaaattttcaataaccaggaatttgcagcactgttagcacagtccgtaaaccagggatttgaggcagtctaccaattaaccagaatgtgtaccataaggatgtcttttgtcaagggatggggagctgaatatagacgacagaccgtgacctcaacaccttgctggatagaattgcacctcaatggcccactgcaatggctggataaagttctgacgcagatgggaagcccctcaattcgctgttcttcagttagctag

SEQ ID NO: 30901 - DNA, 1278 bp, synthetic construct
  misc_feature 1..1278: note = Description of Artificial Sequence: Synthetic coding sequence
  source 1..1278: mol_type = other DNA
atgtcctccatcttgccattcaccccccctatcgtgaaaagactgctgggctggaagaagggagagcagaacgggcaggaggagaaatggtgtgagaaagcggtgaagtcccttgtgaagaagctcaaaaaaaccgggcagttggatgaacttgagaaggctattacgacacagaacgtcaacacaaagtgtatcacaattcccaggtccctggatggtcgcctgcaggtgtcgcaccgaaaaggccttccccatgtaatctactgccgcctgtggcgctggcctgatttgcattcccatcatgaactgagggccatggagctctgtgagttcgcgttcaacatgaaaaaagatgaggtatgtgtgaacccgtatcattaccaacgcgtcgagacgcctgttctcccgcctgtgctggttcccaggcatacggagatccctgcggaattcccccctttagacgactactcccactcgatcccagaaaatactaatttcccagcaggaattgaaccgcagtcaaacatcccagaaacacctcctcctgggtatctctccgaggacggtgaaacctcggatcatcagatgaaccattctatggacgctgggtccccgaatctgtctccaaaccctatgagtcccgctcacaataacctggatttgcagccagtaacatactgtgaacctgccttctggtgttctattagttattacgagttgaatcaacgggtcggtgaaacttttcacgccagccagcccagtatgacagtggacggatttactgatccatcaaattccgagcggttctgcttgggcttgttaagtaacgttaaccgaaacgcggctgtggagctgacgagacgccacattggaagaggagtccgcttgtattacatcggaggcgaggtgttcgccgaatgcttgtccgactccgccatcttcgtgcagtctcccaactgtaatcagaggtatggatggcaccccgctaccgtgtgcaaaatcccccctggttgtaatctcaaaatattcaacaaccaagagttcgctgctctactcgcgcagagtgtcaaccaggggtttgaagccgtgtaccagctgactcgcatgtgcaccatccggatgagttttgtgaaaggctggggagcagaatataggagacagaccgtgacctctacaccttgctggattgagttgcacttaaacggtccactccagtggctggacaaagtactaactcaaatgggaagcccatctattcggtgcagctcagtgtcttag

SEQ ID NO: 30902 - DNA, 693 bp, synthetic construct
  misc_feature 1..693: note = Description of Artificial Sequence: Synthetic coding sequence
  source 1..693: mol_type = other DNA
atgaaccattcaatggatgctggctcccccaatctgtcaccgaatcccatgagtccggctcataacaacttggatctccagccagtaacctactgtgagcctgcattctggtgtagtatatcttactacgagctcaatcagcgtgttggggagactttccacgccagccaaccttcaatgaccgtcgacggctttacagacccatccaacagtgagcgcttttgcctgggcctgctgagtaatgtcaacaggaacgcagctgtggaactcacccgcagacatatcgggagaggagtccgcctatattacatcggcggagaggtgttcgcagagtgcctttctgacagcgctatcttcgtccagtctcccaactgtaaccagcggtatgggtggcatccggctacagtgtgcaagattccaccagggtgcaacctcaaaattttcaacaatcaggaattcgcagccctgttagcacaatccgtgaatcagggcttcgaggccgtgtatcagctcacgaggatgtgcaccatccggatgtcgtttgtcaagggctggggagcagaatataggcgacagaccgtaacgtctaccccctgctggatcgaactgcatcttaatggacctttgcagtggctggacaaagtgttgactcagatgggctcgccttccattcgatgctcttctgtgtcatag

SEQ ID NO: 30903 - DNA, 963 bp, synthetic construct
  misc_feature 1..963: note = Description of Artificial Sequence: Synthetic coding sequence
  source 1..963: mol_type = other DNA
atggagctgtgcgagttcgcattcaacatgaagaaggacgaagtgtgcgtgaacccctaccattaccaacgtgtggaaacacctgtcctcccacccgtgctcgttcccagacacacagagataccagctgaatttccccctttggacgactattctcacagtattccagagaatacaaacttcccagccggaatagaaccgcagtcaaacatacccgagactcctcctcctggctacttaagtgaggatggggagacaagtgatcatcagatgaaccactctatggacgccggatcccccaatctctccccgaatcccatgtcccctgcgcacaataacctggaccttcagcctgtgacctactgcgagccagctttctggtgcagtattagctattatgaacttaaccaacgggtaggcgagacattccatgcgtcccagccatccatgacagtggacggctttacggatccgtcgaattcagaacgtttctgtctcggccttctgagcaatgtcaatagaaacgctgccgtcgagttaaccaggagacacattgggcgaggggtgcgcctttactacatcggcggagaagtttttgctgagtgcctttcagattctgcaatattcgtacagagtccgaattgcaatcagcgttacggctggcaccctgcaacagtgtgcaagattccccctgggtgtaatctcaaaattttcaataaccaggagtttgcggctctactggcccaatctgtcaatcagggttttgaagccgtctaccagctgaccagaatgtgcacgatacgcatgagtttcgtaaagggctggggcgctgagtaccgaagacagaccgtaacgtctactccttgttggatcgaactacacctgaatggcccactgcagtggttggacaaagttcttacccagatgggctccccatccattcggtgttccagtgtgagctag

SEQ ID NO: 30904 - DNA, 1281 bp, synthetic construct
  misc_feature 1..1281: note = Description of Artificial Sequence: Synthetic coding sequence
  source 1..1281: mol_type = other DNA
atgtttagaacaaagcggagcgctctggtgcgtcggttatggcggtcccgggctccaggcggagaggatgaggaggagggagcaggtggaggtgggggaggtggtgaactgagaggcgaaggcgcaaccgactcgagggctcacggtgcgggaggaggaggcccaggtcgcgctgggtgctgcctcggcaaggcggtgagaggagcaaaaggacaccatcatccccaccctcccgctgcgggtgctggcgctgctggtggcgctgaagcggacttgaaggctttaactcacagcgtgctgaagaagctgaaagagagacagctggagctccttttacaggcagttgagtccaggggcggaacaagaaccgcgtgcctgctgctgcctggcaggctggactgcagacttggccctggagcccctgctggcgctcagcccgcacaacccccttcctcctatagccttccgctgctgctgtgcaaagtctttagatggccggaccttaggcacagtagcgaggttaaacgcctctgctgttgcgagtcctatggcaagattaatccagagcttgtttgttgtaacccacatcatctttccagattgtgcgaactagagtcccccccaccgccatacagtagatacccaatggatttcttaaaaccgaccgccgactgccctgatgccgtgcccagctcagcggagaccggcggaaccaactatctggcccctggagggctttctgacagccagcttctgctggaaccgggagacaggagccactggtgcgtagtggcctactgggaagaaaaaactagagtcgggaggctgtactgtgtacaagagccatccttggatatcttttacgaccttccacagggcaatggattctgtctgggccaactgaattcagacaacaaatctcagttggttcagaaggtacgcagtaaaatcgggtgcggtattcagcttactcgggaggttgacggcgtctgggtgtacaataggagcagctatcctatcttcattaagagcgctacgctggataatcctgactcaagaacgctgcttgtgcacaaggtcttcccaggctttagcattaaggcattcgattacgaaaaagcatacagcctacagcgccctaacgatcacgaattcatgcagcagccttggaccggctttaccgtacagatttcattcgttaaagggtggggacagtgctatacccgacagtttatctcctcttgcccatgctggcttgaggtgatattcaattcaaggtag

SEQ ID NO: 30905 - DNA, 636 bp, synthetic construct
  misc_feature 1..636: note = Description of Artificial Sequence: Synthetic coding sequence
  source 1..636: mol_type = other DNA
atggatttcttgaaaccaaccgccgattgtccggatgccgtcccaagtagtgcagaaacgggcggtacaaactatctcgcacctggcggtttgtccgattcccaactgctgctggaaccaggcgacaggtcacactggtgcgttgtggcttattgggaggaaaagactcgcgtgggaaggctgtactgtgtgcaggaaccctcgctggacattttctatgacctgccacagggaaacggcttttgtttaggccagctgaacagtgacaacaaatctcagctcgtgcagaaagtcaggtctaaaattggatgcggcattcagcttacacgagaagtcgacggggtgtgggtgtacaatcgatcttcctaccccatctttatcaagagtgctaccttggataaccctgattctcggaccctcctggtccataaagtttttcctggtttctctatcaaggccttcgactacgaaaaagcctacagtcttcagcgaccaaatgaccacgagttcatgcagcagccgtggacaggctttaccgtgcaaattagcttcgttaaagggtgggggcagtgttacacgagacagtttatcagtagctgcccttgctggcttgaggtgatcttcaatagtcggtag

SEQ ID NO: 30906 - DNA, 636 bp, synthetic construct
  misc_feature 1..636: note = Description of Artificial Sequence: Synthetic coding sequence
  source 1..636: mol_type = other DNA
atggattttcttaagccgacagccgattgccccgatgctgtcccttcctctgctgagacgggaggaacaaattatttagcccctggcggtctctcggactcacagcttctgttagaacccggtgatcgctctcactggtgcgttgtcgcatactgggaagagaagacccgagtgggtagactctactgcgtgcaggaaccctccctggacattttttacgatctgccgcagggtaacggcttttgcctgggacaactgaatagcgataacaaatcgcagctcgtacagaaagtgcgttcgaagataggatgcggcatacaactgactcgcgaagtggacggcgtgtgggtatacaatagatcttcttacccgatcttcatcaaatccgccactctcgacaaccctgacagccggacgctcctggtgcacaaagtgttcccagggttttctatcaaggccttcgactacgagaaagcctatagtctccagcggccaaacgaccatgagtttatgcagcagccctggaccggctttaccgtgcaaataagcttcgttaaaggatgggggcagtgctacacacggcagttcatctcatcttgtccctgttggctcgaagttatcttcaattcccgatag

SEQ ID NO: 30907 - DNA, 270 bp, synthetic construct
  misc_feature 1..270: note = Description of Artificial Sequence: Synthetic coding sequence
  source 1..270: mol_type = other DNA
atgaattcccagcagcagaagcagccatgtactccacctccacagccacaacagcaacaggttaagcagccctgtcaaccccctccccaggaaccttgtatcccaaaaacaaaagaaccatgtcatcccaaggtgcctgaaccttgccacccaaaagtacccgagccctgtcagcctaaagtgcccgagccttgccagcccaaggtacccgagccgtgtccgtcgaccgtgaccccagctcctgcccagcagaagaccaagcagaagtag

SEQ ID NO: 30908 - DNA, 270 bp, synthetic construct
  misc_feature 1..270: note = Description of Artificial Sequence: Synthetic coding sequence
  source 1..270: mol_type = other DNA
atgaattcacaacagcaaaaacaaccatgtactccgcctccccagccacaacagcagcaggtcaagcaaccttgtcagcctccccctcaagaaccctgtatcccaaaaaccaaggagccatgtcacccgaaagttcccgaaccatgtcatcctaaggtcccagagccttgtcagccaaaggtgcccgagccatgccagcctaaagtgcctgaaccatgtccgtccacagtgacccctgctccagctcaacaaaagacgaaacagaaatag

SEQ ID NO: 30909 - DNA, 4260 bp, synthetic construct
  misc_feature 1..4260: note = Description of Artificial Sequence: Synthetic coding sequence
  source 1..4260: mol_type = other DNA
atggcagaaggtttggaaagggtccgaattagcgcgtccgaactgcgcggaatcctagcaactctagcacctcaggctggcagcagagagaatatgaaggagctgaaagaggctcgaccgaggaaggacaatcggagacccgacttggaaatctataaaccgggtttgtcacggttgcggaacaaaccaaaaatcaaggaacctcccggttctgaagagttcaaggatgaaattgttaatgatcgagattgttctgccgttgagaatggaacccagcccgtaaaagacgtctgtaaagagctgaacaatcaagagcagaatgggcctatcgatcctgaaaataatagaggccaagagtccttcccccgtactgcgggacaagaagaccgtagcctaaagatcattaaaaggactaagaaaccggatctccagatatatcagcccggaaggcggttacaaacggtatctaaagagtcagctagtcgtgtggaagaagaggaagtgcttaatcaggtcgagcagctgagagtggaagaggacgagtgcaggggaaacgtcgcaaaggaggaggttgccaacaaacctgacagggccgagatcgaaaaatccccaggcggagggcgtgtgggtgctgccaagggggaaaaaggcaagagaatgggaaaaggtgagggagttcgggagacgcatgatgatccggctcgcggaaggccagggtctgcgaaaagatatagtcgttccgacaagaggcgaaatagataccgcactagatctacctccagcgcagggtctaataacagcgctgagggcgcaggccttaccgacaacggctgtcgtcgccgaagacaggacagaacaaaagaacgcccacggctgaaaaaacaagtcagtgttagctcgacagactctctcgatgaggacagaatagatgagcctgacggtctcggacctaggcggagctccgagaggaagcgacacctggagcgaaattggtcagggcgaggagagggcgaacaaaaaaactccgctaaagaatatagaggaactttgcgcgttacttttgatgccgaagcaatgaataaggaaagtcctatggtgaggtcggctagagacgatatggatagaggtaagcccgacaagggcctcagctctgggggaaaaggtagcgaaaagcaggaaagcaagaaccccaagcaagaactgagagggcgagggaggggaattctgatcctgcctgcccataccactctttctgtgaacagcgcgggatcaccagaaagtgcccctctaggcccaaggctgctgttcggatcgggatctaaaggcagccgaagctggggccgtgggggaacaacccggagactgtgggatccaaacaaccccgatcagaaacctgctctcaaaacgcagacgccacaactgcactttctcgacacagacgatgaggtctcgcccacgagttggggagacagcaggcaagcccaggccagctactacaagttccagaactcggacaacccatactattatcctcggacacccggacccgcatcccagtacccatatacaggctataacccattgcaatatccagtggggcctacaaatggagtttatccgggtccatactaccctgggtacccgacaccaagcggacagtatgtgtgttcaccactgcccacatccacaatgagccccgaagaggtggagcagcatatgaggaatttacagcagcaggagcttcaccggctccttagggtcgctgataaccaggaactgcaactgtccaacttgttaagccgcgatcggatttctcctgagggactggagaagatggcccaactccgggctgagctactgcagctctacgagagatgtattctgttagatattgaattttccgacaaccagaatgtggaccagatcttgtggaagaatgctttctatcaggtgattgaaaaattcagacaactggtgaaagaccccaatgtcgagaacccggagcagattcggaaccggctgttggaactgctggacgaaggatcagattttttcgattctctcctgcagaaattgcaggtgacttataaatttaagctggaggattacatggacggactcgctatccgctcgaaacccctgagaaagaccgtgaaatacgcgctaatctctgcccagagatgcatgatctgccagggagacattgcacgttaccgggaacaggcgagtgacaccgcgaattacggaaaagccagatcttggtacctcaaagctcaacatatagctcccaagaacgggaggccctacaaccaactcgctctccttgctgtgtacactcggcgtaaactcgacgccgtctactattatatgaggtcactcgccgcatcgaaccctatcctgaccgcgaaagaaagcctcatgtcattatttgaggagaccaagcgcaaggccgaacaaatggagaagaagcagcatgaagaatttgatctctccccagaccaatggagaaagggcaagaagtctaccttccggcatgtgggtgacgatacaacacggttggaaatatggattcatccgagtcaccccaggtcctcccaggggacagagagtggtaaggactccgagcaggagaacggcctcggtagtttatccccatccgaccttaacaagagattcatccttagcttcctgcatgctcacggtaagttgtttacccgcatcggtatggagacttttccggctgtggctgaaaaagtgctcaaagagtttcaggtcctactgcaacacagcccatctccaattggttctacaagaatgctccagttaatgacaataaacatgtttgcagtgcataatagtcagctgaaagattgttttagcgaagagtgtaggtctgtgatccaggaacaagcggctgccttggggttagcaatgttttcactgcttgtccgtcggtgcacgtgtctgttaaaagaaagcgcaaaagcccagctaagctcccctgaggaccaggatgaccaggacgacattaaggttagttctttcgtgccagacctgaaagagctcctgccgtccgtcaaagtgtggtcagactggatgctggggtacccagatacctggaatccccctcccacaagcctggatctgccctcacacgtggcggtggacgtctggtcaacactcgccgacttttgcaacatcctgaccgcagtcaatcagtcagaagtgccgctgtataaggatccagatgacgacttaactctgctcattctggaagaggaccgcctgttatccggcttcgtgccccttctggcggcacctcaggatccatgttacgtcgagaaaacttcagacaaagtgatcgctgcggattgtaagagagtgacagtgttaaaatattttctggaggccctgtgtgggcaggaggagcctcttctcgcttttaaaggcggaaaatatgtgtctgtggcacccgtgcccgataccatgggcaaagagatggggagccaggagggcaccagactggaagacgaggaggaagatgtggtgatagaggactttgaggaggatagcgaagccgaagggagcggcggagaggatgatatcagggagctccgagcaaaaaagctggcgctggcgcgaaagattgcggaacagcagagacggcaggaaaagatacaggcggtcttagaagaccactcacagatgcggcagatggaactcgaaataagacctctattcttggtgcctgacaccaatgggttcatcgaccatctcgcttccctcgcacggctcctggaatctcggaagtatatcctcgtcgttccccttattgtcatcaacgaattggatgggttagcgaagggccaggagactgatcatcgggctggcggttacgcgagggtggtgcaggagaaggcaagaaagagcatcgaatttctggagcagcgctttgagagcagggacagttgcctccgcgcacttaccagccggggtaacgaactagagagcattgcattccgatcagaagacattaccggacagctgggtaacaacgatgacctgatcctgtcctgctgcctccattactgcaaagacaaggcgaaagactttatgcctgccagcaaggaggagccaattagactcctgcgagaggtagtccttctgacggatgatagaaacctccgggtgaaggccctgacaaggaatgtgccggtccgggacatacctgctttcttgacatgggcccaggtaggatag

SEQ ID NO: 30910 - DNA, 993 bp, synthetic construct
  misc_feature 1..993: note = Description of Artificial Sequence: Synthetic coding sequence
  source 1..993: mol_type = other DNA
atgaggtttcgtctttgccatcagcgcggatgttgcccccatgagagggagaacacatgtacttgcaagatgataatttcatcattgcaggtcatcgccgctgactgcaaaagagtaaccgtgctgaaatactttctagaggctttgtgtggccaggaagagccgcttctggcgttcaaaggcggaaaatacgtttcagtagcaccggtgcctgacacaatgggcaaggagatgggttcgcaggaaggaacacgtctagaagacgaggaggaggacgtcgtgattgaagactttgaggaggactcagaagctgagggatcagggggtgaggatgacatcagagagctgcgcgcaaagaagctcgcactcgcacgcaagattgcagaacagcagagacgccaggagaagatccaggctgtgctggaagaccactcccaaatgcgacaaatggaactggagattagacccctattccttgtgccagacacgaacggcttcatcgaccacttggcctccctggccagattgctagaaagtcggaagtacatcctggtcgtgccacttatagtcattaacgaactcgatggactggcaaaaggtcaggagaccgatcatagggccggaggttatgccagagtggttcaagagaaggcacgcaaatccatcgagtttttagagcagcggtttgagtcgagggacagctgtctgcgcgctctcaccagcaggggaaacgaattggagtcaattgcatttcggagtgaagacattacaggacagcttggaaacaatgacgacctgattctttcttgttgtctccattattgtaaggataaggccaaagacttcatgccggcaagcaaagaggagcccatccggttgttaagggaagtggtgcttctgaccgatgatcgtaacttgagggtgaaagctctgaccaggaatgttccggtccgcgacattccagcattcctgacgtgggcccaggtcggatag

SEQ ID NO: 30911 - DNA, 1536 bp, synthetic construct
  misc_feature 1..1536: note = Description of Artificial Sequence: Synthetic coding sequence
  source 1..1536: mol_type = other DNA
atggagaccttcccggcagttgcagagaaagtcctgaaagagttccaggtgttgctgcagcatagcccttcccctatcgggtcaacgcgaatgctgcagctaatgaccattaacatgttcgcagtgcataatagccagctgaaggattgctttagcgaagagtgcagatctgtcattcaggagcaggctgccgctctgggcctagccatgttcagtctgctggtccgcaggtgtacgtgcctgctcaaagagtccgccaaagcccagttatcctcaccagaagatcaggacgatcaggacgacatcaaagtgtctagcttcgtgccagatttgaaagaactcctccccagtgtgaaagtttggtcagattggatgttgggctatccagatacgtggaaccctcctcccacttcccttgatttaccttcacacgtggctgtcgacgtatggtctaccttggccgatttctgcaatatcctgactgccgtgaatcaatccgaggtgccactctacaaggacccagacgacgacctcacactgctgatcttagaagaggataggctgctgagtggcttcgtccccctgctagcagctcctcaagatccctgctacgtggagaagaccagcgataaggtcattgccgctgattgtaaacgcgtcacagtcttaaagtattttctggaggcattatgtggacaggaggaacccttgctcgcattcaagggtggtaagtacgtgtcggtagcacccgtgcctgacactatgggcaaagagatgggctcccaggaaggaacaaggcttgaggacgaggaagaggacgtggtgatcgaggatttcgaggaagatagcgaagctgaaggaagcggcggtgaagacgacattagagaattaagagcaaagaagttggctctagctcgcaagatcgcggaacagcagagacgacaggagaaaattcaagcagttctagaggatcacagccagatgagacaaatggagctcgaaatccgccctctgtttttggtaccagatacaaacggattcattgatcacctagccagtctagccaggctcctcgagtcccgaaaatatatcctggtggtccctctcattgttatcaacgagctggacggtcttgctaaaggccaggagactgatcacagggccggaggatatgcaagagttgtgcaggagaaggctcggaagtccattgagtttctggaacagcgtttcgagagtcgtgacagctgtttgcgtgctctgaccagccgcggaaatgaacttgaaagcattgcctttcggagcgaggatatcacaggccagctgggtaataatgacgacctgattttatcctgctgtctgcactactgcaaagataaagcaaaggattttatgcccgcttcgaaagaagagccaattcggctgctgcgtgaagtggtcctcctgaccgacgatcgcaatctgcgagtgaaagcactgacgcgaaacgtgcctgtgagggacattcctgcattccttacctgggcccaggtgggctag

SEQ ID NO: 30912 - DNA, 4167 bp, synthetic construct
  misc_feature 1..4167: note = Description of Artificial Sequence: Synthetic coding sequence
  source 1..4167: mol_type = other DNA
atgaaagaactgaaagaagcaaggccaaggaaggataaccgacggcctgaccttgaaatttacaagcccggattgtcccgcttgagaaataagcctaaaatcaaagaaccacccggatctgaggaattcaaggatgagatcgtcaacgatcgtgattgctctgccgttgaaaacggcacgcagccagtgaaggacgtgtgcaaggagctgaacaaccaggagcagaacggccctatcgatcctgaaaataaccgcggtcaggagagcttccctaggaccgcaggccaagaagatcggtctcttaaaattatcaagcggacaaagaaacctgatctccagatctaccagcctggtaggagacttcagaccgtgtccaaagaatctgctagccgcgtggaggaagaggaagtgctgaatcaggttgaacagctccgcgttgaagaagacgaatgccggggaaacgtggctaaagaggaggtcgctaacaagcccgacagggcagaaatcgagaaatccccaggtggtggacgcgtcggcgctgcgaagggagagaagggcaagcggatggggaaaggggagggcgtgagggagactcatgatgacccagcaaggggtaggccagggagcgcgaagcgatactctcggagcgacaaaagaagaaacagataccgcactcggtccacctccagcgctggaagcaataactccgcggaaggtgctggcctgacagataatggctgtcgacggagacggcaggacaggacaaaagagaggccccgtctaaagaagcaggttagcgtctccagcaccgactctctcgacgaagacaggatcgacgaaccagacggcctggggcctagaaggagttctgaacggaagcgtcacctggaacggaactggtcgggacgtggggagggagaacagaagaactctgctaaggaatataggggcaccctgcgcgtgactttcgacgcggaagcgatgaacaaagaatcaccaatggtccggtccgctcgcgatgacatggatcgcggaaaaccggacaagggcctttcttctggaggcaagggatccgagaaacaagagtcaaaaaatccaaagcaggagctgaggggacgaggtcgtgggatcctgatcttgcctgcccatacgacgttatccgtcaattccgccggtagcccagagtcggcccctctgggccctaggctgctgtttggatccggtagcaagggtagtagaagctggggacgcggaggcaccacccgaaggctatgggatccaaacaaccccgatcagaaaccggcattgaagactcagaccccccaactacacttcttggacacggatgatgaagtgtcgccaacctcttggggtgactcaagacaggcgcaggctagctactataagtttcagaattccgataacccttactactatcctaggaccccaggtccggctagtcaatatccctacaccggctacaatcccctgcagtaccctgtaggccctaccaatggggtgtatcccggaccctattacccagggtaccctactccaagcgggcagtatgtgtgcagtcctctgccaacatctactatgagccccgaggaagtcgagcagcacatgcggaatctccagcagcaggagctgcaccggctcctccgcgtggccgataatcaggagttgcaactgtctaacctgctatcacgcgatagaatctcgcccgaaggactggagaaaatggcccagctccgcgcagagctgcttcagctgtacgagcggtgtattctgctggatatagaattctccgacaatcagaatgttgaccagatattgtggaagaatgccttctatcaagtaatcgaaaaatttcgacaactagtcaaagacccaaacgtcgaaaaccctgagcagataagaaaccgcctcctggaattgttggacgagggttcagacttcttcgactccttacttcagaaactgcaggtgacttacaaattcaaactcgaggactacatggacggtctcgcaatcagatccaagcccctacgcaagacagtcaaatacgcactgatttccgcccagcgatgcatgatttgccaaggagatattgctaggtacagagagcaggcgtccgatacagcaaactatgggaaggctaggtcctggtacttaaaagcccagcatatcgcgcctaagaatgggcgaccttacaaccaactggccttgcttgccgtgtacaccaggaggaagctcgatgccgtgtactattatatgcggtcactggccgctagcaatcccatcctgacagctaaggaaagcctgatgtccttgttcgaggaaacaaaaaggaaggccgaacagatggagaagaagcaacatgaggagtttgacctcagcccggaccaatggcggaaaggcaaaaaaagcacttttcgacatgtgggagacgataccacacgtctggagatatggattcacccctctcacccaaggtccagccaaggtacagaatcagggaaagactccgagcaagagaatgggctcgggtctcttagtccgagtgatctgaataaaaggttcatcttgagttttcttcacgcacatgggaagctatttacaaggatcggaatggagacatttcccgcagtagcagagaaagtcttaaaggagtttcaggtcttgttgcagcactctccgtcccctattggctcaacgagaatgctgcagctgatgacaataaatatgtttgccgtccataacagtcagcttaaggattgcttctccgaagaatgccgaagcgttattcaggaacaagccgctgcactaggcctcgctatgttctccctgcttgttagaaggtgcacctgcctactgaaggagagcgctaaggcacagctgagcagtcctgaggaccaggatgaccaagatgacatcaaagtttcctcgtttgtgcccgatctgaaggagctgttgccatcagttaaagtgtggagcgattggatgttaggctacccagatacctggaatccaccaccgacatctttggacctgccaagccatgtggctgtggatgtgtggtcgactcttgccgacttttgtaatatcctgacggcagtgaaccagtctgaggtccccctgtacaaggaccctgacgatgaccttactttactgatcctcgaggaagatcggctgctgtctgggtttgttccccttcttgcagccccacaggatccgtgctacgtcgaaaaaacttctgataaagtcatcgctgctgactgcaagagggttaccgtactgaagtactttctggaggccctctgcggccaggaggagccacttctggctttcaagggcggtaaatatgtgtccgtcgcacctgtgccggacactatgggcaaagagatgggcagccaggagggcaccaggctggaagacgaagaggaggacgtggtgattgaggatttcgaagaagactctgaagcagagggatctgggggagaggatgatatcagagagctgcgagctaagaaactggctcttgctagaaagatcgccgaacagcagagacgccaggagaagatccaggcagtgttagaggaccactctcaaatgcgccaaatggagctagaaattcggccactttttttggtgccagacaccaatggcttcattgaccacctggcatccttggccagactgctggagtcaaggaagtacatcttggtggtcccgttaatagtgattaatgagctggacggcttggccaaagggcaagaaacagatcaccgcgcaggcggttacgcacgcgtcgtccaggagaaggctcggaaatctattgagttcctggaacagcggttcgagtcgagagactcatgtctccgcgcactgacgtctcgcggaaatgagctggaatccatagcctttaggtccgaagatattacaggccagttaggaaacaatgacgatctgatcctgtcttgttgtctgcactattgcaaggacaaagcgaaggacttcatgcccgcatctaaggaggaaccaatccgattgctgagggaagtagtgcttttaaccgatgatagaaacctgagagtaaaagccctaacgcgtaatgtccctgttcgtgatatacccgctttcctgacctgggctcaggttggatag

SEQ ID NO: 30913 - DNA, 2364 bp, synthetic construct
  misc_feature 1..2364: note = Description of Artificial Sequence: Synthetic coding sequence
  source 1..2364: mol_type = other DNA
atggctgcggctcggcctgctaggggtccagaacttccactgctcggtcttctgctcctgctgcttctaggcgacccaggccgaggggctgcctcctcgggtaacgccacagggcctgggccacgctcagcagggggatccgcgaggcggagtgcggctgtgactggtccaccgccacccctaagccattgtggtcgagcagccccttgtgaaccacttcgttataatgtgtgtctcgggtccgttctgccctacggggctacatctaccctcctggcaggcgacagcgattctcaagaggaagcacatggcaagcttgttctctggagcggattgcgcaacgcgccacggtgttgggccgtgattcagccccttctctgcgcggtatacatgccaaaatgtgaaaatgaccgagtagagttaccctccaggactctgtgtcaggccacaagaggtccctgtgcaatcgtagaaagagaaaggggctggcccgactttctccgttgcacgcctgatagattccccgaaggttgcacaaatgaagtccagaatattaaatttaactcatcggggcaatgtgaagttccactcgtgcgcacagataaccccaagtcctggtatgaagacgttgagggctgcggcatacagtgccaaaatccactgttcactgaagccgaacaccaggatatgcatagctatatcgccgcattcggcgcagtcactggcctgtgtactctcttcaccctggctacatttgtggcagactggaggaattcgaaccggtatcccgcagtcatcctgttttatgtgaacgcatgcttctttgttggcagtatcggttggctagctcagtttatggatggcgctagacgggagattgtgtgtcgggctgacggaactatgcgcttgggcgagcccaccagcaacgagactctctcctgcgtgatcatcttcgtcatcgtttattacgctctgatggccggagtcgtctggtttgtggtgttgacatacgcatggcatacgtctttcaaggccctcgggacgacttaccagccactgtccggtaagacgagctacttccacttgcttacctggtccctgcctttcgtcctgaccgtcgcaattctggctgtggcacaggtcgatggggactccgtgagcgggatttgttttgtgggttataaaaactatagataccgtgccggattcgtcctcgccccaatagggcttgtgctgattgtgggcggttatttcctgatcaggggtgtgatgacattgtttagcattaaaagcaatcacccgggactcctgtcagagaaggccgcaagtaagattaatgaaacaatgctgcgactgggcattttcggttttctggcattcggctttgtcctcatcacattctcttgccacttttatgatttctttaaccaagctgagtgggaacgtagctttagggactatgttctgtgccaggccaatgtcaccattggattgccgaccaagcaacccatccccgactgcgaaattaaaaacaggccctccttgttggtggagaaaatcaacctattcgctatgtttggcaccggaattgccatgtccacatgggtttggacgaaagccaccctgctgatctggcgacgcacatggtgtcgcctgacaggccaaagtgatgatgaacctaagcgcataaagaaaagtaagatgatcgctaaagcgttctccaagagacacgaactcctgcagaaccccggtcaggagttgagtttcagcatgcatactgtgtcccatgacggacccgtcgccggtctggccttcgacctgaatgaaccttctgccgacgtgtcatcagcctgggcacagcatgtgacaaagatggtcgctaggcgcggagctatactgcctcaggatataagcgtcacgccagttgcgactcccgttccccctgaagagcaggcgaacctttggctcgtggaagctgaaatctctccggaactgcagaaacggttaggacgcaagaagaaacgacgaaaaagaaagaaagaagtctgcccactcgctccaccaccggaacttcaccccccagcacccgctcccagcaccatcccgagactcccccagttgcccagacagaagtgcttagtcgccgcaggtgcatggggcgctggagattcttgtcgacaaggggcttggactctggtctcaaacccgttctgccccgagccatctcctccccaggaccctttcctgccaagtgctcccgctcccgtagcgtgggcccacggtcgacgccagggactggggccaattcattcaaggaccaacctaatggacacggagttgatggatgcagactctgacttctag

SEQ ID NO: 30914 - DNA, 231 bp, synthetic construct
  misc_feature 1..231: note = Description of Artificial Sequence: Synthetic coding sequence
  source 1..231: mol_type = other DNA
atgtccgatcaggatagctccgagatccatttcaaagtgaaaatgaccacccatctgaagaagttgaaagagagctactgccagagacagggagtcccaatgaatagcctccggttcctcttcgagggacaacgaatcgccgataatcacaccccaaaagaactaggcatggaggaggaggatgtgattgaagtatatcaggagcaaacaggcggacacagtaccgtctag

SEQ ID NO: 30915 - DNA, 306 bp, synthetic construct
  misc_feature 1..306: note = Description of Artificial Sequence: Synthetic coding sequence
  source 1..306: mol_type = other DNA
atgtcggaccaggaggctaagccgagcacagaagatctcggtgacaaaaaagagggggaatatattaagctaaaggttatagggcaagactctagcgaaattcacttcaaggtcaagatgactacccacctcaagaagctgaaggagtcctattgccagaggcagggggtgccgatgaactctctccgattcctctttgagggccagcgcatcgccgataaccatacacccaaagaactcgggatggaagaagaggacgtcatcgaagtgtaccaggagcagactggagggcactccacggtttag

SEQ ID NO: 30916 - DNA, 306 bp, synthetic construct
  misc_feature 1..306: note = Description of Artificial Sequence: Synthetic coding sequence
  source 1..306: mol_type = other DNA
atgtccgaccaagaagcgaagcccagtactgaagacctgggagacaagaaagaaggggaatatattaagcttaaagtcatcggccaggatagcagtgagattcacttcaaggtgaaaatgacaactcatcttaagaaactgaaggaatcttactgtcagcgtcaaggcgtcccgatgaacagtctgaggtttctcttcgagggtcagcggattgcggacaaccacaccccgaaagagcttggcatggaagaagaggacgttattgaagtctaccaggaacaaacaggaggacatagcactgtgtag

SEQ ID NO: 30917 - DNA, 189 bp, synthetic construct
  misc_feature 1..189: note = Description of Artificial Sequence: Synthetic coding sequence
  source 1..189: mol_type = other DNA
atgaccactcacctgaagaagttaaaagagtcttactgccagcgccaaggcgtcccaatgaactctctgagattcctgtttgaggggcagagaatagccgacaaccacacgcctaaggaactggggatggaggaagaagacgtgatcgaagtgtatcaggagcaaactggcggacacagcacagtgtag

SEQ ID NO: 30918 - DNA, 189 bp, synthetic construct
  misc_feature 1..189: note = Description of Artificial Sequence: Synthetic coding sequence
  source 1..189: mol_type = other DNA
atgacgacacacctcaagaagttaaaagaatcttattgccagagacaaggagtgcctatgaattccctgcgattcctttttgaggggcagcgcattgctgacaaccatacacccaaggagcttggaatggaggaagaagacgtgatcgaagtataccaggaacagaccggagggcattctacagtatag

SEQ ID NO: 30919 - DNA, 795 bp, synthetic construct
  misc_feature 1..795: note = Description of Artificial Sequence: Synthetic coding sequence
  source 1..795: mol_type = other DNA
atgccgagatccttcctcgtgaggaagccttcagaccccaatagaaagccaaattactcagagctccaggactcgaacccggaatttactttccagcagccgtatgatcaagcccacctgctggctgctattcctccacccgaaatcttgaaccctacagcgagtctgcctatgcttatatgggatagcgttctggctcctcaggctcagcctatcgcatgggcttcgctgaggctccaagagagcccgagggtcgcagagttgactagtttaagcgacgaggactccgggaaggggagccaaccaccgtctccgccttctccagcaccaagcagcttcagctctaccagcgtgtcttcgctggaggccgaagcctatgctgcgtttcctgggctaggccaggttccaaagcagctagcccagctgagcgaagcaaaggacctgcaggccagaaaggccttcaactgcaagtattgcaacaaggagtatctctccttgggtgcactaaagatgcacatccgatctcacacactgccttgcgtgtgtggcacatgcggcaaggcgttcagtcgtccatggctattgcagggacacgtacgaacccatactggggaaaaacccttttcttgcccccactgtagccgagcgttcgcagatcggagcaatttacgcgctcatctccaaacccactctgacgtaaagaaataccagtgccaggcctgtgctcgaacattttctcggatgtcccttctccataagcaccaggaaagcggatgtagcggctgtcccagatag

SEQ ID NO: 30920 - DNA, 807 bp, synthetic construct
  misc_feature 1..807: note = Description of Artificial Sequence: Synthetic coding sequence
  source 1..807: mol_type = other DNA
atgcctaggagtttcctggtaaagaaacacttcaacgcgtccaagaagcctaactatagtgagctggacacacacactgtcataatttccccttacctttatgaaagctactccatgcccgtcatcccccaaccagaaattctttcctctggggcttactctcctatcaccgtgtggacgacggcagcccctttccacgcacaattgcctaacggattgtccccactgagtggatatagcagctccctgggcagggtgagccctccccctcccagcgatactagcagcaaagaccacagtggatccgaaagccccatctctgacgaagaggaacgtctccagtccaagttaagtgatccccatgcgattgaggccgaaaagttccaatgcaacttgtgcaacaagacttatagcactttctccgggctggcaaagcataagcagttgcactgcgatgcccagagccgcaagagcttctcttgcaagtactgtgataaagaatacgtctcactgggcgctcttaaaatgcatattcgtacacataccttaccctgcgtgtgtaaaatttgcggtaaggctttttcacggccttggttgttgcagggacacattaggacccacactggggagaaacctttctcatgtccccattgcaatcgagcatttgccgaccgttctaacctccgggcacacctacaaactcactctgatgtcaagaagtatcaatgtaaaaattgctctaaaaccttctcacggatgagcctgctccataagcacgaggagagcggatgctgcgtggctcactag

SEQ ID NO: 30921 - DNA, 807 bp, synthetic construct
  misc_feature 1..807: note = Description of Artificial Sequence: Synthetic coding sequence
  source 1..807: mol_type = other DNA
atgccacggtcgttcctggtaaaaaaacacttcaatgccagtaaaaagcctaactatagtgagttggacacccatactgttattatcagcccatatctttatgagtcctattccatgcccgtaatcccacaaccggagatcctgtcttctggtgcgtactccccaatcacggtatggactacagcagcacctttccatgcccagctccctaacgggctcagccctttatcaggctatagcagctccctggggagagtctctcctcctcccccttcggacacatcaagcaaagaccacagtggctctgagtcgcctatctccgacgaggaagagcgactgcagagcaaactgtcagatcctcatgccatagaggcggaaaaatttcaatgcaacttatgtaataagacttatagcacattttctgggctggctaagcacaaacagctgcactgcgacgcacagtccaggaagtccttctcatgcaaatactgtgacaaggagtatgtgtctctgggagcactcaaaatgcacattcgaacccatacgcttccttgcgtttgcaagatctgcggcaaggctttttcaaggccctggttgcttcagggtcatataagaactcatactggcgagaagcctttctcttgcccccactgtaatcgtgcgttcgcagatcgatccaacttgcgggctcacctgcagactcattcggatgtaaaaaaataccaatgtaaaaattgttcaaaaacattttctcgaatgtccctgttgcataagcacgaagagtccggctgttgtgtggctcattag

SEQ ID NO: 30922 - DNA, 879 bp, synthetic construct
  misc_feature 1..879: note = Description of Artificial Sequence: Synthetic coding sequence
  source 1..879: mol_type = other DNA
atgcccagatcctttctagtgaagacccattcctctcatagagttcccaactatagacgactagaaactcaaagagaaataaatggagcttgtagcgcttgcggtgggctggttgtgcccctattaccccgtgacaaagaggcccctagtgtcccgggtgatctccctcagccatgggatcggtcctcagccgtcgcctgcatttctctgcctctattaccacggatcgaagaggctttgggggcaagcggactagatgctctggaagtctctgaggtggaccctagagcctcgcgagcggcaatagtccctctgaaggattctctaaaccatttgaatttgccaccactccttgtgctgcctacccggtggtcccccactttagggccagacagacacggagccccagagaagcttctgggggctgagagaatgccacgggcacccggagggttcgaatgcttccactgtcacaagccctaccacactcttgctgggctcgcacggcacagacagctacactgccatctgcaggtgggcagagttttcacctgcaaatattgtgacaaggagtataccagcctaggcgctctcaaaatgcatataaggacccacaccctaccgtgtacatgcaaaatctgtggaaaggcattttccagaccatggctattgcagggtcacgtgagaactcacacaggcgagaagccctacgcctgcagccattgctctcgcgcatttgcagaccgatcgaaccttagggcacacttgcagacacactccgatgccaagaaataccggtgccggagatgtacaaaaactttctccagaatgagcctcctggcaaggcatgaagaatcgggctgctgtccaggaccctag

SEQ ID NO: 30923 - DNA, 1398 bp, synthetic construct
  misc_feature 1..1398: note = Description of Artificial Sequence: Synthetic coding sequence
  source 1..1398: mol_type = other DNA
atggggggagctgttgtggatgagggaccgaccggcgtgaaagccccagatggagggtggggctgggccgtgctttttggctgttttgtgattaccggattctcttatgccttccctaaggccgtatcggttttctttaaggagctgatacaggaattcggaattggctacagcgacacagcctggatcagcagcattcttcttgctatgctgtatggaaccggtccactgtgttccgtgtgtgtgaacagattcggttgccgccctgttatgctggtgggtggcctgttcgcctcattgggaatggtggctgccagcttttgtcggagtattattcaggtgtacctgaccacgggcgtcattaccggtctgggtttggcactgaactttcagccttctttgattatgctcaaccgctatttcagcaaaagaagacctatggcaaacggccttgccgcagcaggctccccggtgtttctgtgcgcactgtcaccgctgggtcaattactgcaggatcgctatgggtggcggggaggcttcctgattctcggcggactcctgctgaattgttgcgtctgtgcagcgttgatgaggcccctggttgtcacagctcagccaggcagcggacctccacgtccaagccggagactgctcgatctgagtgtatttcgcgacaggggcttcgtgctatatgcagtggcggcaagtgtaatggtgcttggccttttcgttcctccagtttttgtggtgtcatacgctaaagacctgggggttcctgataccaaggccgcttttctgctaacaatcctgggatttatcgacatatttgcccgacccgcagcagggttcgtcgccggacttgggaaagtgcgcccttactctgtgtacctgtttagtttctccatgttctttaacggcctggccgatttagccggtagtactgcaggcgactacggaggtctggtggtgttctgtatttttttcggcatcagctatggaatggtgggcgcattgcagtttgaggttctgatggctatagtggggacacacaagtttagcagtgcaatcgggctggttttactgatggaggcagtcgccgtcctggtgggccctccctccggcggtaaattacttgacgcgactcatgtgtacatgtatgtgtttatcctggccggtgcagaagtgcttacatcttcactgatacttctcctcggaaacttcttttgtattcggaagaaacctaaggaaccgcagcccgaggtggcggcagcagaagaggaaaagctccacaagccaccagctgattctggcgtcgatctgcgggaggtcgagcattttttgaaagcagagcctgagaaaaacggggaggttgtgcacactcccgagacatccgtctag

SEQ ID NO: 30924 - DNA, 1398 bp, synthetic construct
  misc_feature 1..1398: note = Description of Artificial Sequence: Synthetic coding sequence
  source 1..1398: mol_type = other DNA
atgggaggagccgtagtggacgaaggacccaccggtgtgaaggctccagacggaggatggggctgggccgttctgtttggctgctttgttatcacaggcttttcttacgccttcccgaaggccgtatctgtgttttttaaagagctcatacaggagttcggcattgggtattccgacactgcatggatttcctccatccttttagcgatgttgtatggtactgggccactctgctctgtatgcgtgaacagattcggatgccgtcccgttatgctggtgggaggcctgtttgccagcctcggtatggtggctgccagtttctgtcggtcaatcatacaagtttatttaaccacaggcgtcattactggcctgggcctggccctaaacttccagcccagccttattatgctgaatagatacttttctaagcgaagacccatggcgaacgggctggctgccgctggatctccagttttcctctgcgccctgtccccattggggcagctgttgcaggacagatatggatggcgcggtgggtttctgattcttggaggtcttctcttaaactgctgcgtctgtgctgccttgatgaggccactagtagtcaccgctcagccaggctcaggcccaccaagacccagccggagattgttagacctaagcgtgttccgggatcggggattcgttctgtacgccgtcgctgccagcgtcatggtccttggactgtttgtgccacccgtgtttgtggtttcgtatgccaaggacctcggggtgccagataccaaagccgcattccttctgactatcctgggatttatcgatatttttgccaggcctgcagcgggtttcgttgccggtctgggcaaggtgcggccttacagcgtgtacctcttctccttcagcatgttcttcaacggtctcgcagacttagctggctcgaccgccggtgactacggcggtctggtagtgttctgcatcttcttcggcatttcttatgggatggttggtgccctccagtttgaggtgctgatggcgatcgtgggcacacacaaattcagtagtgcgatcggcctcgtgctactgatggaagctgtggccgtgctcgtcggccctccctcaggtggcaagcttctggacgccacccacgtgtacatgtacgtgttcatcctggcgggtgctgaagtgctgacatcctccttaatcctgctgctcggcaatttcttttgtatccgtaagaagcctaaagagcctcaacctgaggtggccgctgctgaggaggagaaattacacaagccccctgccgactcaggagttgacctgagggaagtcgagcacttcctcaaggccgaacccgagaagaacggtgaagtggtccacacccctgagaccagtgtctag

SEQ ID NO: 30925 - DNA, 1398 bp, synthetic construct
  misc_feature 1..1398: note = Description of Artificial Sequence: Synthetic coding sequence
  source 1..1398: mol_type = other DNA
atgggcggagccgtcgtcgatgagggccctactggtgtaaaggcaccagacggcggttggggatgggctgtgctatttggctgtttcgttattactggcttctcctacgcttttcccaaggctgtatccgttttctttaaggagcttatccaggaatttggcataggatactcagataccgcttggatatcctcaatactgctcgccatgctgtatgggacaggtcccctttgtagtgtgtgcgtaaaccggttcggatgccggcctgtgatgttggttggtggtcttttcgcatctctaggaatggtagccgcttctttttgccgatccattatccaggtgtatctgactacgggcgttattactggtctgggactggcactcaacttccagccatccctgatcatgctgaaccgatatttctctaagcggcgtccgatggccaatggcctggcggcagcaggatcccccgtattcctctgtgcactgtcccccctcggacagttactccaggaccgttacggctggcggggtgggtttctgatactgggcggtttgttacttaactgctgcgtctgtgctgctctgatgaggcctctagtggtaacagcccaacccggttcaggaccccctcgtccttcgcgacgccttcttgacttatctgtcttccgggataggggcttcgtgctctacgccgtagccgcttctgttatggtactgggactttttgtgcctccggtctttgtggtgtcctatgctaaagacttgggagtcccggataccaaggccgcttttctcttgacaattctggggttcattgacatttttgccagacctgccgctggatttgtggctggtctgggcaaagtgcgcccttattccgtgtacctgttttcttttagtatgtttttcaacggcttagccgacttggccggaagcacagcaggagattatgggggactagtggtgttttgtattttcttcgggatttcgtatggaatggtaggggcactgcagttcgaggtcctcatggccatcgttgggacacacaagttttcgagtgccatcgggctcgtgctcctgatggaagccgtggccgtgctcgtgggcccaccctcaggcggtaaattgctcgacgccacccatgtctatatgtacgtctttatcctggctggcgctgaggtcctcacttcttccctgatacttctgctggggaatttcttctgtatcaggaaaaagcccaaagagccacagccagaggtcgcagccgcagaggaggaaaagttacacaagcccccagccgattccggcgtagacctgcgggaggtagagcactttcttaaagctgagccagagaagaacggggaggttgtacacactccggagacctccgtttag

SEQ ID NO: 30926 - DNA, 1398 bp, synthetic construct
  misc_feature 1..1398: note = Description of Artificial Sequence: Synthetic coding sequence
  source 1..1398: mol_type = other DNA
atggggggtgctgtggtggacgagggtccaacaggggtcaaagcaccagacggtggatggggatgggccgtgctcttcggatgttttgtaatcacgggattctcttacgccttccccaaggccgtctcagtgtttttcaaggaactgatccaggagttcggaatcggctattctgataccgcctggatatcatctattttactcgcaatgctatacggaaccgggcctctatgctcagtatgcgttaatcggttcgggtgcaggccggtgatgcttgtaggcggtttgttcgctagtttaggaatggtcgcggcttcgttctgcagatcgataattcaagtttacctcacgacaggtgtcattacaggtctgggactggccctgaacttccagcctagtctgatcatgctgaaccgatacttctctaagcgcaggccaatggcaaacgggctcgccgctgcaggcagccctgtctttctatgcgccctgtcaccactcggccagcttctgcaagaccggtacggctggcgaggcggtttcttaatattgggagggctgctactaaactgttgtgtgtgtgcagctctaatgcggcctctagtagtgactgctcaacctgggtccggcccaccccgtcctagcaggcggctcctcgatcttagcgtttttcgagaccgcggatttgtgctctatgccgttgctgcctctgtgatggtactgggcctgtttgtgcctccggtattcgtggtttcttacgccaaagacctgggggtgcccgacacaaaagcagcgtttctgctcacgatcctgggtttcatcgatatctttgctcggccagcggctggctttgtggccggtttaggcaaggtgcgcccttactccgtgtatttattttctttttctatgttctttaacggactcgccgacttagctggttccacggccggtgattacgggggactggttgttttctgtattttcttcggaatttcttacggtatggtgggggctttacagtttgaggtgctcatggctattgtgggaacacacaaatttagttccgccatagggctggtcctgctgatggaggctgtggccgttttggtcgggcctccaagcggaggtaagctcttggatgctacacacgtgtacatgtatgtctttatccttgcaggcgcagaagtactgacaagctcgctcatcctcctgctgggcaactttttctgtatccgcaaaaaacctaaggagccgcagcccgaggtggctgccgctgaggaagagaaactgcataagccaccagctgattccggagtagacctgagagaagtggaacattttctgaaggccgagccggagaagaacggggaggtggtccacacccctgaaacaagcgtttag

SEQ ID NO: 30927 - DNA, 1470 bp, synthetic construct
  misc_feature 1..1470: note = Description of Artificial Sequence: Synthetic coding sequence
  source 1..1470: mol_type = other DNA
atggtcccttcttctcctgctgtcgagaaacaggtccctgtggaacctggaccagaccctgagctgcgcagttggcggcacctagtctgctacttgtgcttttatggctttatggcgcagatacgcccaggagagtcgttcatcaccccgtatctgttaggccctgacaaaaactttactagagaacaggtaactaatgaaattacccccgttctgtcctacagctatttggcagttctggttcccgtcttccttttaacagattacctgaggtatactcccgtgctcctgctgcaggggctttcttttgtgagcgtttggctgctcctgttacttggccatagtgtcgctcacatgcagctgatggaactgttctacagcgtgacaatggcggctcgcatcgcctactcaagctacatcttcagtttagtgaggcccgcaaggtatcagcgggtcgccggatactccagagctgccgtgctcttgggagtgtttacttccagtgtgctgggccagctccttgttaccgtgggaagggtgagtttttccaccctgaactacatttctcttgccttcctcacttttagcgtggtccttgccctcttcctgaagcggcctaagagatcactgttcttcaaccgcgacgacaggggtcgctgcgaaacttccgccagcgagctggaacggatgaatccaggacctgggggtaagcttggacacgccctgagagtcgcttgtggggacagcgtcctcgcaaggatgctgcgcgagctaggcgattccctgcggagaccccaacttcgtctgtggtcgctatggtgggtcttcaacagtgctggatattacttagtggtgtactacgtgcatatcctttggaatgaggtcgatcccacaacaaacagcgcaagagtgtacaatggagccgctgatgctgcctccacacttcttggggctattacctccttcgccgctggatttgtgaagataagatgggccagatggagcaagttattgatcgccggtgtcaccgctacccaggccggtcttgtgttcctgttggcacatacgaggcacccctcctctatctggctgtgctacgccgctttcgttctgtttcgcggatcctaccagttcctggttcccattgctaccttccagatcgcgtccagtctgtccaaggagttgtgtgctctggtctttggagttaatacatttttcgccactatcgtgaagaccatcatcactttcattgtgtctgatgtaagaggactggggttaccggtgcggaagcagaacgaggagcttcacgtagcctccctgtctttatggaagtcacacttgcgactggcagccgatacgctgagctccgagggctcctcaggatccggccctaggtcatggttcctaagtccaactctgagagccgctctacacggccctgtttgtccttccgaggtctgcccgtcctag

SEQ ID NO: 30928 - DNA, 1776 bp, synthetic construct
  misc_feature 1..1776: note = Description of Artificial Sequence: Synthetic coding sequence
  source 1..1776: mol_type = other DNA
atggtcccaagctcgcctgccgtcgaaaagcaggtaccagttgaacccggaccagatccagaactgcgcagctggagacatttggtttgttatctttgcttttacggtttcatggcccaaattaggccaggggagtcattcattaccccttacctcttgggacctgacaagaattttacgcgtgagcaggtgacaaatgaaatcacaccggtgctgtcctactcatatttggctgttctcgtaccagttttcctgctcaccgattacctgcggtatacacccgtgttgttacttcagggactgagcttcgtttctgtctggcttctgctgcttctcggccactcagtcgcacacatgcagctcatggagctgttctactccgttaccatggcggctagaatagcatactcgtcgtatatcttctctctcgtgagacctgcgagataccaaagggtcgccggttatagccgggcagctgtgctgctgggcgtttttacatcttctgtactcgggcaactgctggtgactgttggccgagtgtcgttttctaccctgaattacatctctctggcgtttcttacgttcagtgtggtcctagcacttttcctgaaacgaccaaaaaggagcttgttcttcaatcgagacgacagaggccgatgtgagacctccgcgagtgaacttgagcggatgaatccagggccagggggaaagttgggccacgccctccgagtcgcgtgcggggacagtgtcctcgcccgaatgctccgggagttgggggactcattacgtcgaccgcagttgcggctctggtccttgtggtgggtgttcaactccgccggatactatctcgtggtatattacgtccatattctctggaatgaggtcgatcctacaactaattccgcaagggtgtacaacggcgctgctgatgccgcatccacattgctcggggcaatcacgagctttgctgctggcttcgtgaagatccgctgggcacgttggagcaagctcctgattgccggtgtgaccgccactcaggccggactggtgtttcttctggctcataccaggcacccgtcctcaatctggctgtgctacgctgccttcgtgctgttccgaggatcgtaccaattccttgttccaatagcaaccttccagatcgcttcaagcctcagcaaagaactgtgtgcccttgtgtttggggtgaatactttctttgctacgatcgtgaagaccatcatcacctttattgtaagtgacgtgcgcggtcttggcctccccgtacgtaaacagttccagctttattctgtttattttctgattttgtctataatctattttcttggtgcaatgctagatgggctacgtcactgtcagagggggcaccaccctcgccagccacccgctcagggactgcgcagtgccgctgaggaaaaagccgcacaagccttgtctgtgcaggataagggattgggcggtttgcagcccgctcagagtccaccactgagccctgaggactctctgggcgctgttggccctgcttcactcgagcagaggcagagcgatccttacctggcgcaggccccagccccacaggccgctgagttcctcagccccgtgaccactccatctccttgtacactctgcagcgcccaggcctcagggccagaagccgctgatgaaacctgccctcagctggcagtccaccccccaggggtgtccaagcttgggcttcaatgcctcccttcagatggtgtgcagaatgtaaatcagtag

SEQ ID NO: 30929 - DNA, 846 bp, synthetic construct
  misc_feature 1..846: note = Description of Artificial Sequence: Synthetic coding sequence
  source 1..846: mol_type = other DNA
atgctccgggaactgggagattccctccgccgaccacaattaagactctggtctctgtggtgggtgttcaactccgcaggttactacctggtggtgtattacgtgcatatcctctggaatgaggtagatcctacgaccaacagcgccagggtgtacaacggtgctgccgacgccgcatcaactcttcttggagcaatcaccagtttcgctgcaggttttgtgaagatcagatgggcccgatggtcaaaactcctgatcgcgggagtcactgccacacaagctggtctggtgttcctcctcgcgcacactagacacccgagctccatatggctttgttatgctgcctttgtcctcttccgtggatcttatcaatttctcgttcccattgcaacctttcagatcgcctccagcctttcaaaagaactgtgtgcattggtctttggtgttaacacatttttcgcaacaattgtcaaaacgatcatcacctttatagtgtccgacgtcagaggtctgggcctgcccgtgcggaaacaggccttgcggatgagtagaccaagactgggcctgtgcctccccggaccgtttcctcctcagtccgccgctcctgcccgagcgggtatggccgcaagctctgccgaggatcctggaagtgagaggggaccctggcgcagagccggaaccgtcgcggcacgaggggatccaggcggtgaaagggggccatggaggcgtgaaggaacactggccgcacgaggagatcctggcggagaacggggaccttggtggcgtgaagggaccctggcggctaagccaaggatgcagtgggttaccagggccacagctccttag

SEQ ID NO: 30930 - DNA, 810 bp, synthetic construct
  misc_feature 1..810: note = Description of Artificial Sequence: Synthetic coding sequence
  source 1..810: mol_type = other DNA
taactgcgactgtggtcgttatggtgggtctttaacagcgcaggctattaccttgtggtatattacgttcacatcctctggaatgaagtggacccaaccacgaactccgcccgtgtgtataatggagctgccgatgcagcctcaactctgctgggagccatcacctcttttgccgcaggcttcgtgaaaatcagatgggcacggtggtctaaacttctcatagccggtgtaacagctacgcaagccggattggtctttctgctggctcatacaagacacccttctagcatctggctgtgctacgccgctttcgtgttgtttcggggatcttatcagtttctcgtccctatcgcaacttttcagatagcatcatctctcagcaaggagctgtgtgccctggtctttggagttaacacctttttcgcaaccattgtgaaaactataattactttcatcgtctccgacgtccgcggtctaggacttcccgtgagaaaacaggcattacgaatgagtagacctcgtctgggattatgcttacccggaccttttcctccacaaagcgcagctccggctagagccggtatggcagcttcttccgccgaggatcccggtagtgaacggggaccatggcgacgggcaggaaccgtggcagccagaggggaccccggtggagaacgcggaccctggcgtcgggagggaacactggcggcaaggggagatccaggtggtgagagaggaccttggtggcgggaggggacgctcgcggctaaacccaggatgcagtgggttaccagagccacagctccatag

SEQ ID NO: 30931 - DNA, 549 bp, synthetic construct
  misc_feature 1..549: note = Description of Artificial Sequence: Synthetic coding sequence
  source 1..549: mol_type = other DNA
atggtaccttctagccccgctgtggagaagcaggtcccagtggaacctggacctgacccggagctgcgctcctggcgccacctcgtctgttacctatgtttctatggcttcatggctcagatccggcctggcgaatctttcatcactccatatttgctgggacccgacaagaacttcacgagagagcaagtgacgaacgaaattacccctgtcctgagctatagctacctggccgtgctagtacccgtgtttttactgaccgattatcttaggtatacacctgtactcctgttacaaggcctgagctttgtatccgtgtggctgctgttgctgctgggccacagtgtggcacacatgcaacttatggagctgttctatagcgtgacaatggctgccaggatcgcctattctagctacattttctctttagtgcggcctgctaggtaccagcgcgttgccggatactcgagagcagctgtgcttctgggcgtgttcaccagcagcgtcctgggccagctgctggtaacggtagggcgtgtgtctttttag

SEQ ID NO: 30932 - DNA, 465 bp, synthetic construct
  misc_feature 1..465: note = Description of Artificial Sequence: Synthetic coding sequence
  source 1..465: mol_type = other DNA
atggttcctagttcaccagccgtagaaaagcaggtcccggtggaacctggcccagatccggagctgagatcttggagacatttggtgtgttacctgtgtttttatgggttcatggctcagatacggcctggcgaaagctttatcacaccttatctattaggacctgacaaaaacttcactcgcgagcaagtgactaatgagattacacctgtgctgagttattcctacctggcggtgctggttccagtcttcctgctgacagattacctgaggtatacaccagttctgttgttgcagggcttgagctttgtgagcgtgtggcttctccttctgctggggcattctgtcgcacacatgcaactgatggagctgttttattccgtcaccatggccgctcggatagcttacagcagttatatcttcagtctggtcagacctgcacgctatcagagagtggccggttag

SEQ ID NO: 30933 - DNA, 1656 bp, synthetic construct
  misc_feature 1..1656: note = Description of Artificial Sequence: Synthetic coding sequence
  source 1..1656: mol_type = other DNA
atgcgaccacagcctgcggaaccagctcctggcggaagagggaacgaggcttgttccatccattccgaagtgactaacgaaattacccctgtgctcagctacagttacttagcagtgctggtccccgtgttcctgctcaccgactacttgcggtacactcctgttctcctgctccaagggctgagctttgtgtctgtgtggttgcttcttttattgggccactctgtagctcatatgcagctcatggagttattctattctgtaaccatggctgcaagaatcgcttactcctcatacattttcagcctggtgaggcctgcccgttatcaacgtgtggcaggttactcccgcgctgcagtgttgctcggcgtgtttacatctagcgttctgggacagttgttggttacagttgggagagtctctttcagtaccctcaactatatcagcttagcgttcttaacatttagcgtggtattagcactctttttaaaacggcctaagcgcagtctttttttcaaccgcgacgaccgcggacggtgcgaaacatcggcttcggagctggagcggatgaacccagggcctggcggtaagctgggccacgccctgagggtcgcatgcggagacagtgtgctagcccgtatgcttcgggagctgggggacagcctccgtagaccgcaactgaggctctggtcactctggtgggttttcaactcggcaggctactatctggtggtgtactacgtgcacatcctctggaatgaggtcgacccaacaaccaactcagccagggtatataacggggctgccgatgcagcgtcaactctactgggtgccattacttccttcgcagcaggctttgtaaagataagatgggctcgctggtctaaattgctgattgcaggagtcactgctactcaggctggtttggtattcctgctcgcccacacacgtcaccctagctccatctggctgtgctacgctgcattcgtgctcttcagaggaagctatcaattcctggtgcctatcgctacattccaaattgcgagttcactgtctaaggaactctgcgcactggtgtttggggttaatacgttctttgcaactatcgtgaaaaccataatcacattcatcgtgtccgacgttcgcggactgggcctcccagtccgaaagcagttccagctgtacagcgtttacttcctgatcttgagtattatctattttctgggggcaatgcttgacggcctccggcactgccagcgcggacatcatcctagacaacccccagcccagggcctgcgcagcgcagctgaagaaaaagccgctcaggcactgagcgttcaagacaaaggtctgggtggtctccagcccgctcagtcaccacccctcagtcctgaagattcattaggtgccgtagggccagctagtctggaacagcggcaaagcgatccatacctggcacaggcccctgcgccacaggccgcagagtttctgtcaccagtgacgacgcccagtccctgcactctatgctctgcccaagcttcgggacccgaggccgctgacgagacttgtcctcagctggccgtgcatcctcctggggtgtctaagctgggcctacagtgtctgcctagcgacggtgtgcagaacgtaaatcagtag

SEQ ID NO: 30934 - DNA, 186 bp, synthetic construct
  misc_feature 1..186: note = Description of Artificial Sequence: Synthetic coding sequence
  source 1..186: mol_type = other DNA
atggtgcctagttcaccagccgtggagaagcaagtgccggtggagccagggccagaccctgaacttcgctcttggaggcacctggtgtgctatttatgcttttacggcttcatggcccagatcaggccaggagaatctttcattactccttatctgctgggaccggacaagaatttcacccggtag

SEQ ID NO: 30935 - DNA, 705 bp, synthetic construct
  misc_feature 1..705: note = Description of Artificial Sequence: Synthetic coding sequence
  source 1..705: mol_type = other DNA
atggaaccatcttcaaagaagctgacggggagactgatgctcgccgtcgggggtgcagtcctgggctcattacagttcggttataacaccggtgtcattaacgcgccacagaaagtcatcgaggaattttacaaccagacctgggttcatcggtacggcgaatccatcttaccaacaacacttacgactctatggagcctctcggtcgccatcttctccgtcggtggaatgatcggctctttctccgtgggactgttcgtaaacagattcggtagaaggaattccatgcttatgatgaatctcctggcttttgtgtcagccgttttgatgggcttttccaagctgggtaagagttttgaaatgctcatcctggggagatttattattggagtatattgtggactgactaccggctttgttcccatgtatgtgggggaggtctctcccaccgccttgagaggtgctctcggcactctgcaccagctagggatcgtggtgggtatcctcattgcgcaggtcagttggggcagaatctacctcccaggtaccgcccctgctcactcattttctgggtcccggatctgcgcccagcagggcagagtgtccctccctccatctccacactccctcgctgaggacaactacggcacacaggtgcagaggacacagcatcacggcctccccgtggactccaaaatgacatag

SEQ ID NO: 30936 - DNA, 1377 bp, synthetic construct
  misc_feature 1..1377: note = Description of Artificial Sequence: Synthetic coding sequence
  source 1..1377: mol_type = other DNA
atggagccatcatcaaaaaagctgaccggcaggctcatgctagctgttgggggtgcagtgctcgggagccttcaattcggctacaacacaggggtaatcaatgctccacaaaaggtaattgaagaattctataatcaaacgtgggttcaccgctacggggaatccattctgccaacgacactgaccacgttgtggagcctgagcgtggccatttttagcgtgggcggtatgattggctctttctccgtggggctgtttgtcaacagatttgggaggcgcaattccatgctgatgatgaacttacttgccttcgtgagcgccgtgctcatgggtttcagcaaattaggtaagagcttcgaaatgctcatcctgggaaggtttatcatcggtgtgtattgcggccttaccaccgggtttgtgccaatgtacgtgggcgaagtgtcacctaccgctctgagaggagctctgggcactctgcatcagctggggattgtggttgggatcctgatcgcacaagtctttgggcttgacagtatcatgggtaataaagatttgtggccactcctgcttagcattatcttcatcccggcactgctgcagtgcattgtgctgcccttttgtcccgaatcacccagattcctcctgatcaatcggaatgaggaaaaccgcgcaaagagtgtgctgaagaagctccgcggaacagctgacgtcacccatgacctgcaggaaatgaaggaggaatccaggcaaatgatgcgagaaaaaaaggtcacaatcctggagctgtttagaagcccggcttatagacagccaatactgattgccgtcgtcctccaactgtcacagcaactcagcggcatcaatgcagtcttctattacagcacctcaatcttcgagaaggctggcgtccaacagcctgtttacgctaccatcgggagtggaatcgtcaataccgcgtttactgtggtcagcttgttcgtggtggagcgggctggcaggcggactctccaccttataggcttggcaggcatggctggatgtgccatactgatgaccatcgccttggctttactggagcagttgccctggatgagttacctaagcatcgtagccatctttgggttcgtggctttctttgaagttggccctggaccgatcccttggtttattgttgcagagctgttttcacagggcccaagacctgctgcaatcgccgtcgcgggattttcaaattggacctctaacttcatcgtaggaatgtgttttcagtacgtcgaacaactgtgcggtccatatgtgttcatcatttttactgtcctgttggtcctgtttttcatttttacactgaatggcagcatgcctgaggggggagactag

SEQ ID NO: 30937 - DNA, 1305 bp, synthetic construct
  misc_feature 1..1305: note = Description of Artificial Sequence: Synthetic coding sequence
  source 1..1305: mol_type = other DNA
atggagcctagcagcaaaaagctgacgggcaggctgatgctggcagtgggcggagcagtcctgggtagcctccaattcgggtataacactggcgtcatcaacgctccccagaaagtcatagaagagttttataaccagacgtgggtgcatagatatggagagtcgattcttcctaccaccttaacaactttatggtcactaagcgttgcaatcttctcagttggcggtatgattggatcattttccgtggggctctttgtaaaccgatttggcaggcgcaacagtatgttaatgatgaatttgctggctttcgttcccatgtatgtgggcgaggtttcgcccaccgcgctgagaggcgcactggggacgctgcatcaacttggcattgtggtgggaattatcatcttcatccctgcactgctgcagtgtatagtgctgcccttctgtcccgaatcaccacgcttccttctgattaacagaaacgaagagaatcgggctaaatccgttctcaagaagctgcgaggtacagctgacgtaactcacgacctgcaggaaatgaaggaggagtctagacagatgatgagagagaagaaagtgactattctggaactctttaggtcacccgcttaccggcagcccattctaatcgccgtggtgctccaactctcccaacaactgagcgggatcaatgcagttttctattattcgacctcaattttcgaaaaagctggcgtacagcagccagtgtacgctactatcggatccggcattgtgaacacggcctttactgtcgtgtcattatttgtggtcgagcgggctggcagacggacactgcatctgatcggtcttgcagggatggctggctgtgcaatcctcatgacaatcgctctggcccttctcgaacagctgccatggatgtcttacctttcgattgtggcaatcttcgggtttgtggctttcttcgaagtcggtcctgggcctatcccgtggttcatcgtcgctgagctattcagccagggccctaggccagcagctatcgcggtggccggattcagtaattggacctcaaacttcatcgttggcatgtgtttccagtatgtggaacagctctgcgggccatacgtgttcatcatttttacagtactgctggtgctgttcttcatattcacctacttcaaagtgcccgaaaccaaaggtcgcaccttcgacgagatcgctagtgggttcagacagggtggggcaagccagagtgataaaacaccagaggagctgtttcaccctttgggcgctgactctcaggtctag

SEQ ID NO: 30938 - DNA, 528 bp, synthetic construct
  misc_feature 1..528: note = Description of Artificial Sequence: Synthetic coding sequence
  source 1..528: mol_type = other DNA
atggagccatcctccaaaaagttgactggaagactgatgttagccgtggggggtgccgtgctgggatcactgcaatttgggtataatacgggcgtgatcaatgccccacagaaagtcattgaggaattctacaaccaaacctgggtgcaccgctatggggagtctatcctgcccaccactctgacaaccctgtggagcctctcggtggctatttttagcgtgggagggatgatcggatctttctctgttggattatttgtgaacaggttcggtagacgtaactccatgcttatgatgaacctactggctttcgtctccgcggtgctgatggggttttctaagttagggaaccctaagttagaaacgactgatacacctttaccgaaaaaattcccattcaggccccaggcccgaaaggtgaccgctgtccaatgtcccttctgcctgagtatttgcccactccatagcctccttatactaggccctacctccactgctaccgaggctgggaagggccacaatgtatag

SEQ ID NO: 30939 - DNA, 1479 bp, synthetic construct
  misc_feature 1..1479: note = Description of Artificial Sequence: Synthetic coding sequence
  source 1..1479: mol_type = other DNA
atggagccctcctcaaaaaagctgacaggtcgtctcatgctggctgtcgggggagcagtgctgggcagtctgcagtttggttacaacacaggagtaattaatgcgccacaaaaagtcatcgaggagttttacaatcagacatgggtacataggtacggagagagcattctgcccaccaccctgactacgttgtggtcactttctgtggccatttttagcgtcggtgggatgatcggcagttttagcgtcggcctatttgtgaacaggttcgggaggaggaactccatgctgatgatgaacttgttggcttttgtgtccgcagtactcatgggcttcagtaaacttggcaagagttttgaaatgcttatcctgggtcggttcatcattggtgtgtactgcggtctcactaccgggtttgtgcctatgtatgtcggggaagtctcgcccactgcccttcggggagcgttagggacccttcatcaactaggaatcgtcgtcgggattctgatagcccaggtgtttgggcttgactcaatcatgggtaacaaagacctatggccattactgctcagcataatcttcataccggctctcctgcagtgcattgtattaccattttgccctgagtcgccacgcttcttgctgattaaccggaatgaggaaaaccgtgcaaaaagcgtccttaaaaagctgagaggtaccgcagacgtgactcatgacctacaggagatgaaagaagagtccagacaaatgatgcgggaaaagaaggtgacgatattagaactgttcagatcccccgcttaccggcagcctattctgatcgctgtggtcctgcaactgtcccagcagctgagcggaatcaacgccgtgttttattacagcacatccatcttcgagaaagctggtgtgcagcaacccgtgtacgccactattggctcaggaatcgtcaacaccgccttcactgtggtctccctgtttgtagtggaacgagccggtagaagaacactgcacctcatcggtctggcaggaatggcgggatgtgccatccttatgactatcgccctggcgctacttgagcaactgccttggatgtcctacctcagcattgtagccattttcggcttcgtcgctttctttgaggtgggaccgggaccgatcccatggtttattgttgctgagttattttcacagggcccacgccctgcagctatcgccgtcgccggattcagtaattggacttccaacttcatcgtcggcatgtgcttccagtatgttgaacaactttgtggaccctatgtctttatcatcttcaccgtcctgctcgtgctgttcttcatcttcacctacttcaaggtgccagagacaaaaggcaggacctttgatgaaattgcgtccgggttccgacagggcggagcctcacagagtgataaaacccccgaagagctttttcatcccctgggggctgattcccaggtttag

SEQ ID NO: 30940 - DNA, 753 bp, synthetic construct
  misc_feature 1..753: note = Description of Artificial Sequence: Synthetic coding sequence
  source 1..753: mol_type = other DNA
atgctgatgatgaacttactcgcattcgtgtccgccgtgctgatgggattctcaaagctgggtaagtcatttgagatgctcatcctcggcagattcattatcggcgtatactgtggtctcaccactggttttgttccgatgtacgtgggcgaggtgagtccaactgccttacgcggagcactgggcacactgcatcaactggggatagtcgtcgggatacttatagcacaggtattcgggctggacagcattatggggaataaggatttgtggcccctactgctgtcgatcattttcatccctgcactgctgcagtgcatagtgctccctttctgtccagagagccctcgcttcctgctgatcaaccgtaatgaggaaaacagagctaaatcagtgctgaagaagttgcgaggcactgccgacgtaacccacgacctccaggaaatgaaagaagagagtaggcagatgatgcgggagaagaaagtgaccattctcgaactgttcagatccccagcctaccgtcagccaattctgatagccgtggtgctccagctctcacaacagctgtccggtatcaatgctgtattttattattcaacctccatcttcgagaaagccggagttcagcagccggtgtatgctactatcggctcagggattgttaacaccgcctttactgttgtttcggtgtctctctgccttctggcgccacccgcaaaacctcagggaggtgggtcggccatttttccttag

SEQ ID NO: 30941 - DNA, 1671 bp, synthetic construct
  misc_feature 1..1671: note = Description of Artificial Sequence: Synthetic coding sequence
  source 1..1671: mol_type = other DNA
atgcccagttttgacgaggcactgcaacgcgtgggggaattcggacgattccagcgcagagtcttcctcctgctgtgtctgaccggagtgacattcgctttcctgtttgtaggcgttgtgtttctaggaacacaacccgatcactattggtgtcggggtccgagtgccgctgcacttgcagagagatgcggatggtcccccgaggaggaatggaaccgaactgcacccgcatctcggggacccgagcctccggaaaggagaggccgatgccagcggtatttactcgaggcagccaacgatagtgcttcagccacttcggctctgtcttgcgctgatcctcttgccgctttccctaacaggtcagcccctttggtcccgtgcaggggcggatggaggtatgcacaagcccacagtactatcgtgtccgagtttgatctggtttgcgtgaatgcatggatgctagatctcacgcaggctatcctgaacttgggcttcctgacgggcgcattcacattggggtatgccgcagacaggtacggacgaatagttatatacttgttgagttgtctaggtgtgggtgtgaccggtgtggttgttgcatttgccccaaacttccccgtgttcgttatttttcgcttcctgcaaggggtgttcggaaaaggcacctggatgacttgctatgtaatagttacagaaattgtgggaagtaagcagaggcggatagtggggattgtgatccaaatgttttttaccctgggaattatcatcctgcccggaatcgcctacttcatccccaattggcaagggattcaactcgcgattacactgcccagtttcctgttccttctgtattattgggtagtcccggagtcaccacgatggttgattaccagaaagaaaggagacaaagccctgcagatcctccggagaattgctaaatgcaacggtaagtatctgtctagcaactactcagagatcacagtgaccgacgaggaggtgagcaatccctcattcctcgacctggttcgtacgcctcagatgcggaagtgtaccctgatattaatgttcgcctggtttacttcggctgtggtttaccagggtcttgtcatgaggctcggaatcatcggagggaacctgtatatagactttttcatttcgggggtggtagagctgcctggggcactgctcattctgctgaccattgaaagactcggaagacgcctgccgttcgccgcatctaacattgtggccggtgttgcctgtttagtgaccgcattcctgcctgaggggatagcatggcttagaaccacggtcgccaccctggggaggctcggtattactatggctttcgagattgtatacctggtgaacagcgaactctatcccaccacgctacggaactttggagtgtcactctgctctgggttatgtgattttggcggaattatagctccctttctgctcttccgcctggctgccgtgtggctggaactaccccttataatcttcggcatcctggcatccatatgcggcggtttggtcatgttgctgcctgagacaaaaggaattgcgctgcctgagaccgtggatgacgtcgagaaacttggatccccccacagctgcaagtgtggacgcaataagaagaccccagtgagtcgaagccacctctag

SEQ ID NO: 30942 - DNA, 1674 bp, synthetic construct
  misc_feature 1..1674: note = Description of Artificial Sequence: Synthetic coding sequence
  source 1..1674: mol_type = other DNA
atgccttccttcgatgaggcactccaacgggtgggtgagttcggacggtttcagagacgcgtgttcctattgctttgtctgactggagtaacgttcgcgttcctcttcgtgggggtcgtttttctcggaactcagcccgatcattactggtgtaggggaccttcagcggcagcactcgcggaacgttgtggatggtcacctgaggaggaatggaatcgcaccgcccctgccagccgaggcccagagcctccagaaagacgaggacgctgtcagcggtacctcttagaagcagcaaacgactctgcaagtgccacttccgccctgtcctgtgcagaccccctggccgctttccccaaccggtcagccccactcgttccttgtaggggtggatggcgctatgcccaggcacattccacaattgtatccgagttcgatctagtttgtgtgaatgcctggatgctggacttgacccaagccatcttaaacctgggtttcctcacaggcgcttttacattggggtacgccgcagacaggtatggcaggattgtgatatacttgctatcatgtttgggggtcggggtcactggggtggtggtcgccttcgccccaaatttcccggtcttcgttatttttcgcttcctgcagggggtgttcgggaagggaacttggatgacatgttatgtgatagtaaccgagatcgttggatctaagcagagaagaatagtgggaatcgtgatccaaatgttttttaccctcggaattatcatcttacctggcattgcctatttcattcctaattggcagggcattcagctggctattacactcccctcgttcctgtttttgctgtattactgggttgtgccggaatcacctagatggcttattacccgcaagaaaggggacaaagcactgcagatcctgcgaaggattgctaaatgcaacggcaagtacctgtctagcaactactccgaaattacagttacagatgaggaagtcagcaacccatccttcctggatctcgttcgaacacctcagatgaggaagtgtaccctcatcctgatgttcgcctggttcaccagcgccgtggtttatcagggcctcgtgatgaggctgggcataatcgggggtaatctctatatcgatttctttatctcaggggtggtggagttgcctggcgctctgctaatattgctgaccatagagcggcttggacgaagactgccgtttgcagcctccaacatcgtggctggagtcgcttgtttggtgaccgcttttttaccagaggcaggcatcgcctggctccggacaactgtggccaccctgggcagactcggcatcaccatggcgttcgaaatcgtttacttggtgaactcggagttgtatccaaccactctgaggaactttggcgtatccttatgttcgggactatgtgatttcggcggaattatcgctccgttcctgctgtttagactggccgcagtgtggctggagctccccttgattatcttcggcattcttgcctccatttgtggaggactggttatgctgttgccagaaacgaagggaattgctttaccggaaactgtggatgatgtcgagaagctggggagtcctcatagttgtaaatgcggaaggaacaagaaaacaccagtgagcaggtctcacctgtag

SEQ ID NO: 30943 - DNA, 1017 bp, synthetic construct
  misc_feature 1..1017: note = Description of Artificial Sequence: Synthetic coding sequence
  source 1..1017: mol_type = other DNA
atggaactccgatccggctctgtgggcagtcaggccgtggccagaagaatggacggtgacagtagggatggtggaggaggtaaagacgcaacgggttcagaggattacgagaacttgcccacctccgccagcgtgtcgacccacatgaccgctggagccatggccggaatactcgaacacagcgttatgtaccccgtggatagcgtgaagacacgcatgcagtctctgtcccctgacccaaaagcccagtatacctccatttacggcgcactcaagaaaattatgcgcacggagggcttctggcgcccactgaggggcgtcaatgtcatgataatgggagccggtcccgcacatgctatgtacttcgcttgttatgaaaatatgaaacgcacgctaaatgacgtctttcatcatcagggaaattcccacctggccaacgggatcgccggaagcatggccacgttactgcacgacgccgtcatgaatccagctgaggttgtgaagcagaggcttcagatgtacaatagccagcatcggagcgcaatttcttgtattagaaccgtctggcggactgagggcctgggggctttctaccgtagctacaccacgcaattaacaatgaacattccatttcagtccatccatttcataacgtacgaatttctgcaggagcaggtgaatccccacaggacctacaacccacagtcgcatataatctccggaggcctagctggcgctctggctgcagccgcaaccacacccctggatgtgtgcaagactttattaaacacacaagagaatgtggctctgagccttgcgaatatttctggacgcctatcaggtatggccaatgctttcaggactgtttatcagctaaacgggttagcaggctatttcaagggtattcaggccagagtgatttatcaaatgccgtccacagccatttcctggtctgtctacgagtttttcaaatacttcctcacgaaacgccagcttgagaaccgggctccgtactag

SEQ ID NO: 30944 - DNA, 2268 bp, synthetic construct
  misc_feature 1..2268: note = Description of Artificial Sequence: Synthetic coding sequence
  source 1..2268: mol_type = other DNA
atggcgcgaaaactatccgtgatcctaatcttaacttttgccctatcggtcaccaatccattacatgagctcaaggccgctgcttttccccaaaccactgagaagatatctcctaactgggagtctggcattaatgtagacttggccatctccacccggcagtatcatctgcagcagctgttctatcgctatggggagaacaacagtttatccgttgaaggatttagaaagctcctgcagaacattggcattgataaaatcaagagaattcatattcatcatgatcacgatcatcattccgaccatgaacaccactccgatcacgaaaggcacagtgaccatgagcaccatagcgaacatgaacaccatagcgaccatgaccaccactcacaccacaaccatgctgcctccggtaaaaacaagcgaaaggcactgtgccccgaccacgactctgactctagtggaaaggaccccagaaacagtcaaggaaagggcgcacatcgccctgagcacgcatctggaagaagaaacgtaaaggattctgtgtccgcctctgaagtgacttccactgtgtataacaccgtttccgaaggtacccacttcttggagaccatcgaaactcctaggcccggaaagctgtttcccaaggacgtgagcagctccaccccaccgagcgtcacgtctaaaagtagagtaagcaggctcgcaggccgtaagacaaacgaatctgtttctgagcctcgtaaaggattcatgtatagtcggaacaccaatgagaaccctcaggagtgttttaacgccagcaaactattgacttcgcacgggatgggcattcaggtacccctgaatgccacagaatttaactatctctgcccagctatcataaatcagatcgatgcccgaagctgcctaattcacacctcagagaaaaaagccgagatcccccctaaaacctactccttgcaaatcgcttgggttggaggctttatcgctatcagcatcataagctttctgtccctgctgggggttattcttgtcccactgatgaatcgagtgttcttcaagttcctcctgtcattcctggtagcactagccgtggggaccctgtccggtgatgcctttctccacctgttaccacattcacacgcctctcaccaccactcccactcccacgaggaaccggctatggaaatgaagcggggacccctcttttctcacttatctagccagaatattgaggagagcgcttacttcgacagtacctggaagggcctcacagctctgggtggtctgtatttcatgtttctggtcgagcacgtgctgaccctcattaagcaattcaaagacaagaagaagaagaaccagaagaaaccagagaatgatgatgacgtggagataaagaaacagctgtcaaagtacgagtctcagctttccacaaacgaagaaaaagtcgatactgatgaccgcaccgagggatacttaagggctgactctcaggagccgagccatttcgattctcaacagccagccgtgctagaggaggaagaggtgatgatcgctcacgctcatccccaagaagtctacaacgaatacgtgccgaggggctgtaagaacaaatgccattcgcattttcacgatactcttggacagtctgacgacctgattcaccaccaccacgattatcatcacatcctgcaccaccaccaccaccagaatcaccacccgcacagccattctcagcgctacagcagggaggaactgaaggatgcgggagttgccacactggcatggatggtcatcatgggagatgggctacacaacttcagtgacggcctcgccataggtgcagcattcactgaagggttgtctagcggcctatcaacgtcggtcgccgtgttctgccacgagctgccgcatgagttgggggattttgccgtactcctcaaagctggcatgacagtcaagcaggcggtgctctacaatgctttgagcgcaatgttggcctacttgggtatggcgactgggatcttcatcgggcactacgccgaaaacgtctccatgtggatcttcgctttgaccgccggactcttcatgtacgtggccctcgtcgacatggttccagagatgttgcacaatgacgcctccgatcatggctgctcacggtggggctacttctttcttcagaatgccggaatgctgctcgggttcggcatcatgctgctgatctccattttcgaacataagatcgttttcaggatcaacttttag

SEQ ID NO: 30945 - DNA, 1302 bp, synthetic construct
  misc_feature 1..1302: note = Description of Artificial Sequence: Synthetic coding sequence
  source 1..1302: mol_type = other DNA
atgggtattcaggtgcctttgaacgccaccgagttcaattacctgtgtcccgcaattatcaatcagatcgatgcccgatcctgcttaattcatacgtccgaaaaaaaggccgagatccccccaaaaacttacagcctacagatcgcatgggttggcggatttatcgctatctctatcatctcttttctgtccctgttaggcgtgattctggtgcctctcatgaaccgggtcttttttaaatttctactctcctttctcgttgcattggccgtcggcacgctgagcggggatgcttttcttcatttgttgcctcactcacatgcaagccaccaccacagccatagccacgaagaaccggctatggaaatgaaacgcggaccgctgttttcgcatctgtcaagccaaaacatcgaggaaagcgcctattttgacagcacatggaaaggcctgactgctctgggaggtctgtactttatgtttctggttgaacacgtgctgaccctgataaaacagttcaaggataaaaaaaagaagaaccagaagaagcccgaaaacgacgacgatgtggaaatcaaaaaacagctctctaaatacgagtcgcagttatctacgaacgaggagaaggtggacacggacgacagaaccgagggttacttgcgcgcagattcacaagagccctctcactttgattctcagcagcctgccgtgcttgaggaggaagaagtcatgatagcccacgcccatcctcaagaagtttataatgaatatgtgccgagaggttgtaagaataagtgtcactctcacttccatgatacactggggcagagcgacgaccttatccatcaccaccacgactatcatcacatattacatcatcaccaccaccagaaccatcaccctcactctcactcccagcgttatagccgagaagagctgaaagacgcgggagtcgccactttggcatggatggttatcatgggcgatggacttcacaatttcagcgacgggctcgcaatcggcgcagcctttacggaggggttgtctagtggcttgagtacttcggttgcagtcttttgccacgaattgcctcatgagctcggagactttgctgttttattaaaagcaggcatgacagtgaagcaggccgtgctgtataatgcccttagtgccatgctggcctatcttggcatggccactggcatttttataggacactacgcagagaacgtgtctatgtggatcttcgcgctaacagctgggttgtttatgtacgtggcgttagtggatatggtctcattctag

SEQ ID NO: 30946 - DNA, 1233 bp, synthetic construct
  misc_feature 1..1233: note = Description of Artificial Sequence: Synthetic coding sequence
  source 1..1233: mol_type = other DNA
atgggtatccaggtgcccctgaacgcaacagaattcaactatttatgtccagccataatcaatcagatcgatgccagaagttgtttgattcacacctccgaaaagaaagcagagatcccgcctaagacctatagccttcagatcgcctgggtgggcggatttattgccattagtatcattagctttctctctttgctcggcgtaattttggtcccactgatgaaccgcgtctttttcaagttcttgctgagctttttggtcgccttggccgtgggcactctgagtggggatgcatttctgcacttgttacctcactctcatgcgtctcatcatcactcccacagtcacgaagaaccagctatggaaatgaaacgtggaccattgttttcccatctctcttcccagaacattgaagaatcagcctattttgattcaacctggaagggactgactgcactgggcggtctgtactttatgttccttgtcgagcacgtgctgacactcatcaaacagttcaaagacaaaaagaagaaaaaccagaaaaaacccgagaacgatgatgatgtcgagataaagaagcagctgtcaaagtatgaatcccagttgtccaccaacgaggaaaaggtggataccgacgatagaaccgaaggatacttgagagccgattctcaggagccaagccacttcgactcacagcagccagccgtcctcgaagaggaagaagtgatgatcgcacatgcgcatccccaggaagtatataacgagtacgtgcctcggggttgtaagaacaaatgtcactcccactttcacgacaccctgggtcaaagcgatgacctgatacaccatcaccacgattatcatcatattctgcatcatcatcatcaccagaaccatcatccgcatagtcattcgcagaggtatagtagagaggagctgaaggacgctggggtcgccacactggcttggatggtgatcatgggcgatggtcttcataactttagcgacgggttagctataggtgccgcatttaccgaaggactcagctcaggactgagcacaagcgtggctctcgttgatatggtgccggaaatgctccataacgacgcaagtgatcatggttgtagtagatggggctactttttcctgcaaaatgctggtatgctgcttggcttcggcatcatgctacttatttcaatcttcgaacataaaatagtgttccgcattaacttctag

SEQ ID NO: 30947 - DNA, 1833 bp, synthetic construct
  misc_feature 1..1833: note = Description of Artificial Sequence: Synthetic coding sequence
  source 1..1833: mol_type = other DNA
atggatacacctcgcggtatcggcacgttcgttgtgtgggactacgtggtcttcgccggtatgctcgtgatctccgccgcaattgggatttactacgcatttgccggtggtggacagcagacttcaaaggatttcctcatggggggaagaagaatgacagccgttcccgttgcgctgagcctcaccgctagcttcatgtcagccgtcacagtgctgggcactccatccgaagtctataggtttggagcgatattcagtatatttgcctttacatacttctttgtggtagttatctctgcagaggtgtttctccctgtgttttataagttgggcattacaagcacctatgagtatctggagctacgctttaataaatgtgtaaggctctgcgggaccgttctcttcatagtacagaccatcctgtacaccggcattgtgatatatgcacccgcactggcattaaaccaagtcactggctttgacctctggggtgccgtggtggcaaccggcgtggtttgtactttctactgcacactgggcggtctcaaggctgtgatctggacagacgtgtttcaagtggggattatggtggccggatttgccagtgttatcatacaggcggtcgtgatgcaaggcggaattagcaccattctgaatgacgcatatgacggcggacggcttaatttttggaattttaaccccaaccctcttcagcgccacacattctggactattattatcggtggcactttcacatggaccagcatttatggggtgaaccagtcccaggtacaaagatatatcagctgcaagtcccgatttcaggccaaactatcgctgtacattaacttagttggcctctgggccatcctcacctgcagcgtcttctgcggccttgcactgtatagtcggtatcacgattgtgacccttggactgccaaaaaagtcagcgcacctgaccaactcatgccttacctagttctagacattttgcaagattatcccggactccctggattgttcgtggcgtgcgcctacagtgggacactaagcaccgttagcagcagcattaatgccttagccgcagtgacagtcgaagatctgatcaaaccatacttccggagcctgagcgaacggagccttagttggatcagccaaggcatgtcagtggtgtacggagccctatgcataggcatggcagctctcgcgtccctgatgggggctctgctgcaggccgctctatctgtttttgggatggtaggagggcctttgatgggtctgttcgcactggggatcctggttccttttgcgaattctatcggcgctctggtcgggctgatggccggatttgcaatctccttatgggttggaatcggagctcagatctatccccctctgcccgaacgtaccttgccccttcatctggatatacaaggctgtaattcaacctacaacgaaaccaatctgatgacaacgaccgaaatgccctttactacttccgtcttccaaatttacaatgtgcagcgaactcctcttatggacaattggtattccttaagctacctgtactttagcaccgtgggaaccctggtgaccttgctagtggggattctcgttagcctaagcactgggggaagaaagcagaacctggacccaagatacatccttactaaggaagattttttgtcgaacttcgatatttttaagaaaaagaagcatgtgctgtcttataaaagccatcctgtggaagatggcggtactgacaaccctgctttcaatcacattgaattgaatagcgatcagtccgggaaatcaaacgggacccgactctag

SEQ ID NO: 30948 - DNA, 1071 bp, synthetic construct
  misc_feature 1..1071: note = Description of Artificial Sequence: Synthetic coding sequence
  source 1..1071: mol_type = other DNA
atggatatggccgatgagcccttgaatggctcacacacctggctgtcaatcccgtttgacctcaacggctcagtcgtcagcactaacacatcaaatcaaaccgaaccatactacgacttaacctcaaacgctgtgttgacatttatttatttcgtggtgtgtatcataggtctgtgcggaaataccttagtcatctatgtcatcctccggtacgccaagatgaagactatcactaatatatacattttgaacctagccattgctgatgagctattcatgcttgggctccctttcctagccatgcaggtcgcactcgtccattggccttttgggaaggcaatctgccgtgtcgtgatgaccgtggatggcattaaccaatttacctccattttttgcttgactgtcatgtccattgatagataccttgccgtggtacacccaattaagtctgctaagtggaggagaccccgaacagcgaagatgatcactatggctgtgtggggcgtctcactgttggtcattcttcccataatgatttacgccggactgagatccaaccaatggggtcgcagttcatgtacaatcaactggcctggtgagagcggcgcttggtatacgggcttcattatctatacatttattttgggtttccttgtccctctgaccattatttgtctctgttatctcttcattatcattaaagtaaaatccagcggaattcgggtggggagctccaaacggaagaagtcagagaagaaagttactcgcatggtgtccatcgtcgttgcagtgtttatcttctgctggctccccttctatatcttcaacgtcagcagtgtctctatggccatcagtcccactccagccctgaaggggatgttcgacttcgtggtcgtattgacctacgccaacagttgcgccaacccaatactttacgctttcctttcagataactttaagaaatcttttcaaaacgtgctgtgtctggtgaaagtggataatagtaaaagcggtgaggagggtagttgtctggatatgatcttccgaaataataaaaacaggaagaaatag

SEQ ID NO: 30949 - DNA, 1110 bp, synthetic construct
  misc_feature 1..1110: note = Description of Artificial Sequence: Synthetic coding sequence
  source 1..1110: mol_type = other DNA
atggatatggcggacgagccactgaacgggagccacacctggctgtctatcccgttcgatttaaacggcagcgtggtatctactaatacgtccaatcagaccgagccttattacgatctgacgtccaatgcggtgctcacttttatttatttcgttgtctgtatcatcggtctctgtggcaatactctggtgatttacgtgatcctcaggtacgcaaagatgaagacaattaccaatatttacatcttgaatctagccatcgctgatgagcttttcatgttaggcttaccttttctggccatgcaggttgcactagtgcattggcccttcgggaaggccatctgtcgggtcgtcatgaccgtcgatggcatcaaccagttcacaagcattttctgtcttaccgtgatgagtattgaccgttatctggctgtggtgcacccaatcaagagtgcaaagtggcgcaggcccagaacggcaaagatgattaccatggccgtctggggcgtctctctgctagtcatcctgccaataatgatctacgccggactgcggagcaaccaatggggcaggtcgtcctgtacaattaactggcccggagagtcaggggcatggtatactggattcatcatctacacgtttatccttggattcctggtccccctgactatcatctgtctgtgctacctgtttattatcatcaaggtcaaaagcagtggcatcagagtgggcagttcgaagcggaagaagtccgaaaaaaaagtgaccaggatggtcagtattgtggtggccgtgttcatcttctgctggcttccattttacatatttaatgtgagcagtgtttcaatggcaatcagccctacacctgccctgaagggaatgttcgattttgtggtggtactgacatacgccaactcttgcgctaatcctattctgtatgcctttttgagcgacaatttcaagaagtcgtttcagaatgttctatgtctggtgaaggtgtcaggcaccgacgacggcgaacggtcggattcaaaacaggacaaatcccgcttgaacgagacaactgaaacgcaacgcaccttacttaacggcgacttgcagaccagtatttag

SEQ ID NO: 30950 - DNA, 3315 bp, synthetic construct
  misc_feature 1..3315: note = Description of Artificial Sequence: Synthetic coding sequence
  source 1..3315: mol_type = other DNA
atgcaggcccagcagcttccctatgagttcttttctgaggagaacgctccaaagtggcgcggactgctcgtgcctgcgctgaagaaggtgcagggacaggtgcaccccacgctggaatcaaacgacgatgccctccagtacgtggaagaactgatcctgcagctgcttaatatgttgtgccaggcgcagccacggtccgcctctgacgtggaagagcgcgtgcagaaatcctttccgcatcccatcgataaatgggctatcgctgacgcccagagcgctattgagaaacgcaaaagaaggaaccctctgagcctccccgtcgagaaaattcatcctctgttaaaagaagttctaggatataagatcgaccaccaggtctctgtgtacatcgtcgccgtgttagaatatatctcagcagatatactgaagttggttggcaactatgtgagaaacatcaggcactacgaaattaccaagcaggacataaaagttgccatgtgtgcggacaaggtgctgatggatatgtttcatcaggatgtggaggacattaacatccttagcttaaccgacgaggagcccagcacgtccggcgaacagacttattatgacttggttaaggcctttatggcagaaataagacagtatattcgcgagctgaaccttatcataaaggtgttccgggaaccattcgtttcaaacagcaaattattctctgccaatgatgttgagaacatcttcagtagaatcgtcgatattcacgagctctccgtaaaactgcttggccatattgaggacactgtggaaatgaccgatgagggctcccctcacccactcgttggatcttgctttgaggatctggctgaggagttggctttcgacccttacgagagttatgcgcgagacatcctcaggcctgggtttcacgaccgattcctcagccagttgtccaaaccaggggctgctctgtacctccaatcgattggcgagggtttcaaagaggcagtgcagtatgtactccctcggcttctcttagcgccagtgtatcattgtctccactactttgaactcctgaagcagctcgaagaaaagtccgaagaccaggaagacaaggaatgcttgaaacaggctatcacggcgctcctgaacgtgcagtctgggatggaaaagatatgctcaaagagtctggctaaaaggaggcttagtgaaagcgcgtgtcgcttttattctcagcagatgaagggcaaacagcttgccatcaagaagatgaacgagatccagaaaaatatcgatggttgggagggcaaagatatcgggcagtgttgcaatgagtttatcatggagggcaccctcacccgcgtcggcgcaaaacacgagcgtcacatctttctcttcgatgggctgatgatttgctgcaaatccaatcatggccagcctagactgcctggagcttccaatgcggagtaccgcttaaaagaaaagttttttatgcgaaaagttcagattaacgataaggatgatacgaatgaatataagcatgctttcgagatcatactcaaagacgagaattcagtcattttctccgcgaaatctgcagaggagaagaataactggatggccgctctgatcagcctccagtacagatccaccttggagagaatgctggatgtgacaatgctgcaggaagagaaggaggagcaaatgagactccccagtgccgacgtgtaccggtttgcagagcctgactctgaggaaaatatcatcttcgaggaaaatatgcagcctaaggccggaattcctatcattaaggccggaaccgtcattaagctgattgagaggttaacataccacatgtatgccgacccaaatttcgtccgcacctttctcactacatacagatctttctgtaagccgcaagaacttctgagcctgattatagaacgcttcgaaatccccgagcctgaaccaaccgaggccgaccggatcgctatcgagaacggggatcagccactgtccgcagagttaaagaggttccggaaggagtatatccagccagtgcagctacgggtgcttaacgtgtgcaggcattgggtagagcatcacttctatgattttgagcgcgacgcttacctgctgcaacggatggaagagttcattggcacagtcagaggtaaggccatgaaaaagtgggtggagtctattaccaaaatcattcaaaggaaaaagattgcacgggacaacggccctggacataacataacattccagagttcccccccaaccgtagaatggcatatcagccggcctggccatattgaaacctttgacctgttaacactccaccccatcgagattgcgcgtcagctgacccttctagaatctgacctttatcgtgccgtgcaacccagtgagctggttggcagcgtctggacgaaggaggataaagaaataaactcaccaaatttgcttaaaatgatccgacacactacaaaccttactctgtggtttgaaaagtgtatagtcgaaacagagaatcttgaagagagggtagctgtagtttctagaattattgagatcctacaagtcttccaggagctcaacaatttcaatggcgtcctggaggttgtcagcgcaatgaattcatcccctgtatacagactggaccacaccttcgaacagatccctagtaggcagaagaagatcctggaagaagcccacgagctatccgaagatcattacaagaaataccttgcaaagctccgcagcattaatcccccatgcgtccccttttttggtatatacttgacaaatattttgaaaactgaggaggggaatccggaggtgttgaaacggcacggaaaagagctgataaacttcagcaaacggcgtaaagtggcagaaattaccggagaaattcaacaataccagaaccagccatattgtctgagagtggaatccgacatcaaacgcttttttgaaaacctgaatcctatgggcaactctatggagaaggagttcacagactacttgtttaacaaatctcttgagattgagccccgtaatcctaagccactgccacggtttcccaagaagtactcttatcccttgaagtccccgggtgtacgaccaagtaacccacgtcctgggaccatgaggcaccccacacctttacagcaggagcctagaaagattagctactcacggatcccagaaagtgagacagagagcactgctagcgccccaaactccccaaacactgtcaacacctccgcctgtttctggtgttttcagtaccatcggtgtttgcagtgcatttag

SEQ ID NO: 30951 - DNA, 3957 bp, synthetic construct
  misc_feature 1..3957: note = Description of Artificial Sequence: Synthetic coding sequence
  source 1..3957: mol_type = other DNA
atgcaggcccagcagcttccctatgaattcttttcagaagagaatgcgcctaagtggcggggactgcttgtgcccgctctgaaaaaagttcaggggcaggttcatcccacgctggaatctaacgacgacgccctgcaatacgtggaagaactcatccttcaactactgaatatgctctgccaagctcagccaagatctgcgagcgacgtcgaggaaagagtccaaaagagctttccccatcccatagataagtgggcaatagctgacgctcagtctgccatagaaaaaagaaaacggagaaacccactatccctccctgtggagaaaatacaccctttgctgaaggaggtccttggttataagatcgaccatcaggtgtccgtgtacattgtagcggttttggagtacataagtgccgatatcctcaagctggtaggaaactacgtacgcaacattagacactacgagatcaccaagcaggatataaaggtcgctatgtgcgccgacaaggtgctgatggacatgttccaccaagatgttgaggatataaatattctaagcctgacggacgaagagccctctacgtctggcgagcaaacgtattatgatttagtgaaggcgttcatggccgagattaggcaatatatccgggaactgaacctgatcatcaaggtcttccgggagccttttgtgtctaattctaagctatttagtgccaacgatgttgagaacatattctcccgaatagtggatatacatgaactttcagtgaaactgctggggcacattgaggatacagtcgaaatgaccgacgagggcagcccccacccactggttggaagctgttttgaagatctcgccgaggagctcgctttcgatccctacgagtcatacgccagggatatcctgagaccagggtttcacgaccggtttctgagccaacttagtaaaccgggtgctgccctgtatctccagtctatcggcgaggggttcaaggaggccgtgcagtacgtgctgccgagactgctgctggcccctgtgtaccactgtctccactactttgaactgctgaagcaacttgaggaaaaatccgaagaccaggaggacaaggagtgcctaaagcaagcaatcacagccctcctcaacgtgcaatctggaatggagaaaatctgctccaaaagcctggccaagcgcagattgtctgaatcggcctgtaggttctattctcagcagatgaaaggtaagcagctggccatcaagaagatgaacgagatccagaaaaacattgacgggtgggagggcaaagacatcggacagtgctgcaacgaattcatcatggagggtacactgacgcgcgtgggcgcaaagcacgaacgccacatctttctgtttgacggactgatgatctgttgcaaatcgaaccatggacagccaaggcttcctggagcatcaaatgcagagtatcggctaaaggagaagttctttatgagaaaggtacagataaacgacaaagatgatacaaacgagtataagcatgccttcgagataatcctgaaggacgagaactctgtgatcttctcagctaaaagcgccgaggagaaaaacaactggatggcagcgctgatctcactgcagtaccgttctaccctcgagcggatgctggacgtgactatgctgcaggaagagaaggaagagcaaatgaggctaccctccgccgatgtgtaccgctttgcagaacccgacagcgaggaaaatatcatttttgaagagaacatgcagcctaaggccggtattcccatcattaaagccggaaccgtcattaagctgatcgaacgcttaacatatcacatgtatgcagaccctaattttgttcgaacgttccttacgacctatcgcagcttctgtaaaccccaagagctgctaagtcttattatcgagagatttgaaattccagagccggaaccaaccgaggcggaccgtattgccattgaaaacggagaccagccactctccgcggaactgaagaggtttcggaaagagtatatccagcctgtgcagcttcgggtgctgaatgtgtgtaggcattgggtggaacaccacttctacgatttcgaaagagatgcttatctgctgcagcgcatggaagaatttatcggaacagtccgagggaaggctatgaaaaaatgggtcgagtctataaccaaaattattcaaaggaaaaagatcgccagagacaacggcccaggccacaacattacatttcaatccagtccgccaacagttgagtggcacatatcccgtcccggacatatcgaaacctttgatcttctgactctccatccaattgagattgctcgccagctcacactgctcgagagcgatctatatagagctgtgcaaccatcggaactcgtgggctcagtgtggacaaaagaggataaggaaattaactcacccaacctactgaagatgattaggcacaccactaatctgacgctctggtttgaaaagtgcatcgtcgagactgagaacctggaggagcgggtggcagtggtgagccgcatcatcgaaattctccaggtcttccaggaactcaataacttcaacggcgtcctggaagtcgtctctgctatgaatagttcccccgtgtaccggctggatcatactttcgaacaaatccccagtcgccagaaaaagatcctggaggaggctcatgaactgtccgaggatcactataaaaaatacctggccaaactcagatctatcaatcccccttgcgttccattcttcggaatttacctgaccaatattttaaagactgaagagggtaatcccgaggtgctcaaaaggcacgggaaggagctgattaatttttctaaacgcaggaaggtggctgagattaccggcgagattcagcagtaccagaatcaaccatactgccttagagtggagtcagacataaaacgctttttcgaaaacctcaaccccatggggaactctatggaaaaggagtttaccgattacctgtttaacaaaagcctcgagatcgagccccgaaacccaaaacctctacctcgcttccctaagaagtactcatatccattaaagagtcccggagtgaggccctcaaacccaagacccggtacgatgcgtcaccccacccccctgcagcaagagcctcgcaagatatcatatagtagaatccccgagagcgaaaccgaaagcactgcatccgcacccaatagcccccgaacccctttaacgccgccacctgcctcaggtgcaagttccacaacagacgtgtgtagcgtgttcgattctgaccactctagccccttccactccagaagcgcaagtgtttctagcatctctctcacaaaggggactgacgaagtcccagtgccgcctcctgttccacctaggcggcgtcccgaaagtgctcccgctgagagttctcccagtaagatcatgagcaagcacttggacagcccgccagctataccacctagacaaccaacttccaaggcatatagtcctaggtattccatatctgatcgcacctcaattagtgacccccctgaaagtccacctctactccctccccgtgaacccgtgaggaccccagacgtgttttcctctagtccgttgcatctgcagcccccacctctgggaaaaaaatctgatcacggcaatgcattcttcccaaactccccatccccattcaccccccctcctccacagaccccctcacctcacggaaccaggcgccatcttcctagccctccactaacccaggaggtggatttacactcaatagctgggccaccagtccctcctagacaaagcacgtctcagcacatccctaagctgccccctaagacgtacaagcgtgagcacactcacccctccatgcatcgggatggtcctcccttactcgagaatgctcattctagctag

SEQ ID NO: 30952 - DNA, 4002 bp, synthetic construct
  misc_feature 1..4002: note = Description of Artificial Sequence: Synthetic coding sequence
  source 1..4002: mol_type = other DNA
atgcaggcgcagcaactgccctatgagttcttctctgaagaaaacgctcccaaatggcgtgggctcctggttcctgctctaaagaaggtacaggggcaggtccacccaaccctcgagagcaatgatgatgcactgcaatatgtcgaggagctgatcctgcagcttctcaacatgttatgtcaagcacagcccagatcagctagcgatgtggaggaaagggtgcagaagagcttcccgcatccaatcgacaaatgggcgatagccgacgcacaatctgctattgagaaacggaagcgcagaaatcccctgtccctgcctgtggagaaaatccacccgttattgaaggaggtccttggttacaaaatcgaccaccaggtgagcgtctacattgtcgccgtgttggagtatattagcgctgacattcttaagctggtgggcaattatgtgcgcaacattcgccactatgaaatcactaaacaagatataaaagtggcgatgtgcgctgataaggtgttgatggacatgttccatcaggatgtggaggacatcaacattctttccctgactgatgaagagccaagcacttcaggtgagcaaacgtactatgacctggtgaaagccttcatggctgagattcggcagtatatcagagaattaaacctgataatcaaggttttccgagagccatttgtatcaaactctaaattattcagtgcaaatgatgtcgagaatatcttttcccggatcgtagatatccacgagctgtccgtaaagctcctaggtcatatcgaagacactgtcgagatgacagacgagggctcacctcaccccttagtaggtagttgcttcgaagacttggccgaagaattagcctttgacccctatgaaagctatgcaagagatatactgcgcccaggatttcacgacagatttctgagccaactgagcaaaccaggcgcagccctgtatctgcaatccatcggcgaaggcttcaaagaagcggttcagtatgtcctgccgaggttgttgttagcgccagtctaccactgcctgcactacttcgaacttctgaagcaactcgaagagaagtccgaggatcaggaagacaaggaatgtttgaaacaggcgattaccgctctcctgaatgttcaatcgggcatggagaagatctgcagcaagagtctggcgaagagaagactgagtgaatctgcctgcagattctattcccagcagatgaaagggaaacagttggctatcaaaaagatgaacgaaattcaaaagaatatcgacggatgggagggtaaggacatcggtcagtgctgtaatgagtttattatggaaggtactctcacacgggtgggcgcaaagcacgagcgccatattttcctgtttgatggcctaatgatctgttgtaagtcaaatcatggacagccacgtctgccaggcgctagcaatgccgagtacagactcaaggagaaattttttatgcggaaggtacagatcaatgacaaagacgataccaatgagtacaaacacgctttcgaaatcatactcaaagacgaaaatagcgtcatattttctgcaaaaagtgctgaagagaaaaataactggatggccgcactcatctctctgcaatataggtcaaccctggagcgcatgctggatgttaccatgctgcaggaagaaaaagaagaacagatgaggctgccttctgccgatgtctatcgcttcgccgaacccgacagtgaggagaacatcatttttgaagaaaacatgcagcccaaagcaggcatccctatcattaaggccggaaccgttataaagctgattgaacgcctgacataccacatgtatgcagaccctaatttcgtgcgtacctttctcactacataccgcagtttttgcaaaccacaggaacttttgtctctaatcatagagagattcgaaatccctgagccagaacctacagaggctgaccgcatcgccatcgagaacggagatcagccgctgtcagccgagctgaagcgcttccgaaaagagtatatccagccagttcaattgcgggtgctgaatgtgtgccggcattgggtcgagcaccacttttacgattttgaacgtgacgcctatctgcttcagcgtatggaagagtttatcggcactgtgaggggaaaggctatgaagaaatgggtagagtcaatcacaaagataattcagaggaagaagattgctagagacaacgggccaggccataatatcacattccagtcttctccgcctactgtggagtggcacatcagtaggcctgggcacattgaaacatttgatctgctgacccttcaccctatcgaaatcgcccgacagctgactcttctggaatccgacttgtatcgagcagtgcagccgtcagaactggttggctccgtttggacaaaggaggacaaggagatcaatagcccgaacctccttaagatgatcaggcacactaccaacctgaccctgtggtttgaaaaatgtatcgtagagactgagaacctagaggagcgcgttgccgtggtttcgcggatcatagagatattacaagtcttccaggagttgaacaactttaacggcgttctcgaggttgtgtccgccatgaattcttccccggtgtatcggctagaccacacctttgagcagataccgtctcgccagaaaaagatcttagaggaggcccacgagctttcggaagatcactacaaaaagtatttggccaagctgcgctccatcaaccctccctgtgtccctttcttcgggatttacctgacaaatattctgaaaacagaagaagggaacccagaggtgctcaaacggcatgggaaagagctgataaactttagcaagcggcgaaaggtggctgaaatcacaggtgagatccagcagtatcagaaccagccctattgcctccgggtggaaagtgacatcaagcgattctttgaaaatttaaacccaatgggtaactcaatggagaaagaattcacagattatttgttcaacaagtccctcgagatcgaaccacgaaatcctaaaccattgccccgattccccaaaaagtacagctatcccctcaaatcgccaggtgttcgacctagcaacccacgacctgggactatgaggcacccaacccccctccagcaagagcctcgaaagatctcctactcccgaatcccagaatcggaaacagagagcacagcgagcgcaccaaacagtccaagaacacctctaactccacctcctgccagcggggcatcatctacaaccgatgtctgctcagtgtttgattccgaccactccagcccatttcatagttcaaatgatactgtgtttattcaagtaactctgccccacggcccaagatcagcgtccgtgagttccataagcctgaccaagggcactgacgaagtcccagtgccacccccagttccccctcgtcggaggccggaaagcgcacctgctgaatcgtccccctctaaaatcatgtccaaacaccttgattcaccacctgccatccctccccgtcagcctacaagcaaagcgtatagtccaagatattccatctcagaccgaacttccatctctgaccctcccgagtcacctcccctgttgcctccacgggaacccgtgaggactccggatgttttctctagctccccactccacctgcagcctcccccactgggcaagaagtcagatcacggaaacgcctttttccctaacagcccaagcccctttactcctccgcctccacaaaccccaagtcctcatgggacaaggagacacctgccatccccacccctcactcaggaggtagacttacactctatagccggaccccctgttccaccacgccagtccacttcccaacacattcccaagctcccgcctaagacgtataaacgcgaacacactcaccccagcatgcacagagacgggcctcctttgctcgaaaacgctcactccagttag

SEQ ID NO: 30953 - DNA, 4002 bp, synthetic construct
  misc_feature 1..4002: note = Description of Artificial Sequence: Synthetic coding sequence
  source 1..4002: mol_type = other DNA
atgcaggctcagcaacttccttatgagttcttcagtgaggagaatgcccctaaatggcggggtctgctggtgcctgctctgaaaaaagtgcaaggacaggttcacccaacactcgagagtaacgacgatgctctccagtatgtcgaagagctcattctccagctgctcaacatgctgtgccaggcccaacccagatccgcgagcgatgtcgaggaacgggtgcagaagtcatttccacatcctattgacaaatgggcaattgccgacgctcagtccgccattgagaagcggaagaggcgaaacccgttgtcactccccgtggaaaaaattcacccccttttgaaggaggtcctggggtataaaatcgatcaccaggtttctgtgtacatcgttgccgtgttggagtatatcagcgcagacatccttaagcttgtggggaattatgtcagaaatatccgccattatgagattaccaaacaagacatcaaagtagctatgtgtgcggacaaggtgctgatggacatgttccatcaggacgttgaggacattaatatcctgagcctaacagatgaggagccaagcacaagcggagagcagacatattatgacctcgtgaaggcttttatggcagagatcagacaatatatccgtgagcttaatcttattattaaggtcttccgggaaccgttcgtatcaaatagcaagctgttttcggcaaacgacgttgaaaatatcttctctcgcatcgtggacatccacgagcttagcgtaaagcttctgggacacatcgaagataccgtcgagatgacagacgagggctctccccatcccttggttggcagttgtttcgaggacttggccgaagaattagcctttgacccttacgagtcttacgctcgggacatactgaggccagggttccatgacagatttttaagccagctgagcaaacccggagccgcactctatttacaatctattggtgaaggtttcaaggaggccgtgcagtacgttctcccacgtctgctgctggcacccgtgtatcattgtctgcactactttgagttgcttaaacagctcgaggagaagtccgaggaccaggaggacaaagaatgcttgaaacaagctatcacagctctactgaacgtgcagagcggcatggaaaagatttgttctaaaagcctggcaaagcgacgcctgtctgaaagtgcatgtcgtttctactcacagcagatgaagggaaagcagctagccattaagaaaatgaatgaaatacagaagaacattgacggttgggaaggtaaagatattgggcagtgttgcaacgagttcataatggagggcactctgacgcgggtgggggcaaagcatgagcgccacatcttcctcttcgacggattgatgatctgctgtaagtctaaccatgggcagccaagactgcccggtgcaagtaatgcggaatatcgactcaaagagaaattcttcatgcgtaaggttcaaataaacgacaaggacgatacaaatgaatataaacacgcttttgaaattattctgaaggatgagaacagcgtcatcttctctgctaagtccgccgaagagaaaaacaattggatggctgcattgatctccctgcaatacaggtccactctcgaaagaatgttggacgtgactatgctccaggaggagaaggaggagcagatgagactgccatcagctgacgtgtacagatttgccgaacccgattccgaagaaaacattattttcgaggagaacatgcagccaaaggccggaatcccaattattaaagctggcacagtgataaaactcattgagcgactcacatatcacatgtacgcagatcccaattttgtgagaacgtttctaacgacataccgtagcttttgtaaaccccaagaactgctatcccttattatcgagaggttcgaaattccagaaccggagcctactgaagcagaccggatcgcgatagagaacggggaccaacccctctcagcagagctgaagagattcagaaaggagtacattcagcccgttcagctgcgagtactcaacgtttgccgtcattgggtggaacatcatttctatgattttgaacgcgatgcgtatctgctgcagagaatggaggaatttattggaaccgtgaggggaaaggccatgaagaaatgggtggaaagcatcaccaagatcatccagcgaaagaaaatcgccagagacaacgggcctggtcacaacattactttccagtcatcaccaccaacagtcgagtggcatatttctaggccaggccacattgaaacatttgacctcctgactctgcatccaatcgaaatagcgaggcagctgaccttgctggagtctgatctgtaccgggctgtacagccttcagaactggtgggcagtgtttggactaaagaggataaggaaattaactctccaaatttgcttaaaatgatcaggcatacaacaaatcttacactgtggtttgaaaaatgtatcgtggagactgaaaatctggaggagagggttgcagttgtttctcgcatcattgaaatcctgcaggttttccaggagttgaacaattttaatggagtgcttgaggtggtcagcgcaatgaacagtagccctgtatacagactggaccacactttcgagcagatcccttcacggcaaaagaagattttggaagaggcgcacgaactgagcgaagatcactacaagaaatacttggctaagcttcgcagtataaatcccccatgcgtgccgttctttggtatttacttaaccaacattctcaaaacagaagagggcaaccccgaagtgctgaagcggcatgggaaagagcttatcaactttagtaaacgacgaaaagtggcagagataacaggggaaatccagcagtatcagaatcagccttattgtctgagagtcgaaagtgatatcaagaggttcttcgaaaacctcaatccaatggggaattctatggaaaaggagttcaccgactatttgtttaataagtccctggagattgagcccaggaatcccaagcctctaccccgtttcccaaaaaaatattcttaccctctgaagagtcccggagtacgaccttccaaccctcggcctggtactatgagacacccaactcccctgcagcaggaaccgaggaaaatctcctattcaaggatccctgaatccgagacggagtctacagcctccgcgccaaacagtccacgcacccccctgaccccacctcccgcaagcggcgcaagctcgaccacggatgtttgcagcgtgttcgactcagatcattctagcccctttcactctagtaatgacacagtattcatccaggttacattgccccacggccctcgttcagcttccgtgtcttccatttcgttaaccaagggaactgacgaggtgcctgtgccgcctccagttccccctcgtaggcgcccagagtcagcccctgccgagtcgtctccttccaaaatcatgagtaagcacctggactctcctccagccatccctcctagacaacccaccagcaaagcatattcccccagatactccattagtgataggacgtccattagcgaccctcctgaatcaccccctcttcttccccctcgagaacccgtgagaacccctgatgtgtttagctcttcgccactccacctgcagccaccacccctcgggaaaaagagcgaccatgggaacgcttttttccctaacagcccatcccctttcacccccccaccaccgcaaacaccctctccacacggcacccggagacatctgccatccccgcctttaactcaggaggtggacttgcacagcattgccggacccccagtcccccctagacagtctacatcccagcatataccaaagttgccccctaagacttacaagcgcgagcatacccacccatctatgcatagggacgggccacctctcttggagaatgcccattctagttag

SEQ ID NO: 30954 - DNA, 945 bp, synthetic construct
  misc_feature 1..945: note = Description of Artificial Sequence: Synthetic coding sequence
  source 1..945: mol_type = other DNA
atgctgtgccaggctcagccccgaagtgcctcagatgtcgaggagcgcgttcagaaaagctttccacacccgattgacaagtgggcaattgccgacgctcaatcagccatcgaaaaacggaaaaggcgaaaccccttgtccctgcctgtggagaagattcacccccttcttaaggaagttctcggatataagatcgaccaccaagtttcagtgtacattgtcgctgtgctggagtacatctcagcggatattctaaaacttgtcgggaattatgtgcgtaacattagacactacgagatcacgaagcaggatatcaaggtagcgatgtgcgcagacaaagtgctaatggatatgtttcaccaggacgtagaagatattaacatcctttcattgaccgacgaagagccatcaacgagtggcgaacagacatactatgatctcgtgaaagcctttatggccgaaatacgtcagtacatcagggagctgaacctgatcattaaggtattcagagagccattcgtgtcaaacagtaaactcttttcggctaatgacgttgagaatatttttagtaggatcgttgacatccatgagctttcggtgaaacttctgggccatattgaggatacagtggagatgacggatgaagggagcccccaccccctggtggggtcctgtttcgaagacctcgccgaagaactcgcattcgacccttatgaatcatatgccagagatattctccggccaggctttcacgaccggttcttgtcacagttatccaagcccggagcagccctctacctgcagtcaattggagaggggttcaaggaagccgtccagtacgtgctgccacgcctgctgctggccccagtttaccattgtttacattatttcgagctgctgaagttccccttcggagatctgtccagactccgagatagtgtgtag

SEQ ID NO: 30955 - DNA, 3153 bp, synthetic construct
  misc_feature 1..3153: note = Description of Artificial Sequence: Synthetic coding sequence
  source 1..3153: mol_type = other DNA
atgaccgatgagggttcccctcatcctttggtgggaagctgctttgaagacctcgctgaagaactcgcttttgacccttacgagtcgtacgctcgagacattctcagaccaggctttcatgatcgatttctgagccaactgtccaaacctggagccgcactctacttgcagtccatcggagaggggttcaaggaggccgtacagtacgtcctcccacggctgcttcttgctccagtctaccactgcctgcattactttgagctcctcaagcagttggaggagaagtccgaggaccaagaggataaggagtgcctgaagcaggccattaccgccttgctgaacgtacaatccggaatggagaagatttgcagcaaaagcttagctaagagacgactgagcgagtccgcctgccggttctatagtcagcagatgaaggggaagcagctggctatcaagaaaatgaatgaaatccagaagaatatcgacgggtgggaaggcaaggatatcggtcagtgttgtaacgagtttattatggaaggcaccctcacgcgcgtcggtgcaaaacacgagagacatatcttcctgtttgatggcctcatgatatgttgcaagagcaatcacggacagcctagacttccaggagcctctaacgccgagtacaggctcaaagaaaagttcttcatgcgtaaggtgcagatcaatgacaaagatgacaccaatgagtacaaacacgcatttgagataattttgaaagacgaaaattctgtgatcttctcggctaaatctgctgaggagaagaataactggatggccgctctcatatcactgcaataccgcagcacattggagcggatgttggatgtgacaatgttgcaggaagagaaggaagagcaaatgagattgccctcagccgacgtctatcgctttgccgaacctgattctgaagaaaatatcattttcgaggagaacatgcaaccaaaagccggtatacctattatcaaggccggaacagtgatcaagttgattgaacgtctcacttatcacatgtatgccgaccccaactttgtgcgtacattccttacaacctataggagtttctgtaagccacaagaactgttgagtctgataattgaaaggtttgaaatcccagaacccgagcccactgaggcagatcgtatagcgatagaaaacggcgatcagcctttgagcgccgagctcaaacgcttccgaaaggagtatattcagcctgtgcagttgcgtgtgctgaacgtctgcagacactgggttgagcaccacttttatgactttgaaagggacgcctatttgttgcagagaatggaggagttcatcggcactgtgaggggaaaagcgatgaagaagtgggttgagagtattaccaagattattcagcggaagaaaatcgcccgagacaacggaccaggacacaacattacttttcaaagctctccgccaactgtggagtggcacatctcacggcctggtcacattgaaaccttcgaccttttgacactccacccaattgaaatcgccaggcagttaacccttcttgaaagcgacctctacagagcagtccagccttctgagcttgtgggcagcgtgtggacaaaagaagacaaggagattaattcccctaacctactgaaaatgatccgccacactactaacctcacactgtggttcgaaaagtgcatcgttgagaccgagaatctcgaagagcgggtggcggtggtgtctcgtatcatcgagatcctgcaggtttttcaggagttaaataactttaacggcgttctcgaggtggtttctgccatgaactctagcccagtgtaccgattggaccatactttcgaacagattccttcccgtcaaaagaagattttggaggaagcccacgaactcagcgaagaccattataagaagtatcttgccaaattacgttctatcaatccgccatgcgtgcctttctttggaatttatctaacgaacatcctgaagaccgaggagggtaacccggaagtgctgaaaagacatggaaaggagctgatcaatttcagcaagcggagaaaggtggctgaaataacgggggagattcagcagtaccagaatcagccttattgcctccgggttgaaagcgacatcaagagatttttcgaaaatttgaaccctatgggcaactcaatggaaaaagaattcactgattacctcttcaataaaagccttgagatcgagcctcgcaaccccaagccactgcctaggttccctaaaaaatatagctatcctcttaaaagccctggcgtcagaccaagtaatcctcggccaggtaccatgcggcaccccacacctctccagcaagaaccaagaaagatcagttattcacgcatccccgaatctgagaccgaatccaccgcatcggcgccaaattcgcctaggacaccactgaccccccctcccgctagcggtgcatcatccaccacagacgtgtgctctgtcttcgatagcgaccattcttcgcccttccacagtcgcagcgcctccgtctcatcaatttctttgaccaaaggtacggatgaggtccccgtcccaccccctgtcccacccagacggagacccgagagtgcacccgctgaatctagcccttccaaaatcatgtccaaacatcttgacagcccaccagccatacccccaagacagcccacaagcaaagcttatagccctcggtacagcattagcgatcgaacctccatatccgacccacctgagtcccctccccttctcccacccagagagcctgtccgcacccctgacgttttctccagcagcccactacacctacaacctcctcctctgggcaagaagtccgatcacgggaacgcatttttcccaaactctccgtctccattcactcccccaccaccgcaaaccccctcaccccatgggacgaggcgccacctgccaagcccgccactcacccaggaagttgaccttcatagtatcgctggtccacctgtgccaccaaggcaaagcacctctcagcatatccctaaattaccaccaaagacatacaagagggaacacacacatcccagtatgcacagagatggtcccccactgctggagaacgcccattcgagttag

SEQ ID NO: 30956 - DNA, 2358 bp, synthetic construct
  misc_feature 1..2358: note = Description of Artificial Sequence: Synthetic coding sequence
  source 1..2358: mol_type = other DNA
atgtcagaccaagaccactcaatggacgagatgaccgctgttgtaaagatcgaaaagggcgttggaggtaacaatgggggtaacgggaatggcggaggggcattctcccaggctaggtccagcagcaccggctcctcatcaagtacaggaggtggtgggcaggagtcacagccttcacccttggcgttgctggctgctacatgttcgagaattgagagtccaaatgagaacagcaacaactcacagggcccaagccagtctggcggtacaggtgaattggacctgacggcaacgcagctatcacagggtgccaatggttggcagataatttcttcttcttcaggcgcaacccctacctccaaagagcagagtggcagtagtacgaatggatccaatggctctgagtcctccaaaaataggacggtgagcggaggccaatatgtcgtcgcggctgctcctaaccttcagaaccagcaggtgcttactgggttacccggtgttatgccaaatatacagtaccaggttatccctcagttccagacggtcgatggccagcagttgcaatttgccgctactggggctcaggttcagcaggacggctccgggcagattcagatcatccccggagcaaatcaacagattattacaaacagaggaagcggcggtaatattattgccgctatgcccaacttgcttcagcaagcagttccgctgcagggcctcgctaacaacgtgctttctggccagactcagtacgtcactaacgtgcccgtggcactcaatgggaatatcactctgctccctgtcaactcggtctccgcggcaactctgaccccttcctctcaagctgtgactatatcttcatcaggttcacaggagagcggctcacagccggtcacgagcggcacaaccattagctcagcttccctggtatctagtcaagctagctcatcgagtttcttcacgaatgctaactcatactcaaccaccactacaacatcaaatatgggtattatgaacttcacaacctcggggagtagtggcacaaattcccaggggcagaccccccagagggtgtctggacttcagggttccgatgcactgaatatacagcagaaccagacctcgggcggatctttacaggctggccagcaaaaagaaggcgaacagaatcaacagacccaacagcaacaaatacttattcagccgcagctggttcagggcggacaggctctgcaagcgcttcaagctgcccctctgtctgggcagacgtttactacgcaggctatcagccaggagacattgcagaatttacagctgcaggccgtccctaacagcggtccaatcattattcggaccccaaccgtgggaccaaatggtcaggtgagctggcagacactccagttgcagaatctgcaggtgcaaaacccccaggctcagaccattacactcgctcccatgcagggcgtttctctgggccagacctctagttccaatacaacattgacacctatcgcctctgcggcatccattccggcaggcacagtcactgtcaacgccgcacagctctcaagtatgcccggactgcagacaataaacctgagcgccctggggacttcggggatccaggtacacccaatccaagggttgccactcgccatagccaatgccccaggcgatcatggcgcacagctgggcctgcacggagccggaggcgatgggattcatgacgataccgctggcggagaggagggggagaactctcctgacgctcagccccaggcgggacgacgtacaaggagggaggcatgcacctgtccttattgtaaggatagcgagggcagaggcagtggggaccctggtaaaaagaagcagcacatttgccacatccaagggtgcggcaaggtgtacgggaaaacgtcccacctgcgtgcgcacttacgctggcacacgggggaacgacccttcatgtgtacatggtcctactgcggcaagcgcttcacgaggtctgacgaattgcaacgtcacaagcggactcatactggtgagaagaaatttgcctgtccagaatgccctaagagatttatgcggagtgaccatttatccaagcatataaagacccaccagaacaaaaagggaggtccaggagtcgctctgagcgttgggaccttacctctggattctggcgctggttctgaaggctcaggaacagcaactccaagtgcattgatcacaaccaatatggtcgcaatggaggcgatctgtcccgagggaatcgccagactcgccaattccggcatcaatgtgatgcaggtcgccgacctgcaatcgataaacatttccggcaatggcttctag

SEQ ID NO: 30957 - DNA, 2337 bp, synthetic construct
  misc_feature 1..2337: note = Description of Artificial Sequence: Synthetic coding sequence
  source 1..2337: mol_type = other DNA
atggacgaaatgactgccgtggtaaagattgaaaagggggtggggggtaacaacgggggaaacggaaatggtggtggagccttcagccaggcgcgatcaagcagcactggctcctcctccagtacgggaggtgggggacaggaaagtcagccgagccctcttgccctgcttgcagcaacgtgtagcaggattgagtctcccaacgaaaatagcaacaatagtcagggtccttctcagagcgggggaacgggggaattggatctgactgccacccagctgagccaaggcgcaaatggctggcagatcatctccagtagttccggtgctacgcccacttctaaggaacagtcggggtcctctactaacggaagtaacggatccgagtctagcaagaaccggacagtgagcgggggacagtacgtggtcgcagcagcccctaatcttcagaatcagcaggtgctcacagggctgccaggagtcatgccaaacatccaatatcaggttatcccacagtttcagacagttgatggtcagcagcttcagtttgccgcaaccggggctcaggtccagcaggacggaagcggacagatccagattattccgggtgcaaaccagcagataatcacaaatcgcggtagtggcggaaatatcatcgctgcgatgcctaatctgctgcagcaggcggtcccactgcagggcctggccaataacgttctcagcggacagacacagtacgttaccaacgtgcccgtcgccttaaacggcaacataaccctcctccccgtaaactctgtcagcgcagccaccctgacaccatccagccaagctgtgactataagttccagcggaagccaggaaagtggaagtcagcccgtgacttctggtaccactatctctagcgcaagcctggtcagctcacaggcctccagttctagcttctttacaaacgccaactcctactctacaacaacaactacgagcaacatgggtatcatgaattttactacatccggtagctctggcacaaacagccaagggcagacaccgcagcgcgttagcggcctgcaaggttccgatgccctcaacattcagcaaaaccagacctctggagggtctctgcaggccggacagcagaaagagggcgaacagaatcagcagacacaacagcaacagattctcatccagccacaactcgtgcagggcggtcaagccctccaggctctgcaagctgctccactgagcgggcaaacattcaccacccaagcaatctcgcaggagacacttcagaacctgcagctgcaggccgtgccaaattcgggacccatcattattcggactccaaccgtagggcctaatgggcaagtgagctggcaaaccctgcagctgcagaatttgcaggtacagaatcctcaggcccaaaccattacactcgccccaatgcagggggtgagtctgggtcagacttctagcagtaataccactcttactccaatagcaagtgcagcaagcatcccagctggcaccgtgaccgtcaatgccgcacagctatcctctatgcccggtctccagacaatcaatctgtccgctcttggtacctctggaattcaggttcacccaatccagggtctgccattggccatcgctaacgcgccaggagaccacggcgctcagttgggcctgcacggggcagggggtgacggcattcatgatgacacagccggaggggaggagggggaaaactcaccagacgcccaaccacaggctggtaggcgtacaaggcgcgaggcctgcacgtgcccttactgtaaggactcagaaggcagaggatccggggatcccggtaaaaagaagcagcacatctgccacattcagggatgtggtaaggtgtatggcaagaccagtcatctccgggcacatttgcgctggcacactggggagcggccatttatgtgcacatggtcgtactgcggaaaaaggttcactaggagcgatgaactgcagcggcataaaagaacccacacaggagagaaaaagtttgcatgcccagagtgcccgaagaggttcatgcgtagtgaccatctgtcgaagcacattaaaacgcaccagaataaaaagggcggaccaggcgtggccctgagcgtgggaacattacccctggatagtggtgccggatcagaaggtagtgggacagctacaccctctgctttgataactacgaacatggtggccatggaggccatttgtcctgagggaatcgctcgactggctaattcaggtataaatgtgatgcaggtcgccgatctccaatctataaatattagcggtaatggtttttag

SEQ ID NO: 30958 - DNA, 1413 bp, synthetic construct
  misc_feature 1..1413: note = Description of Artificial Sequence: Synthetic coding sequence
  source 1..1413: mol_type = other DNA
atgtcagcccaggtgctcggcttcttgcgctcatggacgcctctgcctctggcggcacctagaggtcctgctgccgctggcaatgatgctggggcaccggctgccacggccccaggtggggagggggagccacactctcgcccatgcgacgctcgcctgggctcaacagacaaggagctgaaagcaggtgccgctgcgacggggagcgctcctactgcacccggtaccccatggcaacgagagccaagagtagaagtcatggaccctgccggtggccctcgaggcgttctgcctaggccctgcagagtgctggtgttgctcaatcccagaggcggaaagggcaaagctctgcaactgtttaggagtcatgtgcagccactgctggctgaggctgaaatttccttcacactgatgctgaccgaaagaagaaaccatgcccgtgaattggtccggtcggaggagctgggacgctgggatgctctggttgttatgagcggggacggcctcatgcacgaggtggttaatggtctcatggagcggccagattgggagaccgccatacagaaacctctgtgctctttgcccgctggcagtggtaatgcactggccgcatccctcaaccattatgcaggttacgaacaggtcacaaatgaagatcttctgaccaattgcacacttctgctatgccggagactgttgtcaccaatgaatctgttgtctctccatactgcttcaggccttcggctgttctccgtgctcagcctggcctggggtttcatcgccgacgtcgacctggagagtgagaaatatcgtagactcggcgaaatgcggtttaccctaggcactttccttcgactcgctgccctacgcacctatcggggacgactggcttaccttccggtcggacgtgtgggtagcaaaacgcctgcctccccggtcgtggttcaacaggggccagtagatgcccacttggttcccctggaggagccagtgccatcccattggaccgtggttccagacgaagattttgtcctggttctggctctcctgcacagccatctgggctctgaaatgtttgctgccccaatgggcagatgtgccgcaggagtcatgcacctgttttacgtgagagccggagtcagtcgtgcaatgctgctgcggttgtttctggccatggagaaaggacggcatatggagtacgagtgtccctacctggtgtatgtaccagtggtagcgtttagattggagcccaaagacggcaagggagtgtttgctgtggacggcgagctcatggtgagcgaggcagtgcagggacaggtccaccctaactacttttggatggtttccggttgcgtggaaccacctccgagctggaaacctcagcagatgccgcctccagaagagcctctgtag

SEQ ID NO: 30959 - DNA, 1155 bp, synthetic construct
  misc_feature 1..1155: note = Description of Artificial Sequence: Synthetic coding sequence
  source 1..1155: mol_type = other DNA
atggatcctgccggaggcccacgtggagtgctccccaggccatgtagagtgcttgtgctgcttaaccctagaggaggcaagggaaaggcccttcagctctttagaagccatgtgcagcctttactcgccgaggcagagatttcctttacactcatgctgaccgagaggaggaaccacgccagagaactggttaggagcgaggagctgggacggtgggacgctcttgtggttatgtcaggtgacgggctgatgcacgaagttgtgaacgggctaatggaacgacccgattgggagactgcaatacagaagccactctgttcattaccggctggcagcgggaatgctctggccgcaagtctcaaccactatgcaggatacgaacaggtgaccaacgaggatcttctcacaaattgtaccctgttgctgtgtaggagactgctttcaccaatgaaccttttgagtttgcataccgcctccgggctgaggctgtttagcgtgctgagcctggcctggggcttcattgctgacgtcgatctggaaagcgagaagtatcgcagactcggtgagatgaggttcaccctgggcactttcctgcgcctggccgcacttagaacataccggggtcgccttgcttacctacctgtgggaagggtaggctcaaaaacaccagcttctcctgtggttgtacaacaggggcctgtcgacgcccatctggttcccctggaagaaccagtgccctcccactggacagtcgtccctgatgaagactttgtgctcgttttggccctgctccatagccatttggggtccgagatgtttgctgcacctatgggcagatgcgctgccggtgtcatgcacctgttctatgttcgggcaggggtctctagagcgatgctgctccgcctttttctagcaatggaaaaaggacggcatatggaatacgaatgcccatacctggtgtacgttccagtcgtggcttttagattggaacccaaggatgggaagggcgttttcgccgtggatggcgagcttatggtctcagaagcagtgcaggggcaggttcaccctaattatttttggatggtctctggatgcgttgagccacccccatcttggaagcctcaacagatgcctccccctgaggagccgttatag

SEQ ID NO: 30960 - DNA, 1152 bp, synthetic construct
  misc_feature 1..1152: note = Description of Artificial Sequence: Synthetic coding sequence
  source 1..1152: mol_type = other DNA
gagccaactgggggaccgagaggtgtgctgcctaggccctgtcgagtcctcgtgctgctcaatccgaggggcggaaagggtaaggcactgcagttgtttagatctcacgtgcaacctctcctggccgaggctgaaatctcatttactttgatgcttactgagcggaggaatcacgctagagaactggttcggtctgaggagctcggaaggtgggacgctctcgtagtgatgtccggcgatggcttgatgcacgaggtcgtcaatggactgatggagagacccgactgggaaaccgcaatccagaaacccttatgctccctaccagccggatcaggtaacgctctcgcagcctccctgaatcactacgcgggatacgagcaggttaccaacgaggacctgctgactaattgcactctactcttgtgcagacgattgctgtctccgatgaatctgctgtcccttcacaccgcttctggactgcggcttttttcagtattgtccctggcctgggggttcattgctgacgtggacctagagtccgaaaagtatcggcgtttgggcgaaatgcgattcactctcggcacatttttacggctggccgcactcagaacctatcgagggcgtcttgcatatctgcccgtgggcagggttggatctaagaccccagcaagtcccgtcgtggtccaacagggccctgtggatgctcatctcgtgcctctggaggagccagtgccgagtcactggactgtcgtacctgatgaggactttgtgctggtacttgctctcctgcacagccatctgggcagcgagatgttcgccgctccgatgggcagatgcgcggctggagtgatgcaccttttctatgtgagggccggagtgagccgcgctatgctgctccgactcttcctggcaatggaaaaggggaggcatatggagtatgagtgcccctatctcgtttatgttccggtcgtggcttttcgcctggagcctaaagacggaaaaggcgtgttcgccgtggatggagagttgatggttagcgaggctgtgcagggccaggtgcaccccaactacttttggatggttagcggttgcgttgaaccaccccctagttggaagccacaacaaatgccccctccagaggagcccctctag

SEQ ID NO: 30961 - DNA, 1155 bp, synthetic construct
  misc_feature 1..1155: note = Description of Artificial Sequence: Synthetic coding sequence
  source 1..1155: mol_type = other DNA
atggatcctgcaggcggtccacgcggtgtactccctaggccctgtcgcgtcctggtcctcctaaatcccagaggaggaaagggtaaggcactccagctgttcaggtcacatgtgcagcctctgcttgccgaggccgagatatctttcactctgatgctcacagaacgcaggaatcacgccagagaactagtacgcagcgaggaactcgggcgatgggatgccttagtcgttatgtctggcgacggactgatgcatgaggtggttaatgggttgatggagcgcccagactgggaaacagccatacagaaacctctgtgctccctacccgcaggctccggcaatgccctggccgctagtttgaaccactacgccggatacgagcaagttacaaacgaagatctccttaccaattgcacactgctgctgtgtaggcggctgctttcgcccatgaacctgttaagcctgcacaccgctagtggacttagactatttagcgtcctgtccttggcctggggattcattgctgatgtggacctggagtctgagaagtacaggcgcttgggagagatgcggttcaccttaggcactttccttcgtttggccgcactcagaacgtaccgcggaagactcgcttatttacccgtcggtagagtgggttctaaaacccctgcgtcaccagtggtagtccagcaaggccctgttgatgcccacctcgtccctctcgaagagccggttccaagccattggacagtagtacccgatgaggatttcgttttggtcctcgctctcttgcattctcacctggggagtgagatgttcgccgcacccatgggcaggtgcgccgcaggggtaatgcatctgttctacgttagggcaggcgtgtcaagggcgatgctcctccgtctgtttttggccatggaaaagggcaggcacatggagtacgaatgtccgtatctcgtgtacgtgccagtggtcgcttttagactggagcccaaggacggcaaaggggtgttcgcagttgatggcgagctgatggtgtctgaagcagttcagggacaagtacaccccaactacttctggatggtatccgggtgtgtggagccccctccctcctggaaaccacagcagatgccaccacctgaagagcccctgtag

SEQ ID NO: 30962 - DNA, 1197 bp, synthetic construct
  misc_feature 1..1197: note = Description of Artificial Sequence: Synthetic coding sequence
  source 1..1197: mol_type = other DNA
atggatccggtcgtgggatgcggacgaggcctgttcggctttgtatttagcgctggagggccaaggggagttctgccacgcccttgccgagtattggtccttcttaacccgaggggaggcaaaggcaaagctctgcagctgttcagaagccatgtgcaaccactccttgccgaagcggagatctcttttaccctcatgctcacagaaaggcgtaatcacgccagggaactggttcgttccgaggaactgggaagatgggacgctcttgtcgtcatgtccggagacgggctcatgcatgaggtagtgaatgggctgatggaacggcctgactgggagacagcaattcagaagcccctctgttcactccctgcagggagcggcaatgcccttgccgcaagtctgaatcactacgcgggatacgagcaggttaccaacgaggacctgctcaccaactgcacgttgctcctgtgtcgacgattgctctcgcccatgaatctgctaagtctgcatacggcctctggattgcggctgttctccgtgctgagcttggcatggggatttatcgcagatgtggacttggagtccgagaagtacaggcggctaggggagatgcgttttacactgggaactttcctccgcttagccgcactgcggacctatcggggtcggctggcctatctgcccgtgggcagagtgggctcaaagacacctgcctcccccgtcgtggtgcaacagggccctgtggatgcacacctggtgcctttagaggaacctgtccccagccattggacggtcgttcccgatgaagatttcgtcctcgtgctcgctctgttgcacagtcacctgggatccgagatgttcgccgcaccaatgggtcgctgcgccgcaggggtgatgcatttgttctacgtgagggctggcgtttcgcgagctatgctactcaggttgtttctggccatggagaagggaaggcatatggagtatgaatgcccatatttggtttatgtcccagtagtagcctttcggctcgagcccaaagatggtaagggagttttcgcagtggatggagagctgatggtaagcgaagctgttcagggccaggtacacccgaactacttttggatggttagcgggtgtgtcgagccgcctcctagttggaagcctcagcagatgcctccgcctgaggaaccactgtag

SEQ ID NO: 30963 - DNA, 1155 bp, synthetic construct
  misc_feature 1..1155: note = Description of Artificial Sequence: Synthetic coding sequence
  source 1..1155: mol_type = other DNA
atggacccagctggtgggcctcgaggggtgctgcccagaccctgccgcgtgctagtcttgctgaatcccagaggtggtaagggtaaggccctgcagctttttagatctcacgtgcagccactgttagccgaggcggagatcagcttcactctcatgcttactgagagacgcaatcacgctcgcgagcttgtacgctctgaagagctcggccgatgggacgcactggtggtgatgagtggggacggcttaatgcacgaagtcgtgaatggcctaatggagaggcccgattgggagaccgccatacagaaacctctgtgctcgttgcccgcaggttccggtaacgctctggcagcaagccttaaccactacgcaggatacgaacaagtaacaaacgaggatttgctgaccaactgcacactcctgttgtgcagacgcctgttaagccctatgaatctgctctcgcttcataccgcgtccggactgcggctgttctccgttttgtctctcgcttggggctttatagctgatgtggacttggagtctgaaaagtatcggcgtttgggggaaatgcgctttacactcggtactttcctgcgactggcagcccttcgtacataccgcggacgcctagcttacttaccagtgggcagggtggggtctaagacccctgcctcccctgtggtggtccagcaaggtcctgtcgatgcccatttggttcccctggaagaacctgtcccctcacattggacagtggttccagacgaggacttcgtgctggtcctcgctttgctgcatagtcaccttggatccgagatgtttgcagctcctatgggacgatgtgctgcaggcgtcatgcatctcttttacgtccgggcaggagtgtcaagagccatgttgctgcgcctattcctggctatggaaaagggcagacatatggagtatgagtgcccgtacctggtttatgtacccgtagtggcgtttcggttggagcctaaggatggaaagggggtgtttgcagtagatggggagctgatggtatccgaagcggtgcaaggacaggtgcaccctaactacttctggatggtgtcaggatgtgttgagcctcctcccagctggaaaccacagcagatgccccctcctgaagaaccgctgtag

SEQ ID NO: 30964 - DNA, 1965 bp, synthetic construct
  misc_feature 1..1965: note = Description of Artificial Sequence: Synthetic coding sequence
  source 1..1965: mol_type = other DNA
atgaacggccacctggaggccgaggaacaacaggatcaacgcccagatcaggagctgactgggtcatggggccatgggcctcgatctacattagtccgagccaaagctatggccccaccacctccccctctggcagcctccacacctttactgcacggcgagttcggaagttatcccgctaggggtccacggtttgctctcactctgacgtctcaggcactccacatccagaggctaagacctaaacccgaggccaggccccgtgggggattagttcccctcgccgaagtgtccggctgctgcactctcaggtctcggagcccgtcggactctgccgcttatttctgcatctacacatacccaagagggagacgaggggctcgcaggcgggctacacgcaccttcagggctgacggggctgccacatacgaagaaaatagagctgaagctcagagatgggccactgcactcacttgcctattgcgtgggctgcccctgcccggagacggggaaatcacacctgacctgctgccacgccctccgcgtctccttctgctggttaaccctttcgggggaagggggctggcttggcagtggtgtaaaaaccatgtgttgcccatgataagcgaggctggcctctcatttaacctaatccagaccgagaggcagaatcatgcccgagagttggtgcagggactgtcactgtctgagtgggacgggatcgtgacagtatctggcgatggcctcttacatgaggtgctcaatggacttttagatcgacctgattgggaggaggccgttaaaatgcctgtgggcattctcccttgtggcagtgggaatgctctcgctggtgccgtgaaccagcatggaggtttcgaacccgcattaggtctggacctccttctgaactgcagtctgcttctatgtcggggaggcggacacccattggatctcctgtcagtcaccctggcgagcgggtccaggtgtttcagtttcttgtcagtggcttggggctttgtgtcagacgtcgatatccagtccgagcggttccgggcactggggagcgctagattcaccctaggtactgtcctcggtcttgccacacttcacacgtatcggggtcgcctttcctatctgccggctacagttgagccagcctcccctacacctgctcattccctgccccgtgccaagtctgaactgaccctgacacccgatcccgctccacctatggcacattcaccgctgcataggtctgtatcggacctgcctctccccctgcctcaacctgcattagcctctccgggaagcccagaacccctaccaatccttagcctcaacggtggcggaccagagttggcaggggactgggggggagcaggcgacgccccactgagtcctgaccccctgctgagttctccacctggatcacctaaggcggctctacacagccctgtttcggagggcgcacctgtgattcccccatccagtggtttgccgttgcccacccccgatgcgagggtcggagccagcacctgcgggcctcccgaccatttgctgcctccactcggcactccgctcccacccgactgggtgaccctggagggcgactttgttcttatgctggctatcagccctagccatctgggcgcagatcttgtggcagcccctcacgcgcgttttgatgatggtttggtgcacctgtgttgggtcaggtctgggattagtcgggcagccctgctgcggttgtttctggcaatggagagaggaagccatttctctcttggctgcccacagctgggttacgccgctgccagagccttccgattggaacctctgacccctagaggcgtgctgacagtggatggggaacaggtggaatacgggcctcttcaggcacagatgcaccctggaattgggaccctgctgaccggtcccccaggctgtcccggtcgtgagccttag

SEQ ID NO: 30965 - DNA, 1851 bp, synthetic construct
  misc_feature 1..1851: note = Description of Artificial Sequence: Synthetic coding sequence
  source 1..1851: mol_type = other DNA
atggcaccgcctccaccccctctggcagcaagcacaccgctgcttcatggcgaatttggttcttaccctgcacgcggacccaggttcgcccttacactgacaagtcaggccctccatatccagaggttgaggcctaagcctgaggcaaggcctcggggtggcctcgtcccactggctgaagtatcaggatgctgcaccttgagaagcagaagtccttcggattcggcagcctatttctgcatctatacgtaccctagaggtagaaggggagcaagacggagagcaactagaacttttagggcagacggggctgccacctatgaggaaaatagggccgaagctcagcgttgggcaacagctctaacttgcctcttgcggggattgcctcttcctggggatggggagatcacacctgatttgctcccgcgacccccacgcctcctgcttcttgtcaatccatttggtggtcggggtctggcctggcaatggtgtaaaaaccacgtcctgccaatgatctctgaagcgggactgagctttaatctgatccagactgaacgacagaaccacgcgcgagagctggtacaggggctatccttgtctgagtgggacggaatcgtgacagtatcaggtgacggtctcctgcacgaagttctcaacggactgctagatagacctgactgggaggaggcagtcaagatgccagtgggcatacttccttgtgggagcggaaatgcgctggccggtgccgttaaccaacacggcggaccaagctggggagatagagatccatacataagccacagtgcaaagcccactgtctcacaagtaaaccagcccgcatgtggaatgcttactccgtctagctggacgtttcttcctgcatgcttcccagctgtgagccgggctccacgaactctgcctgggatggggggtacgcaagctctcggttcagcgagattcacattggggacagttctcggccttgctactctgcatacatatcgcggtcggctgagctatttgccagccacagtcgagccagccagccctacgcccgctcattcgctgcctcgcgctaaaagtgagttgacccttactcccgaccctgccccacccatggcacatagccccctgcacagaagcgttagtgacctccctctgcccctgccacaacccgctctggcttcgccaggcagccccgaaccgctccccattctctctcttaacggcggaggccctgagctcgccggagactggggaggtgctggcgacgccccactgtcacctgacccacttttgtcttcaccacctgggtcacccaaagcggcactccactctcccgtctcagagggcgctccagtcatccccccatctagcggtctgcccctccctacccccgacgcacgagtcggagcctcaacttgcgggccaccagatcacctgctcccaccgctggggactccgcttccgccagactgggttacactagaaggagattttgtcctgatgctggcgatctccccatctcacctgggcgctgatctggttgccgctccacacgcccgtttcgacgacggcctggtgcatctgtgctgggtcaggtcaggtatttcccgggcagctcttttacggctgttcctggcaatggagcgaggcagccacttctccctcggctgtccccagctgggatacgccgcagccagggctttccgcttggagcctctcacacccagaggcgttcttaccgtagatggcgagcaggtggagtatgggcctctccaggcacaaatgcatcccggaatcggaactttgctgacaggaccccctggctgtccagggagggagccgtag

SEQ ID NO: 30966 - DNA, 1884 bp, synthetic construct
  misc_feature 1..1884: note = Description of Artificial Sequence: Synthetic coding sequence
  source 1..1884: mol_type = other DNA
atgaacggccatcttgaagcggaagagcagcaggaccagcggccagaccaggaactcactggtagctgggggcatggaccaagatctaccttggtgcgcgctaaagctatggccccaccgcctccccctctagctgcctccacaccactgttgcatggtgagtttggatcttatcctgcgagaggcccaagattcgccctcactctaacttcacaggcactgcacatacaacgcctccgcccaaaacatagtgctgcctatttctgcatctacacatacccccgaggacgtcgtggggctcgacgcagggcaactcgcactttccgcgctgacggtgctgcgacttacgaggagaacagagctgaagcacagcgctgggctacagcgctgacatgcctacttaggggcctgcccttgccgggtgacggggaaataacaccggacttactccccaggccacctaggctccttttactcgtgaatccgtttggtggacggggtctcgcctggcagtggtgtaagaatcatgttcttcccatgatcagcgaggctggcctgagcttcaacttgattcagacggagcggcagaatcatgctcgggagctcgttcaggggctgtcattaagcgagtgggatggcatagtcactgtctctggcgacggtttgctgcatgaagtgctgaacggcctgctggatcggcctgactgggaagaagcagtaaaaatgcccgtgggaatattaccttgtggaagcggcaatgcactggccggtgccgtgaaccaacatgggggtttcgagcccgcactcggtctggacctccttctgaactgcagcttgttgttgtgtcggggaggagggcacccacttgatctcctgtccgtaaccctggcctcagggagtagatgcttctcctttttgtcagtggcatggggttttgtgagcgatgtggacattcagtccgagcgcttccgggctctgggaagcgctagatttaccctgggcacagtgcttggactcgccactcttcatacctaccggggaaggttatcctacctgccagccactgtcgaaccggctagccccaccccggctcactctttgccccgagctaagtctgaactgacactgactcccgacccagccccacccatggctcactcacctctccatcggtctgttagcgatttgccactccctctgcctcaaccggcattggcatcacctggctcccccgaaccgttacctatcctgagcctcaatgggggaggcccagagcttgctggcgattgggggggagcaggcgatgcacccctgtcacctgatccccttctgtctagcccacctggaagccccaaggctgccctacactcgcccgtgagtgaaggtgctccagtcatcccacctagctctggtctccctttgcccacgcccgacgcccgtgtgggagcttcgacatgcggtccaccagaccatcttctcccaccactgggcaccccacttccacctgactgggtcacactggaaggtgacttcgtcttgatgctggccatctctccctcacacttgggcgctgacctggtggcggctcctcacgccagatttgacgatggcttagtccatttgtgctgggtgcggtcaggcatctctcgcgctgctctgctgaggctctttctggccatggaacggggttctcatttttcactgggctgcccacagctggggtacgctgccgcacgcgctttcaggttagaacctctgacccccagaggggtgcttacggttgacggcgagcaagtggagtacgggccactgcaggcccaaatgcaccccggaatcggaacacttctgactggacctcccggatgccctggcagagagccctag

SEQ ID NO: 30967 - DNA, 150 bp, synthetic construct
  misc_feature 1..150: note = Description of Artificial Sequence: Synthetic coding sequence
  source 1..150: mol_type = other DNA
atgaatggccaccttgaggctgaagaacagcaggaccaaaggagccccctgacctgctatttagggaggccgggatgtttttattggagtatacctctaggggttggcgcttggcctggtagcggggttaggacaacctgtttcccttag

SEQ ID NO: 30968 - DNA, 2286 bp, synthetic construct
  misc_feature 1..2286: note = Description of Artificial Sequence: Synthetic coding sequence
  source 1..2286: mol_type = other DNA
atgatagggtgcctccacgctcgcgttagtggcccactttgggacgccggtttgtgtcctgcaagcagccgatctgctcacacttgcttaagcttgtctgtttctgacgctcccgtctctcccgcaacagccccacactgtcttcttctttcgacggcacccgcacccccatgcccttgccatggtgtcctcaattcccaccccttttccccgccattcccccagcgaccggatcaggagttgactggtagctggggtcacgggcctcggtccacactggtgcgcgcaaaggcgatggcaccgcctccgcctccactcgccgcttctacacccctgctccatggggaatttggttcctaccctgccaggggccctcgctttgctcttactcttacatcccaagccctccacatacagcgcttgcgtcctaagcctgaggctaggcctcggggtggattggtgcctttagcagaagtttccggctgctgcaccctgcgttcaaggtcaccctcagatagcgcagcttatttttgtatttacacataccccagaggcaggcggggtgcacgccgaagggcaaccagaacatttagagctgacggagcagcgacatacgaagaaaatagagcagaggcgcagaggtgggccaccgcacttacttgtctgttgagaggacttcctctcccaggcgacggggaaataacccctgatctgcttccgagacctccacggctgctcctcctggtgaacccttttggaggtcgcggtctggcctggcaatggtgcaagaaccacgttctccccatgatctctgaagcaggactatcctttaacctgatccagacagagcgccagaatcatgcaagggagctagtccaggggttaagcctcagtgagtgggatggaattgtgaccgtttctggggacgggttactgcacgaggtgcttaacggcttgctggatcgcccagactgggaagaagctgtgaagatgcctgtagggatccttccttgtgggtctggtaacgccttggcgggtgccgtgaaccagcacggtggattcgaacccgcactcggactagacctactgctcaattgttccttactcttgtgcaggggaggcggacaccctcttgatcttctgtcggtcacccttgcatctggaagccggtgtttctccttcctgtcagtggcttggggctttgtatccgatgttgatatccaatctgagaggtttcgagccctgggaagcgctagattcaccctgggtaccgtgttaggcttagccaccttacacacttatcgcggtcgtctttcctacctcccagctaccgtggaacccgcttcccctacaccagctcattccctacctagagctaagtcagagctgaccttgaccccagaccctgccccaccaatggcccatagtccattgcaccggtccgtctcagaccttcctctgcctttaccccagcctgccctggcctctccgggtagccccgagcccctgcccatcctgtccctaaacggaggaggacctgagctcgcaggagactggggaggcgctggtgacgcaccgctctctccagaccccctgctgagcagtccccctggtagcccaaaggctgctctgcatagcccggtctctgaaggggctcccgttattcccccatcctctggcctgcccctgcctacccccgacgcccgtgtgggagctagcacttgcgggcctcccgaccatctattgcccccattggggacacctctgcctcccgactgggtgacactagagggcgacttcgtgctgatgctggcaatttctccttcacaccttggagccgacttggttgccgcacctcacgcacgcttcgatgacggtctggtgcacctctgctgggtgaggagcgggatttctagagccgcacttttaagactattcctggctatggaaagaggcagccatttttccctgggctgtccacagcttggctatgccgcagctagagccttcaggctcgagcctctcactcctcgcggagtgcttaccgtggacggcgaacaggtcgagtatggtcctctgcaggctcagatgcaccctggtattgctcgcggacgtacccaaacaccagcactacctgcagcccctgcgctctacgggagacagcctggtgccgctcatggtctgcagcctgtatgtcagggtgccgcactgttcttccacaattcctggctctggggatctcaggatctcttcaggatcgtgctcacagaagccgttggtggatag

SEQ ID NO: 30969 - DNA, 1965 bp, synthetic construct
  misc_feature 1..1965: note = Description of Artificial Sequence: Synthetic coding sequence
  source 1..1965: mol_type = other DNA
atgaatggacatctcgaggcagaagagcaacaggaccagcggccagatcaagagctcacaggaagttggggtcatgggccaaggtccacccttgtcagagctaaggccatggctcctccaccaccccctctggcagcctccacccctctgctgcatggtgagtttggttcttatccagcaagaggccctcggttcgcattgacccttacctcccaggcgctgcacattcagaggctgagacccaaacctgaagccagaccacgaggaggcctcgttccacttgccgaggtgagtggatgttgtactcttaggtctcgatctccctccgatagtgctgcatacttttgcatttacacataccctcgagggagaaggggcgctcgaagaagagctaccagaacgtttagggccgatggcgctgctacctacgaagaaaaccgcgctgaggcacagaggtgggccacagcccttacctgccttctacggggtctacctctgccgggtgatggcgagattacacctgacttgctgcccaggccccctaggctgcttctcttggtgaaccccttcggagggagaggactggcctggcagtggtgcaaaaatcatgtgttgccaatgatctccgaggccggtctctctttcaatctaatacagaccgagcgccaaaaccacgccagagagctcgttcagggactgtccctgtccgaatgggacggaattgtgaccgtttcaggcgacggccttctgcacgaggtccttaatggcctgttggatcgccctgattgggaggaggccgttaaaatgccagtaggtattctgccctgcggaagcgggaacgctctggccggagctgtgaatcagcacggagggttcgaacctgccctggggctggacctgctgctcaactgttctctgttactgtgtagagggggtggccaccctctggacctactaagcgttacccttgctagcggcagcaggtgtttttcttttttgtcggtcgcctggggattcgtttcagatgtagacatacagtcagagcgattccgcgcactgggcagtgcaagattcacactcggtacagtactcgggttggcaacactgcacacatatcggggtcggctaagctatttgccggctaccgtagaaccagcaagcccaactccagcgcactccctacccagagctaagtcagagcttaccctgacccccgatccagctccccctatggcacatagtccattacaccgttccgtttccgacctcccactgcccctgccacagccggctcttgccagcccgggatctcctgagccccttcccatattgagtttgaatggcggtggcccagaactagctggcgattgggggggagctggagacgcccctctgtcaccagacccactgttgagcagcccccctggtagccccaaagccgctctccatagtcccgtttctgagggcgctccagtcattcctccaagctccggcctccccctgcccaccccagatgccagagtaggcgcatcgacttgcggtcctcccgatcacctgttgccaccgctcggcacacctttgcccccagattgggttactctggaaggcgatttcgttctgatgctggcaatctccccaagtcacctcggagccgacctggtagcagcacctcacgcaagattcgatgatgggctggtgcatctttgctgggtgcgcagcggcatcagcagggcagccctgctgagattattcctcgcaatggagcgtgggagtcacttcagccttggttgtcctcaattgggatacgccgcagccagggcattccggctcgagcctctgacgccgcgtggggtattaacagtggacggagaacaggtcgagtatggaccactgcaagcacagatgcacccgggtattggtacactattaactggccctcccggatgtcctggaagggagccttag

SEQ ID NO: 30970 - DNA, 1857 bp, synthetic construct
  misc_feature 1..1857: note = Description of Artificial Sequence: Synthetic coding sequence
  source 1..1857: mol_type = other DNA
atggcccctccccctccccctctggccgcaagtaccccactgctgcacggtgagtttggatcttatcccgcacgcggtcctagattcgctctcacactgacctcacaggctctgcatattcaaagactccggccaaagcccgaggcacgaccacgaggaggtcttgtgccgctcgccgaagtgtcgggttgctgcaccttgcgctctagaagtccatcagacagcgccgcatatttttgtatatacacttatccaagagggaggcggggtgccagacggagagcaaccaggacatttcgcgctgacggcgcagcgacatacgaggagaaccgagctgaggcccagcgctgggctacggctctcacctgcctcctacgcggtctacccctgcctggggacggcgagataactccggatctgctgcctagaccccctcgtcttcttttgctagtgaatccatttggcggaagaggactggcctggcagtggtgtaaaaaccacgtactgccaatgatctccgaagctgggctctcgtttaacctgatccagaccgaaagacagaaccacgccagagaactggtgcaaggactttcactgagtgaatgggacggcatcgtgaccgtaagcggcgacggactgctgcatgaggtactcaacggcctgcttgataggccagactgggaagaggccgtgaagatgcctgtgggaatcctgccttgtggctcaggcaatgctttggccggtgcggttaatcagcacggtggcttcgagccggcactgggtctcgacctgcttctgaactgctctttgctgctctgtcgcggtggagggcaccccctggaccttctgagcgttaccctggcctccggcagtagatgctttagtttccttagcgtagcatgggggtttgtgagcgatgtcgacattcagagcgagaggttccgggcactggggtccgcacgattcacattggggaccgtcctggggctggcgacactccacacctatagaggaaggctaagctacctgcctgccactgtggaaccagcgagtccgacacctgctcactcattgcccagggccaaatcagagctgaccctcacgcctgacccggcaccccctatggctcatagccccctgcacagaagtgtttccgacttgcccctgccactgccccagcctgccctcgccagccccggaagccccgagcctctcccgatcctgagcttaaatggcggaggtccagagcttgctggagactgggggggagcgggagacgccccactgtcccccgatccactgttatcctcccccccagggtcacccaaagccgcactgcattcacctgtctctgaaggtgcacctgtcatacccccatcgtccggactcccattgcccacccccgacgcccgtgtgggtgcctcaacttgcgggccacctgatcacctgcttccccctctaggcacccctctgccccctgactgggtgacccttgaaggagacttcgtgctgatgctggccatcagtcccagccacctcggtgcagaccttgttgctgcacctcatgcccgattcgacgacggtcttgttcacctctgttgggttcgctctggaatctcgagggctgcattgctgaggctcttcctcgctatggagagaggatcacatttttcactgggctgtccacagctcggttacgcggctgctagagcgttcagactggaaccactgacccccaggggggtgctgacagtggatggggagcaagtggagtatggacctttgcaggcccagatgcatcctggcataggtacactgctgactggtccccctggatgtcccggacgtgagccctag

SEQ ID NO: 30971 - DNA, 1149 bp, synthetic construct
  misc_feature 1..1149: note = Description of Artificial Sequence: Synthetic coding sequence
  source 1..1149: mol_type = other DNA
atgggtcccacttcagttccccttgtcaaggctcacagatcgtctgtctccgactacgtgaattacgacattatcgtgcgccattataattataccggcaaactcaatataagtgccgataaggagaactctattaagctgacgtctgtggtcttcattctgatctgctgtttcataatccttgaaaatatattcgtccttctgacaatttggaagaccaagaaattccacaggcccatgtactattttattgggaatctcgcattgtccgacctgctcgctggggtggcctacacagctaatctgctcctgtctggtgccacaacatataaacttacgcccgcacagtggttcttgcgggaaggcagtatgttcgtcgctctatctgcctccgttttcagcctgctggccatagccattgagcggtatatcaccatgctgaagatgaaacttcacaatggatccaacaatttcagattattcctcctgatatccgcatgttgggtgataagcctgatcctgggaggtctgcctatcatgggttggaattgtatcagcgctctgagttcatgctctactgtgttgcccctgtatcacaagcactatattcttttttgcacaacagtcttcaccctgctgcttctgtcaatcgtgattctgtattgcaggatttactccctcgtacgtacccgtagtagaagactgacctttcgcaaaaatatttccaaggcgtcgaggagttctgaaaagtccttggcgctgctaaaaactgttatcattgtgctgtcggttttcattgcctgctgggctccactgtttatactcttactgctggatgttggctgtaaggtcaagacttgtgatattctattcagggcagagtacttcttggtcttagccgtgcttaacagtgggacaaaccctatcatttatacgctaacgaacaaggagatgaggcgcgcatttataaggatcatgtcgtgctgtaagtgtccatctggggatagcgcgggtaagttcaagagacccatcatcgcaggtatggaattctcccgctcgaagtcggataacagctcccacccacagaaagacgagggagacaatcctgagactatcatgagttcgggtaatgtgaatagctcatcgtag

SEQ ID NO: 30972 - DNA, 1353 bp, synthetic construct
  misc_feature 1..1353: note = Description of Artificial Sequence: Synthetic coding sequence
  source 1..1353: mol_type = other DNA
atgggtcctacttccgtccctctagtaaaggcacaccgtagctctgtcagcgattacgtgaattatgatataatcgtgagacactataattacaccggcaagctgaacatatccgctgacaaagagaattcaattaagttgacctccgtggtctttatcctaatctgctgcttcattatactggaaaacatcttcgttcttctaacgatttggaaaaccaagaaattccaccggcctatgtattatttcattggcaatttggcactgagtgatcttctggctggggtggcatatacagccaacttacttctgtctggggctaccacatataagcttaccccggcacagtggtttcttcgggagggctcaatgttcgtggctctttctgccagtgtgttttctctcctcgcaatcgccattgaacgatatatcacaatgcttaaaatgaagcttcataacgggagcaataattttcgcctttttctcctgattagtgcctgctgggtgatttctcttatcctcggcggactgccaattatgggatggaactgcatctcagcgctcagctcgtgctctaccgtcctccccctgtaccataagcactacatccttttttgcacaaccgtgttcaccctgctgctgctgagcatcgtcattctctattgccgcatttacagcctcgtcagaactcgcagtcgtcgattgacattccgtaagaatatcagcaaagccagcagatcttcagagaagagtttggcactactgaagaccgtcattattgtgctatccgtcttcatagcctgttgggcccctctgttcattcttcttctcctggatgtggggtgcaaggtgaagacctgcgatattctcttcagggccgagtattttttggtattagccgtgctgaattctggaacgaatcccattatctacaccctgacaaacaaagagacccttcttgcaaatagttcagatccatcctctcctgcatggaattcagccgcagctaatcggaccattccgccaacccctagaaagacaaaggggactacacaacgacctttgtgcctgctggagacctctacactgctccctaggacaggatcttgcccccctaccggcagtgctctttacctagtcgccggacacccaagcgtgtggaaaaagatcagtggactccggctgctccctggaaggtcctgttgcaagcctgaaggaggacggggaagaatccgaacagcctggtggtgccgagtgcttgttggccgagtgagcagttgcgaacaatgcaccgggaagggcggagaccaagtgcctgcatggaatatcttttcaacccccctggaactgtag

SEQ ID NO: 30973 - DNA, 726 bp, synthetic construct
  misc_feature 1..726: note = Description of Artificial Sequence: Synthetic coding sequence
  source 1..726: mol_type = other DNA
atggctacactgaaagatcaactcatatacaatctgctgaaggaggaacaaacgccacagaataagattactgttgttggagttggggctgtgggcatggcttgcgccatctctatactgatgaaggatctggccgatgagctggccctggtggacgttatcgaagacaagctgaaaggggagatgatggaccttcagcacgggtcactattcctgaggactcctaagattgtttctgggaaagactataacgtgaccgccaattccaagcttgtgatcattaccgctggcgcacgccagcaggagggagagagtcgccttaatctggtgcaaaggaacgtgaacatttttaaatttataattccaaacgtggtgaaatattcccccaattgtaaactactgatagtttcaaaccccgtcgacattctgacctatgtcgcatggaagatctccggatttccaaagaaccgcgtcattggttcgggttgtaacctggattcagctagattccggtaccttatgggagaaagacttggcgtgcatcctctttcttgccacggctgggtgctgggcgaacacggtgatagctcagtccctgtctggtccggtatgaatgttgccggagtctccctgaagacactccaccctgatctggggactgacaaggataaagaacagtggaaggaagttcataaacaggtggtggaacgggttttcacagagtag

SEQ ID NO: 30974 - DNA, 813 bp, synthetic construct
  misc_feature 1..813: note = Description of Artificial Sequence: Synthetic coding sequence
  source 1..813: mol_type = other DNA
atgctccaggcttgtaagatggagggatttccactggtcccaccaccctcggaagacctagtgccctatgacacggacttatatcagagacagacacatgagtactacccatacttgtccagtgatggagagagccacagcgaccattattgggactttcacccccatcacgttcattccgagttcgagtcatttgctgagaacaattttaccgagctgcagtcagttcagccaccgcagctgcagcagttataccggcatatggagctcgagcagatgcacgtgcttgacacacccatggtgcctccccacccgagcctgggtcaccaggtttcttatctgccccgtatgtgcctgcagtacccatcactgtctcctgcccagccatcctctgatgaagaggagggtgagcgtcagagtccccctctggaggtgtccgatggggaggctgacggcctggagcccggaccagggctcctccccggagagactggttcaaaaaaaaagattagattgtatcagttcctgctcgatctccttagatcaggggacatgaaggattcaatttggtgggtcgataaggataaaggaacatttcagttcagtagtaaacacaaagaagctctcgcacatcgatggggcattcagaaaggaaacagaaagaagatgacatatcaaaagatggcaagagctctgcgtaactacggtaaaacaggcgaagtcaaaaaggtcaagaaaaagttaacctaccagttcagtggagaagttctgggacgaggcggactggcggagagacggcacccgcctcactag

SEQ ID NO: 30975 - DNA, 2403 bp, synthetic construct
  misc_feature 1..2403: note = Description of Artificial Sequence: Synthetic coding sequence
  source 1..2403: mol_type = other DNA
atggggtcttcaaaaaagcaccggggagaaaaggaggctgctggtacaactgccgcagccggaacgggtggtgccactgaacaacctcctaggcatagagagcacaagaagcacaagcataggtctggcggatctgggggatccggaggggagagacggaaacgatctagggaacgtggcggagagcggggttcgggtcggcgtggcgctgaggcagaggcacgcagctccacccacggaagagaaagaagccaggcggaaccttcagagcggcgagtcaagagagagaaacgcgatgacggatatgaagcagccgcaagcagcaaaacgtcctctggcgacgccagttccctgtcgattgaggaaactaataaactgcgtgctaagctcggactgaagccactggaggtcaacgctatcaaaaaggaagccggtactaaggaggagcctgtgacagctgatgtcattaatcccatggcgctcaggcaacgggaagaactgagagaaaagcttgctgccgctaaggagaagcggctgctgaatcagaaactgggaaagatcaaaactctcggggaggatgatccttggcttgacgacacagccgcttggattgaacggtcacgccaactgcagaaagagaaagatctggcagagaaacgcgctaaattgctggaggagatggaccaggagttcggagtatctaccttggtggaagaagaatttggtcagcgtaggcaagacctctatagtgccagggacttgcagggtcttacagtagaacatgcaatcgacagcttcagagagggggagacgatgattcttactctgaaagataagggcgttctgcaagaagaggaggacgtgctggttaacgtcaatcttgttgacaaggaaagagcggagaagaatgttgaactgagaaaaaagaaaccagactatctcccatacgctgaagacgaatccgtggacgacctggcgcagcagaagcccaggtcaattttatcaaagtacgacgaagaactggaaggggagcggcctcattcgtttcggctggagcaaggcggaaccgctgacggcctacgggaacgtgagctcgaggaaatcagagctaagctgagactgcaagcccagtctttgtccaccgtggggcctcggctggcatccgagtacctcacacccgaggaaatggtaacctttaaaaaaacgaaaagacgcgtgaaaaagataagaaagaaagagaaagaggtagtggtacgagccgacgacctcttgcctttgggagatcagacacaggacggtgattttggctcccgtctgcgtggacgcggtagaaggcgggtgtctgaagtcgaagaagagaaggagcctgttccccagcccctgccctccgacgatactcgcgttgaaaatatggacatatctgacgaagaagagggcggtgctccaccgcctggatctccacaggtcctggaggaggacgaggctgaactcgagctgcagaagcagctggaaaagggtaggcggctgagacagcttcagcagctccagcagctgagggattccggtgagaaagtagtggagatcgtgaaaaaactagagtccaggcagaggggatgggaggaagatgaggaccctgagcgtaaaggcgcaattgtcttcaatgctaccagcgaattttgtagaaccctgggagagattccaacctatggactggccggaaatagggaggagcaggaggagttaatggactttgagcgggacgaggaacgatccgcaaatggcggatctgaatccgacggcgaagagaacattgggtggagcactgtgaatctggacgaggagaaacaacaacaggatttttcagcatctagtaccactatcctcgatgaggaaccgattgtcaaccggggactggctgccgcactgctgctgtgccaaaataaggggttactggaaactaccgtgcaaaaggtggctcgggtgaaggcccctaacaagagtttaccttctgctgtgtactgtatagaggacaagatggccattgatgacaagtattctcgtagggaggaataccgtggttttacacaggatttcaaggagaaagatggctataaacccgatgtgaaaatcgagtatgtggacgaaaccggccgaaagctaacacccaaggaagccttccgccagcttagccaccgtttccatggaaagggctctgggaagatgaaaacagaacgacggatgaagaaattggacgaggaagccctcctgaagaagatgagcagctcagacacacctttgggcactgtcgcactgctccaggaaaagcagaaggcacagaaaacaccatacatcgtccttagtgggtccggtaagagtatgaacgcaaacaccatcacaaaatag

SEQ ID NO: 30976 - DNA, 1929 bp, synthetic construct
  misc_feature 1..1929: note = Description of Artificial Sequence: Synthetic coding sequence
  source 1..1929: mol_type = other DNA
atggccctacgacagagagaggaactgagagagaagcttgcggctgcgaaagagaagagattgctcaaccaaaaactcggaaaaatcaaaactctcggtgaggacgatccctggttggacgataccgcagcctggatcgagcgatcccgccaacttcaaaaagaaaaagatttagccgagaagcgagcaaaactgcttgaggaaatggaccaggaatttggcgttagtacactggtggaagaagagttcggccagagacggcaggacctttacagcgctagggatctacagggactgactgtggagcacgccattgacagctttcgcgagggagagacaatgattctgacattaaaggataagggtgtactccaggaggaagaggacgtgctcgttaacgttaatctggtcgataaggagcgggcagagaagaacgttgaactgcgcaagaagaaaccagattaccttccttatgctgaagacgagagcgttgatgatctggcccagcaaaaaccacgcagcatcttgtctaaatacgacgaggaactcgagggggagcgaccccactcctttagactggaacaaggcggtaccgctgacggattgcgggagcgggagttggaggagataagagcgaagctgcggctccaagcacagtcactaagcacagtgggccctcgtctcgcatctgaatacctcacgcccgaggagatggtgacttttaaaaagacaaaacgacgtgtcaagaaaatacggaagaaggagaaggaagttgtcgttcgagctgatgatctcctgcccttaggcgatcagacgcaggacggggatttcggctctaggctgagaggccgaggtagaaggagggttagcgaagttgaggaggagaaagagcccgtcccacagccacttccctccgatgacacacgggtggagaatatggatatctctgacgaggaggaaggaggggcaccccctccaggcagcccgcaggtgctcgaggaagacgaagcagagctcgagctgcagaagcagttagagaaaggtaggcggctacggcagctgcaacagttgcagcagcttcgggacagtggggaaaaagtagttgagatagtcaagaagctcgagagccggcagcggggttgggaagaagacgaggaccctgagaggaaaggcgcaattgtcttcaatgccactagcgaattctgcagaacacttggtgagatccctacatacggcttggctggaaatagagaggagcaggaggagctgatggatttcgaacgcgacgaagaaaggtcggccaatgggggatccgagagtgatggggaagagaatataggatggagtacggttaacctggatgaggaaaagcagcagcaggacttctcagcttcaagtactacaatactcgatgaggaacccatcgtcaataggggcctcgcagccgctcttctgctgtgtcagaacaagggtcttctggaaactacggttcagaaggtggccagggtgaaggctccaaataaatctctgccttccgctgtctactgtattgaagacaagatggccatcgacgataagtacagcagacgcgaagagtaccggggattcacccaagactttaaggaaaaagacggctacaagcccgacgtgaagatcgaatacgtcgatgaaaccggcaggaagctaactcctaaagaggcctttcggcagctgtctcacagatttcacggaaagggatctgggaagatgaagaccgagagaagaatgaaaaagttagatgaggaggcacttctaaagaagatgtcttcatctgatacgcctctgggtaccgtcgccctgttgcaggagaaacagaaagcgcagaaaactccttatatcgtgttgtccggctctggcaagtccatgaacgcaaacacaattaccaagtag

SEQ ID NO: 30977 - DNA, 4392 bp, synthetic construct
  misc_feature 1..4392: note = Description of Artificial Sequence: Synthetic coding sequence
  source 1..4392: mol_type = other DNA
atgaaaaagaagacagtctgtacattaaacatgggagataaaaagtatgaagatatggagggagaggagaatggcgataacaccatctctactgggctgctgtactcagaggccgatcggtgtccaatttgtctgaattgtttgttagaaaaagaagtcggcttcccagaatcttgcaatcacgtgttttgtatgacttgcattctaaagtgggccgagaccctagctagctgtccgattgataggaagcccttccaggccgtctttaagttctctgctctggaagggtacgtgaaagtgcaggtcaagaagcaacttagagagacaaaggataagaaaaatgaaaactcattcgaaaaacaggtgtcctgtcacgagaattctaaaagctgcattcgccgtaaagctatcgtgcgtgaagatctgctttccgccaaagtctgcgatctgaagtggatacatcgcaactctctgtattcagagacaggtggcaagaagaatgccgctatcaaaataaataagcctcaacgcagtaactggtccaccaatcaatgcttcagaaacttcttcagcaacatgttttcctctgtgtcgcattctggagagtcaagcttcacttacagggcctactgtacagaatttatcgaggccagcgagatctcggctttaatcagacaaaagagacatgagctcgagctcagttggtttccggataccctgcctgggattggacgcattggcttcataccttggaacgtggagactgaggtcctgcccctaattagctcagtgctaccgagaacaatcttccctacgagcactatttcattcgaacactttgggacttcatgcaaggggtacgcactcgctcacactcaggaaggagaggagaagaaacagaccagcggtaccagtaacacacgcggaagcagaaggaagccagcaatgacaactccgacccggcgatctacaagaaatacccgggcagagactgcctcacagtcccagcgtagcccgataagtgataattccgggtgtgacgctccagggaacagcaatccatctctttcggttcctagcagcgcagagtccgagaagcagactcggcaggccccaaaacggaagagcgtacgcaggggacgcaagccaccattgctgaagaagaagttgcgcagctcagtcgccgctcctgaaaaatcctctagcaatgacagcgtggacgaggagactgctgagagcgacacatctcccgtccttgaaaaagagcaccagccagacgtggatagcagcaacatatgcactgtccagacacacgtcgaaaatcagtcagcgaactgcctgaagtcttgcaatgaacagatcgaggagtccgagaaacacaccgccaactacgatactgaagaaagagtgggcagtagctcttctgagtcatgtgcacaggacctccccgttctcgtcggtgaggagggtgaagtgaagaaattagagaataccgggatagaagcaaacgtcttatgcctcgaaagcgagatatctgaaaatatcctcgaaaaaggcggagatcccctggagaaacaggaccaaatctctggcctgagtcagagtgaagtgaagactgacgtttgcaccgtgcaccttccaaacgattttcccacttgcttaacatctgaaagtaaggtgtatcaaccagtgtcatgccccctctctgatctttccgagaacgtggaatccgtggtaaatgaagaaaaaataaccgaatcttcccttgtcgagattacagagcataaggattttactctgaagacagaggagctgattgagagccccaaactggaaagctcagaaggcgaaattattcagacagtggaccggcaatccgtaaaatcacccgaggtacagctcttagggcacgtggagacagaagacgttgagatcatcgctacatgtgacaccttcggtaacgaggacttcaataacattcaggattctgagaacaacttgttaaagaataaccttctgaataccaaattggagaagagcttggaggagaagaacgagagtctgacagagcacccccgaagtactgaattgccaaaaactcacatcgaacagattcagaaacatttctccgaggacaacaacgagatgatacccatggagtgcgattcattctgctccgaccaaaatgagtccgaagtagaaccctccgttaatgcggacctgaagcagatgaacgaaaacagtgttacccactgctcagagaacaacatgccgagctcagatctggccgatgaaaaggtggagactgtctcacagcctagcgagtcaccaaaagacactatcgacaaaactaaaaagccgaggaccagaaggtctcggtttcacagcccttcgaccacctggtcccccaataaggacacaccacaggagaagaaaagaccacagtcccctagcccgagacgcgagactgggaaggagtccagaaagagccaatcaccctcacccaagaatgagtcagctcgcggtcgaaagaaatccagatcccaatccccaaagaaggacatcgccagagagagacgccagtctcagtctagatctcctaaacgtgacacaacccgggagtcccgacggtccgagagcctaagccctcggagagagacatcccgggaaaataaacgtagccagcctcgcgtgaaggattcttcacccggagagaagtcgaggtcacagagtcgggagcgggaaagcgatcgtgatgggcagcggagggagcgcgagagaagaacaagaaaatggagtcgctcccgctctcactcaaggtcaccgtcaagatgtaggaccaaaagcaagtcatcgtcttttgggaggattgatagggactcatattcccccaggtggaaagggaggtgggctaacgatgggtggagatgtccaaggggaaacgacaggtatcggaagaacgaccccgagaagcaaaacgaaaacacccgtaaggagaagaacgatattcacctcgatgctgatgatccaaacagtgctgacaaacaccggaatgattgtcctaactggatcactgaaaaaattaacagtggcccagacccacgaactcgcaatcccgaaaagctcaaagaaagtcactgggaggaaaatcgcaatgaaaatagcgggaactcctggaacaagaacttcgggtcaggatgggtgtctaaccgaggacgtggtagaggaaacagaggacgtggaacttatagaagcagtttcgcctataaagaccagaatgaaaacaggtggcagaaccgaaagccactaagcggaaacagcaacagctctggaagcgagtctttcaaatttgtcgaacagcagagctacaagcgtaagagcgagcaggagttttcattcgacacccccgctgatcgctccggatggacgtcagcctcatcatgggccgtccgaaaaaccctgcctgcagatgttcagaactactatagtcggagagggaggaattcaagcggaccacaatccggctggatgaagcaggaggaagagacaagtggacaagacagcagtctgaaggatcagaccaaccagcaggtggatggctcacaactgcctatcaatatgatgcagccacagatgaacgtcatgcagcagcagatgaacgcacagcatcagccaatgaacatcttcccgtatcccgtcggcgtgcatgctccattaatgaacatacagcgcaacccgtttaacatccacccacagctccccttgcaccttcacacaggagtcccactcatgcaagtggcgactccaacctcggtcagtcagggtctgccgccaccgccaccccctcctccaccaagccagcaggtaaactatattgcttcacaacccgatggaaaacagctgcaggggattccatcgtcaagccatgttagcaacaatatgtccacccctgtgctgcctgctcctaccgccgctcctggcaataccggaatggttcaggggccttccagcggaaacacatcaagctccagtcactccaaggcctctaatgcagcagtaaagctggccgagtcaaaagtgagtgtcgcagtggaggcgtcagctgacagtagtaagaccgataagaaactgcagatccaagagaaggccgcacaagaagtgaagctcgccattaagcctttctaccagaacaaggatatcaccaaggaggagtataaagagattgtgcgaaaggcagtcgacaaggtctgccactctaagagtggagaggtgaactccactaaggtcgcaaacttggttaaagcatacgtcgataagtataagtattcaaggaagggcagccagaagaaaaccctcgaggagcccgtctctaccgagaagaacattggttag

SEQ ID NO: 30978 - DNA, 4392 bp, synthetic construct
  misc_feature 1..4392: note = Description of Artificial Sequence: Synthetic coding sequence
  source 1..4392: mol_type = other DNA
atgaagaagaaaacagtgtgtacgctgaacatgggcgataaaaagtatgaagatatggagggagaagaaaacggtgataataccatctctaccggtcttctctattccgaggccgatagatgtcccatctgtctcaattgcttactagagaaagaggttggatttccagaatcctgtaaccacgtcttctgtatgacttgcattttaaagtgggcagagaccttggcatcttgtccgatagacagaaaaccctttcaagccgtgttcaagtttagtgccctggagggctatgtgaaggtacaggtaaagaagcaacttcgggaaacaaaagacaagaagaatgagaactcattcgagaagcaggtcagttgccatgaaaacagtaagagctgcatccgcaggaaggcaatcgtgcgcgaagacctgttatccgccaaggtctgtgaccttaagtggatccatcgcaactccttgtatagtgagacgggcggtaagaagaatgcagctatcaagattaataaaccccagcgcagcaattggtcaactaaccagtgcttcagaaatttcttctcgaatatgttctcttccgtatcccattcaggcgaatcaagttttacatacagagcttactgtaccgagtttattgaggcttccgagatctccgctctgattcgccagaaaaggcacgagctcgaactgagctggtttcccgacacactgcccggaataggccgtatcggtttcatcccctggaatgtggaaacggaggtgcttccccttatcagctccgtcctgcccaggacgattttccccactagtacaatcagctttgagcattttgggaccagttgcaagggctacgctctcgctcacacccaggaaggtgaggagaagaaacaaacgagcgggactagcaacactcgtggttcacggcgaaagcccgctatgactactcccacgcggcgatcaacccggaacacgcgagcagagaccgctagtcagagccagcggagcccaatttctgacaatagcggatgtgatgcaccaggcaattccaaccctagcttgagcgtccctagtagcgccgaatccgaaaaacagaccagacaggcccctaaacgaaagtcggtacgcagaggaagaaaaccacccctccttaagaagaaactgcgttcctctgtggctgctcctgagaaatcgtcttctaatgatagtgtggacgaggaaacagccgaaagcgacacctccccggtgctcgaaaaggagcaccagcccgacgtggacagctcgaatatctgtacagtgcagacccacgtggagaaccagtccgcaaactgcctcaaatcctgtaacgaacagattgaagagtctgaaaaacacactgctaattacgacaccgaagaacgcgtcggaagctcttcttccgagtcctgtgcccaggatctcccagtactggtaggcgaagagggcgaggttaaaaagctcgaaaacaccgggattgaagcgaatgtgctatgtttggaaagcgagatctccgagaatatcctggaaaagggcggagatcccctggagaaacaagaccaaatatccgggctgtctcagagcgaggtaaaaacggacgtgtgcacagtccatctgccaaatgactttcctacctgcctgacctcagagagcaaagtataccagccggtttcctgtccactgtctgatcttagcgagaacgtggaatctgttgtgaacgaggagaaaatcaccgaatcaagcttggttgaaatcaccgagcataaggattttacgctgaagacggaggaacttatagaatcgcccaagctggaaagcagcgaaggagagatcatccagaccgtcgatcggcaatccgtcaaatctccagaagtccagctcttgggccatgtcgaaacagaagatgtggagattatcgctacctgtgatacatttggcaacgaagacttcaataatatccaggactccgagaataaccttctgaaaaataaccttctgaatacaaaattggaaaaatctctggaagagaagaacgagtccttgacagaacaccctagaagtacggagctgccaaagacgcatattgaacagatacaaaagcatttctcggaggacaacaacgagatgatccctatggagtgcgactccttttgtagcgaccagaacgaatccgaggttgaaccaagcgtgaacgctgacctaaaacagatgaatgaaaacagcgtgacccactgctccgagaacaatatgccgagttcagatctggccgatgaaaaggtggagacagtgagtcaaccatcagagtcccccaaagacaccattgataaaaccaaaaagcccagaacaagacggtcaagatttcacagcccctccacaacttggagtcccaacaaggacacgccccaggagaagaaaaggccccaatcacctagcccaagaagggagacaggcaaggagtcgagaaaaagccagtcaccttctccaaagaatgaatcggctaggggcaggaagaagtcccgcagccagtcacctaagaaggatattgccagggagcgacgacagtcccagtcccgatctcccaagagagacacaacaagagagtctcgccgttccgaaagcctgtccccgagacgcgagacgagtagagaaaacaagcggagtcaacctcgggtgaaggattcctcgcctggtgagaagtccaggtcccagagccgcgagcgagagtctgatagggatggccaacgcagggaaagagaaaggcgcacccgcaaatggtctagaagcaggtcacactcaagatcccccagtcggtgtagaacaaaaagtaaaagctcatccttcggtcggattgacagagactcctattctccgagatggaagggccgatgggccaacgatgggtggcgctgccccaggggcaatgatcggtacaggaaaaatgaccccgagaaacagaacgaaaacacgcggaaggaaaaaaatgatatccacctcgacgctgatgatccaaactctgcggacaagcataggaatgattgccctaattggattacggagaaaataaatagcgggcctgatccccgaactcgaaaccccgaaaaacttaaggagtcccattgggaagagaatcgtaatgaaaacagcggaaactcatggaataaaaacttcggctctggctgggtgagcaaccgcggaaggggtcgcggtaatcgaggcagaggcacttataggagcagtttcgcctataaggatcagaacgaaaaccgttggcaaaacaggaagccactgtccggaaattctaactctagcgggagcgaaagtttcaagtttgtggagcagcagtcctacaagcgcaaatccgagcaggagttttcttttgatactccggctgaccggtctggatggacatcagcgagctcatgggcagtgaggaagactcttcctgccgatgtgcaaaactactattccagaagaggaaggaactcaagcggccctcagagtggatggatgaagcaggaagaagaaacatcaggacaggattcctccctgaaggatcagacaaaccagcaggtggacggatctcaattgcctatcaatatgatgcagccccagatgaacgtgatgcaacagcagatgaatgctcagcaccagcctatgaacatctttccttaccctgtaggtgttcacgcccctcttatgaacatccaacggaaccctttcaatatccaccctcagctgcccttacatttgcatacaggtgtcccgctgatgcaggtagccacccccacttctgtgtctcagggactaccaccccctcccccaccccctcctccctcccagcaggttaattatatagcatctcagccagatggaaagcagcttcagggaattccatcctcctctcatgtctcaaacaacatgagcacaccagtgttgccagcaccaaccgccgctcctggaaacactggcatggtacagggcccaagtagtggtaataccagctcctcctcgcactcaaaagcttcaaatgccgcagtgaagctggccgagtcaaaggtatcagtggcagtcgaggcatctgccgatagctccaagacagacaagaagctgcagatacaggagaaggctgcgcaggaggtgaaactcgcaattaagcccttctaccaaaataaggacattacaaaggaggagtacaaggagatcgtacgaaaggcagtcgacaaagtttgccattccaaatccggcgaggtgaatagcactaaggtcgctaacctggttaaagcctacgtggataaatacaagtactcccgcaagggaagccaaaagaagacattggaagaaccagtcagtaccgagaaaaacattggatag

SEQ ID NO: 30979 - DNA, 3447 bp, synthetic construct
  misc_feature 1..3447: note = Description of Artificial Sequence: Synthetic coding sequence
  source 1..3447: mol_type = other DNA
atgaccaccccaactaggaggagcaccaggaacacccgggcagaaaccgcctctcaatctcagagaagcccgatttcggacaactctggctgtgatgcacctggcaactcgaacccgtcgctgtcggtgccctctagtgccgaatcagaaaagcagacccgccaagccccaaagcgaaagtcggttcggagaggcaggaagcctccactcttgaaaaagaaattgagatcatccgttgcagcgcctgaaaagagttcctcaaatgacagcgtggatgaggagaccgcggaaagcgacacaagcccggtactagaaaaggaacatcagcctgacgttgatagtagcaatatttgcaccgtgcagacacatgtagagaatcagtccgcgaactgtctgaaaagctgtaacgagcagatcgaggaaagtgagaagcacactgccaattacgacactgaagaaagggtgggctcgtcttctagcgaatcgtgtgcccaagacttacctgtactagtgggcgaggaaggcgaggtaaagaagctggagaacactggcattgaggctaacgtgctatgcctcgaatccgaaatcagtgagaatattctagagaaagggggagacccattagagaagcaggatcagatttcagggctgagccagagcgaggtgaagacagacgtttgcacggtgcatctccccaacgatttccctacatgcctcacttccgaaagtaaagtctatcaacctgtgtcatgcccgctatctgacttgtctgaaaatgtcgaatctgtggtaaacgaagagaagatcacggaatcgagcttggtagagatcacggaacataaagacttcaccctgaagacagaggagctgatagaaagtcccaagcttgagtcctccgagggagagatcatccaaactgttgaccgtcagagtgttaagtcacccgaagttcagctcctgggacatgtggagacagaggatgtggagattattgccacttgcgacaccttcgggaacgaagatttcaataacatccaagattctgagaacaatttactcaagaacaatctcctcaatactaagttagaaaagagcctggaggaaaagaacgagagcctcaccgaacatcctcgctctactgagctacctaaaacgcacatcgagcagatccaaaagcactttagcgaggacaacaacgagatgattcctatggaatgcgatagtttctgttcggatcagaacgagagcgaggtagagccatctgtgaacgcggacctgaaacaaatgaacgagaactccgtcactcattgttccgaaaacaacatgccgagttctgatctggctgacgagaaagtcgagaccgtctctcagcccagcgagagtcccaaagacaccattgataaaacaaagaaaccacgcacgcggcgttcaaggttccattcaccatccacgacatggagtccaaacaaggacaccccacaggaaaaaaagaggccccagtccccatcaccaagacgcgagacaggcaaagagagtcggaagagccaatcaccctctccaaaaaacgaatcagccagaggtagaaagaaaagtagatcccagtctccgaaaaaagatatcgctcgcgagaggagacaaagccagtctcgatcccccaagagagacaccacccgggaaagtaggagaagtgaatcactatcacctcgtagagaaacctccagggaaaacaaacgttcacagccccgagtaaaggactcctcacccggagaaaaatccagatcccagtcgcgggagcgggagagcgaccgagacggccagaggagagagcgagaaaggcgtactcgtaaatggagtaggagccgcagccattctagatcccctagccgttgcagaactaaaagcaaaagctcgtctttcggaagaattgatagggactcatattctcctagatggaagggaaggtgggcaaatgatgggtggcgatgtcctcgcggaaatgatagataccggaagaacgacccagagaagcagaatgagaacacacgcaaagaaaagaatgatatccatctagatgcagatgaccctaactccgcagacaaacaccggaatgattgtcccaactggattacagaaaaaatcaatagcggaccagatccgagaacacggaacccagaaaaattaaaggaatcccactgggaggaaaatagaaatgagaatagtggaaattcatggaacaaaaattttggctcgggatgggtgtctaatcgcggaaggggacgagggaacagggggcgtgggacgtatagatcctcgtttgcttataaagaccagaacgaaaatcgatggcagaatcgcaagcccctctcgggaaactccaattctagcggttcggagtcgttcaaattcgtggagcaacagagctacaaacgtaaaagcgagcaggaattctcctttgatacgccagccgaccggagtggctggacctctgcttcatcatgggctgtccgcaaaaccctgcccgcagatgtgcagaactactacagcagacgtgggcgtaattctagtggaccacagtccggctggatgaagcaggaagaggagactagcggccaggactcctcgctcaaagatcagaccaaccagcaggttgatggctctcagctgcctatcaatatgatgcagccgcaaatgaatgtcatgcagcaacagatgaacgctcaacatcagccaatgaatatattcccatatccagtaggagtacatgcacccctaatgaatatccagcgaaatcccttcaatatccatcctcagctgcctctccatttgcatactggcgtgccactgatgcaggtggctacaccgacgagtgtcagccaaggactccctcctcccccaccaccaccccctccctcacagcaggttaattacatagcctcccaacctgatggcaaacagctgcagggtatccccagtagctcacatgtgtccaataacatgtctaccccagtcctgcccgctcccacagccgctcccggaaataccgggatggtgcaaggcccaagtagtgggaacacgagtagctcctcacacagcaaggcctcgaacgcagcagtcaagctcgccgaatcaaaagtaagcgtagcagtggaagcctctgccgactccagtaaaactgacaaaaagcttcaaatccaggagaaggcagctcaagaagtgaagcttgctataaagccattttaccaaaacaaagacatcacaaaggaagaatacaaggaaatcgtgaggaaagcagtggacaaagtatgtcatagcaaatctggtgaagtcaacagcaccaaggtggcaaacttagtgaaagcctatgtcgataagtacaagtacagtagaaaagggtcccagaagaaaaccctggaagagcccgtgtccacagaaaagaatatcggatag

SEQ ID NO: 30980 - DNA, 1401 bp, synthetic construct
  misc_feature 1..1401: note = Description of Artificial Sequence: Synthetic coding sequence
  source 1..1401: mol_type = other DNA
atggcagaagagcaagacctgtctgaggtagagctaagccctgtgggttccgaagagccaagatgccttagccctggctccgcaccatccctcggtcccgacggagggggaggcggttccggtctacgagcctcccctggccctggggagctgggcaaggttaagaaagagcagcaagacggtgaagcggatgatgataagtttccagtttgtatccgtgaggctgtgtcacaagttctttcggggtatgactggaccctcgttcccatgccagtgagagtaaatggagcgtcaaaaagtaaaccacacgtgaagcggcctatgaatgcgttcatggtgtgggctcaggctgccagacgtaagttagcagaccagtaccctcacctgcacaacgccgagctgagcaagaccctcggcaaactgtggcgtcttctcaacgaatcagataagcgcccatttattgaggaggcggagcggttacggatgcaacataaaaaggatcatccggactataagtaccagccgagacgtcggaagaacggtaaagccgctcagggcgaggccgagtgtcccggaggagaggccgagcagggtggtactgctgctatccaagcacactacaagtcggcacatttagaccatagacacccaggagagggtagccctatgtccgacggcaacccggaacacccatccgggcaaagtcacgggcctccaacgccacctacgactccgaaaacagaattgcagagcggtaaggctgaccctaaaagagacggcagatcaatgggtgaaggtgggaaaccacacatcgacttcgggaacgtggacatcggcgagatctcccacgaggtcatgagcaatatggaaacttttgatgtagccgagctcgatcaatacctgccaccaaatgggcatcccggacacgtttcctcttattccgctgcagggtatgggctcggctcagcgcttgctgtcgcgtctggccacagcgcttggatttccaagccgccaggcgtggcactacccacggtttccccccctggcgtggatgccaaggcccaggtcaagaccgagacagctgggcctcaaggccctcctcactacactgaccagccgagcacttctcagattgcctacaccagcctgagcctccctcattacggaagcgcctttccgtcgatttctcggcctcaattcgattactccgatcatcagccttccggcccttattatggtcatagtggccaagcatcaggcctgtattccgcatttagttacatggggcctagccagcggccactctacacggccatcagtgatccctcaccctcaggtccacagtcccacagtcctacacattgggagcagccagtgtacactacactctcaagaccttag

SEQ ID NO: 30981 - DNA, 1401 bp, synthetic construct
  misc_feature 1..1401: note = Description of Artificial Sequence: Synthetic coding sequence
  source 1..1401: mol_type = other DNA
atggccgaagagcaagatctttctgaggtggaactatccccagttgggtccgaggagcctagatgtcttagcccagggtcggcgccaagcctgggacccgacgggggtgggggtggtagcggactgcgcgctagccctggcccaggggaactgggcaaggtcaagaaggagcaacaggatggcgaagcagatgacgacaagtttccagtatgcatcagggaagccgttagccaggtgctaagcggctacgattggaccctggtcccaatgccggtcagggtaaatggcgcaagtaaatccaagccacacgtaaagagacctatgaatgcttttatggtctgggcccaagcagctagacggaagctggccgaccaatatccccatttgcacaacgccgaattgagcaagacactgggcaagctttggcgcctgctgaatgaaagtgacaagaggcctttcatcgaggaggccgaacgtcttcgtatgcaacataagaaggatcatccagattataagtatcagcccagaaggcggaagaacggtaaagcggctcaaggggaggctgaatgtccagggggtgaggcagagcaggggggaaccgcagctatccaggcgcattacaagagcgcacacttagaccatagacaccccggagaaggatctcctatgtcggatgggaaccctgagcatccctcagggcagtcccacggcccacctacccctccaacaactccgaagacagaattgcagtctggcaaagcggatcctaaaagggacggaagatccatgggggaagggggaaaaccccacatcgattttggaaacgttgatatcggagaaattagccatgaagtgatgagcaatatggaaaccttcgacgtggcggaactggatcaatacctgccacctaatggacatccaggtcacgttagcagctatagcgccgctgggtatggtctaggctctgctctggctgtcgcctcaggccacagcgcgtggatcagcaagcctccaggcgttgccttgccaaccgtgagcccacctggcgtggacgctaaagctcaagtgaagactgagacagccggacctcagggccctccacattatacagatcaaccatctacgtcccaaatagcttacactagtctctccctgccccattatggatcagcctttccttcaatatcccgaccccaattcgactacagtgaccatcagccctctgggccttactacggccatagcggtcaagcttcaggactctatagcgcttttagttatatgggccctagccaacggcctctgtacacagccatttctgatccaagcccgtcaggaccacagtcccactccccaacgcactgggagcagccagtctacaccaccctttcacgaccttag

SEQ ID NO: 30982 - DNA, 861 bp, synthetic construct
  misc_feature 1..861: note = Description of Artificial Sequence: Synthetic coding sequence
  source 1..861: mol_type = other DNA
atggccgaagaacaggacttgagcgaagttgagctctctccagtaggatccgaggagccaagatgcctatcccccggttccgcaccgtcactaggccctgatggaggtggaggtgggtcgggactacgcgctagtccgggacccggtgagctgggcaaggtgaaaaaggaacagcaggatggtgaggcagatgatgacaagtttccggtgtgcattcgggaagccgtctcccaggtgttatccgggtacgactggaccctcgtccccatgcccgtgagagtgaatggagcctctaaatctaaaccacacgtgaagcgcccaatgaatgcttttatggtatgggctcaggctgctcgcagaaaactggcggaccaatatccgcatctccacaatgcggaactgtccaaaactctgggcaagttgtggcgcttactgaatgagtcagacaaacgacccttcatcgaggaggccgaacgcctgagaatgcagcacaagaaagaccatcccgattacaaataccaacctagaagacgcaagaacgggaaggccgctcaaggtgaggccgagtgtccaggtggcgaggctgaacagggagggaccgctgccattcaagctcactacaaaagcgcccacctagatcatcgacaccccggagaagggagccctatgagcgacggcaatcctgagcacccctctggccagtcacacggcccaccaacacctccaacaactccaaagacagagttacagagtggcaaagctgaccccaagcgcgacggaaggccgtcacctagcgggcctcagagccatagccccactcattgggaacaacctgtatatacgacactgagccggccttag

SEQ ID NO: 30983 - DNA, 642 bp, synthetic construct
  misc_feature 1..642: note = Description of Artificial Sequence: Synthetic coding sequence
  source 1..642: mol_type = other DNA
atggccgaagagcaagatcttagcgaggtggaattatcccccgtaggctcggaggagccaagatgtctgagtcccggatctgcaccttctctggggccagacggagggggtggaggctctggactgagagcctcacccggtccaggcgagctcggcaaagttaagaaggagcagcaagatggggaggctgatgatgataaattccctgtctgcataagagaagccgtgagccaggtgctctccggctatgactggactctggtcccgatgccagtacgtgtgaatggggcaagtaaatctaaaccacatgttaagcggcctatgaatgccttcatggtgtgggctcaagccgcacgccgtaaactcgcggaccagtatccccatttgcacaatgccgaacttagtaagactctgggtaagctgtggcgcttgcttaacgaatccgacaaaagaccctttatagaggaggcagagagattgaggatgcagcataagaaggatcacccagattataagtatcagcccaggcgcagaaagaacggcaaggccgctcaaggggaggctgaatgtccgggaggcgaggccgagcaaggtggaaccgccgcaattcaggcacactacaagagcgcccacttggactag

SEQ ID NO: 30984 - DNA, 1425 bp, synthetic construct
  misc_feature 1..1425: note = Description of Artificial Sequence: Synthetic coding sequence
  source 1..1425: mol_type = other DNA
atggtccaacagaccaacaacgcagaaaatacggaagctctgctggcaggagaaagctcggacagtggcgctgggctagaactggggatcgccagcagccccacccctggcagtaccgcctctacaggagggaaagccgatgatcccagctggtgtaagacaccaagtggtcatattaaacggcctatgaacgccttcatggtgtggtcgcagatagagagacgaaagataatggagcagagccccgacatgcacaatgcagagattagcaagcgattggggaagcgttggaagttgctcaaggacagcgacaaaatcccctttattcgggaagccgaacgcttgcggctgaaacacatggctgattaccctgattacaagtataggcctcgcaaaaaggtcaaatccggcaatgccaacagtagtagcagtgcagcggcaagctcaaaacctggagagaagggcgataaagtgggcggttccgggggagggggtcacgggggaggtggaggtggcggaagttctaacgccggaggtggaggaggcggagcaagcggtgggggtgccaatagcaagccagcccagaaaaagtcctgtggctccaaagtggccggtggcgctggcggtggcgtgtcgaagccccatgccaaattgatcctcgctggcggaggcggaggaggcaaggctgctgcagcagctgcggcatctttcgctgctgagcaggcaggcgctgctgcactcctccccttaggggcagccgctgaccaccacagcctgtacaaagcccgtacccctagtgcatctgcgagtgccagtagcgctgcctcagcatccgccgctctggctgccccaggcaaacacctggcagagaagaaggtgaagagggtgtatctgttcggaggactgggaacttcatctagtccggtgggaggagtgggagctggggctgacccttcggatcccctgggcttatacgaggaagaaggagctggctgcagccctgacgcgccttcgctcagtgggaggtcatctgctgcaagcagcccagctgctggtcggagcccggctgaccatcgaggatacgccagtctccgagcagcttccccagcccctagttctgccccatctcatgcaagttcgtcagcatcatctcactcaagctcttcgagcagctcaggctctagcagcagcgacgatgagtttgaagacgacctcctcgacctgaatccttcatccaactttgaatcaatgtcattgggatctttcagctcatcgagcgccctggatcgagacctagactttaatttcgagcctggcagtggttcccatttcgagtttcctgattactgtacaccggaggtctctgagatgatctccggggactggcttgaatcgtctatctcgaacctcgtcttcacttattag

SEQ ID NO: 30985 - DNA, 1425 bp, synthetic construct
  misc_feature 1..1425: note = Description of Artificial Sequence: Synthetic coding sequence
  source 1..1425: mol_type = other DNA
atggtgcagcaaaccaataacgccgaaaacaccgaggcactgctggccggagagtccagcgattctggcgcagggcttgaactgggaatagccagtagtcccaccccaggaagtactgccagcacggggggaaaagcagacgatccctcttggtgtaaaactccaagcggacacataaagaggccaatgaatgcatttatggtatggagccaaatcgagaggcgtaagattatggagcagtctccggatatgcacaacgctgagattagcaaaaggctgggcaagcgatggaagctgctcaaagattctgacaagatccctttcattagggaggcagagcgtctccgacttaaacacatggctgattacccagattacaaatatcgtccaaggaagaaggtaaagtctgggaacgctaattccagttctagcgccgcagcatcaagcaaacccggtgaaaagggagataaggtgggcggttcaggcggaggcggacatggaggtggcggtggcggtggttccagtaacgctggcggtgggggaggaggtgcgtctggaggcggagccaattctaaaccagcccagaagaagtcatgcggcagcaaagtcgcaggtggcgctggcggaggtgtatctaagccccacgccaagcttatattggcaggaggcggtggaggcggtaaggccgcagccgcagctgctgcaagctttgctgcggaacaggccggagctgccgctctgctgcccctcggcgcagcagcagaccaccattccctctacaaggctcgcacaccaagcgcttccgcctccgcaagtagtgctgcaagcgcgagcgccgctttggctgctcccggtaagcatctggctgagaaaaaagtcaaacgagtctacctgttcgggggactcggtactagcagcagtcccgtcggcggagtaggcgctggtgctgatccatccgacccactgggcctttatgaagaagaaggggctgggtgttcgcccgacgcaccgtccctttcgggtaggtcttcggccgctagctctcccgctgctggtaggtccccggctgatcatcgcggatacgccagtctgcgggctgcctctccggcaccgtcatccgcgccatcccacgcctcaagctccgccagctcccatagctcctcaagcagcagctctggctcttcgtcatccgacgacgagttcgaagatgatctgttggatcttaatccctccagtaactttgaaagcatgtcactcgggagcttcagcagtagcagtgcgttggaccgggacctcgactttaattttgaacccggaagcggctctcattttgagttccccgactattgcactccggaagtctccgagatgattagtggcgactggctagagtcaagtattagtaacttggtttttacctactag

SEQ ID NO: 30986 - DNA, 3318 bp, synthetic construct
  misc_feature 1..3318: note = Description of Artificial Sequence: Synthetic coding sequence
  source 1..3318: mol_type = other DNA
atgttggagcctagttcggttcttcacgccaatgtcaatcaggcgccactgtggtgccttgtccttcggtggtgccgtgagtgcaaagacactgtgtgcggaggaaaacagaagagccgcgtgaaccacaccttccagcgccgagaaatcgaagccaaggaagcctgcgactggttgcgagcagcaggctttcctcagtatgcccaactctacgaggattcacagttccccatcaatatcgtagccgttaagaacgatcacgacttcttagagaaagacctggtggaaccattatgtagaaggctaaacaccctgaacaaatgtgctagcatgaagctcgatgtgaattttcagcggaagaaaggagacgattcagacgaggaggacttgtgcatttcaaacaaatggacctttcaacggacctcaagacgatggtcccgcgtggatgacctgtatacccttcttccccgaggagacaggaatggcagccctggaggcacagggatgaggaataccacaagctccgaatcagtcctcacggatctgagcgaacctgaggtttgttctatccactcggagagctcaggtggcagcgacagccgcagtcagcctgggcagtgctgcaccgataatccagtaatgttagacgccccacttgtaagtagcagcctgcctcagccccctcgagacgttttgaaccaccctttccaccctaaaaacgagaaacccacgcgcgcacgtgcaaaatcattcctgaagcggatggagacactgagggggaagggtgcccatggacgacataagggcagtgggaggaccggtgggctggttatcagtgggcctatgcttcagcaggagccagaaagcttcaaagccatgcagtgcatccagatccctaacggcgatcttcaaaactcccctccccctgcctgccggaagggccttccatgttctgggaagtcctccggagaatcatcgccgtcagagcattcctcgtccggagtgtcaacaccctgtctcaaagaacgaaaatgtcatgaggctaataagcggggaggcatgtacctagaagatctggatgttctggctgggaccgctctgccggacgccggtgatcagagtcgcatgcatgagttccactcacaggagaatcttgtggttcatataccaaaagaccacaagcccggaacgtttccaaaggccctttctatagagtcattgagcccaacagattcaagcaacggtgttaactggcggacaggctccataagcctcgggagggaacaagtgcctggggctagggagcctagattgatggcttcctgccatcgagcctctagggtgtcaatctatgataacgtgcctggcagtcacctgtacgcttcaacaggcgacctccttgacctggagaaggatgatttattcccacacctggacgacattctgcagcacgtgaacgggctccaggaggtagtggacgactggagcaaagacgtgttaccagaacttcagacgcatgacacccttgtcggcgagcctggtctttcaacgttcccttcccctaatcaaataacgctggactttgaaggtaacagcgtcagcgagggtaggactaccccaagcgacgttgagcgcgatgtcacctctttgaacgagagtgaaccaccgggtgtgcgtgatcgcagagattccggggtgggcgcatcgctgacaaggcccaatcgacgcttaaggtggaacagctttcagctctcccatcagcccagacctgccccagcatcacctcacattagcagccagaccgcctctcagctgtccttgctgcagcgctttagcctcctccggttgacagcaatcatggagaaacattcaatgtcaaacaaacacggctggacttggtctgtccccaaatttatgaagagaatgaaggtgcccgattataaagataaggcagtgttcggtgtgcccttgatcgtgcacgtccagcgcacaggtcagccgttacctcaatcaattcagcaagccctgcggtatctcagatccaattgtctggatcaggtgggattatttcgaaagtcgggagtcaaaagccgaattcacgcactgcgacagatgaatgaaaattttccagaaaatgtgaattatgaggaccaatccgcttacgacgtggctgatatggttaaacagtttttcagagatctgccagaacccctttttaccaataagctgagcgagactttcctgcacatctatcaatacgtcagcaaagaacagcgacttcaagctgtgcaagccgcaatcctcctgttggcagacgagaaccgggaggtgctgcaaaccttactgtgttttttgaatgatgttgttaatctggtcgaggagaatcagatgacacccatgaatcttgctgtgtgcctggcaccatccctattccatctgaatctgctgaagaaggaaagctctccgcgtgtgatacagaaaaaatatgcgacagggaagccggatcagaaggatctaaatgaaaacctcgccgcagcccaaggacttgctcatatgattatggagtgtgaccgcctgttcgaggttccgcacgagctcgtcgctcagagtcgcaattcctatgtggaggctgagatccatgtgcccacccttgaggaactgggaacacaattggaagagtctggggctacctttcatacatacctcaaccatctgattcagggtctccagaaggaagccaaggagaagtttaaggggtgggtgacatgcagctctaccgataacactgacctggcctttaaaaaagttggtgacggtaaccccctgaagttgtggaaggcctctgtagaagtcgaggccccaccatcagtggtgcttaatcgcgtgctcagggaaagacacctgtgggacgaggatttcgtgcaatggaaggtcgtggagactctggaccgtcagacggaaatctaccaatacgtgctgaactctatggcgcctcacccatccagagacttcgtggtccttagaacttggaagaccgacctgcctaagggcatgtgtacgctggtaagtctgtccgtggagcacgaagaggcgcagttgctcgggggagtccgggcagtggttatggacagtcagtaccttatcgagccatgcggcagcggaaagtcgaggctgactcacatttgtcgaatcgacctgaaagggcactccccggagtggtactcgaaagggttcggacacctctgtgcggctgaggtggctagaatacgaaactcattccaacctcttatcgccgagggaccagagaccaaaatatag

SEQ ID NO: 30987 - DNA, 3342 bp, synthetic construct
  misc_feature 1..3342: note = Description of Artificial Sequence: Synthetic coding sequence
  source 1..3342: mol_type = other DNA
atgttttctcaggtgccacggacaccagccagcggatgttattacctgaattctatgactccagaaggacaggaaatgtatctccgttttgaccagacaaccaggaggagcccctaccgcatgtcccgcatcttagctcgccatcagttggtgaccaaaatccagcaggaaattgaagctaaggaggcatgtgactggctccgagccgctggctttccgcagtacgcgcaactgtacgaggatagccagttcccaattaatatagtggcggtcaagaacgatcatgacttcctcgagaaggatctggtggaaccactctgcaggcgactcaacacactcaataagtgcgcgtccatgaagttggatgtgaacttccaacgaaaaaaaggggatgattcagatgaggaagatctatgcatatccaataaatggactttccagagaacctcacgcagatggtcacgtgtggacgacctgtacaccctgctgccacgaggagacagaaacggaagcccgggagggaccgggatgaggaatacaacctcgtccgagtctgtactgacagacttaagtgagcccgaagtatgctccattcattccgagagctctggagggagtgactcacggagccagcccggacagtgttgcaccgacaaccccgtcatgctggacgctccgctcgtgagcagtagcctcccccagcctccgagagacgtgctgaatcatccgtttcaccccaagaatgagaagcctacgcgggcacgagccaagagcttcctcaagcgaatggagacactccgcggaaagggcgctcacggacgacataaaggctcaggacgcacaggcggtttagttatcagcgggcctatgttgcagcaggagccagaaagcttcaaggccatgcaatgcattcagatcccaaacggggatctgcagaactctccccctccggcatgtagaaagggccttccttgttctggaaagtccagcggggaaagttctccaagtgagcacagctcttcaggagtaagcaccccctgcctaaaggagcgcaagtgtcacgaagctaataagcggggaggcatgtacttagaggatctcgatgtcctggccggaaccgctttgcccgacgcaggcgatcagtcccgaatgcacgagttccattcccaagaaaacctggtggtacatattcctaaagatcacaaacccggtaccttccctaaggcactttccatcgagagccttagtccgactgattcctcgaatggggttaattggaggactggtagtatctctcttggcagagagcaggtgccaggggctagagagcctaggctcatggcaagttgtcatagagcttcccgggtgtcgatttatgataatgtgcctgggtctcatttatacgcatctacgggagatcttctcgacctggagaaagacgacctgttcccccacttagacgacatcctgcagcacgtgaacggtctccaggaagtggtagacgactggagcaaagatgtcttgcctgagcttcaaacacatgacaccctggtaggagaaccgggactttctaccttcccttccccaaatcagattactttggactttgagggcaacagcgtgtccgagggcagaaccacgcctagcgacgtggagcgcgacgtcacttccttaaatgaaagcgaacctcctggcgttcgcgataggcgtgatagtggtgtaggggcttccttgacgagacccaacagacgcctccgttggaattcgtttcagctgagtcaccagccgcgacctgccccagcgagtccccacatctcaagtcaaacagcttcccaactgtcgttactgcagagattttcattactccgcctgacagcaatcatggagaagcactcaatgtctaacaaacatggctggacctggtcagttcccaagttcatgaaacgcatgaaggttcctgactataaagataaggcagtgtttggcgtgccactgattgtgcatgtgcagcgtaccggccagccattgccccaatccatccagcaggccctgagatacctgcgcagcaactgcctcgaccaggtcgggctcttccgcaagtcaggggtcaagtcgcgaatccatgcccttagacaaatgaatgagaatttcccggagaacgtgaactacgaagaccaatcagcatacgatgtggcagacatggtgaaacagttcttcagggatctccctgagcctctgttcaccaacaagctcagcgagacatttctgcacatctatcagtacgtttctaaggaacagcgacttcaagcagtgcaggccgcaattctgctgttagccgacgagaaccgcgaagtgctgcagactctgttatgctttctgaatgacgttgttaacctggtggaggagaaccagatgacaccgatgaacttggctgtgtgtctggctcctagtctcttccatttaaacctgcttaaaaaagaatccagccctcgggtaattcaaaaaaagtacgcgacaggtaaacctgatcagaaagacctcaacgagaaccttgctgcagcccaaggcttggcccatatgataatggagtgtgataggctctttgaggtaccgcacgagctcgttgcccagagtcgtaattcctatgtggaggctgagattcatgtgccaaccttagaggaactcggaactcagctagaggagtctggggctacttttcatacctacctgaaccacctcattcagggactgcagaaggaagccaaggagaaattcaagggttgggtcacctgcagctccacagacaacacagacctagcttttaagaaagtaggggatggcaaccctctgaagctctggaaagctagtgtggaagtagaggcccctccttctgtggtcctgaacagagtcctgcgggaacgccacctctgggatgaggatttcgtgcagtggaaggtggtagagacactagataggcagaccgagatttaccagtacgtgctgaatagtatggcccctcatcccagtcgtgacttcgtggtgctccggacgtggaaaaccgacttgccaaagggaatgtgcacgttagtttccttgtctgtcgagcacgaagaagcgcagctccttgggggagtgcgtgccgttgtcatggattcccaataccttatcgagccttgcggcagcggaaaatcacgtcttactcacatttgccgtattgatctcaaaggacatagcccagagtggtattccaaaggctttggtcatctctgcgccgctgaggtggctcgtattcgaaactcctttcagcccctgatagctgagggacccgagacgaagatctag

SEQ ID NO: 30988 - DNA, 2064 bp, synthetic construct
  misc_feature 1..2064: note = Description of Artificial Sequence: Synthetic coding sequence
  source 1..2064: mol_type = other DNA
atgcttgaaccgagcagcgttctacacgccaatgtaaatcaggcccctttatggtgtttagtgttgcggtggtgtcgcgagtgtaaagacaccgtctgtggaggcaaacagaagtccagggtcaaccacacattccagaggcgcgaaattgaggcaaaggaggcctgtgactggttgagagctgctggctttcctcaatatgcgcagctctatgaggacagccagtttcccattaatatcgtggccgttaagaatgaccacgacttcctcgagaaagacctcgtggaacctctgtgccggcgactaaatactctgaataagtgcgcttccatgaagcttgacgttaattttcaacgaaagaagggtgacgactccgatgaggaggacctctgcataagcaataagtggacctttcagagaacaagtcgcaggtggagccgggtggatgatctatacaccctcctacctcgcggagaccgcaacggttctcctggaggcacaggtatgagaaacacaacaagtagcgaatccgtgctgactgacttgagtgagcccgaagtttgctcgatccactcggaatcctctggtggcagcgactctcgcagccagccaggtcagtgttgcactgacaacccagtgatgctcgatgcacccctcgtgagcagctccttgccccagcccccacgcgacgttttaaaccatcctttccatcctaaaaacgagaaacctacacgtgcccgagctaagtcttttttgaaaaggatggagacattgcgcggaaagggtgctcacggcagacataaaggttccggtagaacaggcggactggtgataagtgggccaatgctgcaacaagagccagagagctttaaagccatgcagtgtatacagatccccaatggagacttgcagaacagtcctcctccggcttgcaggaagggcctgccctgctctgggaagtccagcggcgaaagtagcccatccgaacattcttcaagtggcgtgagtaccccttgtctgaaagagcgaaagtgtcacgaggccaacaagcggggaggcatgtacctcgaagatctggatgtcctggccggaacggcgctgccagatgctggcgaccagagcaggatgcacgagtttcattcacaggaaaacctcgtcgtgcacatccccaaggaccacaaaccgggtacattccctaaggcactgagcattgaatccctctccccaaccgattctagtaatggagttaattggcggacagggagcatttccctgggtcgcgaacaagtacctggtgctcgcgaaccaagattgatggcatcatgccatcgggctagtagagtgtccatatatgataacgttcctggctcccacctgtacgcctctaccggggatcttctggacctcgagaaagacgatttattcccgcaccttgatgatatattgcagcacgtgaacggcttgcaggaagttgtggacgattggtcaaaggacgtgttgcccgagctccagacacatgacaccctggttggcgaacctggactgtctacctttccctctccaaatcagattaccctggattttgaggggaatagcgttagcgagggtcgcacaacaccttccgacgtggaacgcgacgtaactagccttaacgagtccgagcccccaggcgtgagggaccgtcgagattctggcgtgggggcaagtttgactcgccctaacaggcggctgcggtggaactcttttcagttatctcatcagcctcggcctgctcctgcctcccctcacatttcctcacaaactgcctcacagctgtctcttcttcagcgttttagtcttctgaggttaaccgccattatggagaagcactcaatgtccaataagcatggctggacctggtcagtgcccaaattcatgaaacgaatgaaggtgccagactacaaggataaagctgtgtttggggtcccactgattgttcacgtgcagagaacaggccagccacttcctcaatccattcaacaggctttacgctacctgcgatctaactgtttagaccaggaatag

SEQ ID NO: 30989 - DNA, 2988 bp, synthetic construct
  misc_feature 1..2988: note = Description of Artificial Sequence: Synthetic coding sequence
  source 1..2988: mol_type = other DNA
atgaagttggatgtgaacttccaacgtaaaaagggcgatgatagcgatgaagaagatctgtgtatatccaacaagtggactttccagcgaacgagcaggcgctggtcacgtgtggatgacttgtataccctgctgccaaggggggatcggaacggttcacccggtggaacagggatgagaaataccacctcgtccgagagcgttctcacggacctgtcagaaccagaagtgtgttccatccactctgagagctcaggtgggtccgactcaaggagccagcccggacaatgttgcaccgacaatcctgtaatgctggacgccccactggtctcttcctcgttgccccagccacccagagacgtcctcaaccatcctttccaccccaagaatgagaagcccacccgtgcccgagcgaaaagctttctgaagagaatggagaccctgcgaggtaaaggcgctcacggccgacacaagggtagcggtcgcaccgggggacttgttattagtgggcctatgctccagcaggaaccggaaagcttcaaggcgatgcaatgcatacagatcccaaacggggacctccagaactctccaccacccgcttgtcggaaggggctgccgtgtagcggaaaatcttctggagagagttctccaagtgaacattcaagttcgggcgtctcaacaccatgtttaaaggaaaggaaatgccacgaagccaacaagagagggggtatgtacttggaagacctggacgtgctggcaggcacggctctgccagacgcaggcgaccagtcgcgcatgcacgagtttcactcccaggagaacctggtcgtgcacataccaaaagatcataaacccggaaccttcccaaaagctctgagcattgagtcattgtccccaactgattccagtaacggcgttaactggagaacggggagtatctcgcttggcagagagcaagtacccggagcccgagaaccaagactgatggcctcatgccatagggcaagcagagtatcgatttatgacaacgtgcccggaagtcacctctacgcatctactggagatctgctggacctcgagaaagatgacctgttcccccaccttgacgacatcctccagcacgtcaatggactgcaggaggtggtagacgattggagcaaagatgtcctccccgagctgcagacacatgacacattagtgggagaacctggcctctctactttcccaagtccaaatcagatcacgcttgatttcgagggaaatagcgtctcagaagggagaaccaccccttctgatgttgagcgtgacgtcacctcactgaacgagagcgaaccacctggagtgcgggatcggagggatagcggagtgggcgcaagcctgacccgacctaatcggaggctcaggtggaactcattccaacttagccatcagccccgaccagctccagcctctcctcatatctctagccaaaccgcctcacagctctccctactgcagcgattctctctgctcaggttgacggccattatggaaaagcattctatgagcaacaagcacggatggacttggtctgttcccaaatttatgaaacggatgaaggtccctgactacaaggacaaggcggtttttggggttccgcttatcgtccacgtccaaagaacgggacaaccccttcctcagtctattcagcaggcactgaggtacctacgctctaattgtctggaccaggtgggtctcttcaggaagtccggagtcaaaagccgtatccacgctcttaggcagatgaacgagaactttccagaaaatgtgaattatgaggatcagtcagcatacgatgtcgccgacatggtgaaacagtttttcagggacctacctgagccactgtttactaacaaactgagtgaaacattcctccatatttatcagtacgtttcaaaggagcaacggttgcaggctgtgcaggcagccatcctgttactggccgatgagaacagagaagtgctgcagaccctcctgtgctttcttaacgatgtagtaaacctcgtggaggaaaatcaaatgactccaatgaatctcgcagtttgtctggccccatctttgtttcatctgaatctcttaaagaaagagtcttcccctcgggtcatccagaaaaaatacgccactggtaagccagatcagaaggacctcaacgaaaacctagctgctgctcagggcctggcccacatgatcatggagtgtgatagactctttgaagtgccccacgagttggtggcccagtccagaaacagttacgtggaggctgagatacacgtgcctactctagaggagctcggaacacagctggaggaaagtggggcaacctttcacacatatttaaatcacttaatacaaggacttcaaaaagaagccaaagaaaagttcaagggctgggtgacttgcagctctaccgacaataccgatctggcctttaagaaggtgggagacgggaaccccctcaaactctggaaggcttctgttgaggtggaggccccaccttccgtcgtattgaaccgcgtcctgcgcgagagacacctatgggatgaagatttcgtccagtggaaggtcgtggagaccctcgatcgtcagaccgagatctatcagtacgtcctaaattcaatggctcctcatcctagccgagatttcgtagtgctacgaacctggaagaccgatctcccaaagggaatgtgcacactggtgtctctgtctgttgaacacgaggaagcacagctactcggaggggtgagggcagttgtgatggatagtcaatacttgatcgagccttgcggaagcgggaagtcaagattgactcatatctgccgaatagacctgaaggggcattcgccagaatggtattccaagggcttcggccacctctgtgcagccgaggtcgcccgtatcaggaactctttccagccactgatcgctgagggacccgagaccaaaatctag

SEQ ID NO: 30990 - DNA, 450 bp, synthetic construct
  misc_feature 1..450: note = Description of Artificial Sequence: Synthetic coding sequence
  source 1..450: mol_type = other DNA
atggctagctccgacatccaggtgaaagagctggaaaaaagggccagcggccaggctttcgagttgattttgtccccacgctctaaggagtctgtgcccgagttcccactgagcccgcctaaaaagaaggacctttcactcgaagagatccagaagaaactggaggctgcagaagaaagaagaaagtcccacgaggccgaagttttgaaacagcttgccgaaaaaagagaacatgagaaagaggtactccaaaaagctattgaagagaataacaatttctcgaagatggccgaggagaaacttacccacaagatggaagctaataaagagaatcgagaggctcaaatggcggcaaaattagagagactgagggaaaaggacaaacacattgaggaggtccggaaaaacaaagaaagtaaagatccggctgacgagacggaagctgactag

SEQ ID NO: 30991 - DNA, 450 bp, synthetic construct
  misc_feature 1..450: note = Description of Artificial Sequence: Synthetic coding sequence
  source 1..450: mol_type = other DNA
atggctagttcagatatccaggttaaagagctcgaaaagcgggctagtggacaggcctttgagctcattctctcacctcgctctaaggaatcagtcccggagttccctctgagccctccgaagaaaaaagatctgagtcttgaggagatccagaagaaactggaggcagctgaggagcggcgaaagagccatgaggcggaggtgctgaaacagctggctgaaaaaagggagcacgagaaagaggttctccaaaaagccattgaggaaaacaacaatttcagtaaaatggccgaggagaagctgacacacaagatggaagcgaataaagaaaaccgggaggcccagatggccgctaaattggagaggctccgcgagaaggataaacatatcgaagaagtccggaaaaataaggagagtaaagaccccgctgacgaaacagaggccgattag

SEQ ID NO: 30992 - DNA, 450 bp, synthetic construct
  misc_feature 1..450: note = Description of Artificial Sequence: Synthetic coding sequence
  source 1..450: mol_type = other DNA
atggcctcttcagatattcaggttaaagagcttgagaaacgcgcatcaggtcaggccttcgagctaatcctctccccacgcagcaaagagtctgtgcctgagttcccactcagcccaccgaaaaaaaaggatctttctttagaagagatccagaagaagctagaagcagccgaggagcgcaggaaatcacacgaggccgaggtcctgaagcaacttgcagagaaaagagaacacgaaaaagaagtgcttcagaaggccatcgaggagaataacaactttagcaaaatggcagaagaaaagctgacacataaaatggaggccaataaggaaaaccgtgaggctcagatggcggcaaagctggagaggctgcgagagaaggataaacacattgaggaagttaggaagaacaaggaatctaaggatccagctgatgaaacagaggccgactag

SEQ ID NO: 30993 - DNA, 525 bp, synthetic construct
  misc_feature 1..525: note = Description of Artificial Sequence: Synthetic coding sequence
  source 1..525: mol_type = other DNA
atggctagcagcgatatccaggtcaaggagctggagaagagagcctccggccaggctttcgagctgattctatcccccagaagtaaggaatctgtccccgaattccctctgtctcctcccaagaaaaaagacctttcactggaggagattcaaaaaaagctcgaggctgccgaggaaagacggaagtctcacgaggccgaggttctgaaacagctagccgaaaaacgtgagcacgagaaagaagtcttgcagaaggccatagaggagaataacaatttctctaagatggctgaagaaaagctgactcataaaatggaagccaacaaggagaatcgagaggcacagatggcggctaagctcgaaagactacgagagaagatgtacttctggacgcacggtcccggtgcccaccctgctcaaatttccgcagagcagagttgcctgcacagcgtcccagcgctgtgtcctgccctaggacttcagagcgcccttatcacatggtcagacctcagccatcatcactag

SEQ ID NO: 30994 - DNA, 261 bp, synthetic construct
  misc_feature 1..261: note = Description of Artificial Sequence: Synthetic coding sequence
  source 1..261: mol_type = other DNA
atggctagctctgatatacaagtgaaggagctcgagaaaagagcaagcggacaggcgttcgaactgatactgtccccacgatctaaggaatccgtgcccgagtttcccctctcccctccaaagaagaaagacttgagtttggaggagatacagaagaagctcgaggcagccgaagaaaggaggaaatctcatgaggcagaggtgctgaagcaactggctgagaaacgggagcacgagaaagaagttctgcaaaaggcctag

SEQ ID NO: 30995 - DNA, 450 bp, synthetic construct
  misc_feature 1..450: note = Description of Artificial Sequence: Synthetic coding sequence
  source 1..450: mol_type = other DNA
atggccagctctgacatccaagtgaaggagctcgagaaaagggccagcggccaggccttcgagttaatcctgtctccacgatctaaggaaagtgtgccagaattcccactgagccccccaaagaaaaaggatctgagcttggaagaaatccagaagaaactggaggctgctgaagagcgccgtaaaagtcatgaagccgaagtgctgaaacagctggcagagaagagagaacatgagaaagaggtgttacagaaggccattgaagagaataacaactttagcaaaatggccgaggagaaattaacacacaagatggaagccaacaaggaaaatagggaagcccagatggctgccaagctggagcgcttgcgcgagaaggacaaacatatagaagaggtccgcaaaaataaagagagtaaagatcctgcggacgaaaccgaggccgactag

SEQ ID NO: 30996 - DNA, 3615 bp, synthetic construct
  misc_feature 1..3615: note = Description of Artificial Sequence: Synthetic coding sequence
  source 1..3615: mol_type = other DNA
atgtcctttttcaattttcgtaagatctttaagctgggatcagagaagaaaaagaagcagtacgagcacgttaaacgcgacctgaacccggaggatttttgggaaatcatcggcgagctgggagatggtgccttcggtaaggtttataaggctcagaacaaggaaactagcgtcctggctgccgcaaaagtgatcgataccaagtccgaggaggagcttgaggattacatggtagagattgatatcctggcttcttgcgaccatcccaatatagtaaagctcctagacgctttctactacgaaaataatctctggatcttaatcgaattctgcgctgggggagctgtcgacgctgtgatgctggagctggaacgccctcttacagaatcccagatccaggtcgtatgcaagcagacgttagatgcgctgaattatctgcacgacaataaaataattcacagagacctgaaggccggaaatatacttttcacactggacggcgacataaaactcgcggattttggagtctctgcaaagaacacccgcaccatccagcgtcgcgattcctttatcggaaccccctattggatggcacccgaggtcgtgatgtgtgagactagtaaagatcgaccctacgactacaaggcagatgtctggagtttaggtataaccctgattgagatggctgaaattgaaccaccacaccatgaattaaatccgatgcgggttcttctgaaaattgcaaaaagtgaacctccaaccttagctcaacccagcaggtggtcttcaaatttcaaggactttctcaaaaagtgcctcgaaaaaaacgtcgacgccaggtggactacgtcacagcttctccagcatccttttgtcacagtggattccaacaagccaatccgggaactgattgcagaagctaaagccgaggtaactgaagaggtcgaggatggaaaggaagaggacgaggaagaagaaacagagaactcgcttcccatcccagctagcaaaagagcgtcctctgatctgtccatcgcttcgtctgaggaagataagctgtcacagaacgcctgcattctagagagtgtgtcagaaaagactgaacgtagcaacagtgaagataaattaaattcaaaaattctgaatgagaagccaacaactgacgagcctgaaaaggccgtcgaggatattaatgagcacattacagacgcacagttagaggccatgactgagctccatgaccgtactgccgtgattaaggagaacgagcgcgaaaaaaggcctaagcttgagaacctgcctgacaccgaggaccaagagaccgttgacatcaactccgtgagtgagggaaaggagaacaacatcatgatcacgctggagacaaacatcgaacataacctgaaaagcgaagaggagaaggaccaggaaaagcagcagatgttcgagaataagcttataaagagcgaagagatcaaagatacaattctacagacagttgatctagtgtctcaagagaccggcgagaaggaagccaatattcaggctgtcgactcggaggtagggctaactaaggaagacacacaggagaaactgggggaagatgacaagactcaaaaggacgtcatttcaaacacaagcgatgtaatcggaacttgtgaggccgcagatgtggctcaaaaggtggacgaagattcagcagaggacactcaatccaacgatgggaaagaagttgtggaagttggccaaaagctgattaacaaacccatggttggccctgaagcaggaggaaccaaagaggtacctattaaagaaattgtggagatgaatgaaattgaagaggggaagaacaaggagcaggccattaacagctccgaaaacattatggatatcaacgaggagccaggaactaccgagggcgaggaaattactgaatccagcagtaccgaagagatggaggtgagatcggttgtggcagacactgatcaaaaagcactcggatccgaagttcaagacgcctcaaaggttactacccagatagataaggaaaaaaaggaaatccccgtcagcatcaagaaggagcctgaggttactgttgtttcacagcccaccgagccccagccggtgctgattccctctataaatatcaatagtgacagtggagagaataaggaggaaatcggctcactttcgaagactgagaccattttgcctccggagagcgagaacccaaaagagaatgataacgattccggcactggctcaacagctgataccagctctatcgatctaaatcttagcatctctagttttctgtccaagacaaaagactctggttctatcagcctccaagagactcggcgacagaagaaaaccttaaagaagactaggaaatttatcgtggacggggtggaggtcagcgttacgaccagcaaaatcgtcacggacagtgatagtaagaccgaagaattgcgcttcctacgacgccaggaacttcgcgagctccgattccttcagaaagaggaacagagagcacaacaacagttaaactctaaattgcagcagcagcgcgaacagatttttcgccgttttgagcaggagatgatgagcaagaagagacagtacgaccaggagattgaaaatctagagaagcagcaaaaacagacaatcgagaggctggagcaggagcatactaacagattaagagacgaagctaaaagaatcaaaggagaacaggagaaggaactaagcaagtttcagaatatgttgaagaaccggaagaaagaagagcaagagttcgttcagaaacagcagcaagaactggacggatccctgaaaaaaatcattcagcagcagaaagctgaactggccaatatcgagagggaatgtctcaacaataaacagcaactgatgagggccagagaggccgctatttgggagctcgaggaaagacacctccaggaaaaacaccaactcctgaagcagcagttgaaggaccagtacttcatgcagagacatcagcttttgaagaggcatgaaaaggagacagagcagatgcagcgttataatcagagattgatcgaagaactgaagaatcggcagactcaagagagggcgaggctgcccaaaattcaaaggtctgaggctaagacccggatggcaatgttcaagaagtcccttaggattaattcaactgctacaccagaccaggatcgggacaagataaagcagtttgcggctcaggaggaaaaaaggcaaaagaatgaacgaatggcacagcatcaaaagcatgaaaaccagatgagagatctgcaactgcaatgcgaggcgaacgtcagggagttacaccagcttcagaatgaaaaatgtcacctgctggtcgaacacgaaacccagaagctcaaagaactggatgaagagcattcacaggagctcaaggaatggagggaaaagctccggccaaggaagaaaacactggaagaggaattcgcccgaaagctgcaggagcaggaagtgtttttcaaaatgaccggagagtccgagtgtttgaatccatcaacccagtccaggataagtaagttttatcccatcccttccctccactctacgggctcttag

SEQ ID NO: 30997 - DNA, 3708 bp, synthetic construct
  misc_feature 1..3708: note = Description of Artificial Sequence: Synthetic coding sequence
  source 1..3708: mol_type = other DNA
atgagcttttttaactttcgcaaaatcttcaaactggggtctgagaaaaagaagaagcagtacgagcatgtgaaacgggacctcaatcctgaggatttctgggagatcatcggcgaactgggcgatggagcgtttggcaaggtatacaaggcccagaacaaggaaacaagcgtgctcgccgcagccaaagtgatcgataccaaaagcgaggaggaactcgaggattatatggttgagatagatatcctagcctcctgcgaccacccaaacatcgtgaagctgctggatgctttctactacgaaaataacctctggatattaatcgagttctgcgccggaggcgctgttgacgctgtgatgctggagctcgaaaggcccctcacggagagtcagatccaagtggtgtgcaagcagacccttgacgctcttaattatctgcatgataacaaaatcattcatcgcgacctgaaggccggaaacattctctttaccctggacggcgatatcaaactggccgactttggggtgtccgctaaaaatacccggaccattcagcgcagggacagttttatagggaccccgtattggatggctcccgaggttgtgatgtgcgaaacatcaaaagaccgcccttacgactacaaggccgatgtgtggtctctgggaattacactcatcgaaatggccgaaattgagccgccacatcatgaacttaatcctatgcgcgttctactcaagatcgccaagagcgaaccccctacccttgcacagcccagccgctggagctccaatttcaaggactttctcaaaaaatgtctcgaaaagaacgtggacgctcgctggaccacgtctcagctgctccaacacccctttgtaacagtggactccaataagcctattagagagttaattgccgaggctaaggctgaggtcaccgaggaagtggaggatggcaaggaggaggacgaggaggaggagaccgaaaattcactgccaatccctgcttctaaaagagcctcttccgatctgtctatcgcctccagcgaagaagataagttgtcccagaacgcctgtatcctggagtcggtgtctgagaaaactgagcggagtaattctgaggataaacttaatagcaagattctcaatgaaaaacccacgacagatgagcccgaaaaagcagtcgaggacattaatgaacacattactgatgctcagctcgaggctatgacagagctgcacgacagaaccgcagtgatcaaagaaaatgaaagggagaaacgcccaaaattggaaaatttgccggacacggaggaccaggagaccgtagacatcaacagtgtcagcgagggcaaggaaaacaacattatgatcactttggaaaccaatatcgaacataacctcaagtctgaggaggagaaggaccaggagaaacagcagatgttcgaaaataagctcatcaagtccgaggagattaaagacaccatcctacagactgtcgaccttgtgtctcaggagacaggcgaaaaggaagctaacatccaagccgtcgactctgaggtcgggcttacaaaagaggacacacaggaaaagctcggtgaggacgataagacccagaaggatgtgataagtaacacctctgacgtgattggaacttgcgaagcagcagacgttgctcagaaggtagatgaagacagcgccgaagacacccagagcaacgatggcaaggaggtagtggaggtcggccaaaagctgatcaacaagccaatggtgggccctgaggcagggggaactaaagaggttcctattaaggagattgttgaaatgaacgagatcgaggagggtaagaataaagagcaggcaatcaattcgtccgaaaacatcatggatatcaacgaggaacccggtacaactgagggcgaagaaatcacggagagttcatctaccgaggaaatggaggttagatcggtggtggccgacactgatcagaaagccctgggttccgaggtgcaagatgcctctaaagttacaactcagatcgacaaggaaaaaaaagagatccccgtctcgataaagaaggaacccgaggtcacagtggtttcccagccaaccgaaccacagcccgtgcttattcccagcattaacataaacagtgattcaggcgagaacaaggaggagattggaagcctgtccaaaaccgagactattctgccacccgaatctgagaaccccaaggagaacgataacgactcagggactggatctaccgctgacacatccagtattgatctaaatctcagcatttccagcttcctatcaaagaccaaagacagcgggtctatttccctgcaagagacccgaaggcagaaaaagaccctcaagaaaacacggaaattcattgttgacggagtcgaggtgagcgttaccacatccaagatcgttaccgatagtgactcaaaaaccgaggagctcagattcctccgtaggcaggaattgcgcgaactccggtttttgcagaaagaggagcaaagggcccagcagcagctaaactcaaagctgcagcagcagcgcgaacagattttccggcgtttcgagcaggagatgatgagtaaaaaacgccagtacgaccaggaaatcgaaaacctcgaaaagcagcaaaagcaaactatcgaaagattggaacaggaacacactaatcgcctccgggacgaggctaagagaatcaagggcgaacaggaaaaggagctgagcaaattccaaaatatgctgaaaaaccgtaaaaaggaggtgattaatgaagtggaaaaggcccctaaagaacttcgcaaggagcttatgaaaaggaggaaggaggagctggcacagagccagcacgcccaggaacaggagtttgttcaaaagcagcagcaggagcttgacggtagcctgaagaaaatcatccagcagcagaaggcggagctggcgaatatcgaacgtgaatgtttgaataacaagcagcagctcatgcgagcccgtgaagctgctatttgggaactcgaagaacgacacttgcaggaaaagcaccagttgctcaaacaacagttgaaagaccagtacttcatgcagagacaccaactattgaagaggcatgagaaggaaacagagcagatgcaaaggtacaaccaacgtctgattgaggagcttaagaacaggcagacacaggagagagcccgtctgcctaaaatccagaggtcggaagcaaagactagaatggccatgtttaaaaagtcactacgcatcaatagcactgccacgcctgatcaggatcgggataagatcaaacagtttgccgctcaggaagaaaaaagacagaagaatgagagaatggcgcagcatcaaaagcatgagaaccagatgagggatctgcagttacagtgtgaggccaacgttcgagagctgcatcaactgcagaatgagaaatgccatctgctcgttgagcacgagacacagaagctgaaagaactggatgaagagcactctcaggagctcaaagagtggcgtgaaaagcttcgtcctcggaaaaaaacgctggaagaggaatttgctaggaagctgcaagagcaggaagttttctttaagatgaccggcgagtctgagtgcctcaatccatcaacacagtcacgcattagtaaattttaccccattcctagcctgcattccacagggtcctag

SEQ ID NO: 30998 - DNA, 3444 bp, synthetic construct
  misc_feature 1..3444: note = Description of Artificial Sequence: Synthetic coding sequence
  source 1..3444: mol_type = other DNA
atggatgaacctccctttagcgaggccgcactcgagcaggccctcggagaaccctgcgatctagacgccgctttgctgactgacatcgaagacatgctgcaactgatcaacaaccaggactcggatttccccggtttgttcgaccctccatacgcgggaagcggagccggagggaccgatccagcttcccctgacacgagtagtcctggcagtctgagtcctcctccagccacactcagcagttcgcttgaggcgtttttgagcggacctcaggctgcccctagtcccctcagcccaccacagcctgccccaacacccctgaagatgtacccttcaatgccagccttctctccgggaccgggaatcaaagaggaatcagtgcccctttctattcttcagacgcccactccccaaccactgccgggtgctctgcttcctcagagctttccagctcctgcaccaccacagttttctagcacacctgtgctggggtaccccagtccccctggaggattcagtacaggatctccgccagggaatacgcaacagccactgcctggcttgccactggcgagtcccccaggagttccccctgtttcactacacacccaggtccaaagtgtggttccacagcaactgctgaccgtgactgccgctcctaccgccgcacctgtgacaacaaccgttaccagtcagattcagcaggtgcccgtgttgcttcaaccccattttattaaagctgatagtctgctgctgactgccatgaaaacggatggggctacagtgaaggcagcaggcttgtctcccctcgtttcagggaccaccgtccagacgggcccactgcctacactcgtgtctgggggtacaatcttggccacagttcccttagtcgttgacgccgaaaagcttcctatcaatcggttggctgccggatccaaggcccctgcttctgcccagagccgaggcgaaaaacggaccgctcataatgcaatagagaagcgatacaggtcgtctattaatgacaaaataatcgaacttaaagacctggtcgtgggtacagaagctaagttgaacaaatcagccgtgctacgcaaagccatcgattatatcaggttcctacaacactcaaaccaaaaactaaagcaggaaaacctgtctttgcgaacggcagtgcataaatcgaaatcgcttaaggacctggtgtcggcgtgcggctccggagggaacaccgatgttctgatggaaggcgttaaaaccgaagtcgaggacacactgacaccaccaccatccgatgcagggtcccctttccagtccagccccctgtcccttggcagccgagggtcaggcagcgggggttccgggagcgactctgaacccgacagtcctgtgtttgaggactcgaaagctaagcctgagcagagacctagcctgcattccagaggtatgctggataggagccgactagcactatgtactcttgttttcttatgtttatcctgtaatcctttggcctcacttttgggtgcgaggggcctgccttctcctagtgacaccaccagcgtctatcattctcctgggaggaatgttcttggaacggaaagtagagacggaccaggctgggcacagtggctcctgcctccagttgtgtggcttctgaacggtctcctggttctagtcagtctggttttgctgtttgtgtacggggaacctgtgacacgccctcactcgggtcctgctgtttatttttggcggcaccgcaagcaggcagacctggacctggccaggggagattttgcacaggcagcccagcagctgtggctagccctgcgtgcactgggaaggcccctgccaacctcacacctcgatttggcttgcagtctcctgtggaacctgatccgccacctccttcagcgtctctgggtgggtaggtggctggcagggagagccggtggcttacaacaggattgtgccctccgcgttgatgcgtccgcctcggcacgagatgccgctctggtctaccataagcttcatcagctgcacaccatgggtaagcatacggggggacaccttaccgctaccaacctggcactcagcgctctcaatttggcagagtgcgccggagatgcggtgagcgtggccacactggccgaaatatacgtcgcagccgctttgagggtcaagacgtcactgcctagagctctgcattttctgactcgtttcttcctttcatccgccagacaggcatgcctggcacaatcaggttcggttccccctgcaatgcaatggctgtgtcatcctgtgggacaccggttcttcgtagacggggattggagcgtgctcagcactccttgggagtccctgtattctctcgcgggtaaccccgtcgatccactggcccaagtgacgcagctgttcagggagcacctgttggagagagccctcaactgtgtaacgcaacccaacccaagccccggttctgcagacggggacaaagagttcagtgacgcacttggctacctgcagctcctgaattcctgctcagacgccgctggggctccagcatactccttcagtatcagtagctcgatggccacgacaacgggcgtcgatcctgtagctaaatggtgggcgagccttacagcggtcgtgatccattggctccgtcgcgatgaggaggcagccgagcggctgtgcccgctggtggaacacctgcccagagtgcttcaggagtccgaacgtcctctgccacgggctgctctacactccttcaaggccgctagagctctcctggggtgcgccaaggccgagagtggcccagcctccttgaccatttgtgagaaggcgagcggctacctccaggactcccttgcaacaacccctgcgagctcctctatcgataaagctgtgcagttgtttctgtgtgatctcctccttgtggtgcgtacatccctgtggcgacagcagcagcccccagcccctgcacctgccgcacagggtaccagtagtcggccacaggctagcgcccttgagctgcgaggctttcagagggatctcagcagtctgcgtaggctggcccagtcttttcggcctgccatgcggagggtgttcttgcatgaagcaactgcccgtctaatggccggtgcctcccccactcggacccatcagctgttggaccgctctctacggcgtcgggctgggcctggcggaaaaggtggggcagtggcagagctggagccacgcccaacacgcagagagcacgccgaggcactcctgctcgccagctgctacttaccgccaggcttcctgtctgcacccggacagcgggtcgggatgctggcagaggccgcacgcactctggaaaaactcggcgaccgtcggctactgcatgattgtcagcagatgttgatgaggctggggggaggtaccaccgtaaccagcagctag

SEQ ID NO: 30999 - DNA, 3216 bp, synthetic construct
  misc_feature 1..3216: note = Description of Artificial Sequence: Synthetic coding sequence
  source 1..3216: mol_type = other DNA
atggacgagccccctttctccgaagctgcactggaacaagctctgggcgaaccatgtgacctagacgcagcactgctgaccgacattgaggacatgctgcagttgattaataatcaggactctgacttcccgggtttgtttgacccaccatacgccggtagtggagcgggagggaccgaccccgcatcaccagacacgtcctctccgggaagtctgtcccctccccctgcaacactcagcagttctctggaagccttcctctccggcccacaagctgctcccagccctttgtctccacctcagcctgcccctaccccactcaaaatgtatcctagtatgcccgctttcagcccgggtcccggaataaaggaagaatccgtgcccttatcaatcctccaaaccccaaccccacaacccctgcctggagctcttttgccccagtcattccccgctcctgcacccccacagttcagctctaccccagtactgggctaccccagcccacctgggggattcagcactgggtcccctcctggcaatacacagcagcctttacctggcctgccactagccagtccacctggcgttcctcctgtgtcactacatacacaggtgcaatcagtggtgcctcaacagctcctgaccgtcacagctgcacctaccgcggcacccgtcacaacaaccgttacaagccagatccagcaggtgcccgtactgctccaaccacatttcattaaagccgatagtctgctgcttactgctatgaaaacagacggtgctaccgtaaaagctgctggacttagccccttagtctctggcacgaccgtgcagaccggacccctcccaaccctggtttctggagggaccatcttagctaccgtgcctcttgtagtcgacgcagagaagctgcctattaacagattggccgctggaagcaaagcaccagcgtcagctcagagccggggagagaagagaaccgcgcataacgccattgaaaagcgctaccgctcttccattaacgacaagattatagagctcaaggacttagtcgtcggtacagaagcaaaactcaataaatccgcggtcctgcgtaaggcaatcgattatatccgattccttcagcacagcaaccagaaactgaaacaggagaacctgagtctccggacggccgtgcataaatccaaatcgctgaaggacctggtctcagcgtgcggttcagggggtaataccgatgtcttgatggagggggtcaagactgaagtggaggacaccttaacaccaccaccttcagacgcaggtagcccgttccagtcctcccctctgagtctgggcagtaggggttctgggtctgggggttctggtagcgattccgagccagactcaccggtcttcgaagatagcaaggccaagcctgagcagcgccctagtctgcatagtcggggtatgctggatcggagtagattggccctatgcacactggtgttcttatgcctctcctgtaatccattagcatcactgctgggcgctcgagggctgccttctccttctgatacaaccagtgtctaccattctccaggtaggaacgttttgggtactgagagccgcgatggccctggctgggcccagtggttgctgccgccagtggtttggctcttgaatggtctcctcgtgctcgtgtctcttgttctcctgttcgtgtatggtgaaccagtgaccagacctcatagcggtccagctgtctacttttggcgtcatcgcaaacaggccgacctcgacctggcgaggggagacttcgcccaggcagcccaacagctgtggctggctctgcgcgcattgggaagaccacttccaacttcccacctcgatttagcctgtagcctattgtggaacctgatccgacacctgctgcagagactgtgggtgggacgatggctcgcaggacgggcagggggtcttcagcaggattgcgctctgagagttgacgcctcagcaagcgcccgtgatgctgctctggtgtatcataagcttcaccaattgcacaccatgggtaagcacacaggcggacacctcaccgccactaacttagccttgagcgcattgaaccttgccgagtgcgccggagacgctgtgagtgtcgctacgttggctgagatttatgtggccgctgctctgcgggtgaaaacaagtttgcccagggcactgcattttctgacacgttttttcctgtctagcgctcggcaggcatgtttagcgcaatccggcagcgtacctccagcaatgcagtggctttgccatcctgtcgggcaccggttctttgtagacggcgactggtcagttctgagcacaccctgggagtctctgtattctctcgcagggaaccctgtggatcctctcgctcaagtgacacagctgtttagggagcacctgcttgagagggcactgaactgtgtgactcaaccaaaccctagccctggaagcgcagatggcgataaagagttctccgacgctctgggctatcttcaactattaaattcctgctctgacgccgctggtgcgcctgcctacagtttttcgatatcctcctccatggccactactaccggcgttgaccccgtggccaagtggtgggcaagcctcacagccgtcgtgattcactggcttaggcgtgatgaggaagctgctgagcgtctgtgtcctttggttgagcatttacctcgtgtgctgcaggagtcagagcgcccacttcctagggcggctctgcacagtttcaaagcagctcgagctcttttgggctgtgcaaaagccgagtccgggcctgcaagcctgacgatttgtgaaaaggcatccggatatcttcaggacagtctggctacgactcctgcctcctctagcatcgataaagccgtccagctgtttctttgcgatcttctcctggtagtgcggacctcactctggcggcaacagcaaccccctgccccagcccctgccgcacagggaacatcctcgcgccctcaggcctcggcgttagagctcagagggttccagcgagacttgtctagtctgcggagacttgctcagtctttcagacctgcaatgcgccgtctgatggatgtgcttactagcgaaagcgcctgggctcttccgcagcacctggggaaaggttttcccagtccctctggacataaggtcccgggatggcatggtaggatggactag

SEQ ID NO: 31000 - DNA, 3534 bp, synthetic construct
  misc_feature 1..3534: note = Description of Artificial Sequence: Synthetic coding sequence
  source 1..3534: mol_type = other DNA
atggacgagccacccttctccgaggctgctctggagcaggcacttggggaaccatgtgatctcgatgctgctctgctcactgatattgagggggaggtgggagccggtcgtggacgagcaaacggactggacgctccacgagcaggagccgaccggggtgcgatggactgcacgtttgaggacatgttgcaactcattaataaccaggactcagactttcctgggctgttcgacccaccttacgcgggaagcggtgcaggaggcaccgatccagcctcgccagacacaagtagccccggtagcctgtctcctccgccagccacactgtcatccagtttggaggcttttctctctggaccccaggctgcgccaagtcccctgagtcctccccaaccagcaccgacccctctgaagatgtatcctagcatgccggcattctccccgggaccaggcataaaagaagaaagcgtgcctctctcgatcctgcaaacccctacccctcagcctcttcctggcgcactactgcctcaaagctttcccgctccagctccgcctcagttctctagtacccctgtgctgggatacccatcgccccctggcggtttttccaccggtagccctccgggtaacacgcagcagcctctgcctggcctccctcttgcctccccacctggcgtgccacctgtgagtctgcatacccaggtgcagagtgtcgttccacaacagctcctcaccgtgactgccgctccaaccgccgcacccgttactaccaccgttaccagccaaatccagcaagtacccgtcttattacagccacacttcatcaaagcagatagccttttactgaccgcaatgaagacagacggtgctaccgtgaaggcagcagggctgtctcctcttgtttctggaacaactgttcagacgggaccgctaccaaccctcgtctccggtggaacaatcctggccactgtgccattggtcgtggacgcagaaaaactgccaattaacaggctggccgcaggctctaaggccccagcttccgctcagtctagaggagagaagcggactgcacacaacgccattgagaaaaggtaccgctcctctatcaacgacaaaattatagagttgaaagatcttgttgtgggcaccgaggctaaactgaataaatctgctgtcctccgcaaggccatcgactatattcgattcctgcagcattccaaccaaaagctcaaacaggaaaacttgagcctacgcaccgcagtccataagagcaaatcactgaaggacctcgtttccgcatgcggctccgggggtaacacggatgtgctaatggaaggagtcaagactgaggtggaagatactctaacacctccgcctagcgacgccggatcccccttccagtcttctccactatccttgggttccagaggatcaggctctgggggatctggaagcgacagcgagcccgacagccctgtcttcgaggactccaaagcaaagccagagcagcgccctagtcttcacagccgaggtatgctcgatcgttctaggctggccctgtgtaccctcgtattcctctgcctgtcctgcaatccgctcgcgtccctactgggcgctagaggcctcccaagccccagtgatactaccagcgtctaccactccccgggtcgcaacgttctcggtaccgagtccagggacggccctgggtgggcacagtggctcttgccacccgtggtttggctgctgaatgggctgctggtcctggttagccttgtcctgctgttcgtgtacggagaacccgtgactcgccctcatagtggccctgcagtctacttctggagacaccggaagcaggccgacttagacctggctcgcggtgactttgctcaagctgcccagcagctgtggctggccttacgcgcactgggaaggcctcttccgacaagccacctggacctcgcctgctcactgctgtggaacttaatcagacacctactccaaagactctgggtggggaggtggctggccggacgggcaggaggcctccagcaggactgtgccttgcgcgtcgatgccagtgcttcagcacgcgacgctgcacttgtgtaccacaaactgcatcagttacacaccatggggaagcatacaggaggacaccttaccgcaacaaatcttgccctctctgctttgaatcttgccgagtgcgcgggtgatgctgtgagtgttgctacgcttgcggagatttacgtcgcagctgctcttagggtaaagactagcctgcccagagccctgcattttctgactcgcttttttctgtcctccgcgaggcaggcttgcctggcacagtcaggttctgtgccgccagcaatgcagtggctgtgccatccggtgggccaccgctttttcgtcgacggagactggtccgtgctgagtacaccctgggaaagcttgtatagcctggccggaaatcctgtcgatccacttgctcaggtgactcagctgttccgcgaacacctgcttgaaagggccctgaactgcgtcacacagccaaatccatcccctggaagcgctgacggggacaaagaattctctgatgccctgggctatctgcagttactgaacagctgctctgacgctgctggggcaccagcttactctttctccatatcatcttcgatggcaacaaccacaggggtagatccagtggctaagtggtgggcttctcttacggcagtcgtcattcattggctcaggagagatgaagaagccgcagaacggctgtgtccactcgttgagcacctcccacgggtcttgcaggagtctgagcggcctcttccacgagccgcactgcatagctttaaggccgcacgggcattactcgggtgtgcaaaagctgagtccggtccagcatccctcacaatctgtgaaaaggcctccggatatttgcaggattccctcgctaccacacctgccagctcgtctatcgataaggcggtgcagctctttctgtgcgatttactcctggttgttcgaaccagtctttggcgccagcagcagcctccagctcctgcccctgcagcgcagggaacctcttcccgccctcaggccagtgcgctcgaattgagaggatttcagagggatctgtcttcccttcgcaggctggctcagagttttagaccagccatgcgcagagtttttctgcacgaagctaccgccaggctcatggctggcgcaagtcccaccaggactcatcagttgcttgatcgaagtcttcgtcggcgtgccggtccagggggtaaagggggagcagtggcagagctcgaaccacgtccaactcgccgagaacatgccgaggctctccttctcgcttcctgttatctgccgccaggctttttgtccgcccctggtcagcgagttgggatgctggccgaggcagcccgtactttggaaaagttgggagaccgcaggctcctccatgactgtcagcagatgctgatgcggctcgggggaggaaccacagtaacctcatcctag

SEQ ID NO: 31001 - DNA, 3468 bp, synthetic construct
  misc_feature 1..3468: note = Description of Artificial Sequence: Synthetic coding sequence
  source 1..3468: mol_type = other DNA
tagaagattcgaagagcacttaccggagaagtgggcgctggaaggggtagagctaatgggcttgatgccccacgggcaggggctgaccggggagctatggattgcacattcgaagacatgttgcagctgattaataaccaggactctgattttccgggactctttgatcctccctatgcaggaagtggcgcagggggtacagatcctgcaagtcccgacacttcctcacctggctcgctttcccctccacccgcaaccctgagttcctctctggaagcattcctgagtggacctcaggcggcacctagccctctatcaccgccacagccggctccaacgcctctgaagatgtatccaagcatgcccgctttctctcctggaccaggcatcaaggaggagtctgtgccattatccattttacagacgccaactcctcagcctcttcctggtgccctgttgccccagagctttccagcccctgctccaccgcagtttagttccacgcccgtgctcggataccctagcccacccggaggctttagcacaggatcaccacctggtaacacacagcagccattgcccggtcttcccctggccagtccgccaggagtgccacccgtgtcccttcacacacaggtgcagtccgtcgtcccacagcaactcttaactgtcactgccgcaccaaccgcagctcctgtaactaccacagtcacgtcacagatacagcaggtgcctgtgctgttgcagcctcattttataaaagccgatagtctccttttgactgccatgaaaacggacggcgctaccgtgaaagctgccggtctttccccgttggtgagcgggaccactgtgcaaactggtcccctaccaactctagtctccgggggtactattcttgcaaccgtgcctctggtggtggatgccgagaaattgccaattaataggttagcggcaggctctaaagcccctgcgtcagcacagtcccggggagagaaacggactgctcacaacgctattgaaaagaggtaccgctcatcgatcaatgacaaaatcatagaactgaaggacttggtggtcggaacagaggctaaattaaacaagagcgctgttctccggaaggccattgactatatcagatttctccagcactctaaccaaaaattgaagcaggagaacctgtcgttacggaccgcagttcataaatcaaaatccctgaaggatctggtgtcagcctgcggcagcggcggaaacactgacgtgctgatggagggcgttaaaacagaagttgaggatacactgacaccccctcccagtgatgcgggatcacccttccagtcgtctccactctccctgggtagcaggggatctggctctgggggatccggttcagattccgagccagacagccccgtcttcgaggatagcaaagcaaaacctgagcaaaggccgtccctccacagcagaggtatgttagatagatcccgtctggctctgtgcacactggtgttcttgtgtctctcttgcaatcccctggcctcacttcttggggcacggggactgccaagccccagcgatactaccagcgtttatcattctccagggcgtaacgtgctaggcacagagtcccgcgacggcccaggatgggcgcagtggctgctgcccccagtcgtgtggcttcttaatgggctactagtgctggtgtctctcgtgctcctttttgtgtatggtgagcctgtgactcgtccacactccggtccagctgtgtacttctggcgtcaccgcaagcaggccgaccttgatttggccagaggcgactttgcacaagccgcacagcagctgtggcttgccctgagggcccttggaagaccccttcctacctcccacctcgacctggcctgcagcctgttgtggaatctgattaggcacctactgcaacgcctgtgggtgggtcgctggctggcagggagggcagggggactgcagcaggattgcgccttacgtgtggacgctagcgccagcgctagggacgccgctctggtatatcacaagctacatcagttgcacaccatgggtaagcacacaggcggacatttgactgcaacaaatctcgccctctccgctcttaatctagccgaatgtgctggggatgctgtgagcgttgcaaccctggccgaaatttatgtggcggctgctttgcgcgtcaaaacttcactccctagagcactgcatttcctgaccagattcttcctctcaagcgcgagacaggcatgtctcgcccagtcaggatctgttccaccagcaatgcagtggctgtgccaccctgttggccatagattcttcgttgatggcgattggtctgtcctgagcacaccctgggaatctctctattccctggctgggaatccagtggatccgctggcccaggttactcagttgtttcgcgaacacctcctggaacgcgcattaaattgtgtaacccagccaaaccctagtccgggatctgccgatggggataaagaatttagcgatgctctggggtatcttcaattactgaactcctgctcagatgcagcaggagcacccgcttactctttttcgattagcagttctatggccactactacaggggtagaccccgtggccaagtggtgggccagcctgaccgcagtagtgatacactggctgcgtcgagatgaagaggccgctgagcgtctttgtccattggtcgagcaccttcccagagtcctacaagagtccgaacgaccgctccccagagcagcattacacagctttaaggcggcaagggccctgttaggctgcgccaaagcagagagcgggcctgcttccctgacgatttgtgaaaaggcatccggatatttgcaggactctttggcaaccactccagcctcaagttctatcgacaaggctgtccagttatttctgtgcgatctgcttctggtcgtaaggactagcctatggcgacagcagcagccaccggcacccgctcccgctgcccaggggacgtccagtcgtcctcaagcctctgcactggagctgagggggttccagagggacttgagctccctgaggagactagcacagtcctttaggccggctatgcggagagtctttctgcatgaggccacggcccgactcatggccggagcctcccccactcgtactcaccagctgcttgaccggtctcttaggaggagagccggtccaggagggaagggcggagctgtggcagagctagaaccaagacctacccgtcgcgaacacgcagaagcacttctgttggcgtcttgctacctgccgcctggcttcctgagcgctcctgggcagagagtgggcatgttggcagaggccgctcgtactctggaaaaactgggcgatagaagactcctgcatgactgccagcaaatgctcatgcgattagggggaggaactaccgtgacatcatcttag

SEQ ID NO: 31002 - DNA, 2301 bp, synthetic construct
  misc_feature 1..2301: note = Description of Artificial Sequence: Synthetic coding sequence
  source 1..2301: mol_type = other DNA
atgttggcacatctgtctcgagccgcaccctgccccctggcggctggcgcagtggccgcagttgccgtggccgttactagatccctcacagcccagagtctcaggacagctagactgggccctgctacggtgcctccgtccccactgcctgccatatcttctgaacctcacgatagggctggaaagaccttgactgaccctacttcccactttattgacagaataaccgaggcttggtcccacgttggtagtcattcaaaggccaagcccgagcaacgccctagcctgcactctcgcggtatgctagacaggtctcgactcgcgctttgtacgttagtttttctgtgcctgtcatgtaatccactagcatccctgctcggcgcacggggtctgccttctcctagtgacactacttctgtgtaccactccccagggagaaacgtgcttggtaccgaatcccgggatgggccaggttgggcccagtggctgctcccccctgtcgtgtggctgttgaacggacttctcgtgcttgtctcacttgtactgctgttcgtgtacggagaacctgtgaccaggccccattcagggccagctgtctatttctggcgccaccggaagcaagccgatcttgatctcgctagaggggactttgcccaggcagcacagcaactgtggctcgccctacgagctttggggcgtccactgcctacgagccatctggacctcgcatgttccctgttgtggaacttgatcaggcacttgctgcagagactctgggtgggcagatggttagcgggtcgagcaggcggtcttcaacaagactgcgcgctgcgcgttgacgcttctgcttccgcccgagatgcagccttggtctaccacaaacttcaccaattacacacaatgggcaagcataccgggggacatctgaccgctaccaacctcgccttgagcgcgctgaacttagcagagtgcgcgggtgacgccgtttccgtcgcaaccctggcagaaatctacgtcgccgctgctctccgtgttaagacatccctcccacgagccttgcactttctgacccgcttcttcctgagcagtgctcggcaggcttgtctggcacaatccggaagtgtgccgccagccatgcagtggctctgtcatccagtaggacatcgctttttcgtggacggagattggagcgtgctgtccaccccctgggaatccctgtacagcttggccggtaatccagttgaccccctggcacaggtgactcagctcttccgcgagcacctgttagagagggcgctgaattgtgtgacgcagcctaatccttctcctggtagcgccgatggtgataaagagttttcagacgccctggggtacctgcagctcctaaatagttgttccgacgcagccggagctccggcttactccttttcaattagctcatctatggccacaaccacaggagttgaccctgtcgccaaatggtgggcctccctcactgccgtggtgatccattggctgcggcgagacgaggaagccgctgaacggctttgtccacttgtggagcatttgccgagggttttacaagagtctgagcggcctctgcctcgagcagcactgcacagcttcaaggcggctcgggctctgctgggctgtgctaaagcagagtccggcccagctagtttgactatctgtgaaaaggcatctgggtatctacaggacagcctggcgactactcccgctagtagtagtattgataaagccgtgcaactctttctctgtgacctcctgctggtggttaggaccagcttgtggcgtcagcagcaacccccagcccctgcgcctgcagcccaaggcactagctctcgcccacaagcctctgcgctggaacttcgaggtttccagcgggatctgtcaagtctccgcaggctagcccaaagcttcagaccagccatgaggcgggtgttcctgcatgaggctacggcacggctgatggccggtgcctcacccacgaggacacatcagctgttggatcggagtctgcgtcggcgagctggcccagggggtaagggaggtgctgtggcagagctcgagcctcgcccaacccggagggagcatgctgaagctctcctgttagcatcatgttatctccctccaggattcctgtcagcgcctggccagagagtcggtatgctggcggaggctgcacggacccttgagaagctaggagaccggcgactgctgcatgattgccagcagatgctaatgcggctcggcggtgggacaaccgttacatcgtcctag

SEQ ID NO: 31003 - DNA, 2682 bp, synthetic construct
  misc_feature 1..2682: note = Description of Artificial Sequence: Synthetic coding sequence
  source 1..2682: mol_type = other DNA
atgaagacagatggagctaccgtaaaagccgctggattaagcccgttggtaagcgggaccacagtgcagacaggacccctgccaacgctggttagcggaggcaccatactggccactgttccactggtcgtggatgcagagaagctcccaattaacagactagcagcaggttcaaaggccccagcctcagcccagtcacgaggcgagaagcggaccgcccacaacgcaattgaaaagaggtaccggagtagtattaacgacaaaatcattgaattaaaggacctcgtcgtgggaacagaggcaaagctcaataagtctgcagttctacgcaaagctatagactacatccgttttctacagcacagtaaccagaaactgaaacaagagaatctgagccttcgaacggctgtgcacaaatcaaaatctctgaaggatttggtttccgcctgtggcagcggaggaaacactgatgtgttgatggaaggagtgaaaacagaggtggaagacaccctaacaccccctccttctgacgctggctccccctttcagagctcaccattgagccttggcagccgcggtagcggatccggcggtagcggatctgattccgagcctgattcacccgtgttcgaggatagcaaggcgaagccggagcagaggccatcgttacatagccggggaatgctcgacaggtcgcgcttggccctgtgcactctagtgttcctgtgtcttagctgcaacccactcgcctccctgctgggagcccgagggcttccgagccccagcgacaccacatccgtctatcacagccctggaaggaacgtgttgggaaccgaatcaagggacggaccagggtgggcacaatggttgctgcccccagtggtctggcttctgaacggacttctcgtcctggtgagcctggttctgctcttcgtctacggagaaccggtgacccgacctcattcaggacccgctgtctacttctggcgacacagaaagcaggccgatctagatttggcacgtggcgactttgctcaggccgctcagcaactgtggctcgctctccgggctctgggccgtccacttcccaccagtcacctggacctggcttgtagcctactgtggaacctcatccgacacctacttcagcgactctgggtcggtcggtggttggccggacgggcaggcggactgcaacaggactgcgcccttcgcgtggacgcatccgccagcgcacgggacgccgcactcgtatatcacaaactacatcagcttcataccatgggaaaacatactggaggccacctgacagcgaccaatttggctctgagcgcgctgaatttagctgaatgcgcaggggatgctgtgtctgtagcgacactggcagaaatctatgttgcggctgccctgcgcgtgaagacttcgctgccccgagcactgcacttccttactcgcttttttctgagttccgcgaggcaggcgtgcttggcacagtcaggatccgtgcccccagctatgcagtggttgtgtcacccagtgggacatcgatttttcgtggacggggattggtcagttctgtctaccccctgggagagcctttactcactggccggaaacccagtggatcctcttgctcaagtgactcagctgttcagggaacatctcttggaacgagcccttaactgcgtaactcaacctaatccctcgcctggatccgccgatggcgataaggagttttcggacgccctaggttacttacagctcttgaactcttgctccgacgccgcaggcgcacccgcatacagcttctcaatcagctccagtatggcaaccaccacgggtgtagatcctgtcgctaagtggtgggcgagcctgacagctgtcgtgattcattggttacgaagggacgaggaggccgcagaaaggctgtgcccgctggtggagcacctccccagggtgctgcaagagagcgagaggccccttccaagggctgcgcttcacagttttaaagccgctagggcgctgctaggttgcgctaaggcagaatccgggccagcgtcactcactatctgcgagaaagcgagtggctacctgcaggactccctggctacaactccagccagctcgtccatcgataaagccgtgcaattatttttgtgcgacctcttactcgtagtgcggacgtctctctggcggcaacagcagcccccagccccagcccctgctgctcagggaacctcctctcgaccacaggcttctgcactcgaactcagagggttccagagagatctgagctctctccggagactcgcacaaagtttccggcctgccatgcgtcgggttttcctacacgaagccactgcacgccttatggctggagcttcacccacccggacacatcagctgctcgataggtctctacggagaagggctggccctggcggaaagggaggagccgtggccgaactggagccacgcccaacccgcagggagcacgccgaagctctactgctcgcttcctgctacctgccgccaggattcctctctgcacccggacagcgagtggggatgttagctgaggccgcaagaaccctcgaaaagctcggagatagacgccttttgcatgactgccagcaaatgctgatgcgccttggcggaggaactaccgtgactagtagctag

SEQ ID NO: 31004 - DNA, 2955 bp, synthetic construct
  misc_feature 1..2955: note = Description of Artificial Sequence: Synthetic coding sequence
  source 1..2955: mol_type = other DNA
atggactgcaccttcgaggatatgttgcagctcatcaataatcaggactcggattttccaggcctcttcgacccaccttacgcaggctccggcgcaggcggtaccgacccagctagccccgacacgtcaagtcctgggtctctttccccccctcccgcaaccctaagctctagcttagaggccttcctgagcgggcctcaggcggcaccctcaccccttagcccaccacagcctgcacctacccccctcaagatgtacccttccatgccggcattctcacccggacctggcataaaagaggaatccgttccactcagcatactgcagacacccaccccacaaccattgcccgtgcccacccttgtctccggcggaactattctggccaccgtgcccctcgtggttgacgctgagaaactgccaatcaatcgcctggccgctggatccaaagccccagcgtcagcgcaaagtaggggcgagaagcgaaccgcacacaatgcaatcgagaagaggtaccgctcctctataaacgataaaatcattgaactaaaagatctggtagtgggcactgaagctaaactaaacaagagtgccgtgctgcgcaaagcaattgattatatccgcttcctgcagcatagcaatcagaagctaaagcaggagaacctgagcctgagaacagctgtccataagtccaagagcctgaaggacttggtctctgcctgcggctctggtgggaacactgatgtcctgatggagggtgtgaagacagaagtggaggatacccttactcccccaccatcggatgccggttccccttttcagtcttcaccactctctcttggatctcgaggatcaggatccgggggatccggctcagatagcgagcccgacagcccagtctttgaggattcaaaggcgaagcctgagcaaaggcctagtctacacagtagaggcatgctggatcggtccagactcgctctttgcactttagtttttctatgcctgagttgtaacccacttgctagcctgttgggcgctcgcggattgccctccccctccgacaccacctcagtgtatcacagtcccggaaggaatgtgctgggtacagaaagcagggacggcccaggctgggcccagtggcttctgcccccagtggtctggctcctgaacggcctgctggtcctcgtatccctcgtgctccttttcgtctacggtgagcctgtgactcggccacatagtggccctgcagtgtacttttggcgccaccggaaacaagctgacctggatctggcaagaggcgactttgcacaggcggctcagcaattgtggctggcattgcgggcattgggcaggccccttcctacttcgcacctcgacctggcatgtagtctgctgtggaatcttatcaggcacttattgcagaggctgtgggtgggcaggtggctagccggacgcgcaggagggctccagcaggactgcgccctccgggtggacgcatccgcctccgccagggatgcagccctggtttaccacaaattgcaccagctccatactatgggcaaacacaccggaggacaccttaccgccaccaacctcgcactcagcgcactcaacctcgcagagtgtgcaggcgacgccgtgagtgtagctacattagccgagatctatgtggccgctgctctgcgcgtgaaaacttccctgcccagagctctgcactttttgacacgtttttttctgtcctccgctaggcaggcttgcctagcccagagcggctccgtgccgcctgctatgcagtggctatgccaccccgtgggacatagatttttcgtggatggcgattggtcagtgctcagtactccctgggagtccttgtattccctggctggaaaccctgttgacccactggcccaggtcacacaacttttccgcgaacacttgctggagcgcgctctgaactgtgtaacccaacctaatccctccccagggtccgcagacggcgacaaagagttctcagatgcactcggttaccttcagctgctaaattcctgttcagatgcggcaggcgcacctgcatactcattttccatcagcagttcaatggccacaaccactggggtggaccctgtcgccaagtggtgggcgagtcttactgcggtagttatccactggctccgaagggatgaggaggccgcagagcgactttgcccacttgtggaacatctgcctcgagtgctccaggagagcgaaaggcccctccccagggctgccctgcacagttttaaggcagccagggctctgctgggctgtgcgaaagctgaatcaggtccggcatctctgacaatctgcgaaaaggcctcaggctacttgcaggatagcttagcaaccactcccgcatcatcatctatcgataaggccgttcagctctttttgtgtgacttactcctggtggtgcgtacgtccctgtggcggcagcaacagcccccagcccctgccccagccgctcaggggacaagcagtcggcctcaggcaagcgcacttgaactgcggggatttcaaagggacctaagcagtctgcgcaggttagctcagtccttccgtccagccatgcggcgagtcttcctgcacgaagccacagccagactgatggcaggcgcttccccaaccagaacacatcaactcttggatcggtctcttaggcgacgggcagggcctggaggcaaaggcggagcagtggccgaactcgagcctcggcctaccaggagagaacacgccgaggccctcctgcttgctagctgttacttgccccctggattcctgtccgccccagggcagcgtgtcgggatgctcgccgaggctgcccgaaccctggagaagctgggggatcgcagattgctgcacgattgtcagcagatgttgatgcgcctcgggggaggaactacagtgactagctcttag

SEQ ID NO: 31005 - DNA, 3222 bp, synthetic construct
  misc_feature 1..3222: note = Description of Artificial Sequence: Synthetic coding sequence
  source 1..3222: mol_type = other DNA
atggattgcaccttcgaggatatgctgcagttgattaataatcaagactcagatttccccggattgttcgaccctccccagcctgcccctacccccttgaagatgtaccccagcatgcccgctttcagtcctggaccaggtatcaaggaagaatccgtgcctctctccatcttacagacccccaccccacaacctctgccaggcgcactcttaccacaatctttccccgcacctgcacccccacagttctcgagcacacccgtgttgggctatccttcacccccaggtggatttagtactggcagcccgccaggcaatacccagcaaccgctacccggactgccacttgcttcccctcctggcgtgccacctgtgtccttgcatacccaggtccaaagcgtggtcccacagcagctgcttacagtgactgcggcacccacagccgctcccgtcacgaccacggtaacttcccaaatccagcaggtgcctgtgctgctgcaacctcattttattaaagctgattcattgttgctcaccgccatgaagaccgatggcgctaccgtgaaggccgctggcttgtctcccttggtgtccggcacgacagtgcaaacaggaccccttcccacactggtttcagggggtaccatcttggctacggtacctctggttgtggatgctgaaaaactgccgatcaatagactcgccgcaggaagcaaagcaccggcttctgcccagagtcgcggagaaaaaaggacagcacacaacgctattgaaaagaggtaccgctcgtcaattaacgacaaaatcattgagctgaaggatctcgttgtgggtacagaagccaagttgaacaagtccgccgtgcttagaaaggctattgattatatcaggtttctgcagcattcaaaccaaaaactaaaacaagaaaatctttctttgaggactgccgtgcacaagtccaaatcattgaaggatctcgtaagcgcctgtggaagcggcggtaatacagatgtactcatggaaggggtgaagaccgaagttgaggacactctaactcctccgccatctgacgccggatctccatttcaaagctcgccactctctttgggcagccgaggcagcggcagcggtgggagcggttcagacagtgagccagactcaccggtttttgaagattctaaagcaaagccagaacaaagacctagtctgcacagccgaggaatgttggatcgctccaggctagccctttgcactctcgtattcttgtgcctaagctgtaatcccctcgcttccctgctgggagccaggggactcccaagcccatccgacaccacgtccgtgtaccatagccctggaagaaacgtgttgggtactgaatcacgagacggtccaggttgggcacaatggctcctgcccccagtcgtatggcttctgaacgggcttctagtgctcgtgagcctagttcttctgttcgtatatggggagcctgtcaccaggccccattctggccctgccgtgtatttctggcgccaccgcaaacaggctgatcttgacctggcgagaggagacttcgcacaagccgctcagcagctatggttggccctgcgggctctgggaaggccacttccgaccagtcacctggatctagcatgcagcctgctgtggaatcttatacggcacctcctccaaagactctgggtgggacggtggctggccggtcgggcaggagggttacagcaggactgcgcccttcgcgttgacgcctctgctagcgctcgtgacgctgccttagtctatcacaaattacaccagctgcatacaatggggaaacatacggggggtcacctgaccgcaactaatctggcactctcggccctgaacctggccgagtgcgccggagacgctgtaagcgtggccactctggccgaaatctacgtggccgctgctcttcgggttaagacatcccttcctagggccctgcatttcctcacaaggttctttctctcttctgctagacaggcctgtctggctcagtcagggagtgtgccacctgccatgcaatggctttgccacccagtgggccatcgcttcttcgtggacggagattggagcgtccttagtactccttgggaatctctgtactcactggcgggtaacccagtcgatccactcgcccaggtcacccaattatttcgcgaacacctactcgagagagccctgaattgcgtgacacagccgaacccgtccccgggtagcgcagacggggacaaagagttctccgatgccctcggatatctgcagctactgaacagctgcagcgatgctgccggagcccctgcctacagcttttctatttccagctctatggcaacaaccaccggcgtggatccagtcgcaaagtggtgggcctcactgacagccgtggtgatacactggctacgtagagacgaagaggccgctgagagactgtgtccactggtggagcatttacccagagtcctgcaggagagcgagcgtcccttgcccagagccgcactccacagcttcaaagcagccagagccctactgggatgcgcaaaagcagaaagtgggccagccagcctaacaatctgcgagaaggcctccgggtacttgcaggactcccttgccacaacccctgcctcctcaagtatcgataaggccgtccagctgttcctgtgtgaccttttactggtggtaagaaccagtttgtggcgccagcaacaacctccggcaccagccccagccgctcagggcactagctctaggcctcaggcgtccgcactggaactgcgtggcttccagagggatctgagttcactccgtcgcctcgctcagagctttcgcccagctatgcgcagggtgttcttgcatgaggcgactgcacggctaatggccggagcttctcctaccagaacccatcagctattagaccgcagtctccgacgacgggcaggccctggcggtaaaggtggcgcagtagccgagctggaacccagaccgaccaggagggaacacgcagaagctttgctcctggccagctgttacttgcctccaggctttctgagcgccccaggacagagagtcggcatgttggcggaagccgctcgaaccttggaaaaactgggggatcggcgacttctacacgactgccagcaaatgctcatgcgacttggcggaggcacaacagtcacaagtagttag

SEQ ID NO: 31006 - DNA, 1413 bp, synthetic construct
  misc_feature 1..1413: note = Description of Artificial Sequence: Synthetic coding sequence
  source 1..1413: mol_type = other DNA
atggatgagccgccattctcggaggccgcactcgagcaggccctgggagagccctgtgatttggacgctgcgctgttgacagatatcgaagatatgctccagctgatcaacaatcaggattcggatttccccggtctgtttgatcctccgtacgcaggatctggcgcagggggaaccgacccggcttcccctgataccagcagtcctggctccctatctccaccgcctgccaccctgagctcatcactggaagcctttctctctggaccacaggcggctcccagcccattgtccccaccgcagcccgcacctaccccattaaagatgtatccctctatgccggcattcagcccaggacccggaataaaggaggaatcagtccccctttctatcttgcaaacgccaactccccaacctctaccaggagccctgttaccccagtctttccccgctcccgcacctccccagttctcttccacccccgtcctgggctatccttcccctcctggtggttttagcaccgggagcccacccggaaacacacagcagccactccccggacttccactggcttcccccccaggggtccccccagtgtcgttgcacacacaggtgcaatccgtggtccctcagcagctgctgaccgttaccgctgctccaacagctgctcctgtgactaccaccgtgacgagccagatccaacaggttcctgtgctgctccagccacacttcataaaggcggacagcttactactcaccgctatgaagacagacggtgctacagtgaaggccgctggcttgtctcctctagtcagtgggaccaccgttcaaaccggaccacttccaacgctcgtgtctgggggaactatcctggctacggttccactggtcgtagacgccgagaaactgcccatcaacagactagcggctggatctaaagcccctgcttcagcgcaaagccggggagaaaaaagaacagcacataacgctattgaaaaaagatatcgcagctcaataaacgacaaaatcattgaacttaaagacctggtcgtaggcactgaagccaaattaaacaagagtgccgtcctgcggaaggccatcgattacatacgattcttacaacacagcaaccaaaagttaaaacaagagaacctgagtcttcgcactgccgtgcacaagagcaaatcactaaaggacctggtttccgcctgcggatctgggggaaacaccgacgttttgatggagggggtgaagacggaggtcgaagatacgctcacaccaccgccttctgatgctggctccccatttcagtcatctcccctgtcactgggctctcggggtagtggttccggcggtagcgggtcagacagcgagcctgactctcccgtattcgaagactcaaagaccgaatag

SEQ ID NO: 31007 - DNA, 645 bp, synthetic construct
  misc_feature 1..645: note = Description of Artificial Sequence: Synthetic coding sequence
  source 1..645: mol_type = other DNA
ttgatgccagcgtgtctgccagggaaacacaccgggggtcaccttaccgcgactaatcttgctctgtctgctctcaacctggccgagtgcgccggtgacgccgtgtcggtcgcgaccttagccgaaatttacgtggccgcagccctcagagtcaagacctcgctgcccagagcactacattttctgacccgtttttttttgagctccgcgagacaagcctgccttgcgcaaagcggctcagtccctccagctatgcagtggctttgccaccctgtggggcataggttttttgttgacggagactggtcagtgctgtccacaccctgggagagcctttacagccttgctggaaatccagttgatcccctcgcccaggtgacgcagctgttccgtgagcatctgcttgaacgagccttgaactgtgtgacccagcccaacccaagtcccggatctgccgacggagacaaagagttttctgatgcccttggctacctccagcttttgaactcctgctcagacgctgccggagcaccggcatactctttctctatatcaagcagcatggcaacaaccactggagatccatgcccaggccagctttgcaccccttcccgattgcctgggccatgctgggctgtgccttag

SEQ ID NO: 31008 - DNA, 747 bp, synthetic construct
  misc_feature 1..747: note = Description of Artificial Sequence: Synthetic coding sequence
  source 1..747: mol_type = other DNA
atggagagagcctctcttatccagaaggccaagctagctgagcaggccgaacgctatgaagatatggcggcatttatgaagggcgcagtggagaagggcgaggaattatcttgcgaggagcgtaatctgctctctgtggcctataaaaacgtcgtgggaggacagcgagctgcttggagggtcctttcatccatcgagcagaagagtaacgaagaaggctccgaagagaagggtccagaggtccgcgagtaccgcgaaaaggtcgagacggagctgcaaggcgtctgcgataccgtcctagggttgctggactcccacttgattaaggaggccggagacgccgagagccgagtcttctacctcaaaatgaagggagactattacaggtacctggctgaagtggccacaggcgacgataaaaagcggataatcgattccgcacgttctgcataccaagaggctatggacatctctaaaaaagagatgccccctacaaatccaatccgcctgggactagctttgaatttttcagtgtttcactatgagatagccaactccccagaggaggcaatcagcctggcgaaaacgactttcgacgaagccatggccgacctgcacaccctcagtgaggattcctacaaagattctaccctgatcatgcagctgctgcgggacaatttaactctgtggacagcggataacgccggagaggaaggcggagaggcccctcaggaaccccagtcatag

SEQ ID NO: 31009 - DNA, 651 bp, synthetic construct
  misc_feature 1..651: note = Description of Artificial Sequence: Synthetic coding sequence
  source 1..651: mol_type = other DNA
atggagcgtgcatctctgatacaaaaagccaagctggccgagcaggcggagcgatatgaagacatggcagctttcatgaaaggcgcagtggagaagggagaggagctatcctgtgaggagcgcaacttgttgtcggtcgcctacaagaatgtggtggggggacagcgagccgcatggagggttttatcttcaatagagcagaaatctaatgaggaaggctcagaagaaaagggacctgaagttagagagtacagagtgttctatcttaaaatgaagggcgattactaccggtacctggccgaggtggccaccggggatgataagaaacggattatcgacagcgctcgctctgcataccaagaggccatggatatatccaagaaggaaatgcccccaaccaatcccatcagactgggtttggcgctgaatttttcagtgttccactatgaaatagcaaactcacccgaagaggcaatctccctagctaaaacgaccttcgacgaggccatggctgaccttcacacattatctgaagactcttacaaagactcgaccctgatcatgcagctgctacgtgacaatctgacactgtggacggccgacaatgccggtgaagagggaggcgaggctccacaggaaccacaatcttag

SEQ ID NO: 31010 - DNA, 3702 bp, synthetic construct
  misc_feature 1..3702: note = Description of Artificial Sequence: Synthetic coding sequence
  source 1..3702: mol_type = other DNA
atgggattcctgaagctgatcgaaattgagaatttcaagtcatacaagggcagacagatcattggacctttccagcgtttcaccgccatcatcgggccaaacggaagtggcaagtcaaacttaatggatgccatatcattcgttctgggagaaaagacctcaaacctgagagtaaaaaccctgcgtgatttgatacatggcgctccggtgggaaagccggctgccaatagggcattcgtctctatggtttactctgaagaaggcgctgaagatcggaccttcgccagggtaattgtggggggttcttctgagtacaagatcaacaataaggtcgtccagctgcacgagtacagcgaagaactggagaagttaggcattcttatcaaggccaggaattttcttgtgttccagggggcagtagaaagtattgccatgaagaacccgaaagagagaaccgctttgttcgaggagatttcccgtagtggggagctggctcaggagtacgacaagagaaaaaaggagatggtcaaagccgaggaagacacgcaattcaactatcaccgcaagaaaaacattgctgccgaacggaaagaggcaaaacaggagaaagaggaagccgaccgttatcaaaggctgaaagacgaagttgtgcgagcacaggtgcagctgcagctatttaagttataccacaacgaagtcgaaatcgagaagctgaacaaggagttggcctctaagaacaaggagatcgaaaaagataagaaaagaatggacaaggttgaggacgaactgaaagagaagaagaaggaactcggcaagatgatgagggagcagcagcaaattgagaaggaaattaaggaaaaagactcagagctaaaccagaaacgccctcagtatatcaaggctaaagaaaacacatcacacaagattaaaaagctggaggcggctaagaagtccttgcagaatgctcagaaacactataagaaacgaaaaggcgatatggatgaactcgaaaaggagatgctgagcgttgagaaagcacgccaagagttcgaggaacgaatggaggaagaatcccagtctcagggacgggacctgaccttggaagagaatcaggtgaaaaagtaccatcggctcaaggaagaagcgagcaagcgtgccgcaacattggcacaggaattggagaaattcaatcgcgatcaaaaagcagaccaagacaggctggatctggaggaacggaaaaaggttgagaccgaagccaagattaaacagaaactgcgggagatcgaagaaaatcaaaaaagaatcgagaagcttgaagagtacatcacaactagcaagcagtctttggaggaacagaaaaagctggaaggcgaacttaccgaggaggttgaaatggctaaaagacgaatagacgagatcaataaggagctgaaccaagtgatggagcagctaggagacgccagaatagatcggcaggaatcatctcgacaacaaaggaaggctgagatcatggagtcaattaagcgcctctaccctgggtctgtgtatggacgcctaatcgacctgtgccagccgacccagaagaagtaccagatagctgttacaaaggtcttggggaaaaacatggacgccattatcgtcgattcagagaaaacagggagagattgcattcagtatattaaagagcagcgtggggagcccgagaccttccttccactggattacctggaagttaagcctactgatgagaaacttcgggagctgaaaggcgctaaactggtgatcgacgtcatccgctatgagccccctcacatcaagaaggctctgcagtacgcatgcggcaatgcgcttgtttgcgataacgtggaagatgctagaagaattgcttttggaggccaccagaggcacaagaccgtggcactggacgggaccctgttccagaagtcgggtgtcatttccggtggggcttccgatcttaaagctaaggctagacggtgggacgaaaaggccgtcgataaactcaaggaaaagaaggaaaggttaacagaagaacttaaggaacagatgaaggcgaaaaggaaggaagctgaactgaggcaggtgcagtcacaagcccacggtctccagatgcgtctcaaatattcccagagcgatttagagcaaactaaaacaaggcacttagcacttaacctgcaagagaaaagcaagttagagagcgagcttgcaaacttcggacccaggattaacgatatcaagcgcatcatccagtcaagggagcgggagatgaaggatttgaaggagaagatgaaccaggtggaagatgaagtctttgaagagttttgtagagagattggtgtgaggaacatcagggagtttgaagaggagaaggtcaaacgacaaaatgaaatagctaaaaaaaggttggagttcgagaaccagaagacacgactgggtatccaattggactttgagaagaatcaactgaaagaagatcaggataaagttcatatgtgggaacagactgtgaagaaagacgagaacgaaatcgaaaaactcaagaaggaggagcagcgtcacatgaagataatcgatgaaacgatggcccaactccaggatctgaagaaccagcatcttgctaagaaatctgaagtgaatgacaagaaccatgagatggaggagattcggaagaagctgggcggagccaataaagagatgactcatctgcaaaaagaagtgacggcaatcgaaactaaacttgagcagaaaagaagtgacaggcataaccttctgcaggcgtgtaaaatgcaggatataaaactccctctgagtaaggggacaatggacgacatcagtcaggaagaagggagctcacagggagaggactctgtgtcaggctcccagaggatttcttctatctacgctagggaagccctcatcgaaatcgattatggtgacctgtgtgaggacctaaaagacgcacaggcggaggaggaaatcaaacaggagatgaacacactgcagcagaagctaaatgaacagcaatcagttttacagagaattgctgcacccaatatgaaagcgatggaaaagctggaatccgttagggataagtttcaggagacctccgacgaattcgaggccgcaagaaaacgcgcaaagaaggcaaagcaggccttcgagcagattaagaaggagagattcgatcggtttaacgcatgctttgagagtgtggcgacaaatattgacgagatttacaaagctttaagccgcaattcaagcgcccaagcttttttgggcccagaaaatcctgaagaaccttatctcgatggtatcaattacaattgtgttgcccctggtaaaaggtttcggccaatggacaacctgagcggcggagagaagacagttgcagcgttagcgctccttttcgctattcatagctacaagcctgccccatttttcgtgctggatgagatcgatgcagcacttgacaacaccaatatcggcaaagtggcaaattatattaaagagcagtcaacgtgcaatttccaggctattgtgatatctctgaaagaagaattttacacaaaagccgaaagcctgatcggagtctacccagagcagggggattgtgtgatctcaaaggtcctgacattcgatctcacaaaatatccagatgccaatccaaacccaaacgaacagtag

SEQ ID NO: 31011 - DNA, 612 bp, synthetic construct
  misc_feature 1..612: note = Description of Artificial Sequence: Synthetic coding sequence
  source 1..612: mol_type = other DNA
atgggattcctaaagctcatcgaaatcgagaatttcaagtcttacaaaggcaggcagatcatcgggccttttcaaagatttactgcaattatcggcccaaatgggagcgggaaaagtaacttgatggacgcgatcagttttgtcctaggcgaaaaaacgtccaacctccgggtcaagaccctgagagacttgattcacggggctcctgtcgggaagcccgctgcaaacagagccttcgtatctatggtgtattctgaggagggggcagaggacaggacattcgcacgggtaatcgtcgggggaagttcagagtacaagatcaataataaagtggtgcagctgcatgagtactctgaggagcttgaaaagctaggcattctgatcaaggctagaaacttcctggtcttccagggctgttgcggcatatattgtcatgagacccccaaacgcggacaactataccttaaaatctcgaggagtggagaacttgctcaggagtacgacaaacgaaaaaaagaaatggtaaaggctgaggaagatacccagtttaattaccacaggaagaagaatatcgcggcagagcgtaaagaggcaaagcaagagaaggagtag

SEQ ID NO: 31012 - DNA, 1551 bp, synthetic construct
  misc_feature 1..1551: note = Description of Artificial Sequence: Synthetic coding sequence
  source 1..1551: mol_type = other DNA
atgggattcctgaaattgatcgagatcgagaattttaagagctataaggggaggcaaattatcggaccatttcaacggtttacagcgataattggtcccaacggctccggaaaatccaacctcatggatgccatcagttttgtgttgggcgagaagaccagcaacctgagagtgaaaactctgcgggatctgattcatggagcgcctgtgggcaagcctgcagcaaatagggcattcgttagcatggtgtacagcgaggaaggtgctgaggacaggacgttcgctcgcgttattgtgggaggctcatcagagtacaagatcaacaacaaagtagtgcagctccacgaatattctgaggaactcgaaaagcttggtatactgatcaaggctcggaatttcctggtgtttcaagtgaaaaagtaccacagactcaaggaggaagcctccaagcgagcggctactttggctcaagagctcgaaaaatttaatagggaccagaaagctgatcaggacaggctagatctcgaggaaaggaagaaagtcgagaccgaagctaaaattaagcagaagctgcgggagatcgaggagaatcagaagaggattgaaaagttagaagaatacatcactacaagcaagcaaagcctcgaagaacaaaagaagcttgaaggggaactgaccgaagaggtcgagatggccaagcggcgaatcgatgaaatcaacaaagagttgaaccaggtgatggagcagctgggtgatgccagaatcgacagacaggagtcaagtaggcagcaaagaaaggcagaaatcatggagtctatcaaacgcctgtaccctggctcggtctacggcagattaatagatctgtgtcagccgacacagaagaaataccagatcgccgtgacgaaagttcttggtaagaatatggacgccattatagttgacagtgaaaaaacaggaagggattgcattcagtacatcaaagaacagaggggcgaaccagagactttcctgccattggattatctcgaggtgaagccaaccgatgagaagctgcgggaactgaaaggagcgaagctggtgatcgatgtgatccgctatgagccacctcacattaaaaaagcactgcagtatgcctgtggcaacgccctggtgtgcgataatgtcgaggacgcccgaagaatcgcgttcggcggtcatcagcggcacaagaccgttgcactcgacgggacactgtttcagaagagcggcgtaatcagtggaggtgccagcgacttgaaggcaaaggccagacgctgggacgaaaaggcggttgataaactgaaagagaaaaaagaaagattgacggaagagctcaaagaacaaatgaaggccaagaggaaagaggccgagctgcgacaggtacagtctcaggcgcacggtttgcagatgcggttaaaatattcccaaagcgacctggagcagactaaaacaaggcatctggccctcaatttgcaggtgggacccggactgcagccatgctcccctaaagctattcatacgtttctcgcttag

SEQ ID NO: 31013 - DNA, 870 bp, synthetic construct
  misc_feature 1..870: note = Description of Artificial Sequence: Synthetic coding sequence
  source 1..870: mol_type = other DNA
tgatggtacacccctacccctttttactcatcattggaagcggcactcctgaattttcgcccttccgctcctgtattccgcatgcttgaagtgagtatccctacaccccatcgttacgtgcgtgggaagtctaatttgatggatgctatctctttcgttctcggggagaaaaccagcaacctccgggtgaagaccttaagagatttgattcacggcgcaccagtgggcaagcctgcggcaaaccgcgcatttgtgtcaatggtttactctgaggaaggagcagaagatagaaccttcgcgcgtgtgatcgtcgggggatcatccgagtacaagattaacaacaaagtcgtccagctgcatgaatattctgaggagttagaaaagttgggaatcctcattaaagcacgcaattttctggtgttccaaggggctgtggagtctatcgccatgaagaatccaaaagagcgcaccgccctatttgaagaaatttctagaagtggagaactggctcaagagtatgacaaaaggaagaaagagatggtgaaagctgaagaggatacccagttcaactatcacagaaagaagaacattgccgcagagcgaaaggaagccaaacaagagaaggaggaggctgacagataccaaagattgaaggacgaggtggttcgggcacaggttcagctgcaactctttaagctgtaccataatgaggtggagatagagaagcttaataaagaactggcctctaagaacaaagagattgagaaggataagaagaggatggacaaagtggaggacgaactaaaggagaaaaagaaggagctggggaagatgatgagggaacaacaacaaattgagaaggagatttag

SEQ ID NO: 31014 - DNA, 1995 bp, synthetic construct
  misc_feature 1..1995: note = Description of Artificial Sequence: Synthetic coding sequence
  source 1..1995: mol_type = other DNA
atgtccggtgtccggggtctatctcgcctcctgtctgccaggaggctggcactggcgaaagcctggcctactgttctgcaaactggaaccaggggttttcattttactgtggacggcaacaagagggcgtccgcaaaagtgtctgattcaatttccgcacaataccctgtggtagaccacgaattcgacgccgtggtggtgggggcagggggagctggcctgagagccgcattcgggttgtccgaagccggatttaacacggcctgtgtaacaaagctgtttcccacacgatctcacacagtggcagctcaagggggtattaatgccgcactcgggaatatggaggaggataattggcggtggcatttttacgacaccgtgaaaggttctgactggctgggagatcaggacgcaatccactatatgacggagcaagccccagctgccgtcgtggagcttgaaaactatggtatgccgttcagccggactgaggatgggaaaatttaccaacgcgctttcggcggacagtcactcaagttcggaaagggcggtcaggcacatcggtgctgttgcgtcgcggatcgcaccggtcacagccttctccacacactgtacgggagaagcctgagatacgacacttcttacttcgtggagtacttcgccctggatctgctcatggagaacggggaatgtcggggagtaatagccctgtgtatcgaagatgggtccatacatagaatcagagcaaagaatacagtggtggccacagggggttatgggcgtacatactttagttgtaccagcgcccatacttcaaccggtgatggcaccgcgatgattaccagagcaggactcccatgccaggatcttgaattcgtgcagttccatcccacagggatctatggcgcaggatgtttaatcacagaaggatgccgaggcgaaggtggaatcctcattaactcacagggcgaaaggtttatggaacgctatgccccagtggccaaagatctggctagtcgcgatgtggtgtccagatctatgactctggagattcgagagggcagaggatgcggccctgaaaaggaccatgtctatctccagctgcaccacttgccaccggaacagcttgctactcgcctgcctggtatatcagaaactgctatgatcttcgctggggtggatgtcacaaaggagccgattccagtactaccaacagttcactataacatgggcggaatacccacaaactacaagggtcaggtgctgcgccacgtgaatggccaggatcagatagttcctggcttgtacgcttgtggagaggccgcttgcgcatcagtgcacggcgctaaccgcctcggggctaactctctgctcgaccttgtggtattcggtagggcctgcgcattgagtattgaggagagctgtcgtcccggagataaggtgccacccataaagcccaatgcaggggaagagtccgtcatgaatctcgataaattgagatttgctgatggctcaatcagaacctcagagctgagactcagcatgcagaagtctatgcagaaccatgccgcagtgttccgtgtgggctccgtgttacaggagggttgcggcaagatttccaagctttacggcgatcttaagcacctgaagacttttgataggggaatggtgtggaacacagatcttgtcgaaacactggaattacagaatcttatgctgtgcgcactccaaaccatttatggcgcagaagcacgcaaggagtcacgtggggctcacgcacgcgaggattacaaagtgaggatagatgaatatgactacagcaaaccgatccagggacaacagaaaaaaccatttgaagaacactggcggaagcacactctgtcttacgtggacgtcggtacggggaaagtcacgcttgaatatcggcctgtgatcgacaaaactctcaacgaggccgactgtgccaccgtcccgcctgctattcgtagctactag

SEQ ID NO: 31015 - DNA, 1560 bp, synthetic construct
  misc_feature 1..1560: note = Description of Artificial Sequence: Synthetic coding sequence
  source 1..1560: mol_type = other DNA
atgagcggagtgcggggactgtctcgactgttatccgcaaggcggctggctctcgcgaaagcatggccaacggtactgcaaaccggcacccggggatttcatttcacggtggacggaaataagcgcgcaagtgcgaaggtctccgacagtatctccgctcagtaccccgtcgttgatcacgagtttgacgctgtggtggtcggagccggaggcgctggcctcagagccgcatttggattaagcgaagccggttttaatacagcctgtgtgaccaaactcttcccgaccaggagccacacagttgctgcgcaggggggaatcaatgccgctctgggaaatatggaggaggacaattggcgctggcatttctatgacacttctacgggggacggcactgccatgatcaccagagccggactcccatgtcaggaccttgaatttgttcaatttcacccgaccgggatatacggggctggctgcttaattacagaaggatgccgcggtgaggggggaatattgatcaacagtcaaggtgaacgatttatggaacgctacgcacccgttgcaaaggatctggcatcgagagacgtagtgtcacgcagcatgaccctcgaaatccgggaagggaggggatgcggcccagagaaagatcacgtgtacctacaattgcaccacttgccccctgaacagctcgccacacgtttgcctggcatctccgagactgctatgatctttgccggagtggatgtaacaaaggagcccattcccgtgctacccaccgtgcactataatatgggagggattcccacgaactacaaaggccaggtgttaaggcatgtaaacggacaggatcagatcgtgcccggattgtacgcttgcggcgaggccgcttgcgcttctgtccacggtgccaatcgcttgggtgccaactcccttctagatttggttgtgttcggcagggcttgtgctctcagcattgaagagtcttgtcggcctggcgataaggtccccccaatcaagcctaacgcgggagaggaaagcgtgatgaatttggacaagctgcgttttgccgatggctccatccgcacttctgaattacgattaagtatgcagaagtcaatgcaaaatcatgcggctgttttcagggtgggctcagtcctgcaggagggatgcggaaaaatcagtaagctgtatggcgacctgaaacacctgaaaaccttcgacagagggatggtgtggaacacagatctggtggagacactcgagctgcaaaatctgatgctctgcgcacttcagacaatctatggtgccgaagctcgtaaggagagtaggggggctcatgccagagaggattataaggtgaggatcgacgaatacgactattcgaagcctatccagggccaacagaaaaaaccttttgaggaacattggaggaaacacacattgtcctacgtggatgtcggcactgggaaggtaacattagagtacagacctgtcattgacaagactctgaatgaggccgattgtgccaccgtgccgccagccatccggtcatattag

SEQ ID NO: 31016 - DNA, 6644 bp, synthetic construct
  misc_feature 1..6644: note = Description of Artificial Sequence: Synthetic coding sequence
  source 1..6644: mol_type = other DNA
atgaagcggaaggaacgaatagctaggagactcgaggggatagaaaatgatacacagcccatcctccttcagtcatgcacagggttggtcacacaccgcctgcttgaggaggacacgccccgatatatgagggcctctgatcccgcttctcctcacatcggcagaagcaatgaggaggaggaaactagcgactctagtttggagaagcaaaccagatctaaatattgtaccgaaacatctggggtacatggagattccccatacgggagtggaaccatggatacccactctctggagagcaaggctgagaggatcgcgagatataaagcggagagacgccgacagttggccgagaagtacggcctgacgttggacccagaggcagatagtgaatacctctcacggtatacgaaaagccgaaaagaacccgatgccgtggaaaagcggggaggaaaatcggacaagcaggaagaatccagtcgcgacgctagctcgttgtacccgggaacagagaccatgggcctgcgaacgtgtgctggcgagtcgaaggattatgccctgcacgtgggggacggaagctcagacccagaggtgcttctaaatatcgaaaaccagagacgcggacaagagcttagcgctacacggcaagctcacgacttaagtccagcagctgagtcaagcagcacattcagcttttccggtagggattccagtttcacagaagtccctcgcagtccgaaacatgcccacagttcttctttgcagcaggccgcaagcagatcgccctcctttggagatccccagctgtctccggaggccagaccttctaccggcaaacctaaacacgagtggttcctccagaaagattcggaaggcgacacgccatcgctcattaattggccatctcgggtgaaggtgcgcgaaaagcttgtcaaggaggagagtgcaaggaactcaccagagctcgcctctgaatccgtcacccaaagaagacatcagcccgcaccagtacattatgtgtcctttcagagtgagcactcagcatttgacagggtcccttctaaggccgcaggaagcaccagacagcccattcggggatacgtccaacctgccgatacgggtcatacagccaaactcgtcacacccgagacacctgagaatgcctcggaatgtagctgggtggcgtccgccacacagaatgttcctaagccaccttctctcacagtcttggagggcgatgggagggactcgcccgtcctccacgtatgtgaatccaaagctgaagaagaggagggagagggagaaggcgaagaaaaggaagaggatgtatgcttcactgaggccctggagcagtctaagaaaaccctactggcccttgaaggtgatggactcgtgcgcagccccgaggaccccagcagaaacgaggactttggcaagccagctgtgtccaccgtgacactggaacaccagaaggagttggaaaatgtcgcccagcccccacaggcaccacatcagcctaccgagcgaacagggcgatccgagatggtgctgtatattcagtccgaacctgtttctcaggatgcaaagcctaccggtcataaccgcgaagcttctaagaagaggaaggtgagaacccgatcactcagcgattttaccggccctccacagctacaggccttaaagtacaaggacccagccagccggagagaattagagttaccctcctccaagactgaaggaccttacggagagatctcgatgctagacactaaggttagcgttgcacagcttcggtcagcgttcctagccagtgccaacgcgtgtagaaggcccgagctaaaaagtagagtggaaagatccgctgagggccctggcctccccaccggggtggaaagggagcggggatctaggaaaccccgtaggtattttagccccggagagtcacggaagaccagtgaacggttcagaacccaacccattacatccgcagaaaggaaagagtcagatcggtgcactagtcactctgagacaccaaccgtggacgacgaggagaaggtcgacgaaagagccaagctgagcgtggcagctaaaagacttctgtttcgtgagatggaaaaaagttttgacgagcagaatgtcccaaaacggcgaagcagaaacaccgctgttgagcagaggttacggaggttgcaggatcgcagcctgacacagccaattaccacagaggaggttgtgattgctgccacagagcccattcctgcctcatgcagtggcggaactcatcccgttatggcaagactaccttcaccaaccgtggcccgatctgccgtccagccagcccgattgcaggcctcagctcatcagaaggccctggccaaggaccagacaaacgaaggaaaggaactggctgaacagggcgagccggacagctcaacactctccctcgcagaaaagctggcgttgttcaacaagctgagtcagcccgtgtctaaggctatctctactagaaaccgcattgacacccgccagcgccgaatgaacgccaggtaccaaacccagcctgtcacgctgggcgaagtggagcaggtccaaagcgggaagctgatccccttcagtcccgcagtgaatactagtgtgtcaaccgtcgcatccacagtggcgcctatgtacgcgggtgacctgaggactaagccaccactcgaccacaatgcgagcgccacagattacaagtttagttccagtatagaaaatagtgacagccctgttcgcagcatcctcaaatctcaagcatggcaacctctggttgaaggctctgagaacaaggggatgctgcgagaatatggcgagaccgagagtaaaagggcgctgaccggaagagactccggaatggagaaatacggctctttcgaggaggccgaagcatcttatcctatcctgaatcgcgctcgcgaaggcgacagccacaaagaatccaaatacgcagtgcctcggagaggaagtctcgagcgggctaacccccctatcacccacctcggagacgagccaaaagagttttcaatggctaagatgaatgctcagggaaacctggatctgcgagatagactccctttcgaggagaaagtggaagtggaaaatgttatgaagcggaagttctccctgcgtgccgctgagttcggggaaccaaccagtgaacagacaggaacagctgctggcaagaccatcgcacagactactgcaccggttagctggaagccccaagattcaagcgaacagccacaggagaaactgtgcaagaatccttgcgctatgtttgctgcgggagagatcaagactcccaccggggagggattgctggactcaccctccaagaccatgagcattaaagaacgactggcccttcttaagaaatctggagaggaagactggcggaaccgcctcagtcgcaggcaggagggaggtaaggctccagcgtccagccttcatacccaggaagccggaagaagcctgatcaaaaagagggtcaccgagtcccgggaatctcagatgaccatagaggagagaaaacagctgatcactgttagagaagaagcttggaagactaggggcaggggggcagctaatgattcaacccaattcacggtggctgggcgtatggtgaagaagggcctcgcctcccctaccgctatcacaccggtggccagccctatctgcggaaaaacccgaggtacaacacccgtttctaaacccctcgaagacatagaagccagacctgatatgcagctggaatccgacctcaaactcgaccgattggaaactttcctgaggaggttgaacaacaaggttggaggcatgcacgagacggtgctgactgtaaccgggaaaagcgtcaaagaagtgatgaagccagacgatgatgagacctttgcaaagttttaccggagcgttgactacaacatgcctaggagtcccgtagaaatggacgaagactttgatgtgatttttgacccgtatgcacctaaacttacatcgtctgtggccgagcacaaacgcgcagttcgcccaaaaaggcgggtgcaggccagcaagaaccccttgaagatgctggccgcaagggaggatctgctacaggagtataccgagcagcggctaaacgttgcgttcatggagagcaagaggatgaaggtcgagaaaatgtcctccaactctaacttttctgaggttaccctggctgggcttgcgtccaaagagaacttcagcaacgtcagtctgcgctccgttaatctgaccgagcagaattctaacaacagcgcggtgccctacaagagactcatgcttctgcaaattaaaggcaggcgccacgttcaaactagactggttgagcctagagccagtgctctgaacagcggcgactgttttcttctgctgagccctcattgctgcttcctgtgggtgggcgagtttgccaacgtgattgaaaaggccaaggcatcagagctggctacactgatccagacaaaaagagagttgggatgcagggccacttacatccagaccatcgaggagggtatcaatacccacactcacgctgcaaaggatttctggaagcttctcggtggccagacgagttaccagtccgcaggcgacccaaaggaagatgaattgtatgaggccgctattatagagaccaactgcatatatagactgatggacgacaagctggtgcccgacgacgattattggggaaagatcccaaaatgttctttgttgcaaccaaaagaagtgttggtgttcgactttggatctgaggtttatgtctggcacggtaaagaggtcaccctggcccagcggaaaatcgcatttcagcttgcaaagcatctgtggaacggaacctttgactatgagaattgcgacatcaatcctctggaccctggagaatgtaatccgttgatcccacgaaagggacaaggacggccagattgggccatctttggcagactgaccgaacacaacgagaccatcctgtttaaggaaaaatttctggattggacagagctaaagagatctaatgagaaaaacccaggagagctcgcccagcacaaagaagacccgagaacagacgttaaagcatacgacgtcactcggatggtctccatgccacagaccactgccggaaccatactggatggcgtaaacgttggaagggggtacggattagtggagggccatgatcgaagacagttcgaaatcacctcggttagcgtggatgtctggcacatcctggagtttgactattcacgcctgccaaaacagtccattggtcaatttcatgagggagatgcttacgtcgtaaagtggaaattcatggtgtccacagctgtgggttcaagacagaaaggtgaacacagcgtgagggccgctggaaaggagaagtgcgtctacttcttttggcaaggccgacactcaactgtgtcagaaaaggggacctctgctttgatgacagtggaactggacgaagagcgaggtgcccaggtgcaggtgctccagggcaaagagcctccatgtttcctgcagtgctttcaaggagggatggttgttcactccggtcggagagaagaggaggaagagaacgtgcagtcagaatggagactgtactgtgtcaggggagaagtccctgtggagggcaatcttctcgaggtggcatgccactgtagctcgctgagatcaagaacaagcatggtggtcctgaatgttaacaaggccctgatttatctttggcacggatgcaaagcgcaggcccataccaaggaggttggacggacggcagccaataaaattaaggaacaatgccccctcgaagctggattgcattcttcaagtaaggtgactatccacgaatgcgacgaggggagcgaacctcttggattctgggatgctctgggccgtcgcgacagaaaagcttatgactgtatgctgcaggatcccggttcatttaatttcgcaccaaggctgttcatactgtcgtccagtagcggagactttgccgcaaccgagttcgtgtaccccgcacgggctccctctgtggtgtccagcatgccttttcttcaggaagacctgtatagtgctccgcaaccagcgctctttctcgtagacaaccaccatgaggtgtatctgtggcagggctggtggccgatcgagaataaaattaccggttctgctcgcattcggtgggcgtccgacagaaaatctgccatggaaaccgtccttcaatattgtaagggaaaaaacctgaagaagcccgctccaaaatcttacctaatccacgctgggctcgagcctttaacattcacaaacatgttcccttcttgggagcatcgggaagatattgccgagattactgagatggacacggaggttagtaaccagatcacgctcgtcgaggacgtgttggcaaagttatgtaagaccatctatccgctggcagatttactggccaggcccctgcccgaaggagttgacccactgaaattggaaatttatcttaccgatgaagacttcgagttcgccttagacatgacaagagacgaatacaacgcgttaccagcctggaaacaagtcaaccttaagaaagctaagggcctatttta

SEQ ID NO: 31017 - DNA, 6644 bp, synthetic construct
  misc_feature 1..6644: note = Description of Artificial Sequence: Synthetic coding sequence
  source 1..6644: mol_type = other DNA
atgaagcgcaaggagcgaatcgccagacggctagagggcatcgagaatgatacacagccgatcctactgcagtcatgtactggccttgtcacacataggctcctggaagaggacacccctcgctacatgcgagccagcgatccagccagcccccatatcggcaggagtaatgaggaggaagagaccagtgactctagcctcgagaagcaaacccgctcaaaatattgtaccgagacatcgggcgtgcacggcgactcaccctatggaagtgggacgatggatactcactcattagagagcaaggctgaacgaatcgccagatataaggccgagcgaagacgacagctggctgagaaatatggacttaccctggacccggaggcggacagcgagtatctatcgcgatacaccaagagtagaaaggagcccgacgccgttgagaagcggggaggcaaatcagacaaacaagaagagtcctcgcgagatgcgtcatccctctaccctggaacagaaactatgggcttgaggacttgtgccggagagtcaaaggattacgccttgcatgtaggcgatgggagtagtgatccggaagtactcctcaatatcgagaatcagcggcgtgggcaagaactgtcggcaacgcgacaggctcacgacctctcacccgctgctgaatcatcttctaccttttcattctctggaagagattcctctttcacagaggtcccacggagtcccaagcacgcccattctagcagcttacagcaggccgcttccagatctccctccttcggcgatccacaactttctccagaggccaggccttccacaggcaagcccaagcacgaatggtttctccagaaggacagtgagggtgacaccccatctctcattaactggccctctcgagttaaggtgcgggagaagctggtcaaggaagagagtgccaggaactcacctgagctggcctctgagagcgtcacccaaaggcgccaccagcccgcaccggtgcactatgtttcctttcagtccgagcacagcgcgttcgatagggttcctagtaaggcagcaggaagcacacggcagcctatacggggatatgtgcaaccggctgacacagggcataccgccaaattggtaaccccggagacgcccgaaaatgcaagcgaatgtagctgggtggcgtctgcaacacagaatgtgcctaagcccccttccctgaccgtcctggagggcgacgggagagactctcccgtgctgcatgtctgcgagtctaaagccgaagaagaggaaggggaaggagagggcgaagaaaaagaagaggatgtgtgctttactgaggcccttgaacaaagtaagaaaacactgttggcactcgagggggatggcctagtgcggtccccagaagatcccagtcgaaacgaagattttggaaagccggcagtgtctactgtgaccctagagcaccagaaagagcttgagaacgtggcacaaccacctcaggcaccccaccagcctacggaaaggaccggtagatccgaaatggttctatacatccagagcgagccagtgtctcaggatgctaaaccaacaggacataatagagaagcgtccaaaaagaggaaagtacggacacgaagtttgagtgacttcacgggacctccccagttgcaggcactaaagtacaaggatccagcatctcgaagagaactagaattgcccagttcaaaaacagaagggccatacggggagatatccatgctagacactaaggtctccgtcgctcagttaaggtcagccttcttggcctcagccaatgcctgccgcagacccgaactgaagagccgcgttgaacggagcgctgagggccctgggctgcccacaggcgtggagcgggaacggggttctaggaagccacggaggtatttttctcccggtgagtcccgcaagacctcagaaagattccggacccagccgataacaagtgcagagaggaaggaaagtgaccggtgtacctctcattctgaaactcccaccgtggatgacgaggaaaaggtggatgagcgggctaagctaagtgtggccgcaaagaggttactgttccgcgagatggagaagtcttttgatgagcaaaacgtccccaaacggaggagccgcaacaccgcggtcgagcaaaggttgcggcgtctccaggatagaagtttaactcagcccataacaaccgaggaggtggtaattgcggctacagagccaataccagctagctgttccggcggaactcatcccgtcatggccaggcttccgagtcctacagtcgccaggtctgctgtacagcccgctaggcttcaggcttccgcccaccagaaggccttggcaaaggaccaaacgaacgagggtaaggaactcgcagagcagggagagccagatagctctacgttgtctttggctgaaaaactggctttgttcaataaactgtcacagcccgtctctaaagccatcagcactaggaatcggatcgacacgcgtcagcgcagaatgaatgccaggtatcagactcagcccgttacacttggcgaggtggagcaagtgcaatccggaaagctgatcccttttagccccgcagtgaacacctcagtgtcgaccgtagctagtactgtcgctccaatgtatgccggtgatctaagaactaaacctccgttggaccataatgcctcagctaccgattataagttctcaagttctatcgagaatagcgattcccctgtgaggagcattctgaaaagccaagcctggcagcctctcgtcgagggatctgagaataaaggcatgctgcgggagtatggcgaaacagagtcaaagagggccctgaccggccgagattccggcatggagaagtacggatcctttgaagaagcagaagcatcttaccccatactgaaccgagcccgagaaggagatagtcataaggaatctaagtacgccgtcccaaggcggggtagtcttgaacgagcaaacccaccgatcacgcatctgggcgacgaacctaaggagttcagtatggccaagatgaatgcccagggaaacttggatctgcgggatcgtttgccatttgaggagaaagttgaagtcgaaaacgtgatgaagaggaagttctcgctacgtgctgcagagttcggtgagcctaccagtgaacagaccggcacagctgccggaaaaaccatagcccagaccaccgctcctgtcagctggaaacctcaggattccagcgagcagccccaagagaaattgtgcaaaaatccatgtgctatgttcgccgcaggagaaatcaagacaccgaccggcgaaggcctactggactcacccagcaaaactatgtcaatcaaagagaggcttgctctgctgaaaaaatcaggagaagaggattggaggaatagactgtctcgccgacaggaaggagggaaagctcctgcaagctcgctgcacactcaagaggccggacggtcccttatcaagaagagggtcactgagagtcgggagtcacagatgactattgaagaacgtaaacaacttatcaccgtgagggaggaggcctggaagactaggggacgaggggctgccaacgatagtacacaatttactgtggctggcagaatggttaaaaagggtttggcatctccgacagcaatcaccccagtggcgagcccgatctgcggaaaaacaaggggcacgactcctgttagcaaacctctggaggacattgaagcaagacctgatatgcagctggagtccgatctgaagctcgatcggcttgagactttcctgaggaggttgaataacaaggtcggcggtatgcacgaaacagtgctcactgtgaccggtaagagcgtcaaggaagtgatgaagccggatgatgatgagacttttgctaagttctacagatcagtggactacaatatgcccagatcgccagtggagatggacgaggatttcgatgtcatctttgatccctacgctcctaagttgaccagttccgtcgccgaacataaaagggccgtaagacccaagcggcgagtgcaagcaagcaaaaaccctttaaagatgttagccgcacgggaggacctcctacaggagtacactgaacagaggctgaatgtggccttcatggaatctaaaaggatgaaggtggagaagatgagctccaactcaaacttcagcgaggtgactctggctggcctggctagtaaagaaaatttctcaaatgtgagcctgaggagtgtgaatctgactgagcagaattccaacaatagcgcagtgccgtacaaaaggctcatgctgctgcagatcaagggacggagacacgtgcagacaaggctggtggagcctcgggcaagcgccctcaattcaggggattgtttcctgctgttgagcccccattgttgtttcttatgggtgggcgagttcgccaacgtgatcgagaaggctaaagcatcggagctggctaccttaattcagactaagcgcgagttaggttgtagagccacctacattcagactattgaagagggtattaatacacacactcacgccgctaaagatttttggaagctccttggcggtcagactagctaccagtctgcaggggacccgaaggaagacgaactctacgaagcagccatcatcgagaccaattgtatctacaggttgatggacgataaacttgtgcctgacgatgattactggggcaagataccaaaatgcagcttgctgcaacctaaagaggtgctggtgttcgatttcgggagcgaggtctacgtgtggcatggcaaggaagtaacattagctcaaaggaaaatcgccttccaactggcgaaacacctttggaacgggacttttgactatgagaactgtgacattaatccgttggatcccggtgagtgcaacccccttatcccgaggaaagggcaggggcgtcccgattgggccatatttggtcgcctcacagagcataacgagaccatcctcttcaaggaaaaatttctagattggaccgagttaaagcgctcaaatgagaagaaccctggggaattggcccaacataaggaagaccccaggactgatgttaaggcttatgacgttacacggatggtctctatgccacagacaaccgcaggcacaatcttggatggagtgaatgtgggaaggggatatggactggtagagggtcacgaccgcagacagttcgagatcaccagcgtttctgtggatgtgtggcatattctggagtttgactattcacggctgcccaaacagtcaatcggccagtttcacgagggggatgcctatgttgttaaatggaaatttatggtgagtactgcggtgggatctagacaaaagggagagcacagcgtgagggccgcaggaaaggaaaagtgtgtgtacttcttctggcaaggcagacacagcactgtgagcgaaaaggggacctcagccctcatgacagttgagctggacgaggagcgcggtgcccaagtgcaagttctacaagggaaggaaccgccatgttttctgcagtgtttccaggggggtatggtggtccactccggccgaagggaggaggaggaggagaatgtgcagtcagagtggcgcttgtactgtgtacgtggcgaagtgcctgtcgaaggtaacctcctggaagttgcatgtcactgctctagcttaagatcacgaacatccatggtggttctgaacgtgaataaggcgttaatatatttgtggcacggctgcaaggcccaagcccacaccaaagaagtcggacggacagctgccaataagatcaaagagcaatgccccctggaagcagggctgcactcctcaagcaaggtgactatccatgagtgcgacgagggttccgagcctcttggattctgggatgccctcggccgtcgcgaccgcaaagcttatgattgtatgttacaggacccaggcagcttcaactttgcacctcgactgttcattctctcatctagttctggcgatttcgctgccacagagttcgtgtaccctgcacgcgcacctagcgtagtcagttcaatgccctttctacaggaggatctatatagtgcacctcagcctgcccttttcctggtagacaaccaccacgaagtatatttatggcagggatggtggccaattgagaataaaattactggctccgcgcgaatcagatgggcttcagatcgtaagtcagccatggaaactgtcttacagtactgtaaagggaagaacttgaaaaagcccgcacctaagtcttacttgattcacgccggacttgaacccctgacatttacaaacatgttccctagctgggaacaccgcgaagacatcgccgagatcacggaaatggacacagaggtgtctaatcagattaccctggtggaggatgtgctggcgaaactgtgtaaaacaatctacccgctcgcagacctgctcgcccgaccccttcctgaaggagtagaccccctgaagcttgaaatttatctcactgacgaagatttcgagttcgctctggatatgacccgtgacgagtataatgccttgccagcatggaaacaggtgaaccttaaaaaggctaagggcctattcta

SEQ ID NO: 31018 - DNA, 5367 bp, synthetic construct
  misc_feature 1..5367: note = Description of Artificial Sequence: Synthetic coding sequence
  source 1..5367: mol_type = other DNA
atgaagcgaaaggagcggattgccaggcgtctcgaaggcatcgagaacgatacacaacccatccttctccagtcttgcaccggcctagtgacccacagactactagaggaggatacacctaggtacatgcgtgcaagtgatcccgctagtccacacatcgggcgttcaaacgaggaggaggagacgtctgattcaagtttggagaagcagacccgctccaagtattgtactgagacatctggtgtgcatggtgactcaccctatgggagcggaaccatggatactcactccctcgagagtaaggccgaacgaatagccaggtacaaggcagaaaggcggcgtcaacttgccgagaagtatggtctgaccctggatcccgaagcagacagtgagtatctatctcggtacactaaaagcagaaaggaacctgatgccgtggagaaacggggaggaaagtccgataaacaggaagagagcagccgcgatgcatccagtctgtatccaggcactgagacgatggggcttcgcacctgcgcaggagagtcaaaggactacgcgctgcatgtgggggacggttcttcagaccccgaggtattattgaacattgaaaaccagcgacggggacaggaactcagtgcaaccagacaggctcatgatctctcgccagcagcagagagcagttcaacattctcctttagcggcagagacagtagtttcactgaggttcccaggagtcccaagcatgcccacagctctagcctgcaacaggcggcatcccgatctccaagctttggagatccacagcttagtcccgaagcgcgtcccagatgtaccagccattccgagacacccaccgtggacgatgaggaaaaagtggatgagcgcgcaaaattgagtgtggccgcaaaaaggctcctgttccgggagatggagaagtctttcgacgagcaaaatgtacccaaaaggagatctaggaataccgcagtcgagcagaggttgcggagattgcaggatcgttctctgactcaaccgattaccacagaggaagttgtcatcgccgcaacactgcaggcgtccgcacaccagaaggccttggctaaagaccagaccaatgagggcaaggagcttgccgagcagggggaacctgatagttccaccctgagcctcgccgagaagctcgctctgttcaacaaactgtcccagcctgtctctaaggccatttcaactcgcaacagaatagatactcggcagcgcagaatgaatgcaaggtaccagacacagcccgtcacgttgggagaggtcgaacaggtccaaagtggcaagctgatcccattctcccctgctgtgaacacatcagtgtcgactgtggctagcactgtcgcccctatgtacgctggcgacctcagaaccaagccacctctcgatcacaacgctagcgcaacagattacaagttctctagtagcatcgagaatagtgatagcccagtcagatctatactcaagtcccaagcgtggcagcccctagtggaaggctccgagaacaaaggtatgttgagggaatacggggagactgaatccaaacgagccctcaccggccgtgactcaggcatggagaaatatggcagcttcgaggaggccgaagccagctaccccattctgaatcgggctagggagggggattctcacaaggagagtaagtatgccgtgccacgtcgcggtagcttggaacgagcgaacccccctatcacacatcttggagacgagcctaaggagttttccatggctaaaatgaatgcccagggaaatctcgatctgcgggatagactgcctttcgaggagaaggtggaagtcgagaacgtcatgaagcggaagttctctctccgggctgccgagtttggcgagcctacatctgaacaaactggcactgccgctggcaagaccattgcacaaaccaccgccccagtatcctggaagccccaggactcttcagagcagcctcaggaaaagttgtgtaagaatccctgcgccatgttcgcggctggggagatcaaaacacctactggtgagggcctgctcgactccccatcaaagacaatgtcaatcaaggaacgtcttgctctattgaagaagtctggagaggaggactggagaaatcgcctgtctagacgccaggagggagggaaggcacccgcatcctcactgcatactcaggaggcaggcaggtccctgatcaagaagagagttaccgaaagcagagaatcacaaatgacaatcgaagagcggaaacagctgattactgtccgtgaggaggcgtggaaaactaggggcagaggtgctgcaaacgactccactcaattcactgtcgctggcaggatggttaaaaaaggactcgcaagtccaaccgccatcacacccgttgcctcgcctatatgcggtaagaccaggggaaccacaccggtttcaaagcctcttgaagatattgaggcgcgtcccgacatgcaactggaaagtgacctgaaactggatcggctggaaactttccttcgacgacttaacaacaaggtgggaggtatgcatgagactgtcctgactgtcaccggtaagtcagtcaaagaagtgatgaagcccgatgacgatgagaccttcgcgaaattttatcgctccgtcgactacaatatgcctagatcccccgttgagatggatgaggattttgacgtaatattcgacccatacgcccctaagctgacctcaagcgtcgccgaacataagcgggcagtacggccaaaaaggcgagtgcaggccagtaaaaacccgctcaagatgttagctgcccgagaggatctgctgcaggaatatactgagcagaggctgaacgtggccttcatggaatccaagagaatgaaggtcgaaaagatgtcatcaaacagcaattttagcgaggtcacactggctggcctcgcaagcaaggaaaatttttcaaatgttagcctgcgtagtgtcaacctaaccgaacagaacagtaacaactccgccgtcccatacaaaaggctgatgctgctccagattaaaggacggaggcatgtccaaactcggctggtggaaccacgcgcttccgcactcaacagcggcgattgtttcttgttgctaagcccccactgttgttttctgtgggtcggagaatttgcgaacgtaatcgagaaggccaaggccagcgagcttgcaacgctcattcagactaagcgggagcttggttgcagagccacctatattcagactatcgaagaaggaattaatacacacacacacgctgcgaaggatttctggaagctcttagggggacaaactagttatcagagcgccggagatcctaaggaagacgaattgtatgaagcagctatcatcgagaccaattgcatctatagattaatggacgacaaactcgtccccgatgacgattattggggcaaaattccaaagtgtagccttcttcagccaaaggaggtgttggtctttgattttgggagtgaggtatatgtgtggcacggaaaagaagtgaccttggcccagcggaagatcgcattccagctcgccaaacacctctggaacggcacctttgattacgagaattgtgatatcaatcctctcgatcctggcgagtgcaaccccctgatcccccgaaaaggtcagggtaggccggactgggccattttcggcagactgacagaacacaatgagacaatccttttcaaagagaagttcttggactggacagaattaaagagaagtaacgaaaaaaacccaggagagcttgcacaacacaaagaagaccctcgcaccgacgtaaaggcctatgacgtgacacggatggtgtccatgccgcagacaacagcaggcactatcctcgacggagtcaacgtgggcagaggttacggactcgtggaggggcatgaccgtcggcagtttgagattaccagtgtgtctgtagacgtctggcacatcctggagttcgattattctaggctgcctaagcagagcatcgggcaattccatgaaggagatgcatacgtggtaaagtggaagtttatggtcagcaccgcggtgggttcaagacagaaaggggaacattctgtgagggccgctgggaaggagaaatgcgtctactttttctggcagggcagacatagtactgtttccgaaaagggaacctcagcactcatgaccgtggagctggacgaggagaggggtgcacaggtccaggtactccagggcaaagagcccccatgcttcctccagtgttttcaggggggaatggtggtgcatagtggcagacgagaggaagaggaggaaaacgtgcaatcagagtggcgactgtactgcgtccgcggagaggtacccgtggaggggaacctgttggaggtggcctgtcactgctcttccctgcgatcaagaacttctatggtggtgcttaatgtgaacaaagcattgatctatctgtggcatgggtgtaaagcccaagctcacactaaggaagtaggaagaactgcggctaataagatcaaggaacagtgccccctggaggcaggactgcactcaagctctaaggttactatacacgaatgcgacgaaggaagcgagccattgggattttgggatgctctgggacgtcgcgatcgaaaagcctatgattgcatgctgcaggacccaggttcctttaattttgctcccaggctgttcattctgtctagctcatctggggatttcgccgcaacggaatttgtctaccccgcacgcgctccttcagtagtgtcctcgatgccgtttctgcaagaagacctgtattctgcccctcagcctgctttgtttttagttgacaatcaccacgaggtctatttatggcaggggtggtggccaattgagaacaaaatcaccggatccgctaggatccgttgggcttcagacagaaagagtgctatggaaacggtgctgcaatattgcaaggggaagaatctgaagaaacccgcacccaaatcctatctaattcacgccggactcgagccactgaccttcaccaatatgttcccgtcatgggagcatcgcgaggacatagccgagatcaccgaaatggacaccgaagtatcaaatcaaattactttggttgaagatgtattggcgaaactgtgcaaaactatttatccgctggccgacctgctggctaggcccctgccggaaggtgttgacccactaaagctcgaaatttatctgacagacgaagatttcgaatttgccctggatatgactcgcgatgaatacaatgcacttcctgcttggaaacaagttaacttgaaaaaggctaagggcctcttctag

SEQ ID NO: 31019 - DNA, 3387 bp, synthetic construct
  misc_feature 1..3387: note = Description of Artificial Sequence: Synthetic coding sequence
  source 1..3387: mol_type = other DNA
atgttcgctgccggtgaaattaaaaccccgaccggtgaaggcctgttggatagtccaagcaaaacaatgtcaatcaaggaacgcctggccttattgaaaaagtccggggaggaggattggagaaatcgattgagcaggcggcaggagggtggaaaagcgcctgccagttccctgcacactcaagaagctggccgttccctcatcaagaaagaggaggggggtgttgccgacgattcggccataagcaacctcctctggcgggtcaccgaatcacgcgaatctcagatgaccatcgaagaaagaaaacaactgatcactgtccgggaagaggcgtggaaaacccgaggcaggggtgctgcaaatgactctactcaatttacagttgccggaaggatggttaagaaggggttggcctcccctaccgccatcaccccagtggccagtccaatctgtggtaagaccagaggtaccacaccggtgtcgaagcctctggaggatattgaggccaggcctgacatgcagctcgaatccgatcttaaactggatcgattggagactttccttcgcagactgaataataaagttggagggatgcacgaaactgtccttactgttactggcaagagtgtgaaggaagtaatgaaaccagacgacgacgagacctttgctaaattttacaggtcagtggactacaatatgcctaggagcccggtggaaatggacgaggacttcgatgtaattttcgatccatacgcccctaaactgaccagcagtgtggccgagcataaaagggccgtgcgccctaagcgccgagttcaggccagcaagaacccactaaaaatgctggcagcccgagaagatctgcttcaggagtacacagaacagcggttaaacgttgctttcatggagtctaagagaatgaaggtagagaagatgtcctctaattccaatttctcagaagtaactctggctggactggcttccaaggagaatttcagtaacgtgagtctgcggtcagtcaatctgacagaacagaactccaataactccgccgtaccctataagaggctaatgctgctgcagatcaaagggaggcgacacgtgcaaacaaggctcgtggaacctagagctagcgccctgaactctggcgactgctttctgctgctgtcacctcactgttgcttcttgtgggtgggggaatttgccaacgtgatcgaaaaggcgaaagcaagtgagctcgcaactttaatccaaaccaagagggagcttggatgtagagccacctacattcagaccatcgaagagggtattaatacccacacccacgctgccaaagatttctggaaactcttgggcggacagacttcgtaccagtcagctggagatccaaaggaggatgaactgtatgaagccgctatcatcgagaccaattgtatctatcggctcatggacgataaacttgtgcctgacgacgactactggggcaaaataccaaagtgctctctgctgcaacccaaggaagttttggtgtttgattttggctccgaagtctatgtttggcacgggaaggaggtgacactggcacaaagaaagatcgcattccaactggctaaacacctgtggaacggtacattcgactacgagaattgtgacataaatcctctcgatccaggcgagtgtaatcctctgatcccacgcaaaggacaggggaggcctgattgggccatcttcggaaggctcactgaacacaacgaaacaattttgtttaaagagaaatttctagattggactgagctcaaaaggtccaatgaaaagaatcccggtgagctcgcccagcataaagaggaccctaggaccgacgttaaggcatacgacgtgacaagaatggtgagcatgccccaaactaccgcgggaacgattctggatggagtcaatgtcggccgagggtacggtctggtcgaagggcacgatagaagacagtttgaaatcacaagtgtcagcgtggacgtttggcacatactggagtttgactactctcggcttcccaagcagtcaatcggacagttccacgagggagatgcatatgtcgtcaaatggaagttcatggtaagcaccgcagtgggttctcgccagaagggcgagcactcagtaagagctgccggtaaggaaaaatgtgtgtattttttttggcagggcaggcactcaacagtgtcggaaaaggggacgagtgccctaatgaccgtggaactcgacgaggagcgtggtgcacaggtgcaggtccttcaagggaaggaacctccgtgctttctccagtgttttcagggcggaatggtagtgcacagcgggcgacgggaggaggaagaggagaatgtgcagtccgaatggaggctctactgtgtcagaggagaggtgcctgtggaaggcaatcttttggaggtggcttgtcactgctcatccctacgctccagaacaagtatggtcgtgctcaacgtgaataaagctttaatctacctgtggcatgggtgcaaggcacaggcccatacaaaagaagtcgggagaaccgccgctaacaaaatcaaggaacagtgccccctggaagccggactccactctagcagcaaagttaccatccatgagtgtgatgagggatctgagccattggggttttgggatgccctaggtaggcgcgaccggaaagcctatgactgtatgttgcaggaccccggaagcttcaattttgccccacgacttttcattctctccagcagctctggggatttcgcggctacagagtttgtgtaccccgctcgcgcaccctcagtcgtctccagtatgccatttctccaggaagatctgtattcagcacctcagcccgctctgttcctggtcgataatcaccacgaggtttatttgtggcagggatggtggccgatcgagaataagattaccggatccgccaggatccggtgggcatctgaccggaagagtgccatggagaccgtactccagtattgcaagggcaaaaatctgaaaaagccggctcccaaaagttatctaatccatgccggactagagccactaacatttacaaatatgtttccaagttgggagcaccgtgaggatatcgctgaaattaccgagatggatacggaagtcagcaatcaaatcaccctggtcgaagacgtcctggccaagttgtgcaagactatctaccctctagccgacttgctggcaaggcccttgccggagggagttgatccccttaaattggagatctatctaacagacgaggactttgaatttgccctggacatgacgcgcgatgagtacaatgccttgccagcatggaagcaggtgaacttaaagaaggccaagggcctgttttag

SEQ ID NO: 31020 - DNA, 2301 bp, synthetic construct
  misc_feature 1..2301: note = Description of Artificial Sequence: Synthetic coding sequence
  source 1..2301: mol_type = other DNA
atgaaacgaaagttctctctgcgagctgccgagtttggtgagccaacaagtgaacagaccgggactgccgctgggaagacaatcgcccagactactgcgccagtgtcctggaaacctcaggattcgtctgagcagcctcaggagaagctgtgtaagaatccctgcgcaatgtttgccgctggcgaaattaagacccctacgggggagggcttgctcgatagcccttccaaaacaatgtccattaaagaaaggctggcactcctgaagaaatctggcgaagaggactggaggaatagactttcacggaggcaggagggtggcaaggcccctgccagctcccttcacacccaagaggccggtaggtctctgataaaaaagagggtcacagagagtagagaatcccagatgacaatagaggagcgcaagcagctcatcaccgtccgggaggaggcctggaagaccaggggcaggggagcagctaatgacagcacccagttcaccgtagcagggaggatggtaaaaaaagggctggcttcacctactgcaataacccctgtggcgtcccctatttgtggcaaaacaaggggcaccacaccagtgagcaagccgctagaggacatagaggcaaggcccgatatgcagcttgaaagcgacctgaagctggacagattggaaacttttcttagacggttaaataataaagtgggagggatgcatgagacagttttaaccgtgactgggaagagcgtgaaggaagtaatgaaaccagatgacgatgagacatttgccaagttttacaggtccgttgactacaacatgcccagatctcccgtggagatggacgaggacttcgacgtcatttttgacccgtatgctcctaaattgactagctctgtcgcagaacacaaacgagcagtaagacccaagaggcgcgtgcaggcctcaaaaaacccccttaaaatgctcgccgcaagagaggacctgctccaggagtacactgagcaacggctgaatgtggcctttatggaatcaaaacgtatgaaggtagagaagatgtcctcaaacagcaacttttcagaagtgacgctggccggactggcaagcaaggaaaattttagcaatgtctccctgcgctctgttaatctgactgaacagaatagcaataatagtgctgtcccatataaacgactgatgcttttgcaaattaagggaagacggcatgttcagacccgccttgtagagcctagagcaagtgcgctgaactcaggagattgcttccttctcctgtctccacattgctgctttctgtgggtcggcgagttcgctaatgtgattgagaaggccaaggcctccgagcttgcaaccctgattcaaactaaacgagagttaggatgtcgggcaacctatatacagacaatcgaagaggggataaatacccatacccacgccgctaaggacttctggaaattattggggggacagacgtcataccagtctgccggtgatccaaaagaagatgagctgtacgaggctgctattatagaaaccaattgcatctaccgcctcatggacgataaattagtgcctgacgatgattattgggggaaaatccctaaatgtagcctgctacagccaaaagaggtgcttgttttcgacttcggctcagaagtttatgtttggcatggtaaagaagtaacacttgcacagcgcaaaattgctttccagctggcaaaacacctatggaacggcacatttgactacgagaactgtgacattaatcctctggatcccggagagtgcaatccacttatcccacgaaaaggacagggacgcccagattgggccatctttggcagactcactgagcacaacgagaccattttgttcaaggaaaagttcctcgattggacagaactaaagcggtcaaatgagaagaatcctggagaactggctcagcataaggaggacccacgaactgacgtgaaggcatacgatgtcacgagaatggtttcaatgcctcagactacagccggaactatactggatggagtgaatgtcggaaggggctacgggctcgtcgagggccacgaccgaagacagttcgagattacctccgtgtctgttgacgtgtggcacattctagaatttgattattcacgcctaccaaagcagtcaatcggtcaattccatgaaggagatgcatacgtcgtaaagtggaagtttatggtgtcaacggccgtgctgagagcctggcgcggagctcgtggacgagagttcgcaggatcaggactctcattgtag

SEQ ID NO: 31021 - DNA, 1758 bp, synthetic construct
  misc_feature 1..1758: note = Description of Artificial Sequence: Synthetic coding sequence
  source 1..1758: mol_type = other DNA
atgaattcgagcgatgtgtcatccctgaaacacccttcttccttggcttcaccgacagcaattacacccgtggcatcacctatctgcggcaagaccagaggtacgacccctgtgtcaaaaccgttagaagatattgaagcacgtcccgatatgcaactggaaagcgatctgaaactcgaccggctcgagaccttccttaggcgcctaaataataaagtgggtggaatgcatgaaacagttctgacggtgacgggaaagagcgttaaggaggtcatgaaacccgacgatgacgaaactttcgcgaaattttatcgcagcgtggactacaacatgcccagatcccctgtggagatggacgaagatttcgacgtcatttttgacccgtatgctcccaagcttaccagcagcgtagcagaacataaacgtgccgtgaggccgaaaagaagggtacaggccagcaaaaatcctctcaagatgctggccgctcgggaagacctgctccaggagtacacagagcagagactcaacgtagcattcatggaatcaaaaaggatgaaggttgaaaaaatgtcttctaattcaaacttcagcgaagtgactctggcgggactcgcttccaaggagaattttagcaacgtgtcccttcgctcagtgaacctcaccgagcagaattcaaacaacagcgctgtgccctataaacgcctcatgctcctgcagattaagggaaggcgtcacgtgcagacccggctggtggagcccagagcatcagctttgaatagtggtgattgcttcctgctactctccccacattgctgcttcctttgggttggcgaatttgccaacgtgattgagaaggccaaggcttctgaattggcgaccctaatccagactaaacgtgaactgggctgtagagccacctatatacagacaatcgaggagggaatcaatacccatacacatgctgctaaggacttttggaagctgctgggtgggcagacatcttaccagagcgcaggagatcccaaagaagatgagttgtatgaggccgcaatcattgaaacaaattgcatctacagactgatggacgataagttggtgcctgacgatgattactggggtaaaatcccgaagtgctccctcttgcaacctaaggaggttctcgtgttcgattttggaagcgaagtttatgtttggcatggaaaagaggtcacccttgcacagcgcaaaatcgccttccaacttgcaaagcatttgtggaacggaaccttcgactacgagaattgtgacatcaatcctttagacccgggtgaatgcaaccctctcatccctcggaaaggccagggccgacccgactgggccatcttcgggaggctcaccgagcataacgaaaccatcctgtttaaggaaaagttcttggactggacagagcttaagaggagcaacgaaaagaatcccggagagctggcccagcataaagaggacccgagaacagacgttaaggcttacgatgtgacgcggatggtcagcatgcctcagacaacggccggtactattctggatggtgttaatgtgggtcgcggttacggtttggtagagggtcacgatcgaaggcagtttgagattaccagcgtgtctgtcgatgtgtggcatattctcgagttcgattactccagattacccaaacaatcaatcgggcagttccatgagggggatgcatatgtagtgaagtggaaattcatggtttccaccgccggttag

SEQ ID NO: 31022 - DNA, 636 bp, synthetic construct
  misc_feature 1..636: note = Description of Artificial Sequence: Synthetic coding sequence
  source 1..636: mol_type = other DNA
atggtagctcataaccaggtggcggctgataacgccgtgagtaccgcagccgaacccaggaggagaccagagccttcctccagctcaagcagttctcctgccgctcctgcccgaccgcgtccatgccccgcagtgcccgctcccgctcccggagatactcattttagaacttttagaagtcatgcagattaccggagaattacaagagcttctgccttgcttgacgcttgcgggttctattgggggcctctaagcgtgcatggtgcacatgagaggcttcgtgccgaacccgttggtacattcttagtcagggactcccggcaaaggaattgcttctttgccctgtcggtgaagatggctagcgggcctacctccattagggtccatttccaagccggaaggttccacctggacgggagcagagagtccttcgattgcctcttcgaattattggaacactacgttgccgctcccagacgtatgctcggcgcaccactccggcaacgacgtgttcggcctcttcaggagctctgtagacagcgtatagtggccactgtcggacgagaaaacctggcaagaattccactgaaccccgtgctacgtgattacttgtccagttttccctttcagatttag

SEQ ID NO: 31023 - DNA, 678 bp, synthetic construct
  misc_feature 1..678: note = Description of Artificial Sequence: Synthetic coding sequence
  source 1..678: mol_type = other DNA
atggtgacacattccaaattccccgctgcagggatgagcagaccacttgatacctccctcagactgaagaccttttcctccaagtcagagtaccaactggtcgttaacgcagttaggaagctgcaggagtcgggattttactggtctgcagttacaggcggtgaggctaacctgctgctgagtgccgaaccggcaggcacctttctcatacgcgatagttccgatcagagacacttcttcaccctgtctgtaaaaactcagtccggcaccaaaaatctgagaatccaatgtgagggtggctcattctctctccaaagcgatccacgtagtacccaaccagtgccgaggtttgactgcgttcttaagctcgtacatcactacatgccccctcctggtgcgcctagctttcccagcccgcctaccgagccttcctcagaggtcccagaacaaccttcagcacagccattgccaggctcacctccgagaagggcttattacatctattctggaggcgagaaaatcccgttagtgttgagccgaccactgagctccaacgtggctactttacagcatctgtgccggaaaactgtaaatggccacctggatagttatgaaaaggtcacacagttgcccggacccatacgagaattcctggaccagtatgacgcccctctgtag

SEQ ID NO: 31024 - DNA, 1302 bp, synthetic construct
  misc_feature 1..1302: note = Description of Artificial Sequence: Synthetic coding sequence
  source 1..1302: mol_type = other DNA
atggctgagctgagaccttccggtgctcctggcccaacggcaccacccgctcccggtccgacagccccacccgcattcgcttcactgtttccccctggtcttcacgctatctatggcgagtgtaggcgattgtacccagaccagccaaacccactgcaggtgacagctattgtgaagtattggctgggaggcccagatcctctggactatgtctccatgtataggaacgtcggaagcccaagtgcaaacatccccgagcattggcactacatcagctttggcctgtcagacctgtatggagataatagagttcacgaattcacaggcaccgacggcccttcaggttttgggttcgaacttacctttcggcttaaacgcgagactggagaaagcgcccctccgacatggcctgccgagttaatgcagggtctggccagatatgtgttccagagcgagaacaccttttgctctggggatcatgtgagctggcatagccccctcgataatagtgagagcagaatccagcacatgttgctaacggaggatcctcagatgcagcctgtgcagaccccatttggcgtggtcaccttcttgcaaattgttggggtgtgcaccgaagaactgcactccgcccagcaatggaacggccaggggatcctggagcttcttagaacagtgcctattgctgggggaccttggctgatcacggacatgcgcagaggtgagacaattttcgagattgacccgcatttgcaagagagggtagacaaggggattgaaacagatgggtcgaatctatctggggtgtccgccaaatgcgcctgggacgacctgagtagacccccagaagatgatgaagattctcgtagcatctgtatcggtacccagcctcgacggctgtccggcaaggacaccgagcagattcgagagaccctacggaggggcctggagataaactctaaaccggtgctaccccctatcaacccacagcggcaaaacggcctggcacacgatcgtgcaccttcccgcaaagatagcctcgaatccgactcttccacagccattattccacatgaattaatccgtacaagacaattggagtcagtccatttaaagtttaaccaggagtctggcgctctaatccctctgtgtctgcgaggacgcctactccacggtagacattttacatataagtcaattaccggcgacatggctatcacgttcgtgagcaccggagtggagggggctttcgcaacagaagaacacccatatgctgcccacgggccttggcttcagctttag

SEQ ID NO: 31025 - DNA, 1455 bp, synthetic construct
  misc_feature 1..1455: note = Description of Artificial Sequence: Synthetic coding sequence
  source 1..1455: mol_type = other DNA
atggccgaactgaggccgagcggtgccccaggcccaacagcgcctcccgctcccggacctactgcccctccagcgtttgcgagcttgtttcctccaggccttcatgccatatacggcgaatgtagaaggctgtatccagaccagccgaacccgttacaggtaactgctatagtgaaatactggctcggaggacccgatccactggactatgtaagcatgtacaggaatgttggcagtccatccgcaaatattcccgagcactggcattatatctcgtttggcctttctgatctgtacggtgacaatagagttcacgaattcaccgggacagacggtcccagcggcttcgggttcgaactgaccttccgtctcaagcgggaaacaggcgaatccgctcctcccacatggcctgccgaattaatgcagggtctggctcggtacgtctttcagtccgaaaacacattttgtagtggagaccacgtgtcatggcattcccctcttgataacagtgagtctcgcatccaacacatgctgctcacagaggacccgcagatgcaaccagtgcagacacccttcggcgtggtaacgttcctccagattgtgggcgtttgtaccgaggagctgcattcagcgcagcagtggaatggccaaggaatcctagagttactgaggacggtgccaatcgctggaggcccatggctgattaccgatatgcgacgaggtgaaaccattttcgagatcgatccccatctgcaagagcgggtggataagggcattgaaacggacggaagcaacttgtccggggtctccgctaagtgtgcttgggatgacctgtcaagacccccagaggatgacgaggactctaggagcatttgtataggcactcaaccccgtagactgtcaggcaaggatacagaacagatccgagaaactctgcgacggggactggagattaactccaaaccagtgctgccccctataaaccctcagcggcaaaacggactagcacatgatcgcgctccgtcgaggaaagactccctggagtctgactcctccaccgccatcattccccacgaactcatccggaccagacagttagagtctgtccacctgaaattcaaccaagaatccggcgctctgataccactgtgcctgcggggtcggcttcttcacggcaggcacttcacgtacaagagcattaccggcgacatggctatcacctttgtgagcactggtgtggaaggagccttcgcgactgaggagcacccctacgctgcacacggtccatggctccaaatcttactaactgaagaattcgtggagaagatgcttgaggacctcgaagatctgacttctcccgaggaattcaagctgccaaaagagtattcgtggccagagaagaagctcaaggtcagtattctgcccgatgtcgtcttcgactcaccactgcactag

SEQ ID NO: 31026 - DNA, 240 bp, synthetic construct
  misc_feature 1..240: note = Description of Artificial Sequence: Synthetic coding sequence
  source 1..240: mol_type = other DNA
atggcgaggtcacgactgactgcaacgagcgtgtcccaggtgcaggagaacggctttgtgaagaaactggagcccaagagcgggtggatgacatttctggaagtgactgggaagatctgtgaaatgctcttctgcccagaggctattctcctgacaagaaaagataccccttactgcgaaaccggcctcattttcctcactctgaccaagacgatcgccaacacatacttctacttttag

SEQ ID NO: 31027 - DNA, 240 bp, synthetic construct
  misc_feature 1..240: note = Description of Artificial Sequence: Synthetic coding sequence
  source 1..240: mol_type = other DNA
atggcccgttcgagactgacagccacctctgtgagccaagtacaggagaacggatttgtaaaaaaacttgaacccaaatcaggttggatgaccttcctggaggtgacaggaaagatctgcgaaatgctattctgcccggaggccatactgctgacccgcaaggatactccctactgcgaaacaggacttatattcttaacactgacaaagacaatcgccaatacttacttttatttctag

SEQ ID NO: 31028 - DNA, 1245 bp, synthetic construct
  misc_feature 1..1245: note = Description of Artificial Sequence: Synthetic coding sequence
  source 1..1245: mol_type = other DNA
atgaacctgcagcgctactggggcgagattcccatcagcagctcccagaccaacagatctagcttcgatctgctgcctcgcgagtttcgactggttgaagttcacgatccccctctccatcagccaagtgctaataaacccaagccccctactatgctggacataccaagtgaaccgtgttctttgacaatccataccattcagctgatccaacataatagaaggctgaggaacctgatcgccaccgcccaagcacaaaaccagcagcagacagagggtgtaaagacggaggagtccgaacctctgccatcctgccctggctctccacctctccctgatgacctgctacccttggactgcaagaatcccaatgccccatttcagattcgacattctgatccagagagtgacttttatcggggaaagggagagccagttaccgaactcagttggcactcttgtaggcaattgctgtatcaggccgtggccactattttggcacacgcaggcttcgactgcgcaaacgagagtgtgttggaaacactgacagatgtggctcacgagtactgtttgaaatttaccaagctactcaggttcgcagtagatcgcgaggctagacttgggcagacaccctttccggacgtcatggaacaggtctttcacgaggtgggaatcgggagtgtgctctctcttcagaagttttggcagcataggatcaaagattaccactcctacatgctgcagatctctaaacagctgagcgaggaatatgagagaatcgttaaccccgagaaagcaacagaggacgccaaacctgtgaagatcaaagaagaaccagtgtctgatatcacatttcccgtttcggaggaactcgaggccgatctggcctccggtgatcagtcccttcccatgggtgtgctgggtgcccagtcagagagatttcccagcaatctggaggttgaggccagtcctcaggcaagctctgcagaggttaacgccagccctctgtggaatctcgcccatgtgaagatggagccccaggaatccgaggaaggaaatgtgtctggccatggcgtgctgggaagcgatgttttcgaagaacctatgtccggcatgtcagaagcaggcattccccagagcccagacgactctgactccagttatggcagccactccacagatagcttgatgggaagctcccctgtcttcaatcagcgctgcaaaaagcgaatgcgcaagatctag

SEQ ID NO: 31029 - DNA, 840 bp, synthetic construct
  misc_feature 1..840: note = Description of Artificial Sequence: Synthetic coding sequence
  source 1..840: mol_type = other DNA
atgaacctgcagagcggaaagggcgagcccgtcactgagctcagctggcattcctgccggcagttgctctaccaggccgtcgccacaattctggcgcacgcaggatttgactgtgcgaacgaatccgtactcgaaacactcacagacgtggcccacgaatattgcctgaagtttaccaagttgttaagattcgccgttgaccgggaggcccgtctcggccagactcctttccccgatgtgatggagcaggtcttccacgaagttggcattgggagcgtcctcagtttgcagaaattctggcagcataggatcaaagattaccacagctacatgctccaaattagtaagcagttgagcgaggagtatgaacggattgtgaaccctgagaaggcaaccgaggacgcaaagcccgtgaagatcaaagaggaacccgtttccgacatcacctttccggtgtcggaggaactcgaagctgatcttgcctctggggatcaatccctgccaatgggagtgctcggcgcacagtctgaaaggttcccgagcaacctggaggtggaagcaagtccccaggccagttccgcagaggtgaacgcgtcacctttatggaacttggcccacgttaagatggagcctcaagaatctgaggagggcaacgtgtcagggcacggggtcttgggctccgatgtttttgaagaacctatgagcggtatgtccgaagctggcatccctcagtctcccgacgatagcgactcaagttatgggagccacagcaccgattctctgatgggttcctcgcccgtctttaaccagagatgtaagaaaagaatgcgcaagatctag

SEQ ID NO: 31030 - DNA, 1239 bp, synthetic construct
  misc_feature 1..1239: note = Description of Artificial Sequence: Synthetic coding sequence
  source 1..1239: mol_type = other DNA
atgctgcgatactggggcgaaattcctattagcagctcccaaaccaatcgatcttcctttgatcttttgcctagggaatttcggctggtggaggtgcatgatccccctttacatcagccttctgcaaacaagccaaaacctcccactatgcttgacatcccatcagaaccctgttccctcacaatccatacaattcaattgattcagcacaatcgtcgtcttaggaatttgatcgctactgcccaagctcagaatcagcaacagacagagggcgtcaagacagaggagagtgagccactccctagctgtccaggttccccacccctgccagacgacctactgcctctcgactgtaaaaaccctaatgcccctttccagatcaggcattcagaccctgagagcgacttttaccggggtaagggagagcctgttacagaactgtcctggcactcttgccgacagttgctataccaagccgttgccaccattctagcccacgccggattcgattgcgccaacgaatcggtcctggagactctaaccgatgttgcacatgaatactgtcttaagtttaccaagctgttgagatttgcagtggatagagaggcaagactgggacagacccccttcccggatgttatggagcaggtgttccacgaagtaggcatcgggagtgtgttgagtttgcagaagttttggcaacataggatcaaagattaccactcttatatgctccagatttccaaacagttgagtgaggaatacgagaggatcgttaacccagaaaaggctacagaagacgccaagccagtaaagattaaagaggagccggtgagcgacattacatttcctgtctcggaagagctggaggccgacctggcatctggggaccaatccctgcccatgggagttctgggagcccaatcagagaggttcccaagcaacttggaagttgaggccagtccccaggcatcaagtgccgaggtcaatgcaagcccattgtggaacctcgctcacgtgaaaatggagccccaggaaagtgaggaaggaaacgtatctggccatggcgtgcttgggtccgatgtgtttgaggagccgatgtctggtatgagcgaagccggaattccccagagtcctgacgactcagattcctcctacggcagccactcaacagattccttgatgggttctagccccgtctttaaccagcgttgtaaaaagcggatgagaaaaatttag

SEQ ID NO: 31031 - DNA, 1239 bp, synthetic construct
  misc_feature 1..1239: note = Description of Artificial Sequence: Synthetic coding sequence
  source 1..1239: mol_type = other DNA
atgctaagatactggggagagatccccattagttccagtcagacgaatagatcgagtttcgatctactgccacgagaattcagattggttgaagtccacgatcccccactgcatcaaccaagcgccaataaacccaagccacctactatgttggacatcccctcggagccttgctccctgacgatccacactatccagctgatacagcacaacagacgcctccgcaatctgatagcgaccgcacaggcccagaaccaacagcagacagagggagtgaagacggaggaatctgagcccctgccatcttgccctgggtcccccccactaccagatgacctgctccctctggattgtaagaaccccaatgcaccatttcagattcgacacagtgatccggagagcgacttttacagaggcaagggcgagccagtgaccgaactgagctggcacagttgcagacagttactgtatcaggctgtcgctacaattctggcacatgccggttttgactgcgccaatgagagcgttttggagaccctaactgacgtggcacacgaatactgcctgaaattcacgaagctcctgaggttcgccgtcgatagggaggcgagacttggtcagactccttttcccgatgttatggaacaggtgttccacgaagtagggattgggtccgtactcagtctgcagaaattttggcaacacagaataaaggactaccactcctatatgttacagatctctaagcagctgtctgaagagtatgaaagaattgtcaaccctgaaaaagctactgaagacgcaaaacctgttaagattaaggaagagcctgtctccgacatcacatttccggtctccgaggagcttgaagccgacctggcttccggcgaccagtctctgcctatgggagtgttaggggctcagtctgagcgctttccgtcaaatcttgaggtggaggcaagtccacaggcctcgagcgccgaggtgaatgcctcccccctgtggaatcttgcccacgtgaagatggagcctcaggaatccgaggagggcaatgtgtcgggacatggtgtgttgggcagcgacgtgtttgaggaaccgatgtcaggcatgtcagaggctgggattcctcagtcgcctgacgacagtgatagcagctacgggtcgcacagtactgacagcctcatgggctcatcccctgtcttcaatcagcggtgtaagaaaaggatgagaaaaatatag

SEQ ID NO: 31032 - DNA, 1239 bp, synthetic construct
  misc_feature 1..1239: note = Description of Artificial Sequence: Synthetic coding sequence
  source 1..1239: mol_type = other DNA
atgctccgatattggggggagattcccatctccagttcgcagaccaatcgcagctcattcgacttactcccaagagagttccgtcttgtagaggtgcacgatccacccctgcaccaaccatccgctaataagccaaaaccaccaacaatgttggacattcccagtgagccatgctcactgacaatccacacgatccagctgattcagcacaataggcgcttgcggaatctgattgcgacagctcaagcccagaatcagcaacagaccgaaggcgtgaaaactgaggagtccgagccgctgccaagttgtccgggtagcccccctctaccggatgacctgctgccgctcgactgtaagaatccgaatgcgccttttcagatacgacactccgaccccgaatctgatttttatcgaggcaaaggcgaacccgtcaccgagctgagctggcactcttgcaggcagctcctctatcaggctgtggctaccatactggcccacgctgggttcgactgcgctaacgaatctgtcttagaaactctgacggacgtcgcccacgaatattgcctgaaattcacgaaattactccgcttcgcagtcgatcgggaggcacgactgggtcagactccttttcccgacgtgatggagcaggtatttcacgaggtgggcataggcagtgttttgagtctgcagaaattttggcaacaccgtattaaggattatcactcttacatgctgcagatctctaaacagttgagtgaggagtacgagcggatcgttaaccccgaaaaagctacagaagacgcaaaaccagtcaagattaaggaagaaccggttagcgatatcacattccccgtgtcagaggagttggaggcagacctggcctccggtgaccagagcttgccgatgggtgtgttaggcgcacaatccgagaggtttccatcaaacctggaagttgaagcttcaccgcaggcgtctagcgctgaggtgaacgcctctcctttatggaacctcgctcacgtgaagatggagccccaggaatccgaggaaggcaatgtatcgggccatggcgtgctggggagcgacgtgtttgaggaacctatgagcggtatgtccgaagctggcattcctcagtcacctgacgacagcgactccagttacggttcacactctacagactccctcatgggatcatcccccgtctttaatcagagatgcaaaaagaggatgcgtaaaatatag

SEQ ID NO: 31033 - DNA, 1272 bp, synthetic construct
  misc_feature 1..1272: note = Description of Artificial Sequence: Synthetic coding sequence
  source 1..1272: mol_type = other DNA
atggtggggatgtcacgcctgagaaatgatagactggctgatcctctcacaggttgtagcgtctgctgcaagagctcttggaatcagctccaagacctctgccggctagcgaaactaagctgccctgcccttggcattagcaagcgaaatttgtatgattttgaagtggaatatctctgtgactacaagaaaatacgcgaacaagaatactacctcgtgaaatggaggggttatcctgacagtgagtcaacctgggaacccaggcaaaatcttaagtgtgtgaggatactgaaacagtttcataaagacttggagcgagagctgctgcgccgacaccataggtcgaagacccctagacacctcgatcccagcctagctaattaccttgtacagaaggctaaacagagaagggcactcaggcgctgggagcaggagctcaacgcaaagagatcccatctgggaagaattacggtcgagaatgaagtggacttggacgggcctccacgagccttcgtctacattaacgagtacagggtcggcgaggggataactttgaatcaagtggctgtgggctgtgaatgtcaggactgtctgtgggcccctaccggcggatgctgcccaggggcttcactccacaaattcgcctataacgaccaggggcaagtgaggttgcgcgctggcctgcccatttacgagtgcaacagtcgttgcagatgtggctacgactgccccaatagggttgtccaaaaggggatccgctacgatctgtgtatctttcgtactgatgatggcaggggctggggagttaggaccctcgagaagattcgcaaaaattcatttgtgatggagtacgtgggggagataattacaagcgaggaagctgaaaggcgagggcagatttacgacaggcaaggcgctacgtatctatttgacctagattacgtggaggatgtgtacacagtggacgctgcctattatggaaacatttcccacttcgtcaatcattcctgcgaccccaacctccaggtgtataatgtgtttatcgacaatttggatgagagactgccacggatcgcatttttcgccacacgtaccattcgcgcaggagaggagctgactttcgactacaacatgcaggtggatcccgtggatatggagagcacgcgcatggatagcaattttgggctggccggactgccaggttctccaaaaaaacgagtgcgcattgagtgtaaatgtggaacagaaagctgtcgcaagtatctgttctag

SEQ ID NO: 31034 - DNA, 1239 bp, synthetic construct
  misc_feature 1..1239: note = Description of Artificial Sequence: Synthetic coding sequence
  source 1..1239: mol_type = other DNA
atggcagaaaacctcaaggggtgcagcgtgtgctgcaaaagctcatggaaccagctccaggatctctgtcgtctagcgaaactctcttgccctgcgctcggaatctccaaacgcaacctttacgatttcgaggtcgagtatttgtgcgactataagaaaatacgcgagcaggaatactaccttgtcaagtggcgtggatatcccgactctgagagcacttgggaacctaggcaaaatctgaaatgtgtgcggatcctgaaacagtttcacaaagatctcgagagggaactactaagacggcatcaccgctccaaaacacctagacatctcgatccatccttggccaattacctggtgcagaaggcaaaacagaggcgagcactaaggagatgggaacaggaattgaatgctaagaggtctcatctggggaggattactgtggagaatgaagttgatttggatggcccacctagggccttcgtatatataaacgaatatcgagtcggcgaaggtattacactgaatcaggtggccgttggctgcgagtgccaggactgtttatgggctcccacggggggatgctgtcctggagcctcattacacaagtttgcttacaatgatcagggtcaggtgcgcttgagagccggactgcccatctatgaatgtaacagtcggtgtcgttgcggctacgattgcccaaaccgggtggtgcagaagggaattcgatatgatctgtgtatatttaggaccgacgatgggagggggtggggggttcggactctcgagaagattcggaaaaattcattcgtgatggagtacgtcggcgagatcataacttcagaggaagccgaaagaaggggccagatatacgaccgtcagggcgctacttacctatttgatctggattacgttgaggacgtgtatacggtcgacgcagcatattacggtaacatctcccacttcgttaatcattcatgcgaccctaatctgcaagtctacaatgtattcatagacaacttagatgaacgactgccgcgtatagccttttttgccacccggacgatccgagcaggagaagagctcacctttgactacaacatgcaggtggatcccgtcgatatggaatcgactagaatggacagtaatttcggtctggctgggcttccgggtagcccaaagaagcgcgttagaatcgagtgcaagtgtggcactgaatcctgtagaaaatacctgttttag

SEQ ID NO: 31035 - DNA, 648 bp, synthetic construct
  misc_feature 1..648: note = Description of Artificial Sequence: Synthetic coding sequence
  source 1..648: mol_type = other DNA
atggcttggatctcgagattgcgtgagcacctcgacggaccaccgagggcattcgtttatatcaatgagtatagggttggggaggggataacactaaatcaggttgcagtgggctgtgaatgtcaggattgtctttgggcgccaacaggaggatgctgccctggcgcatccctacacaaatttgcgtacaacgatcagggccaggtcagactgagggccggattacctatttacgagtgcaattcacgttgtaggtgtgggtatgattgcccgaatcgagttgttcagaaggggatcaggtacgatctctgtatctttagaacggacgatggtcgtggctggggagtcagaacattggagaagattaggaaaaactcattcgtgatggatcccgctttgttaaccgtgtgcttgaaattacctgcatttcctatgggcaaagcctgggaaacagatctgtctgtaaccggaactttaggtcgcggatgcggcaggggcgaggacagactgcaggaatctccgttcccagtgcccgcaccatcagtaggatgtacatataagccacctcccacgtttcgtaactcattctccacttctcgtctctcagtcgtcggaattcacggcctgcttcgaaggtctaagggttag

SEQ ID NO: 31036 - DNA, 1230 bp, synthetic construct
  misc_feature 1..1230: note = Description of Artificial Sequence: Synthetic coding sequence
  source 1..1230: mol_type = other DNA
atggcagagaaccttaaagggtgtagcgtgtgttgtaaaagttcctggaaccagctgcaagatctgtgtcgcctagcgaagctctcgtgccccgctctgggcattagcaagcgaaatctgtatgatttcgaggtagagtatgtcaggctgcaggaagaccccagaactggcattctgcctggcgaaatggcatggatttctcgcctcagagaacatctcggggctacagcagagtctcaagtgtgtgcctatccacaagctgtcccccagggcctgcgcaaaggcgctgcccctgcagcccctcccgtgaaggaccccccagcgccaggtcctaagctgggtcaactgccaggagccgaagggcaggctgaggctggcgctcctagcttaggggctggagcacaatgccaggctcacctcggtagaattactgtcgaaaatgaggtcgacctcgatggtcctcctcgggcattcgtctatatcaacgagtaccgcgtgggtgagggcattacacttaaccaggtagctgtcggatgcgaatgccaagattgcttgtgggctccaacaggcggatgctgccctagacactgtacatccctgccaacaatgactagagccagatgcgggttcgaaccgggttgtcccagcacatcggctacccccgctgcagctgccgctatgaccgcgcaaatcgtctggtatcggcgtgtttcagatatgactagcgccagcagtgcccgaatgatgggcgtcgctggagccagcgccccatggaggagatttgccagaacagcatccagttggtcgacctgggagcgctctttgccacagagacgccagagcggagggcagatctatgataggcagggggctacatacttgttcgacctggactatgtcgaagacgtgtacaccgttgacgccgcttactacggaaatatctcccactttgttaatcactcgtgcgacccaaatctgcaggtttacaacgttttcatcgataacctcgacgaacgcttgccatctctgagtcttccccaggaacccagtggccaggccagatccagcccactgattactacctgcaaatggaccccatggacatggagagcaccagcttggacccccacgctggcatggctgggttcccttgcccctctgaggagtggctcagtgctgaacgcgtccgttggactctctcccgcagctaacacttccagcagcccttag

SEQ ID NO: 31037 - DNA, 555 bp, synthetic construct
  misc_feature 1..555: note = Description of Artificial Sequence: Synthetic coding sequence
  source 1..555: mol_type = other DNA
atggcttggattagtaggttgagggagcacttaggagctacagccgagtcccaggtgtgcgcatatcctcaggccgttccccaaggcctaaggaagggagcggctcccgctgcccctccagtgaaggacccgccagcaccaggtccgaagctcgggcaactacctggggctgagggacaggcagaacctggctgtcctagtactagtgcaactccagccgcagctgccgcaatgacggctcagattgtctggtatcgcagagtctccgacatgacatcagcctccagcgccagaatgatgggcgtagctggcgcttctgcaccttggcggaggtttgcaaggaccgcttccagctggtctacttgggagcgttcattgccccagcggaggcagagcggaggcgctcggagcacgaccgtgcgcgcacctcctacatcactgacctggacaacctggagaacttgtaccccatggatgccccctacaatggcgacgagccctaccctgtcaactacggtagtgactcccacatgtcgctgtacaacaagctcctag

SEQ ID NO: 31038 - DNA, 285 bp, synthetic construct
  misc_feature 1..285: note = Description of Artificial Sequence: Synthetic coding sequence
  source 1..285: mol_type = other DNA
atgcgagctggattcagtgattttcagctgatcagagatcaagtattgttcctgcaggatcaagcgcagaggctcactgaatggctgcagctgtcagggttcgagaatccagtgtctgagagtacaactctgtgtctgagggagagggagaaacggattcccacctgtgtggccgtttgtgtgccttcaccaggcacagtccacactgccctgttgcatcccacaaccctctcccagtctcgcagttcctccgaagctaagatgctcatcatccataccgcatag

SEQ ID NO: 31039 - DNA, 594 bp, synthetic construct
  misc_feature 1..594: note = Description of Artificial Sequence: Synthetic coding sequence
  source 1..594: mol_type = other DNA
atggatgtcggctctaaagaagtgctcatggaaagtccgccagactactctgccgctccacgcggaaggttcggtatcccctgttgtccagtacaccttaaacggcttctaatagtggtggtggtggtggtgttgattgttgtagtcatagtgggcgcactcttaatgggattgcacatgtctcagaagcatactgagatggtcctggagatgtcaattggagcgccagaagctcagcagcgtcttgcgctgtcagagcatctggtgactactgccactttctcaatcggcagtacggggctggtggtgtacgactaccaacagcttcttatcgcatataagcccgctcctgggacatgctgctatataatgaagattgccccagaatctatcccatctttagaggccctgactagaaaggtccacaatttccagatggaatgttcattgcaggccaagcccgctgtgcccacaagtaaacttggacaagccgagggtcgggatgccggttctgccccatctggaggagacccagcttttttgggaatggcagtcagtactctgtgtggggaggttcctctatattacatctag

SEQ ID NO: 31040 - DNA, 576 bp, synthetic construct
  misc_feature 1..576: note = Description of Artificial Sequence: Synthetic coding sequence
  source 1..576: mol_type = other DNA
atggatgtgggcagcaaagaagtattaatggagtccccgcctgactactctgctgcaccccgaggtcgctttggaataccatgttgtccagtccatctgaaacggttgctgattgttgtggtggtggttgtgcttattgttgtcgtgattgtgggggctcttctcatggggctacatatgtcccagaaacataccgaaatggtacttgaaatgagtatcggcgctcccgaggcccagcagaggcttgccctctctgagcacttagtcactacagcaaccttcagcataggcagcaccggcctggttgtgtatgattaccaacagctccttattgcttacaaaccagctccaggcacatgttgctacattatgaagatcgcccctgaaagtattccttctcttgaagctcttactagaaaagtacacaacttccaggctaaacccgcagtcccaactagcaaactggggcaggccgaaggccgtgacgctggatccgccccaagtggtggagatccggcatttctgggcatggctgtatcaactctatgcggcgaggtgccattgtactatatctag

SEQ ID NO: 31041 - DNA, 1158 bp, synthetic construct
  misc_feature 1..1158: note = Description of Artificial Sequence: Synthetic coding sequence
  source 1..1158: mol_type = other DNA
atgatgatgatggctttgtcgaagacgttcggtcaaaagccagtcaaattccagttagaggatgacggcgagttctacatgattggctcggaagtgggcaattatctgcgcatgtttagaggctccctgtacaagagatatccaagtctgtggaggaggctcgcaacagtggaagaaaggaagaaaatagtggcatctagccatggtaagaagacaaaacctaacacaaaggatcatggttatacaaccttggccacttccgtgaccctcctcaaagcttcagaggtggaagaaatactcgatggaaatgatgaaaaatacaaggctgtgagtatttcaacagagccacctacctacctgcgggaacagaaggcaaagaggaatagtcagtgggtgcctactctgccaaattcttcgcatcacctggacgccgtcccctgtagtaccaccatcaacaggaatcgtatgggcagagataagaagaggacattccccctctgttttgatgatcacgatccagctgttattcatgagaacgcgtcccaaccggaagtcctggtgccaatccgtctcgatatggaaatcgacggccagaagctgcgcgacgcattcacttggaacatgaatgaaaagctgatgactcccgagatgttttcggaaattctctgtgacgacttagaccttaaccctttaacattcgtacctgccattgcatccgctatcagacaacagattgaatcctatcctactgactcaattttagaagatcagagtgatcaaagagtgattattaagctgaatattcacgtgggaaatatcagcctggtcgaccagttcgaatgggacatgtcagaaaaggagaattctcccgaaaaatttgccctgaaactctgtagcgaactcgggctggggggagagtttgttaccacaatcgcgtatagcattaggggccagctgtcatggcatcagaagacttacgccttttctgaaaatcccttgccaaccgtggaaatcgctatccgcaacactggggatgccgaccagtggtgcccactgctggagaccctcaccgatgccgagatggagaagaagattcgtgaccaggaccggaatacccgacgaatgcgacgtctggccaacacggcacctgcctggtag

SEQ ID NO: 31042 - DNA, 1131 bp, synthetic construct
  misc_feature 1..1131: note = Description of Artificial Sequence: Synthetic coding sequence
  source 1..1131: mol_type = other DNA
atgatgatgatggctttgagcaaaaccttcgggcagaaacctgtgaagtttcagctcgaggatgacggggaattctatatgattggctcagaagtgggaaactatctccgtatgtttagaggctccctctataaacgctatccctcactgtggagacggctggcaactgttgaagagcgaaagaaaatagtggcgagcagccatgatcatggctataccacacttgccaccagcgttactctcttgaaggcgagtgaggtggaggaaatcctggatggaaatgatgagaaatacaaggccgtatccatcagtactgaaccccctacttatctgagggagcaaaaagcaaaaagaaattcacaatgggtgccgaccctgcctaactcttcgcaccacttagatgccgtaccctgctcaactacaatcaaccgaaaccgaatgggaagggacaaaaagagaacatttccgctctgcttcgacgatcacgatcccgctgtgatccatgagaatgccagccagcctgaggtgttggttccaatccgcttggacatggaaatagacggtcagaagcttagggacgcctttacctggaacatgaatgaaaagctgatgactcctgaaatgttctcggagattctgtgcgacgacctggatctgaaccccctgaccttcgtccctgccatagcctccgctatcaggcagcaaattgaaagctacccaaccgattctatccttgaagatcagtctgaccagagggttattataaagctcaacatccacgtcggtaatatatcacttgtggatcagttcgaatgggacatgagcgagaaggagaacagcccagaaaagttcgccctgaaactgtgcagtgagctcgggctcgggggtgagtttgtgaccaccattgcttacagcatccggggacaattgtcttggcaccagaagacgtacgcgttcagtgagaaccctctgcctacggtggagatagccatccgcaacactggggacgccgaccagtggtgccccctgctggagaccctcaccgacgccgagatggagaaaaaaatacgagaccaggatcgcaataccagaaggatgcggagacttgctaatacagccccagcttggtag

SEQ ID NO: 31043 - DNA, 81 bp, synthetic construct
  misc_feature 1..81: note = Description of Artificial Sequence: Synthetic coding sequence
  source 1..81: mol_type = other DNA
tggcggagattagctaccgtagaagagcgtaagaaaattgtggccagttctcatgccctgatgactatgacccagctctag

SEQ ID NO: 31044 - DNA, 7625 bp, synthetic construct
  misc_feature 1..7625: note = Description of Artificial Sequence: Synthetic coding sequence
  source 1..7625: mol_type = other DNA
atggtcgcgctgagcctcaaaataagtattggaaacgtcgtcaaaactatgcagtttgagcctagtaccatggtttacgatgcatgccggataattagggaacgcattccagaggctccagccggacctccgagcgacttcgggctgttcctgagcgatgacgacccgaaaaagggtatctggctggaggcagggaaagcactggattattatatgctcagaaatggagacacaatggagtaccgtaagaagcagaggcctctgaaaattagaatgctcgacggtactgtgaagaccattatggtagacgattctaagaccgtgactgacatgctgatgaccatctgtgccaggattggcattacaaatcacgatgaatatagcctggtgagggaactgatggaggaaaagaaagaggaaatcacggggactctgcgcaaagataaaaccctgctccgagacgaaaaaaagatggaaaaactcaaacagaagctgcacactgacgatgaactcaattggctggaccatggaagaactctcagggagcagggtgttgaggagcatgaaacacttctgctgcggagaaagttcttttatagcgatcaaaatgtcgattctcgggatccagtgcagctaaacctgctgtacgtccaagcacgagacgacatcctgaatggctcccatccggtttcctttgataaagcatgtgagtttgccggttttcagtgccagatccaattcgggccacataatgagcagaaacataaagccggatttttggacctgaaggacttcctcccaaaggagtacgtcaaacagaagggggaacggaagattttccaggcccacaaaaactgtgggcagatgtctgagattgaggcaaaggtgaggtatgtgaagctggcgaggagtttaaaaacctatggagtgagcttcttcttggtaaaggaaaagatgaagggcaagaataagctcgtgcccagactcctgggaattactaaggaatgtgtgatgagggtcgacgaaaagactaaagaagtgatccaggagtggaatttgacaaatatcaagaggtgggcagctagtcctaaatcattcacactggacttcggcgattaccaggacggatattatagcgtccagactacggaaggcgaacagatagcacagcttatagccggttacattgatatcatactgaaaaagaagaagagtaaagaccattttggtctggagggagacgaagagagcacgatgctggaagatagcgtgagccctaaaaaatccactgtgctgcaacagcagtacaatagggtggggaaagtggagcacggcagcgtcgctctcccagccataatgcgatcaggagcatctggcccagagaacttccaggttggttctatgccgccagcacagcaacagataaccagcggccaaatgcaccgtggccacatgcctccactgacatccgcccagcaggcccttaccggaactatcaattcatcgatgcaggcggtccaggctgcgcaggctactctggatgactttgatacgctgcccccactgggacaggacgccgctagcaaggcctggaggaagaataagatggatgagagcaagcacgagattcatagccaggtggatgccatcacagctggcacagcaagcgttgtgaaccttacagcgggtgacccggctgagaccgactatactgcagtaggatgcgctgtcacaaccataagctcgaacttgactgaaatgtcacgaggcgttaagctactcgctgctctgctcgaggacgagggaggaagcggcaggccgctgctacaggccgcaaagggcctggcgggagctgtaagcgaattactgcggtctgcccaaccagcgagtgctgaacccaggcaaaacctgctgcaggctgccggaaacgtcgggcaggcaagtggagagctgttgcagcaaataggagaaagtgacaccgatccccatttccaggacgccctgatgcaactcgccaaagctgtcgcatcggctgccgcagctcttgtcctgaaggccaagtctgtcgctcaacggacggaagacagcggactacagacgcaggtgatcgcagccgcaactcagtgcgctctgtctacctcgcagttggtggcctgcacgaaagtggttgcccctacgatttcaagccccgtttgtcaggagcaactggtggaggcgggtcgactcgtggcaaaggctgtcgagggctgcgtcagtgcatcgcaagcagctactgaagacggacagctgctgcggggtgtgggggcagctgcaaccgctgtgacccaggccctcaacgaactcctgcagcatgtcaaggctcatgccaccggagcgggtcccgctggacgatacgatcaggcgactgacaccatcttgacggtgaccgaaaacatcttttctagcatgggcgacgccggtgaaatggttcgccaggctcgcattctggcccaagctacctccgatctagtgaacgcaattaaagcagatgctgagggagaatctgacctggaaaatagcagaaagcttctgagtgctgccaagatcctcgccgacgccactgccaaaatggtggaggcagctaagggtgcagccgctcatcctgattcagaggagcagcaacagcgtttgagagaggctgccgaaggtctgagaatggccacgaatgccgctgcacaaaatgcaatcaagaagaaattggtccagcgcctcgagcatgccgcaaagcaggccgcagccagcgccactcagaccattgcggctgcccagcacgccgcatccacaccaaaagctagcgccggaccacaacccctgttggtacagagttgcaaagccgtggcggagcagattccactacttgtgcaaggagtgcgagggtcccaggcccaaccagacagtccaagcgcccaactcgcgttgatcgccgcttctcaaagcttcctgcagcctgggggaaagatggttgcagccgctaaggcttccgtacctacaatccaagaccaggcctccgcgatgcaactgtcccagtgtgccaagaacctcggtactgcccttgccgagctccggacggccgctcaaaaggcccaggaagcgtgcggccctttggaaatggattcggcattgagcgtcgttcagaatctggaaaaagaccttcaagaggtgaaagctgcagcgcgtgacggaaaactgaagcccctgccaggggagaccatggagaaatgtacccaggacctcggcaacagtacaaaggccgtgtctagcgccatagcacagttactgggggaggttgcgcaggggaacgagaactatgccggtatcgcagcgagggacgtggcaggagggctcagaagtctagcccaggctgcgaggggcgtggccgcactgacaagtgaccccgcagtgcaggcaatcgtgctggataccgcctctgatgttttggataaggcaagtagcctgatcgaagaagctaaaaaagcagccggtcaccccggtgacccagaatcgcaacaaagattagcccaggtcgcgaaggccgtcactcaggcccttaatcggtgcgtctcctgcctgcccggacagcgcgatgtcgacaacgccctcagagccgtgggtgacgcgagcaagaggttgctgtctgattcactgcccccatcaaccgggaccttccaggaggcacagtcccgtctgaatgaggccgcagccggtctgaatcaggcagcaacggaactggtgcaggcctcacgcggaactccacaggaccttgcgcgagcgtctgggcgattcggacaggatttttcaactttccttgaggcaggggtggagatggccggtcaggccccttctcaggaagaccgggctcaggtggtgtccaatctgaagggcatcagcatgagtagctctaaactgctcctggccgcaaaggcactttcgaccgatcctgccgctccaaacttgaagagccagcttgccgcagccgctagagccgtgaccgattcaatcaaccagcttatcacaatgtgcacccaacaagctcctggccagaaggaatgtgataacgccttgcgggagttggaaaccgtcagagaactcctggaaaacccagtccaaccgatcaatgatatgtcctattttggatgtctggacagtgtgatggaaaactccaaggttctgggcgaagcgatgacaggtataagtcaaaatgccaaaaacggtaacttgccagagttcggagatgctatctcgactgccagcaaggctctgtgcggcttcacggaggccgctgcccaggcagcttacttagtgggagtcagtgaccccaactcgcaggctggccagcaggggctcgtggagcccacccagttcgctcgggctaatcaagccattcagatggcttgccagtctcttggcgaacctggttgcacccaggctcaggttctgagcgccgctaccatcgtggcaaaacacacctccgccttgtgcaactcttgcagactcgcatccgcgaggacaaccaatcctacagccaaacggcagttcgtccaatccgccaaggaagtggccaatagtacggcaaaccttgtgaaaacaattaaggccttggacggcgcatttacggaggagaaccgcgcacagtgcagggcggctacggcccctctgcttgaagcagtggataacttgtccgctttcgcgtcgaatcccgagttttcaagtattcctgcccagattagtcctgagggccgtgcggctatggaacctatcgtgattagcgctaagacgatgttggagagcgcgggtggactgattcaaacagctagggcgctggctgtgaatccaagagaccccccaagttggagcgttctggccggacattcccgcactgtatcggattccattaaaaaactgataactagtatgcgggacaaggcccctggacagttggaatgcgagactgctatagctgctctgaactcctgcttgcgagacttggaccaagcttcactggcggcagtgtctcaacagctggccccacgtgaggggatttcacaggaggccctccatacacaaatgctaactgctgtccaggaaatcagtcaccttatcgaacctctggcaaatgccgcacgggcagaggctagtcagctgggccacaaagtctcacagatggcccaatatttcgagcctctgacacttgccgctgtgggtgccgctagtaaaactttgtcacatcctcagcagatggcacttcttgaccagaccaaaactttggcggagtccgccctgcagctactttacaccgctaaggaggctggcggaaatcccaaacaggccgcacacacccaggaagcccttgaggaggccgtgcagatgatgactgaggctgttgaggatttaaccacaacactaaatgaggccgcatctgccgcaggtgtggttggcggaatggtggacagcatcacgcaagctattaaccaacttgatgaaggaccgatgggggagccagagggctcattcgtggactaccagaccacaatggttagaacagctaaagccatcgctgtcaccgtgcaggagatggtgaccaagtccaacaccagtcccgaggagcttgggccattggctaaccaactaacctcggattacggaagacttgcttcggaggcgaaaccggctgctgtggctgctgaaaatgaagaaattgggtcacacatcaaacatagggttcaggaactcggacacggatgcgcggcactagttaccaaagccggtgctcttcagtgtagcccctcagacgcatacacaaagaaggaactcatcgagtgcgctagacgagtgtccgaaaaagtcagtcacgtcctcgctgccctacaggccggaaataggggcacccaggcttgtattacggcagctagcgcagtgtctggcattatcgcagacttagacaccacaattatgtttgcgaccgcaggaactcttaaccgggaaggaaccgagacattcgcagatcatagggaaggcatcttgaaaactgcaaaggtgctcgttgaggatacgaaggtgcttgtgcaaaatgcagcaggtagccaggaaaaactagcccaggccgctcagtcaagcgtcgctacaataacccggctggccgatgttgttaaactgggagcagcctcactcggggcagaggaccccgagacgcaggtagtgctgatcaatgccgttaaggacgtagctaaggctcttggagaccttatcagcgctactaaggcagcagcgggtaaggtgggtgacgatcctgcagtgtggcaactaaaaaattccgctaaggtgatggtcaccaatgtcacttcacttctgaagaccgttaaggctgtggaagacgaagctacaaaagggacccgagccctggaagccacaacggagcacatcagacaagagctcgccgtcttctgcagtccggaaccacccgcaaagacatcaacacctgaggactttatccgaatgacgaaaggcatcaccatggctactgcaaaggcggtcgcagcaggaaatagttgcaggcaggaagacgtaattgcgactgccaatctaagtcggagggcaatagccgacatgctgagagcatgtaaagaggctgcttaccatcccgaagtcgctcctgatgtacgactgagagctctgcactacggaagagagtgtgccaatgggtacttggagctgttagatcacgtcctcctgaccttacagaagccctccccagagcttaagcagcaattgaccggacattctaagagggtggccggatctgtaacagagctgatacaagcagcagaagccatgaagggaactgaatgggtagatcctgaagatcctaccgtgatcgccgaaaacgaactcctgggagccgcagccgctatcgaagcagccgctaaaaagctcgagcagctgaagcccagagccaaaccaaaggaggcagatgagtccctgaattttgaagaacagattctggaggccgctaaaagcatcgctgctgcaacgtccgccctggtcaaggcagcctccgcagctcaacgagaactggttgcgcaggggaaggtgggcgctatccccgcaaacgcactcgacgacggtcagtggtctcagggcctgataagtgctgcaagaatggtggctgcagcgacaaacaacctgtgtgaggccgctaacgctgcagtgcaaggtcacgcttcacaggagaaactcatctcatcagcaaaacaagtagctgcttctaccgcacagctcctggtagcctgcaaggtgaaggccgaccaggatagcgaagctatgaaaagactccaggccgctgggaatgctgtgaagcgggcatcagacaacctggtaaaagccgctcagaaagctgccgcttttgaggaacaagaaaatgagactgtcgtcgtaaaagagaaaatggtgggcggaatcgctcagatcatagcggcacaagaggaaatgttgagaaaagagcgggagctggaagaggctcgaaaaaagcttgcccagatccggcagcagcaatacaaatttctgcctagcgaactgagagacgaacatta

SEQ ID NO: 31045 - DNA, 7289 bp, synthetic construct
  misc_feature 1..7289: note = Description of Artificial Sequence: Synthetic coding sequence
  source 1..7289: mol_type = other DNA
atggtcgctctgtccttgaaaataagcataggaaacgtcgttaaaacaatgcagttcgaacctagtaccatggtctatgatgcttgccgcattattagggagcgtatccctgaagccccagccggtcccccaagtgactttggcctgttcctgtcagatgatgatccaaagaaagggatctggctggaagccggaaaagcgctggactattatatgctgcgtaatggcgatactatggagtacaggaagaaacagcgaccactgaagattagaatgctggatggaaccgtaaaaactataatggtggacgactcaaaaaccgtgaccgatatgcttatgacaatctgcgccagaatcgggataacaaatcatgatgagtacagtctcgttagagaacttatggaagaaaagaaggaggaaataaccggcactcttcgaaaggacaagactctgcttagggacgagaagaaaatggagaagctcaagcagaagctgcatacagacgatgagctgaattggctggatcatggcaggaccctgagggaacagggggttgaggaacacgaaacacttctattacgccgtaagttcttttactccgaccagaatgtagacagtagagatcccgttcagcttaatctgttatacgtgcaagcacgtgacgacatcttgaatggatcccacccagtttccttcgataaagcatgtgagttcgctggcttccagtgtcaaattcagttcgggccacacaacgaacagaaacacaaggccggttttctggatcttaaagacttcctacctaaagaatatgtcaagcagaagggcgagcggaagatatttcaggcacacaaaaactgtggacagatgagcgaaatagaagctaaggtccgctacgtgaagttggccaggtcccttaaaacgtatggggtgagttttttccttgttaaggagaagatgaaaggcaaaaataaactggttccacggctgctgggtataacgaaggaatgcgtcatgcgggtggacgaaaaaaccaaggaggtcatccaagagtggaatttgaccaacatcaaacgttgggcagcctcgcccaaatcattcaccctcgactttggcgattaccaggacgggtattacagcgtccagacgacagagggcgagcagatcgctcaactcatagccggatacatcgatatcatactgaagaagaaaaagtctaaagatcattttggtctggagggtgatgaagaatccacgatgttggaggatagtgtgtccccaaaaaagtccacagtgttgcaacagcagtacaatcgagtgggtaaggtggagcacgggtccgttgcactccctgctatcatgcgctctggcgctagtggccctgagaatttccaggtgggctcaatgcccccagcccagcaacagattacaagtggacagatgcacagaggtcacatgccccctctgaccagcgcacagcaggcgctgaccggaacgatcaattcctcaatgcaagccgtgcaagctgcccaagcaactctcgacgattttgacacgctgccaccgctgggccaagacgcagcctccaaagcgtggagaaagaacaaaatggacgaatcgaagcacgagattcatagtcaggtcgatgctataactgctgggaccgcctcagtggtgaacttaacggccggagacccggcagagacagactatacggccgtgggctgtgcggttactacgatatcctctaacctgacagaaatgtccaggggtgtgaaactcttggccgcactcttagaggacgaaggtggatcagggagacctctcttacaggccgcaaaaggattggccggagcagtgagcgagctgctccgcagtgcacaacccgcaagcgctgagccaaggcagaatttactgcaagccgctggtaatgtggggcaggcatcaggggagctcctccaacagattggagaatcagatacagacccacactttcaggacgcccttatgcagttggcgaaagccgtcgcatcagcagcggcagcgctggtgctgaaagccaagtccgtagcacaacgaacggaggacagcggtctccagacccaagtcatagccgctgcaacacaatgtgccttgtcaacatctcagctagtcgcctgcactaaggtggtagcgcctacaattagttccccggtgtgccaggagcagttggtggaagccggacggctggtggcaaaggctgtggaaggatgtgtgagcgcctcgcaagccgctaccgaggacggtcagttgttacggggagtcggggctgccgctaccgccgtcactcaggcgctcaacgagcttcttcagcatgtgaaggcgcatgccacgggcgcaggacccgcaggacgatatgatcaggctacagatacaatccttacagtgacagaaaacatattctcctccatgggggatgccggtgaaatggtccgacaggcaaggattctcgcccaagctacatccgacttggtgaatgcaatcaaagctgatgccgagggggaatcggacctggagaattctagaaagctactctcggcagccaagattctggctgatgcaaccgccaaaatggtggaggctgcaaaaggcgcagctgcccatccggacagcgaggagcaacagcagcggctgcgcgaagccgcagagggtctgagaatggccacaaatgcagccgcacagaacgcaatcaagaagaaactggtccagcgcctggagcatgcagctaaacaggcggctgcctcagccactcagacgattgccgcagcccaacacgccgcatccactcccaaggcgtccgcaggacctcaacctttgctggtgcaaagttgcaaagcagttgccgagcagattcccctgttggttcagggcgtacgtggaagtcaggcgcagccagacagcccaagcgcccagctggctctgatagccgcaagccagtctttcctgcagcccggaggcaaaatggtggccgcagcaaaggctagcgtgccgacaattcaagaccaggcatctgccatgcagctgtcccaatgcgctaagaatcttggcactgccttagctgaactacgcactgctgcacagaaggcccaggaagcttgcggccctcttgagatggactcggccctgtctgtggtccagaacctggagaaggacctgcaggaagtcaaggctgcggctcgggatggtaagctaaaacctctgcctggggagactatggagaagtgtacgcaggatctgggcaacagcaccaaggctgtgtctagcgccatagcccagctgttgggcgaagtggctcaggggaacgagaactatgccggtatcgctgctcgagacgttgccggtggtctcaggtcactggcacaggcggcacgaggtgtagcagctctaacaagtgaccctgcagtgcaggcaattgtgcttgacactgccagcgacgtgctggataaagccagctcccttatcgaggaagccaaaaaagccgcaggccaccccggagacccggaatcacagcagcggctagcccaggtggcgaaggcagtcacccaggccctcaaccgatgcgtcagttgtctgcccggtcaacgtgatgtggacaatgccctcagagctgtaggtgacgcttctaaaaggttgctaagcgatagcctgcccccatcgaccggtacattccaggaggctcaatctaggctaaacgaggccgcagcagggctgaatcaagcagctactgagctcgtccaggctagtagaggcactccccaggatcttgcgagagcttccggcagatttggccaggacttcagcaccttcctggaagccggagtggagatggcaggacaagctccgagtcaggaggatagggcccaggtggtgagcaacctcaaaggaatctccatgagctcttccaagcttctgctggccgctaaggcactgtccaccgaccccgcagctcccaacctgaagagccaactggccgctgcggctagggccgtgaccgacagcataaaccaacttatcaccatgtgcacacagcaggcacccggtcagaaagagtgcgacaatgccctcagggagcttgaaaccgtacgcgagcttctcgagaatcctgtacagcccatcaatgatatgtcctattttggatgccttgatagcgttatggaaaactccaaggtgctgggtgaggcaatgactggaatttcacaaaacgccaagaacgggaatttgcctgagtttggcgatgcaattagcacagcttctaaagctttatgtggctttacagaagctgctgcccaagctgcatatcttgtgggcgtcagcgaccctaacagccaggcgggtcaacaggggctggtggaacctacacaatttgcacgcgcaaaccaggccatacaaatggcatgccagagtttgggggagcccggttgcacgcaggctcaagtgctgtcagctgccacgattgtcgccaagcatacttctgccttgtgcaattcctgtaggttggcctccgccaggacaaccaaccctactgctaagcgccagttcgtgcagtctgccaaggaggtggccaacagcaccgcaaatcttgtgaagacaatcaaagctctggacggcgcatttaccgaagaaaatcgggctcagtgtcgggcagctaccgctcctctgcttgaggccgtggacaacctgagtgcctttgctagtaatcccgagtttagctctattcctgcgcaaatctcacccgagggtcgtgcggcaatggagcccattgttatcagcgcaaaaacgatgctggaatctgcaggaggcctgattcagacggccagggcgctagcagtgaatcccagagacccaccaagttggtccgtgttggccggtcactcgcgaaccgtcagcgattccattaagaaactgattacttcaatgagggacaaggcccctggacagctagaatgcgaaaccgccattgctgctttgaattcgtgcctacgtgacctggatcaagcttccttggcagccgtctcccagcagctcgcccctctccaggagatatcccatttgatcgagcctctggctaacgcggctcgcgcagaggcttcacagcttgggcacaaagtatcccagatggcacagtacttcgaaccccttacgctcgcagccgtcggcgcagcgtcaaagacactctcccatccacagcagatggctctgctggatcaaactaagacgttggctgagtccgctttgcagctgttgtatactgccaaagaagctgggggaaacccaaagctcgacgaggggcctatgggagaacctgaaggcagttttgtggattatcagacaaccatggtgcgcaccgctaaagccattgccgtaactgtccaggagatgatcgggtcccacatcaaacatagggtccaggagctcggacatggatgcgctgcactggtgacaaaggcgggtgcacttcagtgtagcccgagtgacgcctacaccaaaaaggagctaatcgagtgtgccagaagagtcagcgagaaggtctcccatgttcttgccgctctccaggcaggtaatcggggaacgcaagcctgcatcacggccgcaagcgcagtgagcgggataattgccgatttggatacaactataatgtttgccactgcgggaacgttgaacagggaagggacagaaaccttcgccgaccaccgagaaggtatactaaagactgcgaaggtactggtagaggacactaaggtactggtccagaatgcagccggatcccaggaaaagctggctcaggccgctcagtcatcagtagcaactattactcggcttgccgacgtcgtgaagctcggcgcagcgtctctgggtgccgaagatcctgaaacacaagttgtcctgattaatgcagtgaaagatgtagctaaggcgctgggagatctcatctctgcgacaaaagccgcagccggaaaagtcggcgatgaccctgctgtgtggcagctcaaaaactcggccaaagtgatggtgaccaacgtcactagcctccttaagacggtgaaggctgttgaagatgaagcaactaagggaacgcgagctctggaggccactactgagcatatcaggcaggaactggcgcctcccgctaagaccagcacgcccgaggactttatccgcatgactaagggcatcacaatggcaacagcaaaagctgtggccgctggcaattcttgcaggcaggaggacgtcattgccacagccaatttatcgcgtcgcgctatagccgacatgctgcgagcttgtaaggaagccgcataccaccccgaggttgcaccggatgtcagactcagggcactgcattatgggagagagtgtgcaaatggataccttgaactactggatcacgttctattgaccctccagaaacctagccccgagctgaagcaacagttaacggggcacagcaagcgggtagcgggaagcgtcacggagttaatccaggctgcagaagctatgaaggggaccgaatgggtagatccagaggatcccactgtcatagccgaaaacgagttgctcggcgctgccgcagccatcgaggcagccgctaagaaactcgagcagttgaaacccagagccaagcctaaagaggccgatgagagcctcaacttcgaggagcaaatcctcgaagctgctaagagtatcgcagccgctacttccgcgctcgtgaaggcggctagtgctgcccagcgcgagctagtcgcacagggaaaggtcggagctattcctgcaaacgctctggatgatggccagtggtcgcagggacttatcagtgccgctcgcatggtagcagcagccacaaacaatctctgcgaagcagccaatgctgccgtccaggggcacgctagccaggaaaagttaatctcttcagcaaaacaggtcgcagctagtacagctcagcttctcgttgcgtgcaaggtgaaggcggaccaggacagtgaggccatgaaacgcttacaagccgcagggaatgcagtcaagcgtgcgagtgacaatcttgtgaaggccgctcagaaagccgctgcattcgaagagcaggaaaatgaaaccgtggtggtgaaagagaaaatggtggggggaatcgcccagataattgccgctcaggaggagatgctgcgcaaagagcgcgaattggaggaagccaggaaaaagttggcccagatccggcagcagcagtataaattcctcccttcagaactgagagatgagcacta

SEQ ID NO: 31046 - DNA, 3984 bp, synthetic construct
  misc_feature 1..3984: note = Description of Artificial Sequence: Synthetic coding sequence
  source 1..3984: mol_type = other DNA
atggcggcttctaggcgctcccagcatcatcaccatcatcaccagcagcagctgcagccagcaccgggtgcttctgcgccaccaccgcctccccctccacctctttcacccggtttagcacctggtacgacacccgcttcgccgaccgcgagcggcctcgcccctttcgcatctcctagacatggactcgccctgccagagggagacgggtccagagaccctccagaccgccctaggagtccagaccctgtcgacgggaccagttgttgttcaaccacatctacaatctgcaccgtggccgcagctccagtggtcccggctgtgtccaccagttctgcagctggagtcgcgcctaaccccgcaggctccggatccaataattccccatcctcttcttcaagcccaacctccagttcctcctcttcaccaagttctcctggtagctcactcgctgagagtcccgaggctgccggtgtgtcaagtacggctccactgggccctggcgcagccggacccggaactggcgtacccgctgtaagtggagcactgagagagctgctcgaggcttgtcggaacggagatgtgtccagagtgaaacggctcgttgatgcggcaaatgtcaatgctaaagacatggccggacggaaaagtagtccactgcactttgcggctggctttggcagaaaggacgtggtggagcatctcctgcaaatgggagcgaacgtgcatgctcgagatgatgggggtctaatcccccttcacaacgcctgcagttttggccacgccgaggttgtgtccctgctgctttgtcagggggcagatcccaatgcgagggacaactggaactatactccactccatgaggccgcaatcaaagggaaaattgacgtttgcatcgtgctgttacagcatggtgccgaccctaatatccgaaatactgatggcaaaagtgctctggacctagccgatccatccgccaaagcagtactgacgggagaatataaaaaggatgaacttttagaggcagcacggtcagggaatgaggagaaattaatggccctgctcacacctttaaatgtcaattgccacgcctccgacggtagaaaatccactcctctgcacttggccgcaggatacaatcgcgttcgaatagtgcagctcttactgcagcacggcgcagacgtgcatgctaaagacaagggcggtctggtgcctctgcataacgcttgttcatatggccactatgaggttaccgagctgttgctgaagcacggtgcatgcgtgaacgctatggatctctggcagtttacacccctgcacgaggctgcctctaaaaaccgcgtcgaagtttgttccctattactctcccatggggcagaccccactctagtgaattgccatggcaaatctgcagtggatatggcacccacacccgaattgcgcgagaggctgacctatgaattcaaaggccatagcctgctccaggcagcaagggaagccgacctggccaaagttaagaagactctggcgcttgagatcattaatttcaaacagccgcagagtcatgaaactgcactgcactgtgccgtagcgagtctgcatccaaaacggaaacaggtcactgagctgttactcaggaagggagccaacgtcaatgagaaaaacaaggacttcatgacccccctgcacgtcgctgctgagcgcgcacacaacgatgtgatggaagtacttcataaacacggagcaaagatgaatgcactggatacactgggacaaacagctcttcaccgtgctgcgctagcaggtcacctgcagacttgccgcctgctgcttagctacgggtctgatccatctatcatctcccttcaaggctttaccgccgctcagatggggaacgaagccgtgcagcaaatcctaagtgagtctacccccatcagaacctctgatgtggattacaggctcttagaagctagtaaagcaggcgatctggagaccgtcaaacagctatgcagttcccagaacgtgaactgtagagacctggaagggagacacagcactcccctgcatttcgccgctggatataaccgcgtgtccgtggtggaatacttgctgcaccatggcgctgatgtacatgctaaggacaaaggtggcctcgtcccactgcataacgcgtgctcctatggtcactacgaagtcgccgagttgttagtgcggcacggagcctctgttaatgtagctgacctgtggaagtttaccccccttcatgaagcagctgctaaaggtaagtatgaaatatgcaagctactgctgaagcacggggctgacccaaccaagaagaaccgggatggtaacacgcctctagacctggtgaaggagggggacacagacatccaagacctcttacggggtgatgccgcacttctggacgccgctaaaaagggatgtcttgccagggtgcagaagctgtgcacacctgagaatatcaattgtcgggacacgcagggtagaaacagtactcccctacacctagcggctgggtacaacaacctggaggtagccgagtacctgctcgagcatggagctgacgtgaacgcccaagataaaggagggcttattcctctgcacaatgcggctagctatggacacgtggatattgccgctctgctgatcaaatataatacctgcgtgaatgcgacagacaagtgggcctttaccccactgcacgaagccgctcaaaagggcagaactcagctgtgcgcgctcctgctggctcacggagctgatcctaccatgaaaaatcaggagggtcaaacccccttggacctggccacagccgacgatattcgcgctctgctgattgatgccatgcccccagaggctctcccaacatgcttcaagccacaggccactgtagtctctgcctctctcatttccccagcctccacccctagctgtttgagtgccgcttcttccattgataatctcacaggaccactggcagagttggccgtcggaggggcttctaatgccggtgatggggctgctggtactgaacgcaaagaaggagaggtcgccggtctggatatgaatatatctcagttcctgaaaagcctgggcctcgaacatcttagagacattttcgaaactgaacagatcaccctcgatgtccttgctgacatgggacatgaggagctcaaagaaattggcatcaacgcctacgggcacaggcacaagctaatcaagggcgtggaaagactgctggggggacaacaggggactaatccgtatttaacctttcactgtgtgaaccagggaacaatccttcttgatttagcacccgaggacaaggagtatcaaagcgtagaagaggagatgcagtcaaccatccgggagcatcgggacgggggtaatgctggcggaatattcaacaggtataacgtgattcggattcaaaaagttgttaataaaaaactgcgcgaacggttttgtcaccgccagaaggaagtgagtgaagaaaaccacaatcatcataacgaaaggatgttattccacgggagtcccttcattaatgctattattcataagggttttgatgagagacacgcctatatcggtggcatgtttggagctggcatctactttgcagagaattcgtctaagagtaaccagtatgtgtatggcatcggagggggaaccggctgccctacacataaagatagaagctgctacatttgtcatcgacagatgctgttttgtcgtgtaaccctaggaaagagctttctgcaatttagtaccatgaaaatggcgcatgcaccgcctggccatcacagcgtcattggacggccaagcgtgaacgggctcgcttatgctgaatacgtaatttacagaggagaacaagcctatcccgaatacctgatcacgtaccaaattatgaagcctgaagcccctagccagacagccactgccgcagaacaaaaaacctag

SEQ ID NO: 31047 - DNA, 3501 bp, synthetic construct
  misc_feature 1..3501: note = Description of Artificial Sequence: Synthetic coding sequence
  source 1..3501: mol_type = other DNA
atgtctggcagacgatgcgcgggtggaggggctgcctgcgcgagcgccgctgcagaggccgtggagcccgcagctagggaattattcgaggcgtgccgaaatggggacgtggagcgggtgaagcggctggtcactccagaaaaggtcaactcacgagacaccgctggcaggaaaagcacacccctgcactttgccgcaggatttggcaggaaggacgtggtggagtacctgctgcagaatggggcaaacgttcaagcgagggatgacgggggtctaatccctttgcacaacgcttgtagtttcggtcatgccgaggtggttaacctgctgttacggcatggtgccgacccaaacgccagagacaattggaattatacccctctccatgaagctgctatcaagggtaaaatcgatgtgtgtatcgtccttctccagcacggcgcagagcctaccatccggaacaccgatggtaggacggctctggacttggctgatccctccgcgaaggcagttttgaccggggagtacaaaaaagatgagctactggagtcagcccgttcaggcaatgaagaaaagatgatggcgctgctgaccccattgaatgtgaactgtcacgcctctgacggaaggaagagcacacctcttcacctcgctgcaggttataaccgcgttaagatcgtgcaactgctgttgcagcatggagcagacgtgcatgctaaagacaaaggcgacctcgtgccgctgcacaacgcatgcagttatggccactacgaggtgaccgaattgctggttaaacacggagcatgcgtgaatgctatggacctgtggcaattcactccccttcacgaggccgcaagtaagaatagagtggaggtttgcagcctcctgttgagctatggggctgacccaacgttactgaattgtcacaacaagtctgccattgatctggctcctactccgcaactcaaagaacggctggcctacgagttcaagggccatagcctcctccaggccgcacgggaagcagatgtgacccgtatcaagaagcacctgtccttggaaatggtgaattttaaacacccacagactcatgagacagctctacactgcgcggctgccagcccttatccaaagcgcaagcagatttgcgaactgctgttaagaaagggggcaaatataaacgaaaaaacgaaggaatttcttacgcctttgcatgtggcaagtgagaaggcccacaatgacgtggtagaagtggtggttaagcatgaagctaaagtgaatgccttggataacctaggccagacctccctacacagggcggcttactgcggccaccttcagacttgcagactgctgttgtcgtatgggtgtgaccccaatatcatatcactgcaggggtttaccgccctccagatggggaatgagaacgtgcagcaactgctccaggaggggatcagcttgggtaattctgaggctgatcgacagctcctcgaggcggctaaggccggagatgtcgagacagtgaagaaactctgcacagtacagtcggtgaattgcagagacatcgaaggtaggcaatccacgcccctgcatttcgccgcagggtacaatagggtgagcgtagttgagtacttactgcagcatggagcagacgtgcatgccaaggataaagggggactggtgcccttacataacgcttgtagctacgggcactatgaggtggccgaactgctggtgaaacacggcgcagtggtgaatgtggctgacctgtggaagtttaccccactgcatgaggccgctgcgaagggcaagtacgagatttgcaagcttttgcttcaacacggagctgaccccactaaaaagaaccgtgatggcaacactcctctcgatctcgtaaaagatggtgatactgacatacaagacctgctgaggggggacgccgctttgttggatgcagcgaagaagggttgtcttgcgagggtaaaaaaactctcatcccctgacaatgtgaattgtcgcgatacgcagggacgacactccacccctttgcacttggccgcaggttataataacttggaggtagcagaatatcttcttcaacatggagcggacgtcaatgcccaagacaagggagggctaattcctctgcacaatgcggcttcctacggccatgtcgacgtcgccgctctgctgatcaaatacaatgcatgcgttaatgctaccgataagtgggcgttcaccccgctgcacgaggcagcgcagaagggcagaacacagctgtgcgccctcctgcttgcacacggggcagatcctactctgaagaatcaggagggacagacacctctagacctagttagcgcagatgacgtgtctgcgttactaaccgcagcgatgccaccgagcgctctgccttcttgctataaacctcaggtactgaacggagtgcgctccccgggtgctaccgcagatgctctatcttctggacccagttctccatcatctctttcagctgcctcttctttggacaacttatcaggcagtttctccgaattgtcatcggtcgtcagcagctctggcaccgaaggcgcttcttcactagagaagaaggaggtccccggtgtcgacttttcaattactcagttcgtgcggaacctgggactggaacatctgatggacatctttgaacgggagcagatcactctggacgtactggtggagatgggacataaagaactgaaggagatcggcattaacgcctatggacacaggcacaaactcattaaaggagtggagaggttgattagcggccaacagggactcaatccatacttgaccttaaatacgtcagggagcggcactatcctgatcgatctatcccccgacgataaggaattccaatccgttgaggaagaaatgcaatctacagttcgagagcaccgtgatgggggacacgcaggcggaatatttaaccggtataatattctcaagatccagaaggtatgtaacaagaagctgtgggaacggtacacacacagacggaaagaggtgtcagaggagaaccacaaccacgcaaatgagaggatgttattccatgggagtcctttcgtgaatgccatcatccacaagggcttcgatgagcgccacgcttacattggtggcatgttcggagctggcatctacttcgcagaaaattcctctaagtctaaccaatatgtttacgggattggagggggaaccggatgcccagttcataaagataggtcttgttacatctgccacagacaactccttttctgcagagtcaccctggggaagagtttccttcaattctccgctatgaagatggcccacagcccaccgggtcaccattctgtgaccggccgaccatcggtgaatgggcttgcgctggccgagtacgtgatctacaggggtgaacaggcctatcccgagtatctgattacctaccagataatgcgtccagagggcatggtggatggctag

SEQ ID NO: 31048 - DNA, 2139 bp, synthetic construct
  misc_feature 1..2139: note = Description of Artificial Sequence: Synthetic coding sequence
  source 1..2139: mol_type = other DNA
atgcgggagcccgcattggcagcatctgcaatggcttatcacccctttcatgctcccaggccggcagactttcccatgagcgccttcctcgcagcagcccaaccctctttcttccctgctctcgctctgccacctggggcattggccaagccgcttcccgacccgggacttgccggagccgcagcggctgctgcagcggcagcagccgcagccgaggcaggattacacgtcagtgctctcggcccacaccccccagctgctcatctgcgttccctgaaatcgctggaaccggaagacgaggtagaggacgatcctaaggtaacactcgaagccaaggagctgtgggaccagttccataagctcggcacggagatggtgataacaaaatcaggacggagaatgtttcctcctttcaaggtcagagtgtcagggctggacaaaaaagcgaaatacatcttgctgatggacattgtcgcggcagacgactgccgctacaaatttcacaactccaggtggatggtggcaggcaaagctgaccctgagatgcccaagcgcatgtatattcaccccgactctcctgccaccggagaacagtggatggcaaagcctgttgcttttcacaaactcaagctgaccaataatatcagcgacaaacacggcttcactattctcaacagcatgcacaagtaccaacccagattccacatcgtgcgtgccaacgatatcctgaagctgccatactctactttccgaacatatgttttcccggagacagactttatagccgtgaccgcctatcagaacgataagatcacacagctgaagattgacaataatcccttcgccaagggatttcgggatacaggtaatgggagacgggagaagcggaagcagctgactctgccgtctctcagactgtatgaagaacactgcaaaccagagagggatggagccgagtcagacgcttcgagctgcgatccgcctcccgcaagagagcccccaacttcacctggagccgcaccctcacccttgcgcttacaccgtgcacgggcagaagagaaaagctgcgcggctgattcagatcccgagccagagcgcctttcagaagagcgagcgggagcacctttagggagatcccccgcaccagactccgcatcccccacaaggcttaccgagcccgagcgggctagggagcgccgatcccccgaacgcggaaaggaaccagccgagtccgggggtgacggaccttttggactgcgcagtctggaaaaagaacgagccgaggccaggcgaaaagatgaaggtcggaaagaggcagcagaaggtaaggaacaaggcctggctcctttagtggtccagacagacagcgcttcaccactcggggcagggcatttacccggtcttgccttctccagccatctgcacggccagcagtttttcggtcccctgggcgctggccagccactgtttctgcatcccggacagttcactatgggccctggcgcattctctgccatgggcatggggcacctgctggcgtctgtggcagggggaggcaatggcggaggtggcggacctggaaccgctgcaggtcttgacgcaggcggactggggccagctgccagtgcagcttctacagccgctccctttccttttcacctgtcccagcacatgctggcgtcccagggtatccccatgcctacgtttggtggtctatttccttatccctatacttacatggcagccgctgctgctgctgcatctgcgctgccagctacctctgcggcagccgctgccgctgcagcagccggttctctttcgagaagtcccttcttggggtccgcgagacctcggcttagattttcaccttatcagatcccagtcactattcctccgtcaacttctttactgaccactgggttggcatccgaggggtccaaggcagccggtggcaactcccgggagccatctcctcttcctgagctggcccttaggaaagtcggcgcacccagcaggggtgctctgagccccagcggatcagccaaggaggccgctaatgaactccagtctatacagagactcgtatccggcttagaatcgcagcgcgcattgagcccaggacgggagtcccctaaatag

SEQ ID NO: 31049 - DNA, 981 bp, synthetic construct
  misc_feature 1..981: note = Description of Artificial Sequence: Synthetic coding sequence
  source 1..981: mol_type = other DNA
atgagcgcctttcttgctgccgctcaaccctcctttttccccgctctagcgctccctcccggagctctggctaagcccctaccagaccctggactggctggagccgctgcagccgctgccgcagctgctgcggctgccgaggctggcctgcatgtctctgctctcggccctcaccctcccgctgcccacctccgctcactcaaaagcctagaaccagaagatgaggtcgaagacgaccctaaggttaccctggaagctaaggagctctgggaccaattccacaagctcggcacggagatggtgattaccaagtcaggaagaagaatgttccctccttttaaagtgcgcgtgtcggggctggataagaaagccaaatatatacttctcatggacatagtggcagctgatgactgcagatacaagtttcacaattccaggtggatggtagctggcaaggcagatccagaaatgccaaagcggatgtacattcacccagattccccggctactggggaacaatggatggctaaacctgtagcatttcataagctgaaactgaccaataatatctcagataagcacggtttcacgattctgaactcaatgcacaagtaccagcccaggtttcacattgtgcgtgccaatgatatcctgaagctaccttatagcacctttcggacgtatgtgtttccagagactgacttcatcgcggtgaccgcttatcagaatgataagattacccagttgaagatagataacaaccccttcgccaaaggcttccgagacaccggtaacgggcgaagggagaaacgaaaacaactgacgctccctagtctcagactgtatgaggagcattgcaagcctgaacgcgatggtgctgaatcagatgcctcctcctgcgacccgccacccgcaagggagccgccaacatctcctggggctgcgccatctccactaagactccaccgcgcaagaggttag

SEQ ID NO: 31050 - DNA, 996 bp, synthetic construct
  misc_feature 1..996: note = Description of Artificial Sequence: Synthetic coding sequence
  source 1..996: mol_type = other DNA
atgaccgagaggccacctagtgaggcagccaggagtgacccacaactggaggggagggacgccgctgaggccagtatggctccacctcacctggtcctgttgaacggagttgcaaaggaaacctcccgggctgcagctgcagagcctcccgttatcgagctgggcgcaaggggaggtcccggaggaggaccagcgggagggggtggagctgccagggacctgaagggacgcgatgcagctaccgccgaagctcgccacagggtccctactaccgagctctgcagaccgcctggtccagcccctgccccagcgccagcaagtgtgacggcggaactaccgggtgacgggcgtatggtgcaactgtctcccccagctctggcagccccagcagcccctggaagagccctactctactctctgagtcagccactggcgtcactggggtctggcttttttggggagcctgacgcgtttcccatgtttaccacaaacaatagggtgaaacggaggccgtctccttacgagatggagattacagatggacctcataccaaggtggtacgcagaattttcaccaattctcgggagagatggagacagcagaatgtgaatggagcgttcgctgagctccgtaagctcattcctacgcacccacctgacaaaaagctgagcaagaacgagatactcaggcttgccatgaaatatatcaattttctagcaaaactgctgaacgatcaggaggaggagggcacacagagggcaaagaccggtaaagatcccgtagttggtgccggaggtggaggaggcggaggtggcggaggagctcccccagatgatctgttacaggacgtgctgagccctaactcttcctgcgggagttctttagatggcgctgccagccctgattcttatacagaagagcctgctcctaaacacactgcaagaagtttacatccagcaatgctgcctgctgccgatggcgcaggccctaggtag

SEQ ID NO: 31051 - DNA, 1002 bp, synthetic construct
  misc_feature 1..1002: note = Description of Artificial Sequence: Synthetic coding sequence
  source 1..1002: mol_type = other DNA
atgacagagcggcctccctcggaggcagcgcgttcagacccacagttggagggtcgcgacgcggcagaggctagcatggcccctccacacctcgtgctgctgaacggcgtggcgaaagaaaccagccgagcagccgctgccgagccaccagttatagagttgggtgcgaggggcggacccggtggtggtcctgccggtgggggaggcgcagccagagatttgaaggggagggatgcagctactgccgaggctcgacacagggtgccaacaaccgaactatgtcgccctcctggtcctgccccagcacctgctcccgcttccgtgacagcggagctaccgggtgatggacgcatggtacagctgagccccccagctttagctgcaccggcagcacctggcagggcactactctattccctctcacagcccctcgcatctcttgggtctcactccgggttttttggcgaaccagacgccttcccaatgtttacaacaaataatcgagtaaagcgcaggccaagcccctatgagatggaaatcactgatggcccacacaccaaagtggtccgccgtatttttactaatagccgcgagcggtggaggcagcagaatgttaatggtgcattcgcagagctgcgaaagttgattcccacacatcctcctgataagaagttaagcaaaaacgagatcttacgcttggctatgaagtacataaactttcttgccaaactccttaacgatcaagaagaagagggcacacagcgggcaaaaaccggcaaggatccggttgttggcgcaggaggtgggggaggcggagggggagggggagcacccccagacgatttattacaggatgtactatcaccaaatagctcctgcggaagttctcttgacggagctgcctcccctgatagctatactgaagaacccgcacccaagcataccgctcgatcgctccacccggctatgctcccggctgccgatggcgctggtccgcgttag

SEQ ID NO: 31052 - DNA, 996 bp, synthetic construct
  misc_feature 1..996: note = Description of Artificial Sequence: Synthetic coding sequence
  source 1..996: mol_type = other DNA
atgaccgagaggcccccttccgaagccgcaaggagcgatccccagctcgagggtagggacgccgctgaggccagcatggctccccctcatctggtgctcctcaacggcgtggctaaagagaccagccgcgcagctgccgcagagccccctgtgatcgagctaggcgcacgcggtggccctgggggtggaccagcaggcggaggtggggcagctagggacctcaaggggcgtgatgccgcaactgctgaggcccgacacagagtcccaactactgagctgtgtagacccccagggccagcaccagctcccgctccagcttccgtgacagcagagctgcccggtgatggcaggatggtccaacttagtcctcctgctctggccgctccagcagctccagggagggctctcttatattccttgtcccagcctctggctagtctcggctccgggttctttggtgaaccggatgcgtttccaatgtttaccactaataacagggtgaaacgccgaccttctccatacgagatggagatcaccgacggacctcacacaaaggtagtgcgtcggatctttactaattcccgggagaggtggagacagcaaaatgttaatggagccttcgccgagctccgaaagctgatccccacccatcctccggataaaaagcttagcaagaacgaaatactgcggctggccatgaagtatatcaattttctagccaaattgttgaatgatcaggaggaggaaggaacacagagagcgaagaccggcaaagaccccgtcgtaggcgctggtggaggcggtggcggaggtggaggaggtgcaccccctgacgacctgctccaggatgtgctttcaccaaattcatcttgtgggtcgagtttagacggcgctgcatcccctgattcatacacggaggagcctgcccctaaacacacggccagatccctgcaccccgcaatgttgcccgcagccgacggagccggtccaaggtag

SEQ ID NO: 31053 - DNA, 993 bp, synthetic construct
  misc_feature 1..993: note = Description of Artificial Sequence: Synthetic coding sequence
  source 1..993: mol_type = other DNA
atggaacacctcggccctcatcacctccaccctggtcatgccgaacctatatcctttggaatcgaccagatcctgaacagtcctgaccaaggcggttgcatgggcccagccagccggctacaggacggcgagtatggactgggatgtctcgtcggaggggcatacacatacgggggtgggggatcagcagctgcaaccggggctgggggagcgggagcttatggcactggaggccctggcggtccaggaggaccggcaggcggaggcggagcctgctcaatgggccctcttaccggatcctacaacgttaacatggccctagccggaggcccagggccagggggtggcggaggaagtagcggcggagcaggagcgttgtcagcggctggtgtgatacgtgtgcctgcccatcgcccactggctggcgctgtggctcacccccagccattggctactggtttaccaaccgtcccgagtgtgccagccatgcctggggtgaacaacctgacaggtctcaccttcccatggatggagtccaacaggagatatacaaaggacaggttcaccgggcacccttaccagaatcgaactccaccaaaaaaaaaaaaacctagaaccagctttacaagactgcagatttgcgaactcgaaaagagatttcaccggcagaagtacctcgctagcgcagaacgcgctgccctggcgaaggcactgaagatgacagatgctcaagtgaagacatggtttcagaatcggagaacaaaatggcgacggcagacggctgaagagagagaggccgaaaggcagcaagcaaaccgcatacttctccagctacaacaggaggcgttccagaagtctctagcccagcctctgccagccgaccctctgtgcgttcataactcctcgctcttcgccctgcagaacctgcagccttggagtgatgactctactaaaatcacctccgttaccagtgtcgcgtcagcttgcgagtag

SEQ ID NO: 31054 - DNA, 774 bp, synthetic construct
  misc_feature 1..774: note = Description of Artificial Sequence: Synthetic coding sequence
  source 1..774: mol_type = other DNA
atggaacatctggggcctcatcatctccatcctggccatgccgagccaatcagcttcgggattgaccagattcttaattccccggaccagggagggtgcatgggtcctgctagtaggctccaggatggagaatatgggttgggatgtctggtgggcggtgcttatacatatggcggaggcggatccgccgcagccactggtgcgggaggggctggggcatatggaaccggagggcctggaggcccagggggacccgctggtgggggtggcgcttgttctatgggaccacttaccggttcctacaatgtgaatatggcactcgccggagggccagggcctggcggtggcggtggaagtagcggcggtgctggcgctctctccgccgctggggtcatccgcgtcccggctcatcggccactcgctggtgctgtagctcaccctcagcccctcgccactggtttgccaaccgtgccttccgttcctgccatgcccggagttaacaacttgacagggttaacattcccttggatggagtccaatcgaaggtacaccaaagataggttcaccggccacccctaccagaatagaactccaccgaaaaagaaaaagcctagaactagctttacacggctacagatctgtgaacttgagaagcggttccaccggcagaagtacctggcctctgctgagagagccgcactggcaaaagctctcaagatgactgatgctcaggtaaagacctggttccagaatcggcgaactaagtggaggtag

SEQ ID NO: 31055 - DNA, 345 bp, synthetic construct
  misc_feature 1..345: note = Description of Artificial Sequence: Synthetic coding sequence
  source 1..345: mol_type = other DNA
atggccgaatgtccaacgcttggtgaggccgtaacagatcacccggaccggctttgggcatgggaaaaattcgtgtacctggacgaaaagcagcacgcatggctgccactgaccattgagattaaggatcgcctccagctgcgggtcctgcttaggcgtgaagacgtcgtcctgggacggcctatgaccccgactcagatcggaccctctttgctgcccatcatgtggcagctgtacccagatgggaggtacagaagcagcgatagttctttttggaggctcgtttaccatatcaagatcgatggggtggaagacatgctcttggagctgcttcctgacgactag

SEQ ID NO: 31056 - DNA, 345 bp, synthetic construct
  misc_feature 1..345: note = Description of Artificial Sequence: Synthetic coding sequence
  source 1..345: mol_type = other DNA
atggccgagtgcccaacgctcggcgaagctgttacagatcacccggatcgtctgtgggcttgggaaaaatttgtgtatctcgacgaaaagcagcatgcatggttgccccttaccatcgagatcaaggatagactccaactgcgggtgctcttacgcagggaggacgttgtgctggggagaccaatgaccccaacgcagatcggacctagcctgcttcctatcatgtggcagctgtatcccgatgggcgttatcggagctctgacagctctttctggcgcctcgtttatcacataaaaattgacggtgtggaggacatgctcctagagttattgcctgatgattag

SEQ ID NO: 31057 - DNA, 345 bp, synthetic construct
  misc_feature 1..345: note = Description of Artificial Sequence: Synthetic coding sequence
  source 1..345: mol_type = other DNA
atggccgagtgtccaaccctgggcgaagcagtgacagaccatccagacaggctgtgggcttgggaaaagttcgtctacctggatgagaagcagcacgcgtggttacccctgacaatagagatcaaggaccggctacaactgcgtgttctgctgcgccgtgaagatgtggtcctcgggaggcctatgaccccaacccaaattggccctagcctactaccgatcatgtggcaactatatcccgacggacgatacaggtcatccgatagctcattctggaggctggtgtatcacataaagatcgacggcgtggaggatatgctattagagctgctccccgatgattag

SEQ ID NO: 31058 - DNA, 345 bp, synthetic construct
  misc_feature 1..345: note = Description of Artificial Sequence: Synthetic coding sequence
  source 1..345: mol_type = other DNA
atggccgagtgtccgacgttgggcgaggcagtgactgaccatcctgatcgcctttgggcatgggaaaagttcgtgtacctggatgagaaacagcatgcctggctgcccctgaccatcgagattaaagaccgcctgcagctacgggtcttactcagaagagaggacgtggtcctgggacgccctatgactcctacccagattggaccatctcttctcccaattatgtggcagctttatcccgacgggaggtataggtctagtgactccagtttttggaggttggtctaccacatcaaaattgatggagtcgaagacatgctgctggagctcctaccagacgattag

SEQ ID NO: 31059 - DNA, 1407 bp, synthetic construct
  misc_feature 1..1407: note = Description of Artificial Sequence: Synthetic coding sequence
  source 1..1407: mol_type = other DNA
atggatagcttagcctcgttggtgctatgcggcgtgtctctactgttgagcgggacagtggaaggcgctatggatctcatcctcattaactcacttccgttagtgagtgacgccgaaacctccctgacatgcattgctagcgggtggcgaccccacgagcctattactattggtagggatttcgaagccttaatgaaccagcatcaggatcccctcgaagtcacccaggatgtgactcgtgagtgggcaaaaaaggtggtctggaagagggaaaaggctagcaagataaacggagcttacttctgtgagggccgtgtgaggggcgaggctattaggatcagaaccatgaagatgcggcagcaggcctcattcctgcccgcaacattgactatgacagtggataagggtgacaacgtgaatatatcgtttaaaaaagttcttatcaaggaggaggatgccgtaatttataagaacggatccttcatacactccgtgccacgccatgaagtccctgatattctggaagttcatctgcctcacgctcagcctcaagatgcaggcgtttatagtgcccgatatatcggagggaatctgtttacgagcgccttcactagactgatcgtgcgcagatgtgaagctcagaagtggggccctgaatgtaaccatctgtgcaccgcttgcatgaataatggtgtgtgccacgaggacactggcgagtgcatctgcccacccggattcatgggtaggacctgcgagaaggcttgcgagcttcacacttttggcagaacctgtaaggagagatgctctggccaggaaggctgcaaatcgtatgtattttgcttacctgacccctacggctgttcgtgcgccactgggtggaaaggactgcaatgcaatgaggggatccagaggatgacccccaagattgtggacctgcccgaccatatagaggttaactccgggaagttcaacccaatctgcaaggcgtccgggtggcctttgccgacgaacgaggagatgacattggtgaagcccgacggcactgtgctgcatccaaaagattttaatcataccgaccacttcagcgtggcaatcttcactatccatcgtatcctaccacctgactcaggggtgtgggtttgctctgtgaacactgtggccggaatggtcgagaagccctttaacattagtgtgaaggtattacctaaacccctgaacgccccaaacgtgatcgacaccggccataattttgcagtcatcaatatttcctccgagccatactttggcgatggccctataaagagcaagaagttgctgtacaagccagtcaaccattatgaggcctggcaacatattcaggtgtcaatggaaaagcaaagactgaccaaagccaattccgacatctag

SEQ ID NO: 31060 - DNA, 3375 bp, synthetic construct
  misc_feature 1..3375: note = Description of Artificial Sequence: Synthetic coding sequence
  source 1..3375: mol_type = other DNA
atggacagtttggcaagtctggtgttgtgtggcgtaagtctcttattgtctgggacagtggaaggcgctatggatctcatcctgatcaactctctgccactggttagcgacgctgagaccagcctgacctgcattgctagtgggtggcgacctcacgagcccattacaatcggacgggattttgaggctctaatgaatcagcaccaggaccctctggaagtgactcaagacgtgacacgcgagtgggctaagaaggtggtgtggaaacgggagaaagctagtaagatcaatggcgcatatttttgcgaaggacgagtccgcggagaggccatcagaatccgcaccatgaagatgcgccagcaagccagctttctgccagctacactgaccatgactgtggataagggcgataatgtgaacatttccttcaagaaggtactgatcaaggaagaggacgcggtgatttataagaatggtagctttatacacagtgttcctcggcacgaggtgcccgatattctggaggtccacttaccgcatgcccagccacaggacgcaggcgtctactccgctcggtatattggtggaaacctgttcaccagcgctttcaccaggttgatagtcaggcggtgcgaggcacaaaaatgggggcctgagtgcaatcacctgtgtaccgcatgcatgaataatggggtttgccacgaggatacaggcgagtgcatctgcccacctggctttatggggaggacctgcgaaaaagcctgcgagctgcatactttcgggaggacttgcaaggaacgatgctccggacaagaaggctgcaaatcgtatgtcttttgtctccccgacccgtatggatgtagctgtgcaaccggatggaaggggttgcaatgcaacgaggcctgtcacccaggtttttatggacctgattgtaaactgcgatgctcctgtaacaacggtgagatgtgcgaccggttccaaggctgtctctgttccccaggctggcagggcctgcaatgtgaacgagagggcatccagagaatgacccctaagattgttgatttgcctgatcatatcgaagtcaattcaggcaagtttaatcccatctgcaaagctagtggatggcctttgccgactaatgaggagatgactttagtcaagcccgatggcacggtcttgcaccccaaggattttaaccacacggatcacttctctgtggccatctttacaattcaccggattttacccccagactcaggagtatgggtgtgtagcgtaaataccgtcgccggtatggtggaaaaaccttttaacatatctgtgaaagttctgcctaaacctttgaacgctcccaacgttatcgacaccggccataacttcgccgtgatcaacatctctagcgagccttatttcggcgacgggccaattaagagtaagaagctcttatataagcctgtgaaccattatgaggcctggcaacatattcaggtgactaacgaaattgtaaccttaaactatctggaacctcggaccgagtacgagctttgcgttcaactggtgaggcgcggagaaggcggagagggtcatccagggcctgtgcgtcggtttacgactgcctccatcgggctgcctccgcctcgcggtttaaatcttctcccaaagtctcagactactctcaatctgacgtggcagcctatttttcccagctccgaagacgacttctacgttgaagtcgagaggcggagcgtgcagaagtccgatcagcagaacataaaagtcccagggaacctgacgtccgtgctactgaataatctccatccgcgagaacagtacgtggtgagagcacgggtgaataccaaggctcagggagagtggagcgaggatctaacagcctggactttgtcagatatcctcccaccgcaaccagagaacattaagatctccaacattactcacagcagtgccgtaatttcttggacaatcttagacgggtatagcatcagttccataaccattcgctacaaggtacagggtaagaatgaagaccagcatgtggatgtcaaaataaaaaatgcaacaataacccagtaccagttgaagggtttggagccagaaacagcctaccaagtggacatcttcgcagagaataatatcggctcgagtaatccagctttcagtcacgagctggtgactctccctgagtcccaggctcctgctgaccttggtggagggaaaatgctgctcattgcaatcctgggcagcgccggaatgacatgcctgacagtcctcctggctttcctgattatcctgcagcttaagcgggcaaatgtgcagcgtcgcatggcccaggctttccagaacgtccgggaagagcccgcagtccagttcaactctggaacactcgccctcaataggaaagttaagaacaatcccgatcccacaatatatcccgttcttgactggaacgacattaagtttcaagatgtgatcggggaaggcaattttggacaggttcttaaagccagaatcaaaaaggatggactgcgcatggacgcagctatcaagagaatgaaagagtacgcttctaaagatgaccaccgggatttcgcgggagaactggaagtgctctgcaaactgggccatcatccgaatattattaacctgctcggcgcatgcgagcaccgtggttacctatacttggcgatcgaatacgctccacacgggaacctcctggacttcctgaggaagagtcgcgtgctggagaccgaccctgccttcgccatagcaaactcaactgcctccaccctctccagccagcaactacttcacttcgctgcagatgtagcaagaggaatggactacctgagccagaaacaattcatccatagggaccttgccgctcgtaacattctggtcggagagaattacgttgccaagatcgccgatttcggcctcagtcggggacaggaggtgtacgtgaagaaaacaatgggcagactgcctgtgcggtggatggcaatagaatccctaaattacagtgtttacactacaaacagtgatgtgtggtcctatggcgtgttgctctgggagattgtgtcactaggcggaactccttactgtggaatgacatgcgccgagctgtacgagaagctccctcagggctacagattggagaagccgcttaactgcgatgatgaagtctacgacttaatgagacagtgctggagggagaaaccgtatgaaagacctagctttgcgcagatcctcgtaagcctgaaccgaatgctggaagaaagaaaaacgtatgtcaatactacactgtatgaaaaatttacttacgcaggtattgattgcagcgccgaagaggccgcttag

SEQ ID NO: 31061 - DNA, 3246 bp, synthetic construct
  misc_feature 1..3246: note = Description of Artificial Sequence: Synthetic coding sequence
  source 1..3246: mol_type = other DNA
atggacagtttagcatccctggtgttgtgcggcgtctccctgttgctgagcgggacagtggagggcgctatggacttgatcctcattaacagcctgccgcttgtgtcagatgctgagacatctctcacttgcattgcctccggctggagacctcacgaacccattacgattggcagggacttcgaggccctgatgaaccagcatcaggacccattagaagtgactcaagatgtgacccgagagtgggctaaaaaggttgtctggaaaagggaaaaggctagcaagattaacggcgcatacttctgcgagggacgggtcaggggcgaggctatccggattcgaaccatgaagatgcggcagcaggcaagttttctacccgcaacactgacaatgacagtagataaaggtgataatgtgaacattagctttaaaaaggtgctaattaaggaggaggacgcagttatttacaagaacggctctttcatccactctgttcccaggcacgaggtgcccgacatactggaagtacacctgcctcacgctcagccacaagatgccggagtctactccgctcgctatatcggaggcaatctgttcacatcagcatttacgcgcctgatagtgcggagatgcgaggcccagaagtggggcccagaatgcaatcatctctgtacggcatgtatgaataatggtgtttgtcatgaggacaccggcgagtgtatttgcccccctggcttcatgggcaggacatgcgagaaggcatgcgaattgcacactttcggaaggacctgcaaggagcgctgctccggccaggaggggtgcaaaagctacgtattctgtcttccagacccttacggttgtagttgtgccacgggttggaaaggtctccaatgcaatgaaggaatacagaggatgacccctaagatcgttgacttacctgaccacatcgaagtaaatagtggaaagttcaatcccatttgcaaggcttccggttggcctttgccgactaatgaggagatgactttagtgaagcccgacgggaccgtgctgcatccaaaagacttcaatcacaccgatcatttctcagtagccatttttaccattcaccgcattttaccgcctgattcgggagtgtgggtgtgcagcgtgaacactgtagcgggaatggtcgagaagcccttcaatatctccgtcaaggtgctgccaaagccattgaatgctccaaatgtgatagacactgggcataatttcgccgtgattaatatttcgagtgaaccctatttcggagatggccctatcaaaagcaaaaaattgctctataaacccgtgaaccactacgaagcttggcagcatattcaggtcacaaacgagattgtgacccttaactacctggaaccccgaaccgagtacgaactctgtgtccaattggtgaggcggggtgaaggcggagagggacacccgggaccggtacgacgattcaccactgctagcattggacttcccccacctcggggattgaatctgctccctaagtcgcagactaccttaaatctgacatggcaaccaatattcccgtccagcgaggatgatttctatgtggaggtcgagcgcaggtccgtccagaagagcgatcagcagaatataaaagtgcctggtaacttgacttccgtattgcttaataaccttcacccgagggaacaatacgtcgtgagagcccgagtaaacacaaaagcacagggcgaatggtctgaagacctcaccgcctggacattgtcagacatccttccaccccagcctgaaaacatcaagatctccaacatcacacattcaagcgccgtaatttcatggaccatactggatggttattcaatttctagtattacaattcgatataaggtgcaggggaagaatgaagaccaacacgtcgacgttaagatcaagaatgctaccattactcaatatcagcttaagggccttgagcccgagactgcttaccaggtggatattttcgctgagaataacataggatcatcaaacccagctttttcccacgagctggtgacattaccagaaagccaagccccagctgacctggggggaggcaaaatgttgctaattgccattctaggatccgctgggatgacatgtctcaccgtgctcttagcatttctcatcattctacagttgaaacgagctaatgtgcagcgcagaatggcccaggcttttcaaaacgtgagagaagagcctgctgtacaattcaattcgggcacattggctttgaatcgcaaggtgaagaacaaccccgaccccacaatttacccagtgctggattggaatgatatcaaatttcaagacgtcattggggaaggcaattttgggcaagtgctgaaggcacggattaagaaggatggcttgcggatggacgccgcaattaagaggatgaaagagtatgctagcaaagatgatcacagggattttgctggagaactggaggttctgtgtaagctcgggcaccaccccaacataataaacctgctgggtgcctgcgaacaccggggatacttgtatcttgctatagaatacgcacctcatggcaacctcctggattttctgcgtaagtcccgagtcctggaaacagatcccgcattcgctatcgctaacagcacagcctctacgctgagcagccaacagttgttgcacttcgccgcagatgtggcacgcggtatggactatcttagccagaagcagttcatccacagggaccttgctgccagaaatattctcgtgggggaaaattacgttgccaagatagccgacttcgggctcagtcggggacaagaggtgtacgtgaaaaagacaatgggtaggctgcccgtgcggtggatggccattgagtccctgaactacagcgtgtacacgacgaattccgacgtgtggagctatggggtattactttgggaaatcgttagtctggggggtacgccatattgtggcatgacttgtgccgagttatacgaaaagttgccccagggctacaggctggaaaaaccactgaattgtgatgacgaggtgtatgacttgatgagacagtgttggcgggagaagccttacgagagacccagctttgcgcagattttggtttccctgaacagaatgctggaggagcgaaagacctatgtaaataccacactgtacgagaagttcacctacgcaggcatagactgcagcgcagaggaggcagcttag

SEQ ID NO: 31062 - DNA, 3375 bp, synthetic construct
  misc_feature 1..3375: note = Description of Artificial Sequence: Synthetic coding sequence
  source 1..3375: mol_type = other DNA
atggattccctcgctagtcttgttctctgtggcgtgagtctcctgctgtccgggactgtggagggcgcaatggatctcatccttatcaacagtctacctttagtctcagacgctgaaacaagcctgacctgcatcgctagtgggtggcgtccccacgaaccaatcactatcggaagagacttcgaagctctgatgaatcagcaccaggatcccctggaggtgactcaggatgtcacccgggagtgggccaagaaggtggtgtggaaaagggagaaagcatccaagattaacggcgcatacttttgcgaaggccgagtccgcggagaagctatccggatccggacgatgaagatgagacagcaagcctccttcctcccggctacactgactatgaccgtagacaagggggacaacgtcaacatctcttttaaaaaagtcctgatcaaagaggaggatgctgttatatataagaacggcagtttcattcactcagtgcccagacacgaagtaccggatattctggaggtccacctgccccacgcccagccacaagacgcgggagtttactctgctcgttatatcggaggtaacctattcactagcgcattcacccgcctcattgtcagaaggtgcgaggcacagaaatgggggcctgagtgcaaccacctctgtaccgcttgtatgaataacggcgtgtgccatgaggatacgggtgagtgcatttgcccaccaggattcatgggtcgcacctgtgagaaggcttgcgaactacatacgtttgggaggacatgtaaagagaggtgttctggtcaggagggttgcaaaagctatgtgttctgtcttcccgacccgtacggatgtagttgtgccacgggctggaaggggctgcagtgtaacgaagcttgccaccccggtttctatgggcctgactgtaaactgcgctgctcatgcaacaacggcgaaatgtgcgatcgattccagggttgtctctgctcacctggctggcaagggttgcaatgtgagagggagggcatacagcggatgacacccaagatcgtagatctgcccgatcatatcgaggtcaatagcggaaagttcaatcctatctgtaaggcctccggctggccattgccaacaaatgaagagatgacattagtgaaaccagacggcaccgttctacatccgaaggattttaatcacactgatcatttttccgtggccatattcactatccatcggatcctgcctccagactcaggcgtgtgggtatgctcagtcaatacagtcgcgggtatggtggagaagccattcaacatttctgtgaaggtgctgcctaagcctctgaacgcccctaatgtaatcgacactggacacaactttgccgtaattaatatcagtagcgagccgtattttggcgatgggcctatcaagtctaagaagttgttatataagcctgtcaaccactacgaggcctggcaacacatccaggtcactaacgaaattgtgaccttgaactacttggaacccaggaccgagtatgaattatgcgtccagctcgttcggagaggcgagggtggggagggacatcctggacccgttaggcgttttaccaccgcctcaatcggactgccccctcccagagggttaaacctgttgcccaaaagtcagaccacactaaacctcacttggcaacccatctttcctagctccgaagatgatttttatgttgaagtcgaaaggaggtctgtccaaaagtctgatcagcagaacattaaggtgccgggaaatcttaccagtgtgcttctgaacaacttgcatccacgcgagcagtatgtagtccgcgctcgagtgaatactaaagcccagggtgagtggtccgaagacctgacagcctggacactgtccgacatcctacctccacagcccgaaaatattaaaatcagcaacattacgcactcaagcgctgtgatctcttggactatcctcgatggatattccatcagctcaatcactattcgatacaaggtgcaaggcaagaatgaggaccagcacgtcgacgtcaagatcaaaaatgcaaccataacacagtatcagttaaagggactggagccagagacagcataccaggtagacatctttgctgagaataacatcgggtctagcaatcccgctttcagccacgaactggttacactgccagagtcccaggcaccagcggacctcgggggtggaaaaatgctcctcattgcgatactcgggtccgccggtatgacctgcctgaccgtgctgttggcatttctcatcatcttacagttaaaacgggctaacgtgcagcgtcggatggcccaggcttttcagaatgtaagagaggagcccgctgtgcagttcaatagcggtacactggccctgaatcggaaagtcaagaataaccccgatccaaccatctaccccgtgctagattggaacgacatcaaatttcaagatgtgatcggcgaaggcaacttcggccaagtgctcaaagctcgcattaaaaaggacggcctcaggatggacgctgccatcaagcgcatgaaggagtacgcatcaaaggacgatcatcgggacttcgccggagagctggaggtcctctgtaaactggggcaccacccaaatattattaacttactcggagcatgtgagcatcgtggctacctttacctggcaattgaatatgctccccatgggaacttgctcgattttcttcgcaaaagtcgcgtgctcgagaccgaccccgctttcgcaattgcgaactctactgcatcaactctttcctcacaacagcttctccacttcgcggcagacgtcgcaaggggtatggattacctgtcgcagaaacaatttatacacagagatctcgccgcacgcaatatcctggtcggtgagaattatgtggccaaaatcgctgattttggactgtcccggggtcaagaggtgtatgttaagaaaaccatggggcgactgcccgtccgctggatggccatcgagtcccttaactatagcgtttatactaccaactctgacgtgtggtcctatggggtcctgctgtgggaaattgtatcactggggggaactccctattgtggcatgacttgcgccgagctgtatgagaagctacctcagggatacaggctcgagaagcctctgaactgcgatgacgaagtgtacgatctgatgcggcaatgctggcgcgaaaagccatacgaacgacccagctttgcacaaatcctggtgtccttaaacagaatgttagaggaacggaagacctacgtgaacacgaccctgtatgaaaaatttacctatgctggaatcgactgcagcgcagaggaagccgcttag

SEQ ID NO: 31063 - DNA, 2931 bp, synthetic construct
  misc_feature 1..2931: note = Description of Artificial Sequence: Synthetic coding sequence
  source 1..2931: mol_type = other DNA
atggacagtctggcctcactcgtcttgtgcggcgtttctttgctactctccgcgagctttcttcctgcgacgctcacaatgaccgttgataagggtgataacgtaaacatatccttcaagaaagttctgatcaaggaagaggatgcagtcatctataagaatgggtcattcatacactctgtgccccgacacgaagtgcctgatatccttgaagttcaccttccacacgctcagcctcaagacgcaggggtgtactccgctcgctacataggagggaatctctttacgtcagcttttacaaggctgatcgtccgtaggtgcgaagctcagaaatggggcccagaatgcaaccacctctgcaccgcctgtatgaacaacggcgtctgccatgaagacacaggagagtgcatttgccccccagggtttatggggagaacgtgcgaaaaggcttgcgagcttcacacgtttggcagaacctgtaaggagcgatgctcggggcaggaggggtgcaagtcttacgtgttctgcctgccagatccatatgggtgctcttgcgccacaggttggaagggactgcagtgcaatgagggaatccagcgcatgacaccaaaaatcgtggacctacccgaccatatcgaagttaactcaggcaaattcaatccaatctgtaaagcctcaggctggcccctccccaccaatgaagagatgaccctcgttaagcctgatggaacagtactccaccccaaggatttcaatcacacagaccacttctcagttgccatcttcaccatccaccggattctgccgccagattccggcgtgtgggtgtgctccgtcaatacagtcgccggaatggtcgagaagccattcaatatcagtgtgaaagtcctgcccaagcctttaaatgccccaaatgttatcgacacaggtcacaactttgcggtcataaacatctcctcagagccatacttcggagatggacctattaaaagtaagaaacttctctataagccagttaaccattatgaggcatggcagcacattcaggtcacaaatgaaatcgtaacgttaaactatctagaaccaaggaccgagtacgaactgtgcgtccagcttgtcaggaggggagagggaggagagggccatcctgggccagtgagacgattcaccaccgcgagtattgggctgccacccccaagggggttgaatctgctgcccaagtcccagacgacactcaacctaacctggcagccaatcttcccaagctcagaggacgatttctacgtagaagtggagcgcaggtcagtgcaaaagtctgatcagcagaacattaaagttcccggaaatttgacgtctgtccttcttaacaacctgcatcccagggagcagtacgttgtgcgagcacgggtcaacactaaagcccaaggggaatggtccgaggatctgaccgcgtggacattgagtgacattctgccccctcaacctgagaatattaagatttcaaacatcacgcatagcagcgcagtgattagttggaccatcctggatgggtactcaataagttccatcacaattagatataaagtccagggcaaaaatgaagatcagcatgttgacgttaagattaaaaatgcaacgataactcaatatcagctcaagggattagagccagagactgcctaccaagttgatatctttgctgagaacaacatcgggtcatcaaaccccgctttttcccacgagcttgttactctcccagagtcacaggcccctgccgacttggggggtggtaagatgctgctaattgccatcctgggctcagctggaatgacatgcttgaccgttcttttggctttcctgatcattctgcagctgaagcgcgcaaatgtccaacggcgaatggctcaggcgtttcaaaatcgagaggaacccgctgtgcagtttaactcaggtacattggccctgaataggaaagtcaagaataatccggacccaaccatctatccagttctcgactggaatgatattaagttccaagatgtgatcggtgaaggaaacttcggtcaggtgctgaaggctagaataaaaaaagatggcctgaggatggatgccgcaattaaaagaatgaaggagtacgcctcaaaagacgatcacagagactttgccggagagcttgaggtgctgtgcaagctcgggcatcacccaaacatcattaatttactcggtgcctgcgaacatcggggatatttgtaccttgccattgagtacgctccgcatggtaatctacttgactttttacggaagtccagggtgctggagacagacccagcctttgctattgctaattcaaccgcatccacactgtccagtcagcaattgctgcactttgccgcagatgtcgcaaggggcatggattatctgagtcagaaacaattcatccaccgtgatcttgccgctcgcaatattctagtgggggaaaattatgttgctaagatcgccgacttcggactgagtcggggtcaggaggtgtacgtcaagaaaaccatggggaggctccccgtaagatggatggcgattgagagcctgaactattccgtttatacaacaaactccgatgtgtggtcctatggagtgttgttgtgggagattgtgagcctgggagggacgccttattgcggaatgacttgcgctgagctgtacgaaaagctgccgcagggctatagactcgagaagccactaaactgtgacgacgaagtttatgatttaatgagacaatgctggagagaaaaaccctatgagagaccctcatttgcccagattctggtaagcctgaatcggatgttggaagaacgtaagacatatgttaacaccacgctgtatgaaaagttcacatacgctgggatcgattgctccgccgaggaggcggcatag

SEQ ID NO: 31064 - DNA, 7884 bp, synthetic construct
  misc_feature 1..7884: note = Description of Artificial Sequence: Synthetic coding sequence
  source 1..7884: mol_type = other DNA
atggagaagctccatgggcacgtctcggcacatccggacatcctctctctggagaacagatgcctggcaatgctgcctgacctgcagccactcgagaagttgcaccaacatgtgagcacccactccgatattttgagccttaagaatcagtgtttagccacactgcctgatttgaagaccatggaaaaaccacacggctatgtaagtgctcaccctgacattctctccctcgaaaaccagtgcctggctaccctttcagacctgaagacaatggaaaagcctcacggtcacgtctcagctcatccagatatacttagcctggagaacagatgcttagcgactctgagcagtctcaaaagcacagtgtctgccagtccgttattccaatctctccagatctctcatatgacacaggcggacctgtatcgcgtgaataattccaattgcctgctgtctgaaccgccatcttggcgagctcagcattttagcaaagggctggatttgagtacctgtccaattgctctcaagtccatctccgccactgaaacagcccaggaggcaacgctggggagatggttcgattctgaggaaaagaagggagctgaaacacagatgccttcatattcattatcattaggggaggaagaggaggttgaggatttggccgtaaaacttactagcggggacagcgaatctcacccagaacccaccgaccacgtgcttcaggagaaaaagatggcacttctttccctgctctgcagtacactggtgtccgaagtgaatatgaacaacaccagtgaccctactctggctgctatatttgagatttgtcgggaacttgctttgctggaacccgagttcatcctgaaggctagtctgtacgcaagacagcagcttaacgtcagaaacgtggcaaataatattttagctatcgctgccttcctgccggcttgtcggcctcaccttaggcggtatttctgcgccatagtgcagctccccagcgactggatccaggtggctgagctgtatcaatctttggctgaaggggacaagaataagcttgtacccctgccagcctgcttgcgtaccgcaatgactgacaagttcgctcagtttgatgagtaccagctagccaaatacaaccctaggaagcacagggcaaagaggcaccccagacgcccaccacggtcccctggtatggagccacctttttcacataggtgtttccccaggtatattggcttccttagagaagaacagcggaagttcgaaaaggcaggggacacagtgtccgagaagaagaacccacctagatttacactgaagaaattagtgcagagacttcatatccataaaccagcccaacatgtgcaggccctgttggggtaccggtacccatccaacctgcagctcttttcacggagccgactgccgggaccatgggattcatcccgagctggtaaacggatgaaactgtcaagacctgagacttgggagagggaattaagtctgcgaggcaataaggcctctgtgtgggaagagttaatcgagaatgggaagctacccttcatggctatgttacgcaacctgtgcaatttgctccgggtgggaattagctcacgccaccatgagctgatcttgcaaaggttacagcacgctaaatcagtgatacacagccggcagtttccattcagattcttgaacgcacacgacgcaatcgatgccctcgaggcccaactgcgcaatcaggccctgccatttccttctaatatcactctgatgcgaagaattttgacccgtaatgagaaaaacaggcccagacgacgctttctgtgccacctgagtaggcaacagctgaggatggccatgaggataccagtgctatacgaacaactgaaacgagagaagctacgcgtgcataaggcgaggcagtggaagtatgacggcgagatgctgaatagatataggcaagcactggagacggctgtgaacctgagtgtgaaacactccttaccactgcttccgggacgaactgttttggtctaccttacagacgccaatgccgatagattgtgccctaagtctaatcctcaagggcctccactcaactatgctttactcctgattggcatgatgatcactcgcgctgaacaggtggatgtcgttttgtgcgggggagatacgctgaaaacagctgtcctgaaagctgaagaagggattctgaagaccgctattaagctgcaggctcaagttcaagagttcgatgagaacgatggctggagcctcaatacatttgggaaatacctgctgtcactcgccggtcagcgtgtgccggtggaccgggtcatcctcctgggacagtccatggacgatggtatgatcaacgtcgctaaacagttgtactggcaaagggtaaacagtaagtgcctatttgtaggtatcctactgcgcagagtacagtacctcagcactgacttgaatcctaatgatgtaactctctccggatgtaccgacgctattctgaagttcatcgcagagcatggtgcgtctcatctcttggagcacgtcggtcagatggacaagatcttcaagattccacctcctcctggcaaaaccggcgtgcagagtcttcggccacttgaagaagacactccgtcccctctggccccagtcagtcagcagggatggagatcaatacgtctgttcatttctagcacgtttcgcgatatgcatggtgagagagatctgcttctgcgttccgtgctgccagcattacaggccagggccgctccccatagaatcagtttgcacggtatagacctccggtggggagtgacggaagaagagacccggaggaacagacagctagaggtttgtttaggcgaagtggagaacgcccagttgtttgtgggaattctgggatctcgatatggatacatacctccctcttacaaccttcctgaccaccctcattttcactgggcccaacagtacccaagcgggcgtagtgtgaccgaaatggaagttatgcagtttctcaaccgcaaccagagactccaaccatctgcgcaggctctcatttacttcagggatagcagctttcttagctccgttccagacgcctggaaaagtgactttgtgtccgagtcagaagaagcagccagacgtatctcagagctgaagtcctatctaagtcgacagaaggggataacttgtaggagatacccttgtgagtggggcggagtggccgcaggcagaccctatgttggaggattggaggagttcggacaactcgtactacaggacgtgtggaacatgattcaaaaactatatttacaaccgggagccctccttgagcagccagttagcatccctgacgacgacctcgtgcaggctacattccagcaactgcaaaaaccgcctagtccggctcgccctcgcttgctccaggatactgtgcaaagactaatgctccctcacggacgcctttcgctggtgacaggccaatctggacagggaaaaacagcattcctggcatctttggtgtccgccctgcaggcacccgacggagccaaagtagcctccctggtcttttttcatttctctggtgccagacccgaccaaggtctggctctgactcttctgcggcgactctgtacatatttgagaggacaattgaaggagcccggagccctgccatcaacttacaggagcctggtctgggagttgcaacagcgcttgttgcctaaatccgccgaatccctccaccccggacagactcaggtgttgataattgatggggctgatcgattggtcgaccagaacggacaactgatctccgactggatacccaaaaaattgcccaggtgcgtgcatctcgtgctgagtgttagctctgatgcaggactgggagagacactcgagcagtcccagggggctcacgtgcttgcacttggcccactggaggcttctgcccgtgcaagactggttcgggaggaactggctctctacgggaagcgactggaagagagcccttttaataaccagatgcggttattgctggtcaagcgggaaagtggacgtcctttatatcttaggctggttactgatcacctaaggttattcactctgtacgagcaggtttccgaacgtctgagaacccttcctgccacggttcctctgctgctgcaacacatcttgtccactctggaaaaagaacacgggcctgatgtgctgccgcaggctctgaccgcgctggaggtcaccaggagtggtttgactgtggatcagctgcacggcgtgctgtcagtttggagaaccctccccaagggtactaagagttgggaagaggcagttgcagccggaaacagcggagacccttaccccatgggcccatttgcttgtctcgtacagagcctccgcagtctcctgggtgagggtccccttgaacgaccaggcgctcgtctatgcttgccagacggcccactcaggactgcggcaaagagatgttacggcaaaagaccgggacttgaggacacagctcacatcctcattgctgcccaactgtggaagacgtgtgacgcagatgcttcagggactttccgctcctgtcctcctgaggcacttggtgatctaccctaccacctgctccagtctggcaaccgcggtttgctcagcaaatttcttaccaacttgcacgttgtcgcggctcacctcgaactcggactcgtcagtcgcttgctggaggcccatgcactctatgcaagttccgttccaaaggaggagcagaaactgccagaagcggacgtcgcagtgttcagaacgtttctgcgccagcaggccagtatcctcagccagtaccctcggctgttgccacagcaggccgctaaccagccgttagactccccgctgtgccaccaagcctcattgcttagtagacgatggcacttgcagcataccctgcggtggcttaataaacccaggactatgaaaaaccagcagtcctcctccttatctcttgccgtgagcagttcacccactgcagtggctttttctacaaacggccagagggctgcggtcgggactgccaacggcacagtatacctgttggacctgcgcacttggcaagaagagaagagtgtagtgagcggctgtgacgggatttccgcgtgccttttcctttctgacgataccttgtttttaaccgcattcgatgggctgctggagctgtgggatctgcaacacgggtgccgggttctgcagacaaaggctcaccagtatcagattacagggtgctgtctgtccccagactgtagactgctggccacagtgtgccttggagggtgtcttaagctgtgggatactgttagaggccaactggccttccagcatacttaccccaagtcacttaattgcgttgcattccaccccgagggccaggttatagccaccggttcgtgggccggttccatatcttttttccaggtcgatggattaaaagtgacgaaggaccttggcgcaccgggtgcctcaatacgcaccctggccttcaacgtgcctggcggagtggtggcagtgggacggctggatagcatggttgagctatgggcctggcgggaaggggcaaggcttgctgcgtttcctgcacatcacggctttgtggccgcagccttgtttcttcacgcaggatgccaactgctaactgcgggagaagacgggaaggtccaagtgtggtctgggagcctgggacggcctcgaggccacctgggctcactttcgctgtctcctgccctgtctgtggcccttagtcccgacggcgatcgcgtggccgtggggtatagagctgatggcattcgcatttacaagatttcttccggttcccaaggggcacagggacaagcgctggacgtggcagtctctgctctagcttggctgtccccaaaggtcctagtgtccggcgctgaggatgggtctctacagggatgggctctgaaggaatgctctctgcagagcctctggctgctgagccgtttccaaaaacccgtgcttggtcttgcgaccagccaggagctgctggccagtgcttccgaggatttcactgtgcagctctggcctcggcagctgctcaccagacctcacaaggcggaggacttcccctgtgggacagagctccgcggacacgagggaccagtgtcctgctgctccttctctaccgatggaggatccttggcaactgggggtagagaccgatcactcctttgttgggacgtgaggacccccaagactccagtactcatacactcatttcctgcctgtcaccgggactgggtcacagggtgtgcctggaccaaggacaatctgctgatttcctgcagttcagatggaagcgttgggctgtgggatcctgaatccggccagagactaggccagtttttgggccaccagagcgcggtttccgcagtcgctgcagtggaggagcatgtggtatctgtgtcaagggacggcactctgaaggtttgggatcatcagggtgtggagctcacttccatcccagcacactccggccctatcagccattgcgcagcggctatggaaccacgggcagcgggacaaccaggctcggaactgctggtcgtgactgttggtctggacggagccacacgcctctggcatcctctcctagtatgccagacccacaccctgcttggacactccgggcctgttcgcgctgcggcagtctccgaaacaagcggcctcatgctgacagcttccgaagacggctcagtgcgactgtggcaggttcctaaggaggcggatgatacgtgcatacccagaagcagcgctgcggtgactgctgtagcttgggcaccggacggttctatggccgtgagtgggaaccaggccggagagctgatactctggcaggaggcgaaggcggtggccacagcacaggcccctgggcatattggagcactgatttggagtagtgcccacaccttcttcgttctgagcgccgacgagaagatctcagagtggcaagtcaagctgcgaaagggctcagctccaggaaacctgtcactccacttaaatagaattctccaagaagacctgggggtgctgacttccctcgattgggcgccagatggccacttcctgatactcgctaaggcagacctcaagctgctttgcatgaagcctggggacgccccaagcgaaatttggtcatcctatacggaaaaccccatgatcctttcaactcacaaggagtatgggatcttcgtgttgcaacctaaggaccccggagttctaagctttctgcgacagaaggaaagcggagagtttgaagaacggttaaacttcgacattaatttggagaacccctcaaggacgctcatctccattactcaggccaagccggaatctgagagcagtttcctgtgcgcatccagcgatggaatactgtggaatctcgcaaaatgttcccccgagggcgagtggacaacagggaatatgtggcagaagaaggcaaacactcccgaaacacagacccctggaacagatcccagcacctgtcgagagtccgatgccagcatggacagcgatgcgagcatggacagcgaacccactccccatctgaagactcgccagagaagaaagatacattccggcagtgtcactgccctgcatgtcctgccagagctgttggtgacagcttccaaagacagggatgtaaaactgtgggagagaccatctatgcagctcttgggcctgttccggtgtgaaggctccgtgtcctgtctggagccctggctgggagcgaacagtacactacagctggcggtaggcgatgttcagggcaacgtctactttctcaactgggaataa

SEQ ID NO: 31065 - DNA, 7859 bp, synthetic construct
  misc_feature 1..7859: note = Description of Artificial Sequence: Synthetic coding sequence
  source 1..7859: mol_type = other DNA
atggaaaagctccacggacacgtcagtgctcaccctgacattctcagtctcgagaaccgatgtctggccatgctgcccgatctccaaccacttgagaaattgcaccaacacgtgagcactcattccgacatcctttctcttaaaaaccagtgcctggcaacactaccggatctcaagactatggagaagccccatggatacgtatccgcccaccccgacattctgagccttgagaatcagtgtctggccactttatctgatttgaaaacgatggagaaaccccatggacacgtgagcgcacatcccgacatcctgtctctggagaaccggtgcctcgctacgctgagttctctgaagagcaccgtgagcgcaagtccgctgttccagagcctacagatcagccacatgacacaggctgacctctacagagtcaataacagcaactgccttttatcagagccccctagctggagagcacaacacttcagtaagggcctggacctgagcacttgcccaatcgcactcaaaagcattagtgctactgagacagcccaagaggcgactctcggcagatggttcgatagcgaagagaaaaaaggtgccgagacccagatgccatcatacagtttaagtctgggcgaagaagaagaggtagaagacctggcagtgaaactgacatctggggattctgagtcccatcctgagccaaccgaccatgtgcttcaggagaagaagatggccctgctgagcctgctgtgttctaccttggtctcagaggtgaacatgaataatacatcagatccaacccttgccgctatcttcgaaatatgtcgggagcttgccctgttagagccagagtttattctgaaggcctctctgtatgccaggcagcaactgaacgtaagaaacgtggcgaataatatcctggctatcgccgcattcttacccgcatgccgcccacatcttaggagatacttttgcgccatcgtgcagttgccttccgactggatacaggtggctgagctgtaccagtccttagctgagggggacaaaaataagctggtgccactacctgcgtgcctgaggaccgctatgactgacaaattcgcacagttcgacgaatatcagttggctaaatacaatccacgcaagcaccgagcaaagcgtcaccctcgtcggcctccacggtcccccggaatggaaccaccattttctcaccgttgcttcccgagatacatcggattcctgcgtgaagagcagagaaagttcgagaaagccggtgatacagtaagcgagaagaagaaccctccgaggtttacattaaagaaacttgtccagcgactgcacatccataaaccagcacaacatgtccaggccctgcttggatatcggtacccttcgaacctccagctgttctccagaagtcggctgccgggtccctgggattcaagccgcgcaggcaaacgtatgaaactgagcaggccagaaacgtgggagcgcgaattaagcttgcgcggtaataaggcgtccgtgtgggaggaactcattgaaaacggaaagctcccgtttatggctatgctgaggaacttgtgcaaccttctgagagtcggtatttctagccgacatcacgagctaattctgcagcggttacaacatgcgaagagcgtgattcatagccgtcagttccccttccgatttctcaatgctcacgatgccatcgatgcgttggaggcacagctgaggaaccaggcactgccatttccttccaatataactctgatgagacggatcttgacacgcaacgaaaaaaatagacccaggaggaggtttttatgccatctgtctcgccaacagctgcggatggcaatgagaattcctgtgctgtacgagcaactcaagcgcgagaaacttagagttcacaaagctcggcagtggaagtacgatggcgagatgcttaatagataccgccaggctctagagactgctgtcaacttgtctgtgaaacacagcctccctcttctgccgggtcgcacagtcctcgtgtacctgactgacgcgaatgccgaccgattgtgccctaaatcaaacccgcagggcccaccgcttaactacgctttactcctgattgggatgatgattaccagggctgaacaggttgacgtggtgctgtgcgggggagacacactgaaaaccgcagtgttgaaggccgaagaaggaattctgaaaacggccatcaaattacaagcccaggtccaggaatttgacgagaatgacggatggagcttgaatacctttgggaagtacctactgagcctagccggacagcgcgtcccggttgaccgcgtcatcctgttagggcagagtatggatgatggaatgatcaacgtcgctaaacagctctactggcagcgcgtcaacagtaaatgtctgtttgtgggcatcctgctgcgcagagtgcagtaccttagcactgatttgaacccgaatgatgtgactttatcaggctgcactgacgccatcctcaaatttatcgcggaacatggggcaagccaccttctggagcacgttggtcagatggataaaatctttaagattccaccccctcctggaaagaccggcgtccagtccctgaggcccctggaagaggataccccttctccactcgctccagtctcacagcagggatggcggtcgattcgattattcatctcatccaccttcagagatatgcacggggaaagagacctgctactccgatcggtgctgcccgcactacaggccagagccgctcctcacagaatatccctgcacggcatcgatttgaggtggggggtgaccgaagaagagacaaggcgcaacaggcagctcgaagtgtgcctgggggaagtggagaacgcccaactctttgtcggcatcctgggcagccgttacgggtacattccaccctcttataacctcccagatcatccacactttcactgggctcagcagtatccttcaggaagaagcgtgacagaaatggaggtaatgcaattcctgaatcgtaatcagagactgcaaccctcagcgcaggctctgatctatttccgggacagctccttcttatcttccgtgcccgacgcttggaagtcggactttgtaagtgagagcgaagaggccgcacggagaataagcgagttaaaatcctatctctctcggcagaaagggatcacctgtcggcgatacccttgtgaatggggcggagtggccgctggacgtccctatgtggggggacttgaagagttcggtcaactggtcctgcaggacgtgtggaacatgatacagaagctgtacttgcagccgggagcgctgcttgagcagccggtgtctatacccgacgacgatcttgttcaggctaccttccagcagctacagaagcctccgagtcccgcacggcctcgcttgctccaagataccgtgcagaggctaatgttgccccatggcaggctgagcctggtcacaggccaatctggccagggaaagactgctttcctggcatcgctggtcagcgcgcttcaggctccggacggcgcaaaagtcgccagtttagtgttctttcatttcagcggcgcacgcccagatcaaggcctcgcgctaacactgctgagaagactatgcacttacctccgcggtcagctaaaagaaccaggcgctttgccaagtacttatcgctcccttgtgtgggagctgcagcagaggctgctgccaaaatcagctgaatcccttcaccctggtcagactcaggtgttgatcattgatggagccgaccgactggttgaccaaaacggacagttaatctcagattggattcccaagaaactgcccagatgtgtgcacctagtcctctcagtctcttctgacgcagggctcggggaaaccctggagcagagccagggcgctcatgttctagccctgggccctctcgaggcctcagctagagcaagactggttcgtgaagagctcgctctgtacggcaaacgtcttgaagaaagccctttcaataaccagatgcggctgctcctggtgaagagggagtctggtcgccctttatatctcaggctggtgactgatcatctcaggctgtttactttgtacgaacaggtgagcgaacgtctgcggacacttcccgcaactgtgccactactcttacaacatatccttagcacactggaaaaggagcacgggcctgacgtacttccccaggctctgacagccctggaggtgactcggtccggtttaaccgtggatcagctgcacggagtgctcagcgtttggcgcaccttacccaaaggcactaaaagctgggaggaggccgtggccgctgggaattcaggggacccttatccgatggggcctttcgcctgcttagtccagtccctgcgatcgctattgggtgagggccctcttgagagacccggagctcgtctttgcctccctgacggccctctaaggacggcagctaaacgatgctacgggaaacggccaggcctggaggataccgcccacattcttatagccgctcagctctggaaaacttgcgacgccgatgcatcaggtacgtttaggagctgcccacccgaggctcttggcgacttgccataccacctgctccagagcggaaaccgcggattactgagcaagtttctgaccaacctgcacgtggtagccgctcacctcgagctcggactggttagcaggctgctcgaagcccacgccctctacgcatcctctgtccccaaggaggaacagaagttgcccgaggccgatgtggccgtttttcggacattccttcgccagcaggcctccatcctgagccagtatcccaggctcctccctcaacaggccgctaaccaaccactggactcacccctgtgccaccaagcctccctcctgtccagacggtggcacctccagcacacattgcgatggctgaacaagcccaggacgatgaagaaccaacagagttccagtctgagtctggcagtgtccagttcccccacagccgtggcattttctactaacgggcaacgtgccgctgtggggaccgctaacggcacagtgtatctcctcgatctgaggacttggcaggaagaaaaaagtgtggtctcaggctgcgatggcatctcagcctgcctctttttaagcgacgatactcttttcctgacagccttcgacggtctgttggagctctgggatcttcagcacgggtgcagagtcttgcagaccaaggcccaccagtaccagatcaccgggtgctgcttgtcgccggattgtcggctgcttgctactgtgtgccttggtggctgcctgaaactgtgggatacagtccgaggccagctggccttccaacacacctatccaaagagcctcaattgtgtggccttccacccagagggccaagttattgctaccggctcctgggctggctccatctcattttttcaagttgatggactcaaggtaaccaaagacctgggggctcccggagcatccatccgtaccctggcatttaacgtgcccggaggagtagtggcagtgggccgtctcgacagtatggtggaattgtgggcgtggcgagagggcgctcggcttgccgcatttcccgctcatcatggattcgtggcagcagccctctttctccatgctggctgtcagttgctgacagcaggagaagatggcaaagtccaggtttggtcgggatctcttgggagacccaggggccatctgggatccctgagcctttctccagcgctgtccgtagccctcagccccgatggcgacagggtcgcagtcgggtacagggctgatggcatccgcatctacaagatttcatctgggagccagggcgcacaggggcaagccctggatgtggctgtcagcgcattggcttggctctcccccaaagtcctcgttagcggggcagaggacggctccctgcaaggatgggctctcaaagaatgctcgctccaatctttgtggctactgtccagatttcagaaacccgtgttagggcttgccaccagtcaggaattgttagcgtcagcctctgaggactttacagtgcaactgtggcccaggcaactgctgacaagacctcataaagcagaagacttcccctgtgggaccgaacttcgcggtcacgaaggaccggtaagctgttgctccttctctacagatggtggctcgcttgcaacggggggtcgagaccggtctctgctgtgctgggacgtgcggacccctaagacgcccgttctaattcactcatttcctgcttgccaccgggactgggttaccggatgtgcgtggaccaaggataacctgctgatcagttgttcctccgacggctcagtgggcttgtgggaccccgagtctggtcagaggctgggtcagtttctggggcaccaaagtgcagtctctgctgtggccgcagttgaagagcatgtggttagcgtgagcagagatgggacgctgaaagtctgggatcatcagggagtagagcttacctccatccccgctcatagcggaccaatttcccattgcgctgctgctatggaaccacgagctgctgggcagcctggaagcgagctgctcgtcgttacagtgggcttggatggggctactaggctgtggcaccccctgttggtttgccagacccatactctgctgggacattccggcccagttcgggctgccgctgtgagcgagactagtggcctgatgctaaccgcgtctgaggacggttcggtgagactgtggcaggtgcctaaggaagcagacgacacttgcatccccaggtctagtgcggcagtgacggcagttgcatgggctcccgatggatctatggcggtgtctggcaaccaggcaggcgaactgattctgtggcaggaagccaaggcagtggctaccgctcaggccccaggtcacattggagcactgatctggagctcagcacacacctttttcgtgctcagtgctgatgagaaaatctccgagtggcaggttaaacttaggaaaggcagtgcccctggaaatctcagcctgcatctgaaccgaatcctgcaggaggatcttggggtcttgacaagcttggattgggctccagacggccattttctcattcttgccaaggccgatctgaagctattatgtatgaagcctggtgacgcccctagcgagatatggagctcctacactgagaaccctatgatcttgagtacgcataaagagtatggtatattcgtgttgcagcctaaagaccctggggttctttcgttcttacgccagaaggagagcggggagttcgaagaacgccttaactttgacataaatctggaaaacccttcgaggactctgattagcatcactcaggccaagcccgaatccgcgctgatgggaagctacggtacatggccaaatgccgcacagaaggagaacgggcctcaggtcacctgcgggagaaaaaagaatacccccgagacccagacacctggtactgacccctctacctgcagagaatcagacgctagtatggattctgacgccagtatggacagtgagcccaccccccacctgaaaacccgtcagcgtcggaaaatacatagtggatcagtcactgccctgcacgtccttcccgaattgctcgtgaccgcatctaaggacagggacgtcaagctatgggaacggccatcaatgcagctgttaggactttttaggtgtgaggggagcgtgtcttgcctcgagccttggctgggggctaatagtaccctgcaacttgccgtcggagacgttcagggaaacgtgtacttcttgaattgggagta

SEQ ID NO: 31066 - DNA, 2031 bp, synthetic construct
  misc_feature 1..2031: note = Description of Artificial Sequence: Synthetic coding sequence
  source 1..2031: mol_type = other DNA
atgaagaaccagcaaagctcatccctctccctagctgtaagcagttcaccaactgcagtagcattctccacaaatggccaacgtgccgcagtggggacagccaacgggactgtataccttctcgatctcaggacctggcaggaagaaaaaagcgtcgtctcagggtgtgacggaatctctgcatgtcttttcctcagtgacgacactttatttctgacagcttttgacggccttctcgaactctgggacctgcagcacggatgccgggtgctgcagaccaaagcccaccagtaccaaattaccgggtgttgccttagccccgattgtcgccttctcgccaccgtgtgcctcggaggatgcctgaaattatgggatactgtgcggggacagctagcattccagcacacctatccaaagagcctcaactgtgtggcctttcaccccgaaggacaggtgattgctacaggatcgtgggccggttccatttccttcttccaggttgacggattaaaagtcaccaaagacctaggcgctccaggggcttccatccgaacactggctttcaacgtacctggaggggtggtggccgtcggacgcctggattcgatggtggagctgtgggcttggagggaaggtgctcgcctcgccgcattcccagcgcaccatggattcgtggcggcagctctcttcttgcacgcagggtgccagctgcttacagcgggtgaggacggaaaggtccaggtgtggtcggggagcctgggaaggcctcgtggccatctgggctctctgagcctcagccccgcattgtcagtagctctgtctccagatggcgatcgagtcgctgtcggttaccgagctgacgggattcggatttacaaaatctcctcaggctcacaaggcgcacagggccaagccctagacgtagctgtgagtgccctggcttggttatcgcccaaagtgctcgtgagtggggctgaggacgggtctctgcagggctgggctctgaaggagtgttctctccaatctctgtggctgttatctaggtttcagaagcctgtactcggcttggctacatctcaagaattgctcgcgagcgcatccgaagattttacggttcagctgtggcccagacagctgctgacacggcctcacaaagctgaggacttcccatgcggaaccgaattgcgagggcacgaaggtccggttagctgctgctccttcagcacagatggaggctcattggcaacaggagggagggataggtctctgctgtgttgggatgtgaggactcctaaaacacctgtgctgattcactcatttccagcctgccacagggattgggtgactggatgcgcctggaccaaggataacctgctcattagttgctccagtgacgggtctgtgggactttgggatcctgagagcggacagcggctcggacagttcctgggccatcagtctgccgtgtcagccgtggccgcagttgaagaacacgtagtgtccgtgtctcgcgatgggacactgaaggtgtgggaccaccagggcgtcgaactgacttctatcccagcccacagcggcccaatttctcattgtgccgcagctatggagcccagggctgctggacagcctggatccgagctgctggtcgtcacggtggggctcgacggtgcgacccgcctgtggcatccgcttctggtgtgccagacccataccttgctaggtcacagtgggcctgtgagagccgctgctgtctcagaaacgtccggactaatgctgaccgccagtgaggacggctcagtgaggttatggcaggtccccaaagaagccgatgatacatgtatcccccgaagcagtgctgccgtcacagccgtggcctgggcaccagacgggagcatggcagtgagtgggaaccaggctggcgaactgatcctctggcaggaagccaaggccgtcgcaaccgcccagagtagcccagagcctaattccacgggaggcctgcggggagccgataaatcagggttaggatcctag

SEQ ID NO: 31067 - DNA, 501 bp, synthetic construct
  misc_feature 1..501: note = Description of Artificial Sequence: Synthetic coding sequence
  source 1..501: mol_type = other DNA
atggaaaaactgcacggccacgtgtccgcccacccagatatcctctcattggaaaatagatgtctggctatgcttcccgatctccaacctctggagaagctccatcaacatgtgtcaacacactccgatattctgtccctaaagaatcagtgtttagccactttgccggaccttaagaccatggagaaacctcatgggtacgtgagtgcccacccagatattctttctttggaaaaccagtgcttagccaccttgtctgatctgaagaccatggagaagccacacggccatgttagcgctcacccagatatcttgtccctggaaaatcgatgtctggcgacgctgtcgtctcttaaaagcaccgtctcagcatctcctctcttccagtcactccagatctcccatatgacccaggcagatttgtatcgcgtcaataattcgaattgccttctgtccgaaccaccttcctggagagctcagcacttttccaagggactgtag

SEQ ID NO: 31068 - DNA, 1260 bp, synthetic construct
  misc_feature 1..1260: note = Description of Artificial Sequence: Synthetic coding sequence
  source 1..1260: mol_type = other DNA
atggccgaagatgtatcatctgccgctccaagcccccgtggttgcgcagacggcagggacgccgatccaactgaagaacagatggcagaaacagagcggaatgatgaggagcagttcgagtgtcaggagctactggagtgtcaggtccaggtcggcgcacccgaagaagaggaggaggaagaggaggacgccggactcgtggcggaagctgaagctgtagctgccggatggatgctggattttttgtgtctctcactttgtagagctttccgggatggtcgctcagaagactttagaagaaccagaaattccgcagaagcgattattcacggcttgtcatcacttacagcttgtcagttgcgtactatttacatctgccaattcctgacgcgcattgccgcaggtaagactttggacgcccagttcgagaacgacgaaaggattaccccgctggagagcgccctgatgatctggggaagcatcgagaaagagcacgataagctccacgaggaaatccagaacctgatcaagatccaggcaatagccgtgtgcatggagaacgggaacttcaaagaggccgaagaagtcttcgaaaggatttttggggaccccaattcccacatgcctttcaaatcgaagttgctgatgatcatttctcagaaggacacttttcacagcttttttcagcacttcagctataaccacatgatggagaaaattaagagctatgttaattacgtgctgtctgaaaaatcttcaacatttttgatgaaggctgcagccaaggtcgtagagagcaaaaggacccggaccattacatcacaagacaaaccctccggcaacgacgtggaaatggaaaccgaagccaatctggacactcggaaaagatcccacaagaacctgttcttatccaaactgcagcacgggacccagcagcaggatctaaacaaaaaagagcggagggtggggacaccacagagtacaaaaaaaaaaaaggagagtaggcgcgcaacagaaagccgtattccggtgagtaagagtcagccggtaacgcctgagaaacaccgggctcgcaagagacaagcctggctgtgggaggaagataagaatctccgctcaggcgtgaggaaatacggggagggcaattggagcaagatccttctgcactacaagttcaacaacagaacgtccgtcatgctgaaggacagatggcgcacaatgaagaagcttaagctgatcagcagcgatagcgaggactag

SEQ ID NO: 31069 - DNA, 1320 bp, synthetic construct
  misc_feature 1..1320: note = Description of Artificial Sequence: Synthetic coding sequence
  source 1..1320: mol_type = other DNA
atggcggaggacgttagtagtgcggctccttccccacgcggttgcgctgacggcagggacgcggacccaaccgaagagcaaatggcggagaccgaacgcaacgatgaggagcaatttgaatgtcaggagctgctggagtgccaagtccaggtgggtgctccggaagaggaggaggaggaagaggaagatgccggactggtcgcagaagctgaagcagttgctgcgggttggatgctggactttctctgcctcagcctctgccgagcctttcgagacgggcgatctgaagacttccgtaggacacgaaactctgccgaagccattatccatgggcttagcagtctaactgcatgccaactccggaccatctacatctgccagtttcttacccgaatcgccgctgggaaaactctggacgctcagtttgagaatgacgagcggataacccctctcgaatcagctctgatgatttggggatcaattgaaaaggagcacgacaagctgcacgaggaaatccagaacttgataaagatacaggcgatagcggtgtgtatggaaaatggcaactttaaggaagccgaagaggtgttcgagcgaatcttcggtgatcccaactctcatatgcccttcaaatcaaaattgcttatgatcatttcccaaaaggacacatttcactccttttttcaacattttagttataaccacatgatggaaaaaataaaatcttatgtgaactatgtgctgagtgaaaagagcagcactttcctgatgaaggccgctgccaaagttgtcgagagcaaaaggaccagaactatcacatcgcaggataagccatccggaaacgacgtggagatggaaaccgaagccaatctcgatactcgaaaatcagtgagcgataaacagagcgctgtgaccgagagctctgaaggaactgtgtcactcctcagatcccacaaaaacctctttctctctaagctccagcatggaacacagcagcaagaccttaacaagaaggaacggagggttggcaccccgcagtctaccaaaaagaaaaaagaaagcagaagggccaccgagtccaggattcccgtctctaaatcccagcccgtgactccagaaaagcatcgggctcgcaaacggcaagcttggctttgggaggaggacaaaaatctccgaagcggggtgaggaagtatggcgaaggaaattggtccaaaatcttgctacactacaaattcaacaatcgtactagtgttatgctgaaagaccgatggaggaccatgaaaaaattgaagttgatctcctcggatagcgaggattag

SEQ ID NO: 31070 - DNA, 153 bp, synthetic construct
  misc_feature 1..153: note = Description of Artificial Sequence: Synthetic coding sequence
  source 1..153: mol_type = other DNA
atcttcagtataattcacggtttgtctagcctgaccgcctgtcagctgcgcacaatctatatctgccagtttctcacccgcatcgcggcaggcaagacgttggatgcccagtttgagaacgatgagcgaattacaccacttgagtccgcctag

SEQ ID NO: 31071 - DNA, 1503 bp, synthetic construct
  misc_feature 1..1503: note = Description of Artificial Sequence: Synthetic coding sequence
  source 1..1503: mol_type = other DNA
atggccggaggaggaggcagctctgatggctcaggccgagcagctggtaggcgagcgtctagaagttcaggtcgcgctcgccgtgggaggcacgaaccaggtctggggggacccgcagaacgtggggctggtgaagctagactagaggaagctgtgaaccgatgggtcctcaaattttacttccatgaggctttgcgcgctttccgcggttcccgttacggtgatttcaggcaaatcagggacatcatgcaggcactgcttgtccgtcccttgggcaaagagcatacagtgtccagactgctgcgggtaatgcagtgtctgtcccgcatcgaggagggggaaaatttggactgtagttttgacatggaggccgagttgactcctctggagtcagcaataaatgtgcttgaaatgatcaagaccgagttcaccctgacagaggctgtggtggagtcttcccgaaagttggtcaaggaggccgctgtgattatttgcatcaagaataaggaattcgagaaggccagcaaaatcctgaagaagcacatgagcaaagatcctaccacccagaagctcaggaatgatcttctgaacatcataagggaaaaaaacctcgcccatcctgtgatccagaatttcagctatgagactttccagcaaaagatgctgagatttctagaatcacacctggacgatgctgaaccatacctcctcacaatggccaagaaggccctgaaatctgaaagcgccgcatcatccacaggaaaagaggacaaacaaccggcacctggccctgtcgagaaacccccaagggagccagctcggcagttgagaaaccccccaactacaattggcatgatgaccctgaaggcggcatttaaaacactgagtggtgctcaggattctgaggcggcattcgctaagttggatcaaaaagaccttgtgctccccactcaggcccttcctgcgtcacccgctctgaaaaataagcgacccagaaaggatgagaatgagagctccgccccagccgacggagaaggtggctcagaattgcaaccaaaaaacaaaaggatgactatcagccggttagtactggaagaggatagccaatccacagaaccgtcggcaggactgaattccagtcaagaggcggctagtgctccccctagcaaacctaccgtcctcaatcaacctcttccaggagaaaaaaacccgaaggtgccgaaaggcaaatggaacagctcaaacggtgtggaggagaaagagacctgggtcgaggaagatgagttgtttcaggtccaggctgccccagacgaagatagcacaacgaacatcactaaaaagcagaaatggaccgtagaagagtccgaatgggtcaaagcaggcgtgcagaaatacggggaggggaattgggctgccatcagcaaaaactatcccttcgttaacagaaccgcagtgatgattaaggatagatggagaacaatgaagagactggggatgaactag

SEQ ID NO: 31072 - DNA, 1200 bp, synthetic construct
  misc_feature 1..1200: note = Description of Artificial Sequence: Synthetic coding sequence
  source 1..1200: mol_type = other DNA
atggcagaggccatggatctgggcaaagacccaaacggtcctacccacagcagtaccctttttgttcgagacgacggctcctcaatgtcattctacgttaggccatcccccgcaaagagaaggttaagcaccctcattttgcatgggggagggaccgtctgcagggtgcaggagccaggtgccgttttgcttgcccagccaggcgaggctctggccgaggcttccggagatttcatttctacgcaatacattctcgattgcgtggagcgaaatgaacgcttagaattggaggcgtacaggctgggtccagccagtgccgctgataccgggagcgaggccaaaccgggagctctagctgaaggggcagctgagccagaaccccagcggcacgccggacgcatcgccttcaccgacgccgacgacgtcgcgattttgacatatgttaaggagaacgctcggtcaccttcgtctgtcacgggcaatgcgctttggaaggccatggagaaatcgtctttgactcaacactcctggcagagcctgaaggacaggtatctgaagcacttgcggggtcaagaacataagtatctattaggggacgctccggtgtctccatcaagccaaaagttgaaacgcaaagctgaagaagaccccgaggcggctgacagcggcgagcctcagaataaaagaacaccagacctcccagaggaagagtacgtgaaagaagagatccaggaaaacgaagaggccgttaagaagatgttggtggaagctactcgcgaattcgaggaggtggtggtagacgagtcaccaccagacttcgaaatacatataacgatgtgtgatgatgacccacctacacctgaagaagattcagagacacagcccgacgaagaagaggaagaagaggaagagaaagtctcccagcccgaggtcggcgcagcaatcaaaataattcggcaactaatggaaaagtttaatctggatctctcgactgtaactcaggcgttccttaaaaactccggtgagctggaggcaacctcagcgtttctggcttccgggcagcgcgctgacggatatcctatatggtctcgtcaggacgacatcgacctgcagaaagacgatgaggacacccgggaagctttagtcaaaaagttcggggctcaaaacgtagcaagaagaatcgagttcaggaaaaaatag

SEQ ID NO: 31073 - DNA, 12735 bp, synthetic construct
  misc_feature 1..12735: note = Description of Artificial Sequence: Synthetic coding sequence
  source 1..12735: mol_type = other DNA
atgatgccagcgcaatacgctctgacctcttccctggtgcttctggtgttgctctctactgccagggcaggtccgttcagctcgagaagcaatgtaaccttgcccgctccacgaccgcctcctcagccaggtggccacaccgttggggctggggtggggtcacctagctcccagctatatgagcatacagtggagggaggtgaaaagcaggtcgtgtttacccatcggataaacctgccaccttccaccggctgtggctgtcccccaggaacggagccccctgttttggcctcagaagtgcaggccctcagggttcggctcgagatcctcgaggaacttgtgaaaggcctgaaagagcagtgcaccggcggttgctgtcccgcaagcgctcaagcaggaaccggtcagaccgacgtcaggaccctgtgtagtctgcatggggtatttgatctctcccggtgtacttgttcttgcgaaccaggttgggggggtcccacatgctctgaccccaccgacgcagagattcccccttctagcccaccctctgccagcggtagctgtcccgacgactgtaatgatcagggaaggtgcgtgaggggcagatgtgtgtgctttccagggtacacaggaccatcctgcgggtggcccagttgccctggcgattgccagggtaggggtcgttgcgtccagggagtttgtgtatgccgagcgggattttctggtccagactgctcccaacggagctgccctagagggtgctctcagagagggaggtgcgagggaggaaggtgcgtttgtgaccccggatatactggcgacgattgcggaatgagatcatgcccacgcggatgctcccagagaggtagatgcgagaacggacgatgcgtttgtaaccccggttatacaggcgaggactgtggcgttaggtcctgccccaggggctgctcccagcggggtaggtgcaaggacggcaggtgtgtgtgcgatccaggttacacaggcgaggactgcggcactaggtcctgtccctgggactgtggagaaggaggcagatgtgtcgacgggaggtgcgtgtgctggccaggctacaccggcgaggactgctccacacggacatgcccccgagactgtagaggtcgcggacgatgcgaagacggagagtgcatctgcgacacagggtactctggggatgattgtggcgtcaggtcctgtcccggagattgcaatcagaggggaagatgtgaagatggcaggtgcgtgtgttggcctggatacactggaacggattgcgggtcaagggcctgtccgagggactgccgcggaagggggcgatgtgaaaacggggtgtgtgtttgtaatgccggatacagcggagaagattgcggcgtccggagctgcccaggtgactgccgaggtagggggagatgtgagagcgggcgatgtatgtgctggcctgggtataccgggagagattgcggtacgcgagcctgcccaggagactgcagaggtagaggtagatgtgtggacgggcgttgtgtctgcaacccaggatttacgggcgaggactgtggcagtagaaggtgtccgggtgattgccggggacacgggctgtgtgaagatggggtttgcgtctgtgacgcaggttactccggtgaggattgttccacccgcagttgcccaggcggatgtcgaggacgaggccaatgccttgacggacgctgcgtgtgcgaagacggctatagtggggaggattgcggcgtgcgtcagtgcccaaatgattgttcgcaacacggggtttgccaggacggtgtttgtatctgctgggaaggttatgtatccgaggactgtagcatccggacgtgtccgagcaactgccatgggagaggcaggtgtgaagagggccgttgtctgtgcgaccccggatatactggccctacctgcgcaactcgaatgtgtccggctgattgcaggggcaggggtcgctgtgtgcagggggtgtgcctctgtcacgtaggctacggcggagaggattgtgggcaggaggagccacccgcttccgcgtgccccggaggctgcggtcccagggaactctgccgcgcaggacaatgtgtgtgtgtcgaaggttttagaggacctgactgcgccatccagacctgccctggcgattgcagggggcgaggggaatgtcacgatggttcctgcgtttgcaaagacgggtatgccggtgaagattgcggcgaagaagttcccacaatagaagggatgaggatgcatttgctggaggaaaccacagttcgtacggagtggacccctgcacctggtccagtggatgcctacgagatccagttcatccctacaactgagggcgctagtcctccattcactgctcgggtcccttcatctgcttccgcttatgatcagcgcggactggctcccggtcaggaataccaggtgaccgtgagggctctgaggggcacgagttggggattgcccgcatcaaagactatcaccacaatgattgatggtccccaggatctgagagtggtggccgtgacccctaccaccctcgagctgggctggcttcggcctcaagccgaggtggaccgcttcgtagtgagctatgtgagtgcaggaaatcagcgcgtgcgcctggaggtgccacctgaagccgacggtacccttttaacggatctcatgcctggggtcgaatacgtagtgaccgttacagctgagcgcggacgtgcagtgtcataccccgctagcgtgcgtgcgaataccggatctagcccgctcggcctcctaggcaccacagatgaacctcccccaagtggaccaagtaccacacagggcgctcaggcacctctactccagcagaggcctcaggagcttggagagctgagggtgctgggcagagacgaaacaggaagattacgagttgtatggaccgcacagcctgatacctttgcttacttccagctcagaatgagggtgccagaagggccaggagcacatgaggaagtgcttcccggagacgtccggcaggccttggtcccacccccaccgccaggcacgccctacgagctatcattgcatggcgtccctccgggtggaaaaccatccgaccccattatataccaaggcataatggataaagacgaggagaagcccggaaagtctagtggtccacccagacttggagagctgacagtaactgaccggaccagcgatagtctactgctgcggtggactgtccccgaaggggagttcgacagtttcgtcatccagtacaaagatagggatgggcagccacaggttgtccccgtcgaagggcctcagaggtctgccgtgatcacctctctcgatccgggacgcaagtataaattcgtgctgtacggcttcgtgggaaaaaagcgacacggtccattagtagcagaagccaaaatactgcctcagagtgacccttcgcctggaacaccaccccacctaggaaatttgtgggtgactgacccgactcctgattccctgcatctctcttggaccgtaccggaggggcagttcgacacttttatggttcagtatcgggacagagatggaagacctcaggttgtccccgttgaaggtcctgaaagatcgttcgttgtcagtagcctggatcctgatcataaataccgtttcacattattcggtatagcgaataaaaagcgctatggtcctttgaccgccgatggcactacggccccagagaggaaagaggaacctccgcgacccgaattcctcgagcagcccctgctcggcgagctgactgtgacaggagttactcctgattcactgagactgagctggacagtggctcaaggccctttcgatagttttatggttcaatacaaagacgcgcagggtcaaccacaggccgtgcccgtggccggtgatgaaaatgaagtgacagtgcctggtcttgatcccgatcggaagtataaaatgaatctttacgggctacggggaaggcagcgggttggacctgagagcgttgttgcgaagacagctccacaggaggatgttgacgagacaccttcccccacagagctcggcaccgaagcccctgagagcccagaggagcctctgctcggcgagctgaccgttacaggatcatcccctgactctctctctttattttggactgttccacaggggagcttcgacagttttactgtccagtacaaggacagagatgggagacctagggctgtgcgcgtggggggaaaggaatcagaggtgacagtaggcggtctcgaacccggacataagtataaaatgcacttgtatggcctgcacgaggggcagcgcgtcggtcccgtctccgcagttggagtgacagctccacaacaagaagaaacaccacctgccactgagtcacccttggaacctcggctcggggagcttactgtcacagatgtcaccccaaattccgtcggcttgagttggaccgttcctgaagggcagtttgattctttcatcgtgcagtataaggacaaggacgggcagccgcaagtggtgcccgtagctgcagaccagcgggaggtgactgtgtacaatctggagcctgagcggaagtacaaaatgaacatgtatgggctccacgatggtcaacgtatgggcccactaagcgtagtcatcgtcacagccccattgcctcccgcacctgcaaccgaggcctccaaacctccactggagccaagactgggggagttgactgtaacggacataacacctgattccgtgggactaagttggacagttccagagggagagtttgattcctttgttgtgcagtacaaggatcgggatgggcagccccaggtggtgccagtagcagcagatcagagagaggtgaccattccagatctggagccgtcccgcaagtataagtttctgctctttggcattcaggacggcaagagaagatcccctgtgagcgttgaagccaaaaccgtggctagaggggatgcctcccccggagctcccccaagactcggcgaattgtgggtcaccgatccaactcctgactctttacggctctcttggaccgtcccggaaggacagtttgattcatttgtagtacaattcaaggacaaagatggaccgcaggtggtaccggtggagggccacgaaagaagcgtaacagtcactcccctcgacgcgggtcgcaagtacaggtttcttctctatggcctgttgggtaagaaacgccatgggcctctcaccgctgatggaactacagaggcacggtctgcaatggacgatacaggtactaagcggccaccaaagccccgattgggcgaggaacttcaggtgactacagtcacgcagaactccgttggcctgtcctggacagttccagagggacagtttgactcattcgtggtgcaatataaagatagagatggtcagcctcaggttgttcccgtggagggaagcttgcgcgaagtcagcgtacccggactcgatcccgcacatagatataagctactgttgtatggattgcaccacgggaagagagtgggcccaatcagcgcggtcgccattacggccggacgtgaggaaaccgagacagaaaccacggctcctaccccacctgctccagagccccacttaggagagttgacggtcgaggaggctacgagccacaccctgcacctctcttggatggtcacggagggtgaatttgacagttttgagatccaatatactgatcgcgatggccagttgcagatggttagaattggaggggatcggaacgatattaccctaagcggcctggagagtgaccacagatatctggtgacactgtatggcttctcagatgggaagcatgtgggccctgtgcacgtcgaagccctaaccgtgccagaagaagagaagcctagcgagccaccgacggccacacccgagcccccaattaaaccccgtctgggcgaattgaccgttactgatgctacccccgactcattgagtctgtcatggacagttcccgagggccaattcgatcactttctagtgcagtatcggaacggtgatggacagcctaaggctgtcagagtccctggtcacgaagaaggagtgaccattagcgggttggagcctgatcacaaatataagatgaacctctacggattccacgggggtcagagaatggggccagtaagtgtcgtgggagtcactgcagctgaggaggaaactccatcccccacagagccttcaatggaagccccagaaccggctgaagagcccctgctgggtgagctgacagtaactggcagctctcctgactccctcagtctgtcatggaccgtgcctcaagggagatttgatagcttcactgtgcagtacaaggatagagatgggaggcctcaagtagtgagagtgggaggcgaagagtcagaggtcacggttggtggtctcgaacctgggaggaagtacaagatgcacttgtacggcttgcacgaagggagacgggtcggccctgtttctgcagtgggcgtgaccgcccctgaggaggagtcccccgatgcacctctggcgaaactaagattgggacaaatgactgtgagagatataacttccgacagtttgtcactctcgtggacggtgcctgagggtcagtttgaccacttcctggtccagtttaagaacggagacggacaaccaaaggctgtgcgcgtgccaggccacgaagatggagttactatatcgggactggagcccgaccataagtacaaaatgaacttatatggtttccacggtggacagcgggttggccctgtgtcagctgtcggtctgactgccccaggcaaagatgaagaaatggcccctgccagtaccgagccaccaacgcccgaaccgcctatcaaaccccgtctcgaggagttaacggtaacagatgccactcctgactccctgtcactgagctggacagtccccgagggacagttcgatcatttccttgtgcaatacaagaacggggacgggcagccgaaagctacacgcgtcccaggccatgaggaccgcgtcacaatttcaggactagagcccgataataagtacaaaatgaacctgtatggttttcatgggggacaacgagtcgggcctgtgtccgctatcggtgtcacagctgctgaggaggagactccttcaccgacagaaccatccatggaagcacctgaacccccagaggagccactgttaggtgagttaactgtaacggggtctagtcccgacagcttgtccctatcctggactgtaccacaagggcgatttgatagcttcaccgtccagtataaggacagggatggtagaccccaggtggtgcgcgtcggaggcgaagagtccgaggtgaccgtgggcggactagagcctggacgcaagtacaaaatgcatctgtacggcctgcacgaaggacgacgcgtgggccctgtgagcactgtgggtgtgaccgcgcctcaggaagatgtggacgagacaccctccccaactgaacctgggaccgaagcccctgggccaccagaagagccgctgctgggggaactcacagtgactggatcctctcccgattcactgagccttagctggactgtgccacagggcaggtttgattcctttacagtgcagtacaaagacagggatgggagaccacaagctgtcagggttggtggccaagagagcaaggtcaccgtccgagggctggagccagggcgaaagtacaagatgcacctgtacggactgcacgagggaaggagactggggccagtgtctgccgttggagtgacggaggatgaagcagaaactacacaggccgtccctactatgacaccagagcctccaatcaaacctcgcctcggggaactgacaatgaccgacgcgactcctgactcactatcactctcttggactgtccctgaggggcagttcgaccactttctagtgcagtataggaatggcgatggacagccaaaggcagttagggtgcccggacacgaggacggggtgacaatctccggactggagccagaccataaatataaaatgaatctgtatgggtttcatggtggccagcgcgtgggccctatctccgtgataggcgtaacagcagctgaggaggagacccccagtcctacagaactgagcactgaagcccctgaaccgcctgaagagcccctgttaggcgagctgaccgttaccggcagcagtcctgatagcctttctctgtcctggaccatcccacagggacacttcgactcatttaccgtccagtacaaagatagggatggtcgtccccaagtaatgagagtgagaggtgaagagtccgaagtgacagttggcggattggagcctggtaggaaatacaagatgcacctttacggccttcatgagggtcggagagtgggcccagtgtctacagtcggagttaccgcccctgaggatgaggcagagacaacacaggcagtgccgactacaacccccgaaccacccaataaacctagattgggggagctaaccgttaccgacgcaacccctgatagcctttcacttagttggatggtgcctgagggacagttcgatcattttctggtgcaatatcgcaatggcgatggccagcctaaggtggttcgggtgcccggtcacgaggacggcgtgacaatttctgggcttgaacccgaccacaagtataagatgaatctttacggtttccatggcggtcagcgagtgggacctatcagtgtgattggggtgactgctgctgaggaggaaacacccgcaccaactgaaccatccactgaagccccagaaccgccagaggagcctctgctcggagaactgaccgtgacgggatctagccctgactcattatccctttcctggacgatcccccagggcaggttcgacagctttacagtacagtacaaagatcgggatggcagaccccaagtggtgagggtccgtggagaggagtccgaagtcacagtcgggggactggagcccggttgtaaatataagatgcatctctacgggttgcacgaaggtcagcgggtggggccagtgtccgccgtgggagtcacagcccctaaagacgaagccgaaaccactcaggccgtgccgaccatgacccccgaacctcctattaagccacggctcggagaattgactgtgacagacgcgaccccagactcactctctctgtcatggatggtccctgaaggtcaattcgatcatttcctcgtgcagtatagaaacggggatggtcagcccaaggcggtgagggttcccggacacgaagatggtgtcaccattagcgggctcgaacctgaccacaaatataagatgaatctttacggcttccacgggggtcaacgcgtgggacccgtgtccgccatcggagtgacggaggaagaaacaccctcccctacagagcccagcacagaagccccagaggcaccagaggaaccgcttcttggcgagttgaccgtcactggatctagccccgactccctctctctgagctggaccgtaccccaggggaggtttgactcttttaccgtgcagtacaaggatcgcgatgggcagccacaggtggtacgggttaggggggaggagtccgaagttaccgtggggggtcttgagcccggaaggaaatacaagatgcatctgtatggcctccacgagggccaacgagtgggaccagtaagtaccgtgggaatcactgcccctctgcctaccccgctgccagtcgaaccacgcttaggcgaacttgctgtggctgcagtcactagcgattctgtgggactctcttggacagtggcccagggtcctttcgactccttcttggtccagtatagggatgcccagggacagccccaggctgtgcctgttagtggggacctccgcgcagtggcagtgtccgggctagatcccgcaagaaagtataagtttctgctcttcggtttgcagaacggcaaaaggcatggaccagtcccagtggaggccagaactgccccagacaccaagcccagtcccagattgggggagctgactgttaccgacgcaacccccgattccgtgggactgagttggactgttcccgaaggtgagttcgactcatttgtggtgcagtataaggataaagatggcaggctccaagtagtcccggtagccgcaaatcagcgagaagtcaccgtgcaggggttggagccgagccgaaagtatcggttcctgctttatggactcagcggccgaaagaggttaggcccaatatctgccgactctaccactgcccctctggagaaggagcttccccctcatctgggggagctcacagtggcagaggagacttcatctagcctgcgcctatcctggaccgtagcccagggccctttcgattcatttgttgttcagtaccgggatactgacgggcaacccagggcggtccctgtggccgctgaccagagaactgtcaccgtggaggatttggagcctggtaagaaatacaagttcctgttgtacggattgctgggcggaaagagactgggaccggtctcagccctgggcatgactgccccagaggaagatacaccagctccggagcttgctccggaggccccagaaccccctgaggagccgcgactaggagtgctcaccgtaaccgacactaccccagacagcatgaggctgtcgtggagcgtcgcacagggtccatttgatagtttcgtggtgcagtacgaagacacaaacggtcagccccaggcactccttgtggacggcgaccagtctaagatcctcatttccggattggaaccatcgactccatacagatttctgctttatggcctgcacgagggaaagagacttggtcccctctctgccgagggcaccaccggtctggcaccagccggtcagacctctgaagagtctaggccgcgactgagccaactgtccgtgactgatgtgactacctcaagcctgcggctgaactgggaggctcccccaggcgcattcgatagttttttactccgcttcggggtaccctccccatcaacacttgaaccgcacccacggccacttttgcagagggaactgatggtgccgggtacacgtcacagcgcggttctccgcgatcttagatccggtacactttattccttaaccctgtacgggctgcgcggaccgcacaaagcagattcgattcaaggaacagccagaacactaagccctgtactcgagagccctagggacctacagttctctgagattcgagagacatctgctaaggtgaactggatgccgcctccttcaagagcggactcctttaaggtgagctatcagctggctgatggtggagagccgcagtctgttcaggtcgatggccaggctcgtacacagaagctgcaggggctgatacccggtgctcgctatgaggtcacagtcgtctccgtgaggggcttcgaagagagtgagcctcttacaggctttctgaccaccgtgcccgacggacctacgcaacttagggccctgaacctgaccgaaggtttcgcggtcctgcattggaaacctcctcagaatcccgttgacacgtacgacgttcaggtgacagctcctggcgcaccacctctacaggccgagaccccaggttccgcggtggactaccctctccacgatttagttctacacactaactatacagccaccgttaggggcctcagagggccaaacctgaccagtccagcctcgattacattcactactggcctcgaagctcctagagatctcgaggcaaaggaggttacccccaggactgcactgttgacatggacagagcccccagtcaggcccgcaggctacctgctctcattccacacccccggaggacagaatcaggagatactgcttccaggaggcatcacttcccatcagctcctgggcctgtttccttcaacgtcatacaacgccagattgcaagccatgtggggacagtcacttctccctcctgtgagtactagcttcactactggagggcttagaatcccatttcctcgagattgtggagaagaaatgcagaatggtgctggcgcttcccgcacctcaactattttcctaaacgggaatagggagcggcctctgaacgtgttttgtgacatggaaaccgatggcggaggctggctcgtgttccaacgcaggatggatggccaaacggatttctggcgggattgggaagattatgctcacgggtttggaaacatttcaggtgagttttggctcgggaatgaagccctgcattcactcacacaggccggtgactatagcatgcgagtggacttaagagcgggtgacgaggccgtctttgcacaatacgatagttttcatgtcgacagcgccgctgaatattatcgccttcaccttgagggataccatggaaccgctggggattccatgtcctatcattctggttcagtattctccgccagggacagagacccgaatagcctcttgatcagctgtgccgtatcatacagaggcgcttggtggtaccgaaattgccactatgctaatcttaatggattatacggaagcacagtggaccatcagggcgtgtcctggtaccattggaaagggttcgagttcagcgtgccttttaccgagatgaagctgcggccaaggaatttccgcagccccgcagggggtggatat

SEQ ID NO: 31074 - DNA, 12729 bp, synthetic construct
  misc_feature 1..12729: note = Description of Artificial Sequence: Synthetic coding sequence
  source 1..12729: mol_type = other DNA
atgatgcctgctcaatatgccctgacaagttctctcgttctattagtgctcctgagcaccgcgagagctgggccatttagtagcagatctaatgtcacgctgccagctccacgaccacccccacagcccggagggcacacggtaggcgctggggtaggctcacccagttcacagctttacgagcataccgttgaaggaggggaaaagcaggtggtgtttacgcaccgaatcaatctccccccaagcaccgggtgcggctgccctccgggaacagagccaccagtgctagcctcagaggtccaggctctacgagtgcgactcgagattcttgaggagctggtgaagggcctgaaagaacaatgcactggcggatgctgccctgcgtccgcgcaagccggaacaggccagaccgatgtcaggactctctgttcactccacggagtctttgatctgtctcgatgtacgtgtagctgcgaaccaggatggggcggacctacatgcagcgacccgacagacgctgaaattcccccttctagcccaccttccgcatccggttcgtgtccagacgactgcaatgaccagggtagatgtgttagaggccgttgtgtgtgctttccaggctacaccggtcccagttgcggctggccaagctgccccggagactgccaagggaggggccgttgcgtccagggcgtgtgtgtttgtcgcgctggattttcaggtcctgattgctcccagagatcatgcccccgaggttgcagccagaggggcaggtgcgagggcggaagatgtgtctgcgatccgggatataccggcgatgactgcggcatgcggtcatgcccgagagggtgctcacagaggggcaggtgtgagaacggacggtgcgtttgtaaccccggatatacgggcgaggattgtggggttcgaagctgcccaaggggatgctctcagaggggtaggtgtaaagacggacgctgtgtgtgcgaccccggatacaccggcgaagattgtggcacgagatcctgcccttgggattgcggtgaaggagggaggtgtgtcgatggccgttgtgtatgttggcccggttacacgggagaggattgttccacgcgcacctgcccgagagactgccggggaaggggcagatgcgaagatggcgaatgtatctgcgacaccggatactctggcgatgactgcggggttaggtcatgtccaggagattgtaaccagcgcggtagatgcgaggatgggaggtgcgtgtgttggcccggatacaccggtacagattgcggatctagagcatgtcccagagactgccggggaagaggacggtgcgagaacggggtgtgcgtgtgcaatgcgggatattccggggaagactgtggcgtgagatcttgcccaggcgactgtagagggaggggacggtgtgagagtgggcgttgtatgtgctggcccggatacacagggagggactgtggtactcgggcatgcccaggcgactgccgaggtcggggaaggtgtgtggatgggcgttgcgtgtgtaatccaggctttaccggagaggattgtggaagtaggcggtgccccggagattgcagagggcatggcctttgcgaagacggggtgtgcgtttgcgatgccggttattcaggagaggattgtagcacacgctcctgtcccggaggatgccgcggtcgcggtcagtgcttagacgggagatgcgtgtgcgaagacggctactctggagaggattgtggtgtgaggcagtgtcccaatgattgctctcagcacggcgtgtgccaggatggtgtttgcatttgctgggagggatatgtgtcagaagactgcagcattagaacatgccccagcaactgtcacggcagagggagatgtgaggaagggcgttgtctctgtgaccctggatacaccggaccaacttgtgctacacgcatgtgccccgcagattgcagaggtcggggaaggtgcgttcagggtgtgtgtctctgccacgttggctatggcggtgaagactgcggacaagaggagcctcccgctagcgcctgcccaggcggatgtggacctagggaactgtgtcgcgctgggcaatgtgtctgtgttgaaggcttccggggtcccgactgtgctattcagacctgcccgggagactgccgaggtagaggagaatgccatgacggatcctgcgtctgcaaggatggatacgcgggtgaagattgcggagaggaggtccctaccatagagggtatgagaatgcatctgcttgaggagaccacggtgcgcaccgagtggacacccgcacctggccctgtggacgcctacgaaatacagtttattcctacaactgagggagcaagccctccatttaccgccagagttccgagcagcgcctcggcttatgaccagcgcggactcgcacctgggcaggagtaccaagttacggtccgtgccttgagaggcactagctggggcctgcccgctagcaaaacgataacaacaatgattgacggccctcaggacctaagagttgtggctgtgacccctaccaccctagagctaggctggctgaggccccaggcagaggtggatcgcttcgtggtgtcatacgtcagtgcgggaaaccagagggtccgtctggaggtgcctccagaggccgacggcaccctgctgaccgatctcatgcccggtgtggaatatgtggtgaccgtgaccgctgaaagaggaagggccgttagctatcctgctagcgtaagggccaataccggtagctcgcccctgggattgctcggcacaacagacgagccacccccatctgggccttctacgactcagggtgcccaagctcccttattacagcagcggccacaggaactgggagaactaagggtgctaggccgagacgaaaccggcaggctgcgcgtcgtgtggacagcacagcctgacactttcgcctacttccagctcaggatgagggtgccggagggcccaggggcacatgaagaggtgctgccaggcgacgtaagacaagctttagtcccaccgccaccacctggcaccccttatgaactaagcctgcatggggtcccgcctgggggtaagccttccgacccaataatctatcagggcatcatggataaggacgaggagaaacctggtaagtccagcggcccacccagactgggagaattgacagtaacagatagaacgagtgacagcctactgctccgatggactgtgcctgagggagaattcgactcgttcgtgattcagtataaggatagagacggccagccccaggtggtgcctgtcgaaggccctcaaaggagcgcagtgataactagcctcgacccagggagaaaatataagtttgttctctatggattcgttggcaagaaacggcacggacctctggtggcggaggccaaaatcttacctcagtccgatccttcccctggaacgccgccacacttgggcaatctgtgggttactgatcccacccctgatagtctgcatctctcttggaccgtgcctgagggacaattcgacaccttcatggtgcaataccgggatcgcgatggaaggccacaggttgtgccagttgagggaccagagagaagttttgtagtgagcagcttagacccagatcacaagtacaggttcacactgttcggtattgccaacaaaaagcggtacggccctcttacagctgacggaacgaccgccccagagcgcaaagaggagccaccccgaccagagtttctggagcagccactcttgggtgagcttaccgtcactggggttacccccgactcacttcgcctgtcatggacagtggcccaaggccctttcgatagcttcatggtgcagtataaggatgcccaaggtcagccccaggccgtgcctgtcgccggagatgagaacgaggtaaccgtgccgggactcgaccctgacaggaagtacaagatgaatctgtatggcttgagaggtcgccagcgtgttggcccagagtctgtggtggccaagacagccccacaagaagacgtcgacgagaccccatcccccacggaattggggacagaggcacctgagagtccagaggaacctctgctgggagagctgaccgttacgggctcatctcctgatagcctctcacttttctggaccgtgccccaagggtcttttgatagctttacagtgcagtataaagatagggatggcaggccaagagccgtccgagtcgggggtaaagagtccgaggtgaccgtgggcggtctggagcctggtcacaagtacaaaatgcacctatatggcctacatgaagggcagcgagtcggcccagtttctgctgtgggagtgaccgctccacaacaggaggagactccgccagcaacggagtctcccctggagccaaggctgggagaactgacagtgactgatgtcactccaaacagtgtggggctgtcctggaccgtccctgaaggccaattcgatagcttcattgttcagtataaagataaagatggccagccacaggtagtacccgtcgctgcagaccaaagggaggttactgtgtataacctggaacctgagcggaagtacaagatgaacatgtacggcctgcacgatggtcagcggatgggcccactctcggttgtgatcgtgaccgctccactgccaccagccccagcaaccgaagccagcaagccccctctggaaccacgtttgggcgagctaaccgttaccgatataactcctgattcggtggggctgagttggactgtgcccgaaggcgagtttgactcatttgttgtgcagtacaaagatcgagatgggcaacctcaggttgtaccggttgctgcagaccagcgggaggttacaatccccgacctagagccctccaggaaatacaagtttctcctgtttgggatccaggacggaaaacgcaggtccccagtgagcgtagaggctaagacagtcgcacgtggagatgcctccccgggagctcccccacggctgggggagctgtgggtgactgacccaaccccagatagtctcagactatcatggacggtgcccgaggggcagttcgattcatttgtcgtccagtttaaggacaaagacgggcctcaggtggtcccggttgaagggcacgagaggtccgtgaccgtgacaccattagatgccggtaggaaatatcgatttctgctgtacggcctgctcggaaaaaaaagacacggcccactcaccgcagacggaactaccgaggctcggagcgcgatggatgatacaggcaccaagcggcctccaaaacccaggttgggagaggagctgcaggtgaccacggtgacacagaactctgttggactgtcatggaccgtacctgaaggtcagtttgactcctttgtcgttcagtacaaagatcgcgacgggcagccacaggtggtgcctgtggagggctccctgcgtgaggttagcgtcccaggcctggatcctgcgcacagatacaagctgctcctctatggtctgcatcatggcaaaagagtaggacccatttctgcggtagcgattacagcgggtcgcgaggagactgagactgagacaacggcccctactccccctgcaccggagcctcacttgggagaactgactgttgaggaggccacctctcacaccctgcatctgtcatggatggtgaccgaaggggagtttgatagcttcgaaattcagtataccgatcgagatggacagcttcagatggtcaggatcgggggtgataggaacgatattacgctgtccggactagagagtgatcataggtatttggtgactctgtatggattttcagatgggaaacacgtagggccagtacatgtcgaggctcttacagttccggaggaagagaagccctctgagcccccaacagctacacctgaacctccaataaagccaaggctgggtgagctgaccgttacagatgctacccctgatagccttagtttgagctggactgtgcctgaggggcaattcgaccacttcctggtccaataccggaacggcgatggtcagcccaaggcggtgagggttccaggccacgaagaaggcgtaaccatatcaggtctggagcccgatcacaagtacaagatgaacctatacgggtttcatggaggacagcgtatgggcccagtgtctgtggtgggcgtaaccgcggcagaagaggaaaccccctcaccgaccgaaccaagcatggaagccccagagcctgccgaagagcctctgctcggggagctgactgtgacgggatcctctcctgatagcctgagtctgtcatggaccgtgccccagggcagattcgatagtttcacagtgcagtacaaggaccgcgatggacgtcctcaagtggtcagagttggaggcgaggagagtgaagtgacggtcggcggtctcgaacctggcagaaaatacaaaatgcacctatatggactgcacgaggggcgaagagttggcccagtgagcgctgtgggagtgaccgctcctgaagaggagtcccccgacgcacccctcgccaagttgagactcggccagatgacggtccgggacattacgtccgattctttgtcccttagctggaccgttcccgagggccagtttgaccactttctcgtacagtttaaaaatggggacgggcagccaaaggccgtcagagtgccaggccatgaggacggcgtgacaatctctggcctggagcccgatcacaaatacaaaatgaatctgtacggcttccacggtggacagagggttggtcctgtgtccgcagtaggactgacagcgccaggcaaggacgaggagatggccccagcttccacagagccccctacaccagaacccccaattaaaccgaggttagaggagttaactgttactgatgctacccccgacagcctaagcctcagctggacagtgcctgaaggccaatttgatcacttcctggtacagtacaagaacggtgacggtcagcctaaagctaccagagtacctggtcatgaagacagggtgactataagtgggcttgagcctgacaacaagtataagatgaatctgtatggcttccacggcggacagcgggtgggtcccgtcagcgcaatcggagtaacagcagcagaggaagagacaccctctcccaccgagccgtccatggaagcccctgaacccccagaggaaccactgctgggcgaactcactgtgacaggcagtagtcccgactcgttaagtctgtcatggactgtgccccagggccgttttgactcattcacagtgcagtataaggatcgagacggcagaccccaagtggtgcgcgtaggaggcgaagaatccgaagtaaccgttggtggcttggaacctggtcgcaaatacaaaatgcatctgtacgggctgcatgaaggtcgcagagttgggcctgtgagcaccgtcggcgtaacggcccctcaggaggatgtcgacgagaccccttccccaaccgaacctgggacagaagcgcctggccctcctgaggagccccttcttggggaactaactgtcaccgggtcctctccagactcactcagcttgagttggactgtccctcaagggcgtttcgatagctttaccgttcagtacaaagacagagacgggagacctcaggctgtccgcgtagggggacaggagagcaaggtcactgtacgaggtctcgagcccggtcgaaagtacaagatgcatctatacgggcttcacgaaggacgacggcttgggccagtgtccgcagttggtgtcacagaggatgaagcagaaaccacccaggctgttccaaccatgaccccagagccaccaattaagccgcgtctgggcgaattaaccatgacagacgccacccctgacagcctgtcgctgtcctggaccgttcccgaggggcaatttgatcacttcttagttcagtaccggaacggcgatggccagcctaaagccgtgagggtcccagggcatgaggatggtgtgacaataagcgggctcgaacctgaccacaagtacaagatgaacctctatggatttcatggcggtcagcgcgtgggccctatctctgtgatcggcgtgactgcggctgaggaggagaccccgagcccaacagaattgtctacagaggctccggaacctcctgaggagccactgctcggcgagttaactgttactgggtcctcccccgatagcctcagcctttcctggaccatcccacagggccacttcgactcctttacggtgcagtacaaagatagggacggaaggccccaagtcatgagggtcaggggtgaggaatctgaggttaccgtaggcggtctcgaacctggacgcaagtacaaaatgcatctgtatggtctgcacgaagggcgtcgagtgggtcctgtatctaccgtgggcgtaaccgaagacgaagcggaaaccacacaggcagttcctaccacaactccagaacccccaaacaagcctcgcctgggggagctcactgttacagatgctacaccagattcgctgtctttgtcgtggatggttcccgaaggccagtttgaccactttctggtgcagtaccggaacggtgacggtcagcccaaggttgtacgcgtccctgggcatgaagacggagtgacgatttcaggacttgagcctgatcataagtacaaaatgaatctatatggttttcatggcggacagcgagtcgggcctatttcagtcattggggtgaccgctgccgaagaagagacgcccgcacccaccgagccatcaactgaggctcctgaacccccagaggagcccctactcggcgagctgactgtcacaggaagcagccccgactcgttaagtttgagttggaccattcctcaaggcagatttgactccttcaccgttcagtacaaggatcgcgatggcagaccacaggtggtccgcgtccggggagaggagagtgaagtcactgttggcggactcgagcctgggtgcaaatacaagatgcatctgtatggtttgcacgaggggcagagagtcgggcctgtgtccgccgtgggcgtcacagcgccaaaagacgaagcagaaaccacccaggccgtacctaccatgacccccgagccaccaattaagcccagactcggcgaactgacagttactgacgctacccctgactctctcagcctttcttggatggtcccagagggccaatttgatcactttttggtccagtatcgcaatggagatgggcagcccaaggcagtgcgagtgccgggacatgaggacggtgttacaataagcggactggaacccgatcacaagtataaaatgaatctctatggcttccatggtggtcagcgcgtgggacccgtgagtgctatcggcgtgacagaggaagaaactcccagtcctactgaaccgtccactgaagcgcctgaagcacccgaggagcccctgctcggagagctgacagttaccggctcatctccagacagccttagcttgagctggaccgtacctcagggaagattcgactcattcacagtgcaatacaaggatagggatggacagcctcaggtggtgagagtgagaggcgaagagagcgaggtcaccgtcggcggactggagcccggacgcaagtataagatgcatctctatggcctgcatgagggccagcgcgttgggcctgtctctacggtgggtattaccgctcctctgcctacaccattgcctgtggaaccacggcttggcgagttggccgtggctgctgtgacctctgattccgtgggcctgtcttggactgtggcccagggcccattcgatagtttccttgttcagtacagggatgctcaggggcagcctcaggccgttcccgtctcaggggaccttagagccgtcgcagtctcaggactggatccagccagaaagtacaagtttctcctctttggtctgcagaacggaaaacgccacggcccagtacctgtcgaggcgaggaccgccccagacaccaagccctcacccagactgggcgaactaacggttactgatgcaacacctgattcagtcggattatcttggaccgtccccgagggtgaattcgactcctttgtggtacagtataaagacaaggacggaaggctccaggtggtaccagtggccgcaaaccaaagagaagttacagtgcaggggcttgagccaagtagaaagtaccgctttctcctctacgggctgtccggaaggaaacgactcgggccaattagtgcggattcaacaaccgctcccttagagaaggagttgcctcctcacctaggcgaactgacggttgccgaggagaccagttcatcgttacgcctgagttggaccgtcgctcagggcccttttgactcgttcgtggtgcaatatcgtgatacggacggccagcctcgcgctgtgcccgtggcggcagaccaacggactgtcacagtggaggacctggagccagggaagaaatacaagttcctgctgtacgggctgttaggtgggaagaggctggggcctgtttccgccctgggcatgactgctcccgaggaggatactccggcaccggagctggcccctgaggcccctgaacctcctgaggaaccgcgactgggggtgcttacagtgacggacactactcctgattccatgaggttgtcatggagtgtcgctcaggggccattcgactccttcgtggtgcagtacgaagatactaacggacagccacaggcactgcttgtagacggggaccaatcaaaaatactgatcagcgggctggagcctagcactccctaccggttcctgctctacggcctgcacgagggaaagcgtttgggtcctctttctgccgagggaacgacagggttggcacctgccggtcagacatccgaagaaagccgcccaaggctatcacagttaagcgtcaccgacgtgaccacaagctccctcaggttgaactgggaagcaccaccaggagcattcgacagttttctgctcagattcggtgtcccgtcaccttccaccctcgagcctcatccacgcccactactccaaagggaactcatggtgcctggcacacgacattctgccgtgctacgcgacctacgtagcggcacactgtacagcttgactctgtacggtctgaggggaccacataaggcggatagtattcagggtactgcgaggactctctccccggtgttagagtctccacgtgacttacagttctccgagatcagggagacttccgcaaaggttaactggatgccgcctccatcacgggcagattccttcaaagtctcgtaccaactggccgacgggggagagcctcagtcagtgcaggtggacggacaggctagaacccagaagcttcagggcctgattcccggagcacgttatgaggtgactgtggtgtctgtcaggggctttgaagagtccgaaccactaacagggttcctgaccaccgtgccagacggcccaacacagcttagggctctgaatctcaccgaggggttcgcggttctccactggaagcctccacagaaccccgtagacacatacgatgtccaagtgaccgctccgggagctcctcccttgcaggcagagacccctgggtccgcagttgattatccactgcacgatctggtgttgcatactaattacaccgctaccgtaagagggttgcgtggacctaacctaaccagccctgcatcaattaccttcactaccggactcgaggcccctcgtgatctggaagctaaggaggttacacccagaactgcgctcctaacttggaccgagccacctgtgcggccagccggatacttactgtctttccacactcccggaggacagaatcaggagattctactccctggaggtattacctctcaccagctcctggggttgttccccagcacaagctacaatgctcgattgcaagccatgtggggccagagcctgctgccaccagtgagcacctcttttaccacaggcggactgaggatcccttttccgagagattgtggcgaagagatgcagaacggagcaggggcttcacgcacgtcgacaatcttcttaaatggaaacagagaacgccctctaaatgtattttgtgacatggagacagatgggggaggctggcttgtatttcagaggcggatggacggccagacagatttctggagagactgggaagattatgctcatggcttcggcaacatttctggtgaattctggctcggaaacgaagcgcttcacagtctcacacaagccggtgattactccatgcgagtggatctgcgcgctggcgacgaggccgtatttgcccagtacgatagttttcatgtggacagcgcagccgagtactaccgtttacatctggaggggtatcacggcaccgcaggggacagcatgtcctaccacagcgggtctgtattctccgccagggacagggaccctaattctctcttaatatcttgtgccgtgtcatatcgtggcgcttggtggtatcggaactgccattatgccaatttgaacggactgtacggcagtaccgttgaccaccagggcgtgtcctggtaccactggaaaggctttgagtttagtgtgcccttcaccgaaatgaagctgcggccaagaaattttaggagccccgcagggggtgggtag

SEQ ID NO: 31075 - DNA, 2022 bp, synthetic construct
  misc_feature 1..2022: note = Description of Artificial Sequence: Synthetic coding sequence
  source 1..2022: mol_type = other DNA
atgaggctgtcctggtccgtcgcccagggccctttcgactccttcgtcgtacagtacgaagataccaacggccagccacaggctctgttggtggatggagatcagtctaaaatactgatcagtgggcttgagccgagcactccctacagatttttgctgtatggcctgcacgaaggcaagagactgggacctcttagtgctgaagggacgacgggcttggctcctgctggacagacatctgaggagtctagaccaaggctcagccagttgtctgtcacagatgtaaccacatcttccctgcggcttaactgggaagccccacccggagcctttgatagttttctactccgattcggtgtccctagcccttccaccttggagccacaccctagaccattgctccagcgcgagctgatggttccaggtactagacactccgccgtcctgagagacctacggagtggaacactgtactccctgactctctacgggttgcggggaccgcacaaagctgattccatccagggtacggccaggacgctgtccccagtgctcgagagtcctagggatctgcagttttcagagattcgggaaacttccgccaaagttaactggatgcctcctcctagtagagccgattcatttaaagttagctaccagcttgctgacgggggtgagccccagtcggtgcaggtggacggccaggcacgcacccagaaactgcagggcctgatccccggagcccgttacgaagttactgtggtgtccgtgcgaggtttcgaggaaagcgagcctcttactggtttcctgacaacagtgccagatgggcctactcagctgagagcactcaatctcacagaggggttcgcagtgctgcattggaaaccgccacagaaccccgtcgacacatacgatgttcaggtaacagcccctggagcccctcccctccaggccgagacaccaggctccgcagtagattaccctctccatgatctggtcttgcatactaactacaccgcaactgtccggggtttaagaggaccaaatctcacttcccctgcttcgattacctttactacaggcctagaagcccctcgagacttagaggcgaaagaggtgacccctaggaccgcactactcacatggacagagccgcctgtacgcccagccggatatctgctctcgttccatactcccggaggccaaaatcaggagatactactccctggcggaattaccagtcaccaactgcttgggctattccccagcactagttacaatgcgagactccaggccatgtggggccagtctctgcttcctcccgtgagcacgtcttttactacaggtggcctgcgtatcccatttcccagagattgcggtgaggaaatgcagaacggcgctggagcgtcccgcacgtctaccattttcctgaacggcaacagggaacggccactcaatgtgttttgtgacatggagactgacggcggtggatggcttgtgttccagagacgcatggacggtcagaccgacttctggagagactgggaggactacgcgcacgggttcggcaacatatctggcgaattctggctggggaacgaggcactgcattctctgacgcaagccggagattactccatgcgtgtggatttaagagctggcgacgaggcagtcttcgcccaatacgactcatttcacgtcgattcggccgctgagtattacaggctacacctagaaggatatcacggaactgccggagatagcatgtcatatcatagcgggagcgtcttctccgcccgagatcgagatcccaattcgcttctgataagttgtgctgtttcttataggggagcatggtggtatcgcaactgccactacgcaaatctgaatggactgtacggcagtacagtcgaccatcaaggggtcagctggtatcactggaagggattcgaattctccgtcccattcaccgaaatgaaactgcgtccacgcaactttcgaagtcctgccggagggggatag

SEQ ID NO: 31076 - DNA, 954 bp, synthetic construct
  misc_feature 1..954: note = Description of Artificial Sequence: Synthetic coding sequence
  source 1..954: mol_type = other DNA
atggctaagaaccccccagagaattgtgaagattgccatattctgaacgctgaggcttttaaaagcaagaagatttgtaagagcttgaagatctgcggcctcgtgtttggtatactagccctgactctgatcgtactcttttggggtagtaagcacttttggcccgaggtgcctaagaaggcctatgacatggagcatacattttattccaacggggagaaaaagaagatctatatggagattgaccccgtgacacgtacagagatcttcaggtcgggaaacgggactgacgaaaccttagaagtgcacgatttcaaaaatggctacacgggaatttactttgttggcctgcaaaaatgtttcatcaaaactcagatcaaggtgattcccgagttttcagagcctgaggaagaaatcgacgagaatgaggagatcacaactacattctttgagcaaagcgtcatctgggtccctgcagagaagcctatcgagaatagggatttcttaaaaaattccaaaatcctggaaatttgtgataatgttaccatgtactggatcaaccccaccctcatctcggtgtctgagttgcaggacttcgaagaagagggggaagacctgcattttcctgctaacgagaaaaaaggaattgaacagaacgagcagtgggtcgtgccccaggtgaaagtggaaaaaactaggcatgcccgtcaggccagcgaggaggaactgccgatcaatgattataccgaaaatggtatcgaattcgatcctatgctagacgaacgcggttactgctgtatctattgtaggcggggtaaccgctactgcagaagggtctgcgagccgctcctgggttactatccatatccctactgctatcaggggggtagagttatctgcagagtgatcatgccgtgcaactggtgggtggctaggatgctcggtagggtgtag

SEQ ID NO: 31077 - DNA, 1356 bp, synthetic construct
  misc_feature 1..1356: note = Description of Artificial Sequence: Synthetic coding sequence
  source 1..1356: mol_type = other DNA
atggcaactcctttggtggcgggtcccgctgcgctacggtttgctgccgctgccagctggcaagttgtgcgcggaagatgtgtggaacatttccccagggtcttagaattcctcagatcactgcgcgcagtcgcgcctggtcttgtgaggtataggcaccatgagcgcctgtgtatgggccttaaagcaaaagtggtcgtggagctcattctgcagggacgcccatgggcccaggtgttgaaggcgttgaaccaccactttcccgaatctgggccaatcgtgagggaccctaaagctacaaagcaggatctgcgcaagatcctggaggcacaggagacattttaccaacaagtcaagcagctctcagaggctcccgtggatctggcttctaagttgcaggaactcgagcaagagtacggtgagcccttcctggcagcaatggaaaaacttttgtttgaatacctgtgtcagctggagaaagcgctccccactccgcaggcacagcagctgcaggacgtccttagttggatgcagccaggtgtgagtatcacttcctccctagcctggcgacagtacggggtagacatggggtggctgttaccggaatgttcggttacagatagtgtgaatctggctgaacctatggagcagaatccaccgcagcagcagcgcctggccctgcataacccgttaccgaaggctaaaccaggcacccacttacctcaggggccaagttccagaactcatccagagcctctggcaggcaggcacttcaatcttgctcccctgggaagacgcagggtacagtcacagtgggccagcacaaggggcggtcacaaggagaggccaaccgtgatgctgtttccgttccggaacctgggtagtccgacccaggtcatctccaagcccgagtctaaggaggaacatgcgatttacactgctgatctggcgatggggacccgcgctgcctcaaccggtaagagcaagtccccctgccagactttgggaggcagggcgctgaaggagaatcctgtcgacttgccagcaaccgagcaaaaggaaaactgtcttgactgctatatggatccccttagactgtccctgctgcccccacgggctcggaaaccagtgtgtccacccagtctttgcagctctgtaatcactattggagatctcgtactggattctgatgaagaggagaatggccaaggtgaagggaaagagtccctggagaattaccagaaaaccaagttcgatactctgatacctactctgtgcgagtacctccctcctagcggccacggagctattcccgtcagtagttgtgattgccgcgactcatcccgcccactgtag

SEQ ID NO: 31078 - DNA, 1065 bp, synthetic construct
  misc_feature 1..1065: note = Description of Artificial Sequence: Synthetic coding sequence
  source 1..1065: mol_type = other DNA
atggctactcctctggtggctggccctgccgcactacgcttcgcagccgctgcatcatggcaggtggtcaggggccgttgcgtggagcattttcctcgagtccttgagtttcttagatctcttcgagcagtcgcaccagggcttgtgcgctacagacaccacgagcggttgtgcatggggctgaaagctaaagtggtggtcgagctgatccttcagggcaggccctgggcccaagtacttaaagcactcaaccaccactttcctgagtcagggcctatagtgagagaccctaaggccacaaagcaagatttgaggaaaattctagaagctcaagagaccttctatcagcaagttaaacagcttagcgaggcaccagtggaccttgcctccaaattgcaggagctcgagcaggagtatggtgagccattcctagcggctatggagaaattactgtttgagtatctgtgtcaacttgagaaggcccttccaaccccccaggctcaacagctccaagatgtgctgtcttggatgcaacctggagtctcaatcactagcagcttagcctggcgacagtatggtgtcgacatgggctggctgttgcctgagtgcagtgttaccgacagcgtcaatctggcggagcccatggagcagaacccaccacagcagcagcggctggctcttcacaaccctctaccaaaggcaaagcccggaacgcacctaccacaagggcctagctcaaggactcatccagagcccctggcaggacgccactttaacctggcccctcttgggcgacggcgagtgcagtcccagtgggctagcacaagaggcggacataaagaaaggccaacagtcatgctgtttcctttcagaaacctgggctctcccacccaagtcatcagcaaaccagaatccaaggaggaacatgctatctataccgccgacctggctatggggacacgggcagctagtacagggaaaagcaagtcaccctgtcagacactcgggggtagagccctaaaggaaaaccctgtggatctgccagccactgagcagaaagaatag

SEQ ID NO: 31079 - DNA, 423 bp, synthetic construct
  misc_feature 1..423: note = Description of Artificial Sequence: Synthetic coding sequence
  source 1..423: mol_type = other DNA
atggagcaaaaccccccacagcagcagaggctggcactgcataacccactaccaaaggccaaacctggcactcacctcccacaaggcccttcatctaggactcaccctgagccactggctgggcgacacttcaacctggctccgctgggacggcgtcgcgttcaatctcaatgggcatcaactagaggcggacacaaggaaaggccaaccgtcatgttattcccctttcggaacctggggagccccacccaggttatttccaagccagagagcaaagaggagcatgccatatacactgctgacctggccatgggaacgagagccgctagcacaggcaaaagtaaatctccatgccaaacactcggcggaagagcactgaaggaaaatccggttgacttaccagcaacggaacaaaaggaatag

SEQ ID NO: 31080 - DNA, 1251 bp, synthetic construct
  misc_feature 1..1251: note = Description of Artificial Sequence: Synthetic coding sequence
  source 1..1251: mol_type = other DNA
atggctacaccgttagtggctgggcctgcagccctgcgctttgccgcagccgcatcctggcaggtcgtgaggggcagatgtgtggaacacttccccagggttctggaattcctgcggtccctccgcgctgtcgctcccggtctggttcgttacaggcatcatgagcggctgtgtatggggctaaaagctaagactaaacaggacctgaggaagatattagaagcccaagaaaccttttatcaacaggtgaagcaactatcagaggcgcctgtagacctagcctctaaactgcaagagctagaacaggagtacggagagcctttcctggctgccatggagaagttgttgtttgaatacctatgtcagctggagaaggccttacccaccccccaagcccagcagctccaggatgtgctgtcatggatgcagccaggggtgtccatcacatcatccctggcttggcgccagtacggagtggatatgggctggctgctacctgagtgtagtgtcaccgactccgtgaatctggccgagcccatggagcagaatccaccgcagcagcagcggctcgccctgcataatccccttcctaaggccaaaccagggacgcacctgccccaggggccttctagcaggacacatcctgagccacttgcagggagacattttaaccttgctcccctcgggaggcgccgtgtgcagtcccagtgggcgtccaccagagggggacataaggagcgacctacagtgatgttattcccattccgcaacttgggcagccctactcaagtgatttccaagccagagtcaaaagaggaacacgccatttataccgccgacctggccatgggaacccgcgcagcctccacagggaagtcaaagagcccctgccaaaccctgggaggcagggcactcaaagaaaacccggtggacctgcccgctaccgaacagaaggagaactgtctggattgctatatggatcccttacgactgtctttgttaccccctcgagcacgcaagcctgtctgtccaccgtctctgtgtagcagtgtgatcacgattggggacctggtcttggactctgatgaagaggagaatggtcagggcgaggggaaagaatctctggagaattatcagaaaacaaaattcgatactctgatacccacactgtgcgagtatctgccaccatctgggcacggggcaattcccgtttcctcgtgtgactgcagggactcctcccggcctctctag

SEQ ID NO: 31081 - DNA, 3498 bp, synthetic construct
  misc_feature 1..3498: note = Description of Artificial Sequence: Synthetic coding sequence
  source 1..3498: mol_type = other DNA
atggaacaagaccgaacgaatcacgtggaaggaaatcggctctcgccgtttcttatcccctcgcctccaatctgccagactgaacccttggccacaaagttacagaatggcagtcctttaccagagcgagctcatccagaggtgaatggagacacgaagtggcacagcttcaagagttattatggtataccgtgtatgaaaggaagtcagaactcacgcgtgagcccagattttactcaagaatctagggggtactctaaatgcctccagaacggaggcattaagcgcaccgtctctgaaccgtcattgtctgggctcttacaaatcaagaagctaaagcaagatcagaaagctaatggagaaagacgaaactttggcgtgtctcaagaaagaaatcctggcgaatcttcccagccgaacgtctcggaccttagcgataaaaaagaatctgtttcgagtgtggcccaggaaaatgcggttaaggacttcacaagcttctccactcacaactgttctgggcctgaaaaccctgaattgcagattttgaacgaacaagaggggaaatcagcaaattaccacgataagaacatcgttttactaaagaacaaagccgtgctcatgccaaacggggctacagttagcgcatcttcggttgaacatacacacggtgaactccttgaaaagacattgagccagtattacccggattgtgtctctattgcagtccaaaaaacgacttctcacatcaatgccattaactctcaggctacaaatgaattgagctgcgaaattactcaccctagtcatacttctggtcagatcaacagcgcccagacttccaattccgaactgccacctaagccagccgcagtcgtctcggaggcttgtgacgccgatgatgccgacaacgccagcaagctcgcagcaatgctgaatacctgcagctttcagaagcccgagcagctgcaacagcaaaaaagtgtctttgaaatttgtccatctccagcagagaacaacattcagggcactaccaagcttgcctcaggcgaggaattttgcagtggctcatctagcaatttacaggccccaggtggttcctcagagaggtacttaaaacaaaacgagatgaacggggcttacttcaaacagagctccgtattcacaaaagacagcttttccgccaccactacccccccacctccttctcagctcctgctgtctcccccaccccctctgcctcaagtaccacagctgccatctgaaggaaagtccacgttaaacggcggagtactggaggagcaccatcactatcccaatcagtcaaataccaccctgctgcgggaggtgaagatagaaggaaaacccgaggcccctccgtcacagagccccaacccttcaacacatgtatgctccccatcacccatgctgagcgaaaggcctcagaacaattgcgtcaaccggaatgatatccagaccgcgggaacaatgaccgtgccactttgtagcgagaagacacgcccaatgtcagagcacctgaagcacaatccgccaatttttgggtcaagtggcgagctacaagacaactgccagcagttgatgcggaacaaagagcaggagatcctgaagggacgcgacaaagaacagacccgcgatctcgtgccacctacccaacattacctgaagcctggctggattgagctgaaagcccctcgcttccatcaggccgaaagccatctcaaaaggaacgaggccagcctaccctccattctgcagtaccaacccaacctgagcaatcaaatgacctctaaacaatacaccggcaacagcaatatgcctggaggcctccctagacaagcctacactcaaaaaaccacacagctggaacacaagagccaaatgtatcaggtcgagatgaatcagggccagtcacagggaactgtcgaccaacacctccaatttcagaagccgtcacaccaggtgcactttagcaagacagaccacttgcccaaagcacacgtacagtctttgtgtggtacacgcttccactttcagcagcgcgcagattcccagacggaaaagctgatgtctccggtcctgaaacagcaccttaatcagcaggccagcgagaccgagcccttctccaattctcacctgctccaacacaagccacacaaacaggcggctcagacacagcctagtcagagctcccacctaccacaaaatcagcagcagcagcaaaaactccaaatcaaaaataaagaggagatactgcaaactttccctcacccacagagcaataatgatcagcagagagaaggatctttcttcggacagacaaaagtggaggaatgttttcacggcgaaaaccagtactccaaatcatccgaattcgagacacacaatgtccaaatgggcctcgaagaagtccagaacatcaatcggaggaactctccatattcccagaccatgaagtctagtgcctgtaaaattcaggtgtcctgctcaaacaacacccacctggtatctgaaaacaaagaacagaccactcaccccgagctgtttgctgggaacaaaacgcagaatctgcaccatatgcaatacttccctaacaatgtaatcccgaaacaagacctcctccacaggtgcttccaggaacaggaacagaaatctcaacaggcatcggtgctgcaggggtataaaaaccggaaccaggatatgtctgggcagcaggccgctcagctcgcccaacagaggtacctgatccataaccatgccaacgtgttccccgtgccagatcaggggggaagccatacacagacaccacctcagaaggatacacaaaaacacgcagctctgcgatggcacctgctccagaaacaggaacagcagcagacccagcagcctcagactgaatcatgccattcacagatgcatcgtcccatcaaagtggagcctggttgtaaaccacatgcctgcatgcacacggcccctcccgaaaacaaaacttggaagaaagtaacaaagcaggagaatcctcctgcctcttgtgacaacgttcagcagaaatcaatcattgagacaatggaacagcatcttaagcaattccacgccaaatccctctttgatcacaaggccctgaccctaaagagtcagaagcaagtgaaggttgagatgagtgggccagtgactgtgctgacaaggcagaccacagcagcggaactggatagccacactcctgcattagagcagcagaccacctcgtctgagaagaccccaactaaacggactgcagcttctgtgctaaacaacttcatcgagagcccgtccaaactccttgatacccctattaaaaatctattggacacccccgttaaaacacagtatgattttccgtcatgtaggtgcgttggtaaatgccagaagtgtacagaaacgcacggagtgtaccctgagctggcaaacctcagctcagacatgggattctcttttttcttctag

SEQ ID NO: 31082 - DNA, 6008 bp, synthetic construct
  misc_feature 1..6008: note = Description of Artificial Sequence: Synthetic coding sequence
  source 1..6008: mol_type = other DNA
atggaacaggaccggacaaatcacgtggaagggaacaggctgagcccatttctgattccttcacctcctatctgtcagacagagccactcgctaccaagttgcagaacggaagcccgctccctgagagagcacaccccgaggtcaacggggatactaaatggcacagctttaaatcgtactacggcatcccctgtatgaagggcagccagaatagcagggtaagcccagattttacccaggagagccgcggttactccaaatgtctgcagaatggtggaatcaagcggaccgtcagcgagccctccctgtcaggattgctccagatcaaaaaacttaagcaggaccagaaggctaacggcgagagaaggaactttggcgttagccaggaaaggaaccctggtgagtctagtcagcctaatgtgagcgatctgtccgataaaaaagagtccgtgtctagtgttgcccaggagaacgcagtgaaagatttcacatcatttagcactcataattgttcgggcccagaaaatccagaactgcagattctgaacgagcaggagggaaaaagcgcaaactaccatgataaaaatatcgtactgctaaagaataaggcagtcctcatgccaaacggagccaccgtcagcgccagctccgtggaacacacccacggcgagctcctggagaagaccctttcccaatattatccagactgtgtgtcgatcgcagtgcagaagaccacaagccacataaatgcaatcaattcccaggcgacgaacgaactgagctgtgaaatcacacacccaagccacacaagcggccagatcaacagtgcccagacatcgaatagcgaactgcccccaaaaccagccgctgttgtgagcgaagcttgcgatgctgacgatgcagacaatgcttccaagcttgcagcaatgttgaatacatgtagtttccagaagcccgagcaactccagcagcagaaaagcgtgttcgagatctgcccctctcccgctgaaaataacattcaggggactacgaagctcgcctctggcgaggaattttgttctggcagcagctcaaatcttcaggcccctggaggttcttcagaacgctacctgaaacagaacgagatgaatggggcatatttcaaacagagctctgtgttcaccaaggattctttctctgcgaccactacccctccccctcccagccagctgctgttgtctccacctccgccactcccgcaggtcccacagctgcctagcgaaggcaagagtactctgaacgggggagttctcgaggaacaccatcactaccccaatcagtctaatacaacccttcttagggaggttaagatcgagggcaagcctgaagccccaccatcccagtctccgaatcccagtacccatgtgtgtagccctagccccatgctgtcagaacgacctcaaaacaattgcgtcaacaggaatgacatccagaccgccggtacgatgaccgtccctctgtgttccgagaagactaggcccatgtcagagcacctcaagcacaaccctcctatctttggctcaagtggcgagctgcaggacaactgccagcagctcatgcgtaacaaagagcaggaaatccttaaagggcgagataaagaacagactcgggatttagttcctcccacacagcactatcttaagcccggttggatcgagcttaaggctccaaggttccaccaggccgaatcccacctcaaacggaatgaagctagccttccatctatcttacagtaccagcctaacttgagcaaccaaatgaccagcaagcaatacaccggcaactccaacatgcccggtggcctccccaggcaagcctacactcagaagaccacccagcttgagcacaaatctcagatgtatcaggtcgagatgaaccagggacagagtcaaggcaccgttgatcagcacctgcagtttcaaaaaccctcacatcaggttcacttttcaaaaacggatcatttgcctaaagcacatgttcagagtctatgtggtactcgttttcactttcagcagcgagctgattctcagacggagaagttgatgagtccagtcttgaagcagcatctcaatcagcaagctagcgagactgaacctttctcaaacagccacctactccagcataaaccccataaacaggccgcacagacgcagccaagccagtccagtcatctgcctcagaatcagcagcagcagcaaaaacttcagatcaaaaataaggaggagatactacagactttcccacaccctcagagcaacaacgatcagcaaagggaaggatccttttttgggcagactaaggtcgaggagtgcttccacggcgaaaaccagtattctaagagctctgaatttgaaacacataacgtgcagatgggtttggaagaagtgcagaacatcaaccgaaggaattctccgtactctcagaccatgaagtcatcagcgtgcaaaattcaggtgtcctgttcaaataacactcatctcgtttctgaaaataaggaacagaccacgcaccccgagctgttcgctgggaataagactcagaacttacaccacatgcagtactttccaaataacgtgatcccaaagcaagatctgctccacaggtgctttcaggagcaagagcaaaaatctcagcaggcttcagttttacaaggctacaaaaaccgcaaccaagacatgtcgggtcagcaagctgcccaactagcccagcaacggtacctcatccacaatcacgccaacgtgtttcctgttcccgatcaggggggatcccatacccaaaccccgccacaaaaggacactcagaagcatgccgcactgcgctggcacttgttacaaaaacaagagcagcagcagacccaacagccccagaccgagagctgccattcccaaatgcaccgccctataaaggtggaaccgggatgtaaaccccacgcttgtatgcacacagcaccaccagaaaataaaacgtggaagaaagtgactaagcaggagaacccgcctgccagttgcgacaatgtgcagcaaaagagcatcattgaaactatggagcagcacttaaaacagttccatgccaagagcctgttcgatcataaggcccttaccctaaaaagccagaagcaggttaaggtggaaatgagtggcccagtcaccgtactgactagacagactacagccgcagagctggactctcacacccccgctttagaacagcaaacgacgagttcagaaaaaacgccaacaaagagaaccgctgcatcagtgctgaacaacttcattgagtccccctcaaagctccttgatacaccaatcaaaaatttgctggataccccagtgaagacacagtacgattttccctcctgtcggtgtgtggaacaaataatagaaaaagacgaaggcccattctacacacacctgggagctggcccaaacgttgccgctatccgagaaatcatggaggagcgtttcggacagaaaggcaaggccattcgcatcgaaagggtgatttacaccgggaaagaaggaaaatctagtcagggctgccctattgcgaagtgggttgtccggaggtcttcctcagaggagaaactcctctgtttggtgcgcgagcgcgcaggacatacgtgtgaagccgcagtgatcgtcatactgatcctggtctgggagggaatccctttaagccttgccgataaactttactctgagctcacggaaacgctcaggaaatacggaacccttacgaatcgacgatgcgccctgaacgaggaacgcacttgcgcatgccaggggctcgaccctgagacctgcggcgcatccttctccttcggatgctcatggtcaatgtattacaatggatgcaagttcgctagaagcaagatccccagaaagttcaaactcctcggggatgaccccaaggaggaggagaagttggaaagccacctccagaacctgtctaccctaatggccccaacttataagaagttggcacctgacgcatataacaatcaaattgagtacgaacacagagcccctgaatgccgcctagggttaaaggagggtcgacccttctctggagtaaccgcctgtttggatttttgtgctcacgctcatagggacctgcacaatatgcaaaatggttcaaccctagtttgcactctgaccagagaggacaaccgggaatttggtgggaaacccgaggacgagcagctccacgtgctgcccctttacaaggtctcagatgtagacgagttcggctctgtcgaggctcaagaggaaaagaaacggagtggcgctatccaggtgctgtcttcatttagacgtaaagttagaatgttggcagaacccgtcaaaacatgcaggcagagaaagttagaggccaagaaggcagcggcagaaaagctgtcctcattggagaacagtagcaataaaaacgaaaaggaaaagtcggcaccttcccgcaccaagcagacagagaatgcttcgcaagccaagcagttggctgaacttttgaggctctccggaccagtgatgcagcagtctcagcagccacagcctctgcagaaacagcctccacaacctcagcagcagcagagaccacagcagcagcagccacatcatcctcagacggagagcgtgaactcgtactcggccagcggaagtactaacccctacatgaggagacctaaccccgtgtccccatatcccaatagttcccatacttctgacatatacggcagcacttcccccatgaatttctatagtacgagttcccaagccgctggcagctatttaaatagcagcaatccaatgaatccataccctggtctcctaaaccagaatacccagtaccccagttatcagtgcaatggcaatctaagcgtggataactgctccccatatctgggatcatatagtcctcagtcccaacctatggacctgtataggtatccatcccaggatcccctctctaagctgtcgctgccccctatccacacattataccaaccacgattcggtaatagtcagtccttcaccagtaaatatttaggttatggaaaccagaatatgcagggtgacggttttagcagctgcaccattaggcccaacgttcatcatgtgggtaagttgccgccttatcctacccatgaaatggatggtcacttcatgggcgcaacctccaggttgccccctaacctgtccaatcctaacatggactacaagaacggggagcaccactctccatctcatatcattcacaattactctgcggcacccggaatgttcaattcctcgctgcatgcccttcatcttcagaacaaagagaatgatatgctgagtcacaccgcaaacggactttctaagatgcttcccgctctgaaccatgacagaaccgcttgtgtgcaggggggactgcataagctgtctgacgccaacggccaggaaaagcaacctctggccctcgtgcagggtgttgctagcggcgcagaagataacgatgaggtgtggtctgattccgagcagagcttcctcgaccccgacatcggtggagttgcggtcgcccctactcacggctccatcctcattgaatgcgcgaagcgggaacttcacgccaccaccccattgaagaaccccaacagaaatcaccctaccaggatctcacttgttttctatcagcacaagagtatgaatgagccgaagcacgggctggcactatgggaggccaaaatggctgaaaaggccagagagaaggaggaagagtgcgaaaagtacgggccagactatgtcccacagaagtcccacggcaagaaggtgaagcgcgaacctgctgaacctcacgagacaagcgagccgacctaccttaggtttattaaatccctggccgaacgaaccatgagcgtgacaaccgatagtaccgtgaccaccagcccgtatgctttcacgagggtcaccgggccatacaatcgttacatcta

SEQ ID NO: 31083 - DNA, 3498 bp, synthetic construct
  misc_feature 1..3498: note = Description of Artificial Sequence: Synthetic coding sequence
  source 1..3498: mol_type = other DNA
atggaacaagacagaaccaatcacgtggagggtaataggctgagcccgtttctcatcccttctcctcccatttgccagacagagcctctcgctaccaaactccaaaatggatcgccactaccagagcgggcacacccagaggtcaatggcgataccaaatggcatagctttaagagttattacggaatcccttgcatgaaggggtcacaaaattctcgggtgtcgcctgatttcactcaggaatccagggggtactccaagtgtctgcagaatgggggaatcaaacggaccgtttccgagcctagcctgtccgggctcctccaaatcaagaagctcaagcaagaccagaaggctaacggcgaaagacgcaactttggggtgagccaggaaaggaaccctggcgaatcttcacagccaaacgtgagcgacctatccgataaaaaagagagcgtatcatctgtagcacaagagaatgcagtcaaagacttcacttcattctctacacacaactgtagcggccctgaaaatccagaactgcaaattcttaatgaacaggaaggtaaaagtgctaattatcatgataagaatattgtgctgctcaagaacaaggccgtgctgatgcccaacggagcaaccgtatcggcgagcagcgtggaacatacacatggggagctgctggaaaaaaccctgagccagtactaccccgattgcgtttcgatcgctgttcagaaaaccacaagccacatcaacgctataaattcccaggctacgaatgagctgagctgtgagattacacatcccagtcacacttccgggcagatcaatagtgcccagaccagtaacagtgagttgcccccaaaaccggcagccgtcgtgagcgaagcctgtgatgctgatgacgccgataatgcctccaaattggccgctatgctgaatacctgtagtttccagaaaccagagcaattgcaacaacagaagtctgtcttcgagatatgtccttctcccgcagaaaataacatccaggggacaacaaagctggcttctggggaggagttttgttccggttccagcagcaacctgcaggcacccggtggaagcagcgagagatatctgaagcagaacgaaatgaacggagcttacttcaagcaatcctctgtgttcacaaaggattccttttccgcgacgacaacacctccccctccatcccagctgcttctgtcacccccaccaccgttgcctcaggtccctcagctgccctcagaaggaaagagtaccctcaacggaggtgttctggaggagcaccatcactatcccaatcagtctaacacgacactgttgcgagaagtgaagatcgagggcaagccagaggcccctcctagtcagagccctaaccccagcactcacgtgtgttccccgtccccaatgttgagcgaaaggcctcagaataattgcgttaatagaaatgacatccagactgccggtacaatgacagtaccgctttgtagcgagaagacccggccaatgtctgaacatctgaaacataaccctccaatattcggctcttctggggagctccaggacaattgccagcaactgatgaggaataaggagcaggagatccttaaaggccgtgacaaagaacagactcgggatctcgtcccacccacccagcactacctcaaacctgggtggattgaacttaaggcccctaggtttcaccaagcagagagtcacctcaagagaaacgaagccagtcttccctcaatcctgcagtaccaaccaaacctaagcaaccagatgacctcgaagcaatatacaggtaattccaatatgccaggtgggctgccaagacaagcgtacactcagaaaaccacccagctggaacataagagtcagatgtatcaggtcgagatgaaccagggacagagccaggggactgttgatcagcacctgcagtttcagaaaccgtctcatcaggtgcatttctccaaaacggatcaccttccgaaggctcacgtgcagtcactttgtgggacccgcttccactttcagcaacgggcagactctcagactgagaaactcatgagtccagttctgaagcagcatcttaatcagcaggcatcggagaccgagcccttttcaaattcacaccttctccagcacaagccacacaaacaggctgcccaaacccagccctcgcagagctctcacctccctcaaaatcagcagcagcagcaaaaactccagataaaaaacaaggaggaaattttacagacttttccccacccccagtctaacaacgatcagcagagggagggctccttcttcggacagaccaaagttgaggagtgctttcacggtgagaatcagtattccaaaagttccgaatttgaaactcacaatgtgcagatgggccttgaggaagtccagaacatcaacaggagaaatagtccatatagtcaaaccatgaagtcatcagcatgcaaaatccaggtcagctgctccaataacacccatctggttagtgaaaacaaggagcagactacacaccctgagctgtttgccggtaacaagacccaaaatctgcaccacatgcagtacttccccaataatgtgattcccaaacaagacttgcttcaccggtgttttcaagagcaagaacagaagtcacagcaggcctccgttttacaaggctataagaatcggaaccaagacatgagcggtcaacaggcagcgcagctggcccaacagcgttatcttatccacaatcacgccaatgtcttcccagtccctgatcagggaggttctcacacccagacgccccctcagaaagacacgcagaagcacgcagcccttcgctggcacctgctccagaagcaggagcaacagcaaacacagcagccacagactgagtcatgtcacagccagatgcatagaccgattaaagtggaaccaggctgtaagccacacgcgtgtatgcacactgcgcctcctgaaaataagacttggaagaaggtgaccaagcaggagaacccccctgcaagttgcgacaacgtgcagcagaagtctatcatcgagacgatggagcagcacctaaagcagtttcacgccaagagcttatttgatcataaagccctgactctgaaatcacagaaacaggtaaaagtcgaaatgtccggtccggtgacagtgctgacacgacaaactactgccgcagagctcgattctcacactcccgctctggaacaacaaacaactagctcagaaaaaactccaactaaacggacagccgcatctgttttgaacaacttcattgagagccccagcaagttacttgataccccgattaagaatctcttagacacccctgtgaagacacaatacgacttccctagttgccggtgcgtgggaaagtgtcagaaatgcaccgaaacccatggcgtttatcctgaactggcaaatttgtcctcagatatgggtttttcttttttcttctag

SEQ ID NO: 31084 - DNA, 333 bp, synthetic construct
  misc_feature 1..333: note = Description of Artificial Sequence: Synthetic coding sequence
  source 1..333: mol_type = other DNA
atggaacaagatagaaccaatcacgtggagggaaacagactttctccctttctgattccaagtcccccaatatgtcaaacggaacctctggcgacgaagctgcaaaacgggtccccactccctgaaagggcccaccctgaggtgaatggtgataccaaatggcattcctttaaaagctattatggaatcccatgcatgaagggctcacagaatagccgggtttctcccgattttacacaggagtctcgaggctattctaagtgcctgcagaatggcggaattaagcgcaccgtctcagagccaagtctgtccggtctcttgcaaatcaaatag

SEQ ID NO: 31085 - DNA, 1914 bp, synthetic construct
  misc_feature 1..1914: note = Description of Artificial Sequence: Synthetic coding sequence
  source 1..1914: mol_type = other DNA
atggagcaggatagaactaatcacgtggagggcaataggctcagcccattcctcatacctagtcctccgatttgtcagactgaacctttagcaaccaagcttcagaacggcagtcccctgcccgagagggctcatccagaagtgaacggcgacactaagtggcactctttcaagagctattacggcatcccatgtatgaaaggttcacagaactcacgcgtctctcctgactttacccaggaaagcagaggatattccaagtgcctgcagaacggagggatcaaaaggactgtgtctgagccgtccctgagtggtctgctgcagataaagaaacttaaacaggatcaaaaggccaacggcgagaggagaaacttcggagtctctcaagagaggaaccctggggaaagcagccagcctaacgtaagtgatcttagcgacaagaaggagtccgtaagcagcgtggcacaggagaatgccgtcaaagatttcacaagcttttctacccacaattgcagcggacccgagaaccctgaactgcagatattaaacgagcaggaaggtaagagtgctaattaccacgataagaacatcgtgcttcttaagaacaaggcagtgctcatgccaaacggcgctacagtgagcgcctcttccgtcgagcacacacatggcgagctgctggagaaaactctgagccagtactacccagactgcgtcagcattgccgtccagaagaccacaagtcatatcaacgccatcaatagccaggctacgaatgagctgtcatgcgagattactcatccttcacacactagcgggcaaataaatagcgcccaaacgtccaactcagagttgccccctaagcctgcagccgtcgtgagcgaggcatgtgatgccgatgatgccgacaacgcctccaagctggcggcaatgttgaacacttgctcgtttcaaaagcccgagcagctgcaacagcaaaaatcagtcttcgaaatctgcccctccccagctgaaaataacatccaggggacgactaaactcgcttccggcgaggagttctgctccgggtcttcaagcaatctgcaagcacccggtggatcttccgaacgctatctcaagcagaacgagatgaacggcgcatacttcaaacaatcctctgtctttacaaaggactcctttagcgccacgacaaccccacccccaccaagccaactactcttgtcaccccctcccccacttcctcaagtcccccagttgccaagcgagggcaagtcgaccctgaacggcggagttctagaggaacaccaccactatcctaatcaatcgaacacaactctactgagggaggtgaaaatcgaagggaagcctgaagcccctccctcccagagtccaaatcccagtactcatgtgtgctcccctagtcctatgctttcagagcggccacagaacaactgcgtcaatcggaacgatatccagacagccggaaccatgaccgttcccctgtgtagcgaaaaaacccgtcccatgagcgagcatctaaaacacaacccccctatattcggcagttccggtgagttgcaagacaattgccagcaactaatgcgaaataaagagcaggagatcctgaaaggtcgggacaaggaacaaaccagggaccttgtccctccaacccagcattacctcaaacctggctggatagaactgaaggcgccacgattccaccaagcagagtcacacctgaagcgaaatgaggcaagcctgcccagcatactgcaataccagcctaatttaagcaaccagatgacatccaaacaatatactggaaactccaacatgcctggtgggctccccagacaagcttacactcaaaagacaacacagctcagcacgtctcacaagtgcacaaagttaaaatag

SEQ ID NO: 31086 - DNA, 6008 bp, synthetic construct
  misc_feature 1..6008: note = Description of Artificial Sequence: Synthetic coding sequence
  source 1..6008: mol_type = other DNA
atggagcaggatagaactaatcacgttgaagggaatcggctctccccctttctgatcccaagtccacccatctgccagaccgagccccttgccaccaagttgcagaatgggagcccactgccagaaagggcccaccctgaggtgaatggtgacacaaaatggcatagctttaagtcttactacgggattccctgcatgaaaggatcccaaaatagtcgagtttccccggacttcacgcaagagagcaggggctactctaaatgcttgcagaacgggggaattaaacggactgtgtccgaaccttctctctcaggactcctgcagataaagaaactgaagcaggatcagaaagctaacggggaacgtcgaaattttggtgtatcacaagagagaaatcccggagaatcatcacaacctaacgtgtcagacctgtccgataagaaagaatcagtgtcatcagtcgcacaggagaacgccgtgaaagacttcactagctttagcacccacaactgttccggaccagaaaatcccgaattgcagatcctaaatgagcaagaggggaagagcgccaattaccatgacaaaaacatcgtgctcctgaaaaataaggcagtactaatgcctaatggggcaaccgtgtccgcttcctccgtagaacacacacatggtgaattgctggaaaaaacattatctcaatattacccagactgtgttagcattgccgtgcagaagaccactagccatattaacgccataaactcccaagcaaccaatgaacttagctgcgagatcactcacccttctcatacgtccggtcagatcaactctgctcaaacttccaatagtgaactgccccctaagccggcagctgtggtttcagaagcttgtgatgcggacgacgccgacaacgcctcaaaacttgccgctatgctaaatacttgctctttccagaagcccgaacagctccagcagcagaaatcagtcttcgagatctgcccaagtcccgcagaaaataatatccagggtaccaccaaacttgcctctggcgaggaattctgtagcggtagcagttccaacctacaggctcctggtgggtcctctgagcggtatctaaaacagaatgagatgaatggcgcatatttcaagcagtcatcagtgtttacaaaagacagttttagcgccaccaccacgcccccaccaccatcccagttactgctcagccccccaccccctctcccccaggtgccacaactgccgtcagagggtaagtccactcttaacggcggagttctggaggaacaccatcactaccccaatcaatcaaacacaacacttctgagagaagttaagatagaagggaagccagaggcccctccttctcagtccccgaatcctagcacacacgtgtgtagcccatctccgatgttgagcgaacgaccccagaacaattgtgtgaatcggaacgatatccaaaccgcgggaactatgaccgtccctctctgctccgagaagacccggccaatgtccgagcatctaaagcacaatccgcctatcttcggatccagtggagagttgcaggataactgccaacaactgatgcggaacaaagagcaggagattttgaagggacgcgacaaagaacaaacgcgggatttagtgccacccacgcagcactatctcaaacctggttggatagagctgaaggcccctaggtttcaccaggcagaaagccacctgaagcgaaacgaagcttcacttccatcaatcctgcagtaccagcccaacctgagcaaccagatgacaagtaaacagtatactggaaacagcaacatgcctggaggtcttccccgacaggcatatacccaaaagactacccaactggaacataaaagtcagatgtatcaagttgagatgaatcagggccaatcgcaagggaccgtcgaccagcaccttcagttccagaaaccatcgcaccaagttcacttcagcaagactgaccacctgcccaaagctcacgtgcagtccctgtgcgggactcgctttcacttccaacagcgagctgattcccagacagaaaagctcatgtcccctgtgctgaaacagcacctgaatcaacaggcctcagaaaccgagccctttagtaactcacaccttctccagcacaagccccataaacaggccgcacagactcagcctagtcagtcatcacacctcccgcagaatcagcagcagcagcagaagcttcaaataaaaaacaaggaggaaatattgcagaccttcccgcatccccagtcaaataatgaccagcagcgggagggctctttcttcgggcagaccaaggtggaggagtgttttcatggagagaatcagtacagcaagagttctgaattcgaaacacacaacgtgcagatggggttggaggaagttcagaatataaaccgacgaaattccccttattcccagacaatgaagtctagtgcttgtaagatccaggtatcatgtagcaacaatacacatcttgtttctgagaataaggaacagacaacacatcctgagctgtttgcgggtaacaaaacccagaacctgcaccatatgcaatactttccaaacaacgtgattccaaagcaagacctcctccacagatgtttccaagagcaggagcagaaatcacagcaagcatccgtgttacaggggtataagaaccgcaaccaggacatgtctggccaacaggcggcacagctggcccagcagcgatatctgatacataaccacgcaaacgtcttccccgtccccgaccagggaggatcacacacccagaccccccctcaaaaagatacacaaaagcatgcggctttgcgctggcatctgctccagaagcaggaacagcagcaaacgcagcagccccagactgaatcttgccactctcaaatgcacaggccaattaaagttgagccgggttgtaagccacacgcctgtatgcatacggcaccccctgagaacaagacctggaaaaaggtgacgaagcaggaaaatcccccagcctcttgcgacaacgtgcaacaaaaatctatcatcgaaacgatggaacagcaccttaagcagtttcacgcaaagtcccttttcgatcacaaggcccttacccttaagagccagaagcaagtgaaggtggaaatgagtgggccagttaccgtgctaaccaggcagacgaccgctgccgagctcgactcccacacaccagctctcgaacagcagaccacttcaagtgagaaaacacctaccaaaagaacggctgcctcagttttgaacaatttcattgaatcacccagcaaactgctggataccccaattaaaaacctgctggatactcctgtcaagacccagtatgacttcccctcctgtcggtgcgtggaacaaattatcgagaaggacgagggacctttctatactcacttgggtgccggtcccaatgtggcagctattcgcgagattatggaggaaaggtttggtcagaagggcaaagctatccgcattgagagagtgatttatactggaaaggaagggaaatcctcccaaggatgccctattgctaagtgggtcgtgcgacgctctagctcggaagaaaaattgctgtgcctcgtgagagaaagggccggacatacctgtgaggccgcagtgatcgtcatccttatcttggtgtgggaggggatcccactgagcttagctgacaagctgtatagcgagttgaccgagaccctaaggaaatatggaacattaaccaatagacggtgtgcactgaacgaggagcgcacttgtgcttgccagggccttgatccagagacatgtggcgcttccttcagtttcggatgctcttggagcatgtactacaatggatgtaagtttgcgaggagcaagatcccgagaaagtttaagctcttgggcgacgacccaaaggaggaagagaaattggaatctcatctgcagaacctgtccaccttgatggcccctacttataagaagctggcccctgatgcctacaataaccagatcgagtacgaacaccgagccccagagtgcagattgggcttgaaagaaggcagaccgttctccggagtgacagcatgtctggacttctgcgctcatgctcaccgagacttacataacatgcagaacggatcaaccctggtgtgtaccctaacaagagaagataacagggagtttggcggaaagcccgaggacgagcagctccacgtgctgcccctgtacaaagtaagcgacgttgatgaattcggatctgtggaggcacaggaagagaagaagcgatctggcgctatccaggtcctcagtagcttccgcaggaaagtgcgaatgctggctgaaccggttaagacctgcagacagcggaaactggaagctaaaaaagctgccgctgagaaactgtccagtcttgaaaatagttcaaataagaacgagaaagagaaatctgctccgagccggaccaagcagacggagaatgcttcccaggcaaaacagctggccgaactattgagactttcaggtcccgtgatgcagcagtctcagcagccacagcctctgcagaagcagccaccccagccacagcagcaacaaaggccacagcaacaacagcctcaccacccccaaaccgaatctgttaactcatattccgcttctgggagcactaacccatacatgcgtagacctaacccagtgagtccttatccaaattcatcccacacaagcgatatttacggatccactagcccaatgaacttctatagcacctctagccaagccgcaggcagctatctgaattcctctaaccccatgaatccgtatcctgggttattaaaccagaatacccaataccccagctaccagtgcaacgggaatttgtccgtggataattgttccccttatcttgggagttactcacctcaaagtcagcccatggatctttacagatacccatcacaggatcctttatcaaaactgtcattgccgccaatccatacactgtatcaacctagatttggcaattcccagagcttcacctccaaatatcttggctacgggaatcagaacatgcaaggcgatggcttttcctcttgtactattcgacctaacgtgcaccatgtgggaaaacttcctccctacccaacacacgaaatggacgggcatttcatgggagccactagtaggctacccccaaacctgagtaatcccaacatggactataagaacggagagcaccactccccaagccatattattcacaattactctgcggctcccggtatgtttaatagcagtctgcatgccctccacttgcagaataaggaaaacgacatgctgtcccacactgccaatggattgtcaaaaatgctgcccgcactgaatcatgaccgcactgcctgtgttcaagggggactccataagctttccgacgcaaacggccaggaaaaacaaccactcgctcttgtacagggtgtggcttcaggagcagaggacaacgacgaagtgtggtcagactccgaacagtctttcctcgaccccgatatcggaggagtcgctgtcgcaccaactcatggatccattctcattgagtgcgcaaagcgggagctccacgccactactccactcaaaaatcccaatcgcaaccaccctacgagaatcagtctagtcttctaccagcacaagtctatgaacgaacccaaacacggactggcgctatgggaggcaaaaatggccgagaaggcccgtgaaaaagaagaggaatgtgaaaaatacggtcctgactacgtccctcagaagtcgcacgggaagaaggtaaaacgggaacccgcagagccacacgaaacctccgagccaacatacctgaggttcataaaatcactggctgagcgaacaatgtctgtgacaacagattctactgtgacgacgagtccctacgcattcacacgggttacaggcccatataacagatacatcta

SEQ ID NO: 31087 - DNA, 3585 bp, synthetic construct
  misc_feature 1..3585: note = Description of Artificial Sequence: Synthetic coding sequence
  source 1..3585: mol_type = other DNA
atggagcaggatcgaacgaaccatgttgaaggaaatcgcctctctccctttctgattccaagtcctcctatctgtcaaacggagccactggcgaccaaattgcagaacggctcacctctccctgagcgggctcatccagaagtgaacggcgacacaaagtggcactccttcaaatcctattacgggattccctgcatgaaaggctcacagaatagcagggtgagtcccgactttacacaggagagcagggggtattctaagtgcttgcagaatggcggtatcaaaagaacggtctcagaaccttcactctcagggcttctccagattaaaaaattaaaacaggatcagaaggctaacggagaaagacggaatttcggcgtgtcacaggaaagaaacccaggcgaatcctcacagcccaatgtgtcagacctgtctgataagaaggaaagcgtatcttccgtcgctcaggagaacgctgttaaagattttacttccttctcaacccacaactgctctgggccagagaatccagagctgcagatcctcaacgagcaagagggaaagagcgctaattatcatgacaagaatatagtcctgctaaagaataaggctgtgctaatgcccaacggcgcaacagtctcagcgagttccgtggagcatacccatggagagctgctggaaaagaccctgagccagtactatccggattgcgtctctatcgcagtgcagaagacaacttcacacatcaacgccatcaattcacaggccacaaacgaattgtcttgcgagataacccatccatcccatacgagcggccagatcaactcagcccagacctcgaactctgagcttccgcctaaaccagcagcggtcgtatccgaggcttgcgacgcagatgacgcagataatgccagcaaactggctgcgatgctaaacacttgttcgttccagaaaccagagcaactacaacagcagaagtccgtgttcgagatctgcccatcacccgcagagaataatattcaggggacgacaaagctagcctccggcgaagaattctgcagcgggagcagcagcaatctccaagcccctggcggatcctctgaaaggtatctcaaacagaatgagatgaacggcgcatacttcaaacagtcctcggtctttacaaaggactccttctctgccactacgacgcccccacctccatctcagctcttactgtctccccctccgccactgcctcaagtgcctcagctgccttcagaaggtaaaagcacgcttaacggtggggtgcttgaggagcaccatcactacccaaatcagtctaacaccacccttctgcgtgaagtcaaaatcgagggtaagcctgaagcgcctccctctcagtccccaaatcccagcacccacgtttgttcccctagtccaatgctctctgaaaggccccaaaacaactgcgtgaacaggaacgacatccagaccgctgggactatgaccgtgcccctgtgttctgagaaaactaggccaatgagtgagcatctaaagcacaatccgccaatcttcggtagcagtggagagttgcaagataattgccaacagttgatgaggaacaaggaacaggagatactgaaaggaagagacaaggagcagacccgggacctggttcctccaacccagcattatctcaaacctggttggatcgagctgaaggcgcctagattccaccaggccgagtcacaccttaagcgcaatgaggcctccttgccctcaattctccagtatcaacccaatctgtcgaatcagatgactagcaagcaatacactggaaattccaacatgccaggtggtttaccgaggcaggcttatacccagaagaccacccagctcgaacacaagagtcagatgtaccaggtggagatgaatcagggccagtcccagggcacagtggatcagcacctccaatttcagaaaccgagccaccaagtgcacttttcgaagaccgatcatcttcccaaagctcatgtccagtccctctgcggcaccagatttcactttcagcaacgtgcagattcccagaccgaaaaactcatgagcccagtgctgaaacagcaccttaatcaacaggcctcagagaccgagcctttctcgaattcccacctgttgcagcacaagcctcacaaacaggccgcacagactcagccctctcagagctcacacctcccccagaaccaacagcagcagcaaaagctgcaaattaagaacaaggaggagattctgcagaccttccctcatccccagagtaacaacgaccaacagagggagggtagttttttcggccagaccaaggtcgaggagtgcttccacggcgagaaccagtatagtaagtcgtccgagttcgaaactcacaacgtgcagatgggcctggaggaggtgcaaaatataaaccgaagaaattctccatatagccagactatgaagagtagcgcctgtaagatccaagtatcttgcagcaataatacacatctggtgtccgagaacaaggagcagacgacccatccggagttattcgcgggaaacaaaacccagaatttgcaccacatgcaatacttcccaaacaatgtaatccctaagcaggacctgctgcaccgctgctttcaggagcaggagcagaagtctcagcaggcttccgtactgcagggatataagaaccggaatcaggatatgagcgggcagcaggctgcacaactcgcccaacagcggtatctgattcacaaccacgctaatgtattcccagtgccagaccagggtggatcgcacacccaaaccccccctcaaaaagatacacagaaacacgccgctctcagatggcacttactgcaaaaacaggaacagcagcaaacccagcagccccagaccgagagttgtcatagccagatgcaccggccaatcaaggtggaaccaggctgtaagccccacgcatgtatgcataccgcaccccctgagaacaagacatggaaaaaagtcaccaagcaggagaatccccctgctagttgcgataacgtgcagcagaaaagtatcattgagacaatggagcaacatcttaaacagttccatgccaaatctctgtttgaccacaaggccctcacgttaaagagtcaaaaacaggtgaaggtggaaatgagcggcccagtcactgtgcttacccgacagaccaccgctgccgagttagacagtcacacccctgctctcgagcagcaaactacaagttccgagaaaaccccaaccaaacgaactgcagccagcgtgctgaataactttattgaaagccccagtaagttgctcgatacacctataaaaaatcttttagatacccccgtgaaaacacagtatgattttcctagctgtaggtgcgttggccttgacagacgtgtaaaattactgggccttaaagaaagctctatcttagtgaaaaaagcgaaggtcctaagagatgtgttgctgcttagcgggtggtttgccgaagccgcagtcaagcggagttattgtgtgtggtgcgggtccgagctggcaacgcctgtcagactacagtag

SEQ ID NO: 31088 - DNA, 6071 bp, synthetic construct
  misc_feature 1..6071: note = Description of Artificial Sequence: Synthetic coding sequence
  source 1..6071: mol_type = other DNA
atgatccaggaggagcagatccagctggaaggaagtctggtggacggacctgaagcctcactgatggagcaagatcggaccaatcatgttgaagggaacagactctctcccttcttgattccatcaccgcctatttgtcagactgagcccctggctaccaagctgcagaacggcagcccattgccagaacgggctcaccccgaagtgaacggagacacaaaatggcacagtttcaagagttactatgggataccctgtatgaaaggctcacagaacagcagagtgagcccagatttcacccaggagtcaagaggctacagcaaatgcctgcaaaacggtggaatcaagagaactgtcagcgaaccgagcctctcgggcttactccagatcaaaaagctgaagcaagaccaaaaggccaatggcgagcggaggaactttggggtgtcccaggaacgcaatcctggagagagctcccagcctaacgtgagcgacctcagtgataagaaggagtctgtgtccagcgtagcccaggaaaacgccgttaaagacttcacttctttctctacccacaattgtagcggacccgagaatccagagcttcaaattctgaatgagcaggaagggaaaagcgccaactatcatgacaaaaacattgtcctgctcaaaaataaagctgtgctgatgcctaatggtgcgactgtaagcgccagttcggtggaacacactcatggggaattgttggaaaagactctgtcacagtactaccctgattgcgtgagcattgctgtccagaaaactacctcacacattaatgcaataaattcccaggccacaaatgagctctcgtgcgagataacccacccctcacatacgagcggtcagataaactctgcgcaaacttccaattcagaattacctcctaagcccgctgctgtggtaagtgaagcatgcgatgccgatgatgccgataacgcaagcaagcttgctgccatgctgaacacatgctccttccagaagcccgagcaactgcagcaacagaagtccgtgtttgagatatgtcccagccctgctgagaataacatccaaggcaccaccaaactggcatcaggcgaggagttctgttctggatcatcgagcaatttacaggctccgggaggctcatcagaacgctacctcaaacagaacgaaatgaacggtgcctattttaaacagtctagcgtcttcactaaagactcgttcagcgctacaactacgccacccccacctagtcagctccttctttctccaccaccccctttgcctcaggtcccacaactgcctagtgagggcaaatccaccctgaatggcggagtgctggaggagcatcaccactatccaaaccagagtaacactactctgctacgggaagtcaaaatcgaaggcaaaccagaggctccaccaagccagtcccccaatccttccactcacgtgtgttcaccttctcctatgctgtctgaacggcctcagaacaattgcgtgaaccgaaatgatattcagactgccggaaccatgacagtcccactgtgcagcgaaaagacccgtccgatgagtgagcatctgaaacataacccgccaatcttcgggagctccggcgagctgcaggacaattgtcagcagctcatgaggaacaaggaacaggaaatcctgaaaggtcgtgataaggagcagacaagggacctggtgcctcctacccaacattacctgaaaccaggctggatcgagctgaaggccccaagatttcaccaagctgagtcacaccttaagcgcaatgaagcgagtctgcctagcattctgcagtatcagccaaatctttcaaatcagatgacatccaaacagtacaccgggaatagcaatatgcctggagggttgcccaggcaggcatatactcagaaaactacacagctcgagcataaatctcagatgtaccaagtcgagatgaaccagggacagagccaaggaacggtggatcagcatctccagttccagaaaccctcccaccaggtgcatttttccaaaacggaccatctgcctaaggcgcatgtgcagtccctgtgcggtactcgctttcattttcagcaacgagccgacagtcagacagaaaagctaatgtctccagtacttaaacagcacctgaaccagcaggccagcgaaacggaaccattttctaatagccaccttctgcaacataaaccccacaagcaggctgcccagactcagccatcgcaaagtagccacctgccacagaaccagcagcaacaacaaaagctgcagattaaaaacaaagaagaaattctgcaaaccttcccacatcctcaaagcaacaatgatcagcagcgggaaggatcatttttcggccaaactaaggtcgaggaatgtttccacggtgagaaccagtactccaagtctagcgaattcgagacccacaacgttcagatgggcttggaggaagtgcagaacatcaatcggaggaactccccctactctcagacaatgaaatctagcgcttgtaaaatccaggtgtcgtgtagtaacaatacgcatctcgtgagtgagaacaaagagcagactactcatcccgagctctttgctggaaacaagacccagaacctacaccacatgcagtattttccgaataacgtcattcccaagcaggacctgctccataggtgttttcaggaacaagaacaaaaatctcagcaggcaagcgtgcttcaaggctataaaaacagaaatcaggatatgagcggtcagcaggcggcacaactggcacaacaacgctacctgatccacaaccacgcaaatgtcttcccggtgcctgaccagggcggttcccacacccagaccccccctcagaaagacacccagaagcatgcagccttacgctggcatctactccagaagcaggagcagcagcagacccaacagcctcagacagagagctgccatagtcagatgcaccgcccaataaaagttgagcctggttgtaagccacatgcctgcatgcatacggccccacccgagaacaagacctggaagaaagtgaccaagcaggaaaatcctcccgcttcttgcgataatgtgcaacaaaaaagcatcattgagacaatggagcagcatctcaagcagttccacgccaaatccctcttcgaccataaagccctgacacttaaaagccagaaacaggttaaagtcgaaatgagcggtcccgtcacagtcctcaccagacagaccaccgctgctgaattggattcccacacccccgctctggagcagcagaccacatcctcggagaagacccccaccaaaaggactgcagcaagtgtccttaataatttcatcgaatcaccatctaagctactggacaccccaatcaaaaatctgctggacactcctgtgaaaacacaatacgattttccatcctgcagatgtgtcgaacagatcatcgaaaaggacgaagggcctttttacacacatcttggagccggacctaacgtcgcagcaattcgcgagattatggaagaacgattcggtcagaaggggaaagccatacgcattgagagagtgatctatacgggcaaagaggggaagagttcacagggatgtccgattgccaaatgggtggtccggaggtcttcaagtgaggagaagctcctatgtctcgtgcgtgaacgcgcaggacatacttgcgaggccgcagttatcgtcatcttgattctggtctgggagggcatccctctcagccttgccgataaactctatagcgaactcactgagacactgcgcaaatatggcaccctgactaatcgcagatgcgccttgaatgaagaacgcacctgcgcctgccagggcctcgacccagagacttgcggcgcatcattcagctttggttgctcctggagcatgtattacaatgggtgtaaatttgctcgttctaagataccacgaaaattcaaacttttaggagatgatcccaaggaagaagagaagctggagtcgcatctccagaacctcagcacccttatggctccaacctacaagaagctcgcccctgacgcttacaacaaccagattgagtatgaacatcgcgctcccgaatgcagacttggattgaaggaggggagacctttttcgggcgtcacggcctgcttggacttctgtgcccatgcacaccgcgacttgcataatatgcagaacgggtcaactcttgtttgcaccttgaccagggaggacaaccgcgagttcggtggtaagccagaggacgagcagctgcacgtgctgcccctctataaggtctcagacgtggacgaattcggaagcgtagaagcccaggaagagaagaagagaagcggcgcaatacaggtgctttcatcttttcggcgtaaagtgcggatgctcgccgagcctgtaaaaacatgtcgccaacgcaagctggaggctaagaaagcagctgcagaaaagctgtcctcattagagaattcaagcaataagaatgaaaaggagaaatcggcacccagccggacaaagcagaccgaaaatgccagccaggcaaagcagttggccgaactactacgtctttccggacctgtcatgcaacagagtcagcagcctcagccgctgcaaaaacagcctccgcaacctcaacagcagcaacgtccacaacagcagcagccgcatcatccccaaaccgaaagtgtcaattcctattctgcatctggaagtaccaatccttacatgcgcaggcctaatccagtgtctccttatcctaatagctctcacacgagtgacatttatggctctacctcaccaatgaacttttacagtacttcttcccaagccgcaggctcatatctcaacagctctaaccctatgaatccctatcccggactgctgaatcagaatactcagtatcccagctaccaatgtaatggcaatctctccgttgataattgttccccgtacctggggtcctacagtccccagtcccagccaatggatctgtatcgctacccatcccaggatccactgtctaagctgtccctcccaccaatccatactctgtaccagccaaggtttggtaatagccagtcctttacttccaaataccttggctacggcaaccagaacatgcaaggtgacgggttttcatcatgcacaataagacccaacgttcatcacgtcggtaaattgccgccatacccaacccacgaaatggatgggcacttcatgggcgcaacaagcagactccctcctaatctttcaaatccgaacatggattataaaaatggtgaacaccattcccccagccacatcatccacaattattcggcggctcccggaatgttcaattcctccttacatgcccttcacctgcagaataaagaaaatgatatgctgagtcacaccgcaaatgggttgagcaagatgctgcccgcactaaatcacgaccggactgcttgtgtacaaggcggattgcataagcttagcgatgctaatggacaggagaagcaacctttggccctggtgcagggtgtggcgtccggcgctgaggataacgacgaggtgtggtccgactctgagcagagctttcttgaccctgatattggaggggttgcggtggcgcctacccacgggagtatcctcatagaatgcgctaaacgggaactccatgccaccacccccctcaagaatcctaataggaatcaccctacacgcatttccctggtgttctaccagcacaaatccatgaatgagcccaagcacggtttggcactgtgggaagcaaagatggctgagaaagcgcgtgagaaggaggaggagtgcgagaagtatggccctgattacgtgcctcagaaatcccacggtaagaaggtaaaacgagagcccgctgaaccccatgaaactagtgaaccgacttatcttaggttcattaaatcccttgcggaaagaacaatgtccgtgaccacggactcaaccgtgacaacctcaccatacgcgtttacaagggtgactgggccatataataggtacattta

SEQ ID NO: 31089 - DNA, 615 bp, synthetic construct
  misc_feature 1..615: note = Description of Artificial Sequence: Synthetic coding sequence
  source 1..615: mol_type = other DNA
atggtgtgtggtggatttgcctgcagcaaaaattgcctctgtgccctgaacctgctgtacactctggtgtcactgctgttgattggcattgccgcatggggcatcgggtttgggttgatctcgtccctgcgggtggtgggggtagtcatcgctgtcgggatatttctcttcctgatcgcactggtggggctaattggcgctgtcaagcaccatcaagtactcctgtttttttacatgatcatcctgctgctggtgttcatcgtgcagttctccgtgtcttgtgcctgcctggccttaaatcaggagcagcagggccaactgctggaggttggatggaataatactgcttccgcccgtaatgacattcaacgaaacctgaactgctgcgggttccgttccgtgaacccaaacgacacctgcctggcctcttgcgtaaagtctgaccattcctgcagcccatgcgccccaataatcggagaatacgccggagaggtcttgaggttcgtcggtggcattgggctgttcttcagcttcacagagatcctgggggtttggctgacttataggtaccggaaccaaaaggacccacgagccaatccatcagcttttttatag

SEQ ID NO: 31090 - DNA, 738 bp, synthetic construct
  misc_feature 1..738: note = Description of Artificial Sequence: Synthetic coding sequence
  source 1..738: mol_type = other DNA
atggcctcaccatctcgcaggctccagaccaagccggtaatcacatgtttcaagtcagtgcttttgatatatacttttatcttttggattaccggcgtgatcctattagccgtgggaatctgggggaaagtgtccctagaaaattacttcagtctcctgaatgaaaaagcaaccaacgtgccttttgttttgatagctacgggcaccgtaataatcctccttgggacattcggttgcttcgcaacgtgtcgggcatcagcttggatgctgaagctgtacgccatgtttctcacactggtgtttcttgtggagctggtcgccgctatagtaggcttcgttttccggcacgagattaagaacagctttaagaacaactacgaaaaagctctcaaacagtataacagcacaggcgattatcgtagccatgccgtggacaagatccagaataccctgcattgttgtggggttaccgattaccgggactggacagataccaattactacagcgaaaaggggttccccaagagctgttgcaaacttgaggactgcactccccagcgggacgccgataaagttaataacgaaggttgctttattaaggtcatgacaatcattgaatctgagatgggagttgtggccggtatttcttttggcgttgcttgtttccagctgatagggatttttctcgcctactgtttatcccgcgctattaccaacaaccagtacgaaatcgtgtag

SEQ ID NO: 31091 - DNA, 684 bp, synthetic construct
  misc_feature 1..684: note = Description of Artificial Sequence: Synthetic coding sequence
  source 1..684: mol_type = other DNA
atggcttccccctctcggagactgcagacaaaaccagtgattacttgttttaagagcgtgcttttaatttacactttcattttttggatcactggcgtgatcttgctcgctgtcgggatctggggtaaggtgagcctagaaaattactttagccttttaaacgaaaaagccacgtttgggtgtttcgcaacttgtcgcgcatcagcctggatgctcaagctgtatgcgatgttcctgactttagtttttctcgtggagctggttgctgctatcgtcgggtttgtatttcgacacgaaattaagaactcctttaaaaacaactatgagaaggccctgaagcagtataacagcacaggggattaccgctcacatgccgtggataagatacagaataccctccactgctgtggcgtaaccgactaccgtgattggactgatacaaactattattccgaaaagggctttcccaaatcgtgctgtaaattggaagattgcacgccacagcgggacgccgacaaagtgaataacgaagggtgcttcattaaagtaatgactatcattgagtcagagatgggggttgtggccggaatatctttcggggtcgcatgctttcagttgattggtatcttcctggcctattgtctgagccgcgctatcacgaacaatcaatacgagatcgtctag

SEQ ID NO: 31092 - DNA, 669 bp, synthetic construct
  misc_feature 1..669: note = Description of Artificial Sequence: Synthetic coding sequence
  source 1..669: mol_type = other DNA
atggaaaggaagggcagcgcagccggagccaagggcaatcctagtccccctgcagcgggagaagggcagcgcccacccccaccactgtgtgtgccgggagggggaggtggggcaccagctaggggccaggttggcgcagctgcggaacctgccgagctgattaggagggctcacgaattcaagtcccagggcgcacaatgctataaggacaagaaattccgagaagccatcggcaaataccatagggcgcttttggagctgaaaggtttactgcctcccccaggtgagagggagcgcgactccagacctgcttcccccgctggagcactcaagccaggacgcctctccgaggagcagagcaagacggtggaagccattgagatagattgttacaactctctcgccgcttgtctgctccaggccgagctggtgaactacgagagggtaaaagagtattgtctgaaagtgctcaagaaagagggggagaacttcaaggctctctatcggtccggcgtggccttctatcacttaggcgactacgataaggcgctctactacctgaaggaagcccgtacacagcagcctactgatacgaacgtcatcagatatatccagctgaccgaaatgaagttatcaaggtgctctcagagagagaaggaggccatgtag

SEQ ID NO: 31093 - DNA, 258 bp, synthetic construct
  misc_feature 1..258: note = Description of Artificial Sequence: Synthetic coding sequence
  source 1..258: mol_type = other DNA
atggtcaagcagatcgagagcaagacagccttccaggaggctctagacgctgcgggagacaagctggtcgtagtagatttttcagccacttggtgcggtccctgtaagatgatcaagccatttttccacgatgtcgcgtcagaatgtgaggttaagtgtatgccaacattccagtttttcaaaaagggacagaaagttggggaattctcgggggctaataaggaaaagttggaggcaacaataaatgagttagtgtag

SEQ ID NO: 31094 - DNA, 318 bp, synthetic construct
  misc_feature 1..318: note = Description of Artificial Sequence: Synthetic coding sequence
  source 1..318: mol_type = other DNA
atggtcaagcagatcgagtccaagacagcattccaggaagcgctagatgcggctggcgacaagctggtggttgttgatttttccgccacttggtgtggcccttgcaaaatgatcaagccattcttccacagcctgtctgaaaagtattctaacgtgatatttttagaagttgatgtcgatgattgtcaggacgtggcatcagagtgtgaggtgaaatgcatgccgacttttcaattctttaagaagggccaaaaagtgggggaattcagcggggcaaacaaggagaagcttgaggcgaccataaacgaattagtatag

SEQ ID NO: 31095 - DNA, 1176 bp, synthetic construct
  misc_feature 1..1176: note = Description of Artificial Sequence: Synthetic coding sequence
  source 1..1176: mol_type = other DNA
atggtgatgtttaaaaaaatcaaaagcttcgaggttgtattcaacgatccagaaaaggtctacggctccggagagaaggtcgctggtagggtcatcgtcgaggtctgcgaagttaccagagtgaaagccgtgagaattttagcgtgcggagttgcgaaagtattatggatgcaaggttcccaacagtgtaaacagactagcgaatatctaagatatgaggatactctgcttcttgaggaccagcctacaggggagaatgagatggttattatgaggcccggaaacaaatacgaatataaattcgggtttgagctgcctcagggcccactaggcacatctttcaaaggcaaatatggatgcgtcgactattgggtgaaagcctttctggacaggcctagccagcctactcaggagactaaaaagaactttgaggttgtggacctggtggatgtgaatactccagatttgatggctcccgtgtctgctaagaaggaaaagaaggtttcttgtatgtttatcccagacgggagggtcagcgtctcagcccgaatcgatcgaaaaggattttgtgagggagacgagatctccattcacgcggatttcgagaatacctgttccaggattgtggtcccaaaggctgccatcgtggccaggcatacatatctggcgaatggccagactaaagtcctgacgcagaagttgtcgagtgtgcgtggtaaccacatcatttctggaacttgtgcctcttggcgcggaaaaagtctgagagtgcagaagattagaccaagcatattgggatgtaatatactccgagtcgaatactccttattgatctatgtgagtgtgcctggcagcaagaaggttatcctcgatctgccattagtgatcggcagtaggtctggtctcagctcacggacctcatccatggctagccggacttcgtccgagatgtcctgggtggacttgaacatccccgatacaccggaagctcccccttgttacatggatgtaatccctgaggatcaccgtttagagagtcccacaaccccactccttgatgatatggacggaagccaggatagccccatatttatgtatgcacctgagtttaagtttatgccccctcccacctacacagaggtcgacccttgcattctcaacaacaatgtacaatag

SEQ ID NO: 31096 - DNA, 1494 bp, synthetic construct
  misc_feature 1..1494: note = Description of Artificial Sequence: Synthetic coding sequence
  source 1..1494: mol_type = other DNA
atgaatggacccgaagacctccccaagagttacgattacgatctgatcatcatcgggggtgggtcgggcggattagccgcagcaaaggaggctgcacagtacggtaaaaaggtaatggtcctcgatttcgttactcctacacccttggggacccggtggggactgggagggacatgcgtaaacgtaggatgcatccccaaaaaactaatgcaccaggcagcactgctggggcaggccctgcaggactccagaaattacggctggaaggttgaggagaccgtaaaacacgactgggacaggatgattgaggccgtccagaaccatatcgggtccctcaattggggatacagggtggcccttcgggagaaaaaggtggtgtacgagaacgcgtacgggcagttcatcgggcctcacagaattaaagcaactaacaataaaggaaaggaaaagatatactctgcagagagattcttaatagctacaggcgagagaccccgttacttaggaataccaggagataaagagtattgtattagctcagacgatctcttctctcttccctattgccccggaaaaaccttagtcgtgggggcttcttatgtggccctggagtgcgccggttttttggccggtattggactggatgtgacagtcatggtccgtagcatactcctgagaggcttcgaccaggacatggccaataaaattggagagcatatggaagagcacggtatcaaattcatccgccagtttgttccaattaaagttgagcaaatcgaggcgggtacaccgggacgactccgtgtggtggcacagagcaccaattccgaagagatcattgagggcgaatacaacactgtgatgctggccatcgggcgagacgcctgcactcgaaagatcgggctggaaaccgtcggtgttaaaatcaatgaaaaaacgggaaaaatccccgtaacagatgaagagcagacgaatgttccttacatctatgccattggggatatcctggaggacaaagttgagctcacccctgtggcaatacaggccggtcgacttttggctcagagattatatgcgggatccacagtcaaatgcgactacgagaacgtgccaactacggttttcaccccgctggagtatggggcatgtgggctttccgaggaaaaggccgttgagaagttcggcgaagagaacattgaagtgtatcacagctacttctggcctctggaatggacaatcccaagccgggataataacaagtgttacgccaaaataatatgtaataccaaggataacgaacgggtggtgggctttcatgtgttagggcctaatgctggggaagtgacccaaggtttcgcggcagccctcaagtgcggtctgaccaagaagcagctcgatagcacgatcggcatccaccctgtgtgcgccgaggtatttacgacactgagtgtgactaaacgtagcggggcttctattctgcaggccggatgctag

SEQ ID NO: 31097 - DNA, 1746 bp, synthetic construct
  misc_feature 1..1746: note = Description of Artificial Sequence: Synthetic coding sequence
  source 1..1746: mol_type = other DNA
atgcagcaggttatgctcacttgcaagggagtgaacagagggcacgctgtgcctgcaggcccagggcgaaagcctcgaccacgtcgctcttcacgactgctggcaggagaaaagcacctaacccgaagtgccctgctgctgtgccataccgaggacggaagggccctggaggggacactgtccgaacttgctgctgagaccgatttgcctgtagtttttgtgaagcagaggaagatcggcggtcatggcccaactcttaaggcatatcaggagggcagactgcaaaaattactaaagatgaacggccctgaggatcttcccaagtcctacgattacgacctgataattattggcggaggatctggcggactggctgctgcgaaagaggcagctcagtatggtaaaaaagtgatggtactggatttcgtgacacccacccccctgggcacaagatgggggctgggcggaacatgcgtgaacgtcgggtgtatcccgaaaaagctcatgcatcaggccgctttgctgggccaagcacttcaagattctcgtaactacggctggaaagtggaggagactgtgaagcacgattgggatcgtatgatcgaagcggtccagaaccacataggcagcctgaactggggctatagggtggcccttcgggagaagaaggtagtatatgagaacgcctatggacagttcattggtcctcatcgcatcaaggccaccaataacaaagggaaggaaaaaatttactccgctgagcgctttttgattgcgaccggagagcgacccagatacctgggcattcccggtgataaagaatattgcatttcttcggatgacctgttctcactgccgtactgccctggaaagaccctcgtcgtgggggcaagttatgtcgcactcgagtgcgcgggattcctggcagggatcggactcgacgtcaccgtgatggtgcgttcaatcctccttagagggttcgaccaggacatggctaacaaaatcggcgaacatatggaggagcacgggatcaaattcatacggcagttcgtccctatcaaagtcgagcagattgaggccggaaccccagggagactgcgtgttgtggctcagtcaacgaactcagaggagatcattgagggtgaatacaataccgtgatgctcgcaataggcagagacgcatgtactcggaagatcgggttggagaccgtcggggtcaaaattaatgaaaaaaccggcaaaatccccgtcacagatgaggagcagaccaacgtgccatacatttatgcaattggagatatactcgaagacaaagtggagctgacccctgtcgcaatccaggccggtcgcctactggctcaacggctctatgccggatcgactgtcaagtgcgactatgagaacgtgccaaccacagtgtttaccccactggagtatggagcatgtggcctgtccgaggagaaggccgttgagaaatttggcgaggaaaatatagaagtttaccattcatatttttggccactcgaatggacaattccaagtcgggacaacaacaagtgttacgcaaaaatcatctgcaacaccaaagacaatgaacgagtagtcgggttccatgtgcttgggccaaacgcgggagaggtaacccaggggttcgccgcagccttgaaatgtggtttgaccaaaaaacagttggacagcaccatcggtatccatccagtttgcgcagagttttttagcttcatctag

SEQ ID NO: 31098 - DNA, 1650 bp, synthetic construct
  misc_feature 1..1650: note = Description of Artificial Sequence: Synthetic coding sequence
  source 1..1650: mol_type = other DNA
atgtcctgcgaggatggtcgtgcgctcgaaggaactttgtctgaacttgccgctgaaacggatctgcccgtggtcttcgtgaaacagcgaaagattggaggccatggccctacactcaaggcttatcaggaaggacgtcttcagaagctgctgaagatgaacggtcccgaagatctcccaaaatcctatgattacgacttgattatcatcggtgggggtagtggcggtctggcggcagctaaagaggcagcccagtatggaaagaaagtgatggtgcttgatttcgttacacctaccccactgggtacacgatggggactaggaggcacttgtgtcaacgtgggctgcataccgaaaaagctgatgcaccaggcggctctcttggggcaagcccttcaggactcgcgaaactacggctggaaggtggaggagactgttaaacatgactgggatcggatgatcgaagccgtgcaaaatcacattggaagcttgaactggggatacagagtcgctttgcgcgagaagaaagtcgtctacgaaaacgcctacggtcagtttatcggaccccatcgcatcaaagcgactaacaataaaggcaaggaaaaaatctactccgccgagcggtttctgattgcgaccggggagcgaccgagatatcttggcatcccaggcgataaagaatactgcatcagctccgacgacctcttcagtttaccttactgccctggcaaaaccctggtcgtcggcgcatcatatgtagccttagagtgtgctggctttctggctgggatcgggttggacgtcaccgtaatggtgcggtccattctattacgcggtttcgaccaagacatggccaataagatcggggaacacatggaggagcacggaatcaagttcattcggcagtttgtccctataaaggtggagcagattgaagctggtacccctgggagattgagggtcgtagcccagagcactaactccgaagagattatcgagggagagtacaacaccgtgatgcttgccattggaagggacgcctgcacgcggaaaatcggactggaaacagttggggtgaaaattaacgaaaagacaggcaagattccagtgaccgacgaagaacagactaatgtgccgtacatctacgccataggggatattttggaggataaggtcgaactcacccccgtcgccatccaggccggacgactgcttgcgcagcggctgtacgctggaagcacagtaaagtgtgattacgaaaatgtgcctaccaccgtgttcaccccattagaatatggcgcttgtggactgagcgaggagaaggccgttgaaaagtttggagaggagaacatagaagtgtatcacagttatttctggcccctggagtggacaattccaagcagagataacaacaagtgctacgcgaaaattatctgcaacacaaaagacaatgaaagagtggttggattccatgtgctcggcccaaacgccggagaagtgacacaggggtttgctgcagccctgaagtgtggacttacaaagaagcagttggattccacgattggcattcacccagtctgcgccgaggtctttacgaccttgtcagtgacaaagcggagtggcgcatctatcttgcaagctgggtgttag

SEQ ID NO: 31099 - DNA, 1626 bp, synthetic construct
  misc_feature 1..1626: note = Description of Artificial Sequence: Synthetic coding sequence
  source 1..1626: mol_type = other DNA
atgctcagcagacttgtgctgaattcatgggcacaagccatcattaggcccaggcctccaaaggtactgggcctgcaagtaacaaccttctctgaagcttatcaggaggggaggttgcagaagctcctgaagatgaacgggcctgaagacttgcccaaatcctatgactacgaccttatcattatcggaggcggaagtggtgggctggctgcagccaaggaagccgcacagtatggcaaaaaagtcatggtgctggacttcgtgactcctacacccctgggaaccagatggggcctgggcggtacatgtgttaatgtcggatgtatccccaagaaactaatgcaccaagcagccctgctcggtcaggccctgcaggatagtcgcaattatgggtggaaagttgaggagactgtcaaacatgactgggacagaatgattgaggccgtgcaaaaccatattggatccctgaactggggttaccgcgtagccctgcgggaaaaaaaggtcgtttatgagaatgcttacggccagtttattgggccacaccgcatcaaggcaactaacaacaaaggcaaggagaagatctactcagccgagaggttcctgattgccaccggcgaacgacctagatacctgggcattcctggcgataaagaatattgcatctccagtgatgatctgttctcccttccctattgtcccggtaagaccttagtagtgggagctagttacgtggccttggaatgtgctgggtttttagcagggattggcctggatgttacagtgatggtcagaagtatcttgctaaggggatttgaccaggatatggctaacaagattggcgagcacatggaagaacatgggatcaagtttattcgacagtttgttcccatcaaggtagaacagatcgaggcagggacacctgggagacttcgtgtggtggcacaatccaccaatagcgaggagattatcgagggggagtataatacagtcatgctagcgatcggtagggatgcctgtactcggaagattggcctggagactgttggagttaagattaatgagaagactggtaaaataccagtgaccgatgaagagcagacaaacgtcccctacatatatgcgattggggacatcctcgaggacaaggttgagctgactccagtggccattcaggccggtcgcttacttgctcagcgtctctatgccggttctacagtgaagtgtgactatgaaaacgttccaacaaccgtattcacacccttggagtatggtgcatgtggactgtctgaggagaaggccgtggagaagttcggggaagaaaatatcgaggtgtatcacagctatttctggcccctggagtggaccataccctcaagggacaacaacaagtgctacgccaagatcatctgtaatactaaggacaacgagcgggtggtcggattccacgtcctggggccaaacgcaggtgaagtgacacaaggttttgcagctgcgctgaagtgcggccttactaagaagcagctggactcgaccattgggattcaccccgtctgcgctgaggtcttcaccacactgagcgtgacaaagagatccggcgcttctatactgcaggccggatgctag

SEQ ID NO: 31100 - DNA, 1839 bp, synthetic construct
  misc_feature 1..1839: note = Description of Artificial Sequence: Synthetic coding sequence
  source 1..1839: mol_type = other DNA
atgcctgtggatgactactggttgtgcctaccagcgagctgcgctcgtcccttcgtccagaccgtgagagtcgtccagtcatgtccacattgttgctggtttccgggagtactgccaagcgttccggagccccttcgcatgcccgctatgcttccaaccgggagccattcggcagtgctcccaccctcacactgctccacagctcccccttccacaagccaggaaccgtccagttccgcggatcctaagctctgcttatcccctccaacaagcgacagccgtcaggaaaggaatgttcagtttggcctggcataccaggaggggcgactccaaaagctcctgaagatgaacggcccagaggaccttcctaaatcgtatgactacgacttgatcattatcggcggaggttcagggggtttggctgctgcaaaggaagctgcccagtatggtaagaaggttatggtgcttgattttgtgactccaacgcccctggggacaagatggggtttgggaggcacatgcgtgaatgtgggttgcatccctaagaagttgatgcaccaggcagccctcctggggcaagccttacaggacagccgaaattatgggtggaaggtggaagagactgtgaaacacgattgggacaggatgattgaggcggtgcagaatcacataggttctctgaactgggggtaccgagtggctctccgggagaagaaggtagtttacgaaaatgcttatggtcaatttattgggccacaccgcatcaaagccactaacaataagggaaaagagaagatctacagtgcagaaaggtttcttatcgcaacaggggaacgacccaggtacttaggaatccctggggacaaggagtactgcattagttcagacgatctctttagcctgccctattgtccaggaaaaacacttgttgtgggcgcatcttatgtcgccctggagtgtgcaggcttcctggcaggtatcggcctggacgtgactgtgatggtccgcagcattctgctgcgaggcttcgatcaggacatggccaataaaattggagaacacatggaggaacacggaattaaatttattcggcagtttgtgccaataaaggtggagcagatcgaggctggtacacctggccgtctaagggtggtagcccagagtacaaactccgaagaaattatcgagggtgaatacaacaccgtaatgctggccataggtagagacgcctgcactaggaaaatcggtctggagactgtcggcgtcaagatcaatgaaaagaccggcaagatcccagtgaccgacgaagaacagacaaatgttccttatatctatgctattggggacattctggaagacaaagtcgaacttactccagtcgccatacaggctgggaggctgctcgcgcagcgcttgtacgccggatcaaccgtgaagtgtgattacgagaatgtgccaacaaccgtgtttactcccttggaatacggggcttgtggcttaagtgaagagaaggccgtcgagaagttcggtgaggagaacatcgaagtctatcattcctatttctggcccctggagtggaccatccctagtagagataataacaagtgctatgcgaaaataatttgtaacacgaaggataacgaaagagtggttggctttcacgtgctgggacccaatgctggcgaggtcacacagggcttcgccgctgccctgaaatgtggcctcacaaaaaaacagctggacagcacaattggaatacacccagtttgcgccgaagtcttcacgaccctgtctgttaccaaaagatcaggtgcgagtatcctccaagccggatgctag

SEQ ID NO: 31101 - DNA, 1944 bp, synthetic construct
  misc_feature 1..1944: note = Description of Artificial Sequence: Synthetic coding sequence
  source 1..1944: mol_type = other DNA
atggggtgcgcagaaggaaaggctgttgcagctgccgcaccaacagaattgcagactaaggggaagaatggtgacggtcgcaggcggtcagctaaagaccatcatcctgggaaaacactgcccgaaaatcctgcagggtttacctcgaccgccacggccgactccagagcgctacttcaagcttacatcgacggacatagcgtagtaattttctccaggtccacatgcacaaggtgtactgaggtcaaaaagctattcaagtccctatgcgtgccctatttcgttctggaattggatcagaccgaagatgggagagcgctggagggcaccctcagcgagctggcagcggaaaccgatctccccgtcgtttttgtgaagcagcgcaagataggaggacacgggccaaccctgaaagcgtaccaggaggggaggcttcagaagctgctgaagatgaacgggcctgaggatctgcctaagtcctacgactacgatcttataattattgggggaggatcagggggactagccgcagctaaggaagccgctcaatacggcaagaaggttatggtgctcgatttcgtcacccccacacctcttggaactcggtggggcttgggcggaacttgcgtcaacgttggttgcattccaaagaagctgatgcaccaggccgctttgttgggtcaggcgttgcaggattcccgaaactacggctggaaggtggaggagactgtaaaacatgattgggatcgcatgatagaagccgttcaaaaccacattggaagtctgaattggggctatagggtggccctccgcgaaaaaaaggtggtctatgaaaatgcttatgggcaattcattggccctcatcgaatcaaggctacgaacaacaagggcaaagaaaagatttatagtgccgaacgatttcttattgccactggtgaacgccctaggtacctcggaatcccaggtgacaaggaatattgcataagtagcgatgatctattctcacttccctactgccctgggaaaactttggtggtcggcgctagttatgtagccctggagtgcgccggattcttagcgggtattgggcttgacgtgactgttatggtccggagcattctcctgagggggtttgaccaggacatggccaataagatcggcgaacatatggaggagcatggcattaagtttatcagacagtttgtgcccatcaaagtggagcaaattgaggctggcactccaggaaggctaagggttgtcgcccaaagtaccaactcggaggaaattatagaaggagagtataataccgtgatgctcgcgatcgggagagatgcctgcacccgaaagatcggtctggagactgtgggggtgaaaatcaatgagaagaccggaaaaatacccgtgacagacgaagagcagacaaacgtcccatatatttatgcaatcggagacatcctggaggacaaagtggagctgacacccgtggctatccaggccggacgcttattggcccaacggctctatgctggttcaacagtgaaatgtgactatgaaaacgtgccaaccacagtgttcacccctctcgagtacggcgcttgcggtttatccgaagaaaaggcagtggagaaattcggtgaagagaatattgaggtttatcactcatatttctggccactagaatggacgataccttccagagacaataacaagtgttacgcaaagattatttgcaacacgaaagacaatgaacgagttgtgggatttcacgtccttggacccaatgcaggtgaagtcacccagggattcgcagccgcattgaagtgtggcttgaccaagaagcagcttgacagcacaatcggaatccaccccgtgtgcgctgaggttttcacgacactgagcgtgaccaaacgctctggcgcatctatcttgcaagcaggttgctag

SEQ ID NO: 31102 - DNA, 1500 bp, synthetic construct
  misc_feature 1..1500: note = Description of Artificial Sequence: Synthetic coding sequence
  source 1..1500: mol_type = other DNA
  modified_base 1492: mod_base = OTHER; note = uracil
atgaacggacccgaggacttgcccaagtcttatgactatgacctcatcataatcgggggtggctctgggggtctcgctgccgctaaggaagccgctcaatacgggaaaaaggtgatggtcctggattttgttacccccactcccctcggtaccagatggggccttggtggtacttgtgttaacgtcggatgtattccaaaaaagttaatgcaccaggcggcacttctgggacaagccctccaggactcccgaaactacggttggaaagtggaggagacagtgaaacatgactgggaccggatgattgaggcagtgcaaaaccacattggctctctcaattgggggtacagggtagccctgcgcgagaaaaaagtggtgtacgaaaacgcgtatggacagttcattggtccgcaccgcattaaagcaaccaacaacaagggcaaggaaaagatttactccgctgaacggttccttatagccaccggggagagacccaggtatctggggattccaggcgataaagaatattgtatcagtagtgatgatctattctcacttccctactgtccaggtaagacgctggtcgtgggcgcatcatacgtagccctggaatgtgccggttttctcgcagggatcggattggacgtgacggtgatggttagaagtatactgcttaggggtttcgaccaagatatggcaaataagattggcgaacacatggaagagcacggcatcaaatttattcggcagttcgttcccattaaagtagaacagatcgaagccggaacaccagggagactcagagtggttgctcaaagtacaaacagcgaggagatcatcgagggcgaatataatacggtcatgttagccatcgggcgagacgcttgtacccgcaaaatcggtctggagacggtgggcgtgaaaattaacgagaagacaggcaagataccagtcaccgatgaagaacagacaaacgtgccatacatctacgccattggcgatattttagaagacaaggtcgagctcaccccagtggccatacaggccggacggctcctcgctcagcgcttgtatgccggttcaacagttaagtgtgattatgaaaatgtgccaactacagtgttcacacccctcgaatatggcgcttgtgggctgtctgaggaaaaggcggtagagaaatttggagaggagaatattgaggtttatcatagctacttctggcccctggagtggaccattcccagtcgagacaacaacaagtgttacgcgaaaataatttgtaacacaaaggacaacgaacgagtcgtaggcttccacgtacttgggccaaacgccggagaagtgacccagggcttcgccgctgccctcaagtgcggtctgacgaagaagcagctggactctactatcggaattcatcctgtttgtgcagaggtatttactacactcagcgtgaccaagcggtccggcgcatccatacttcaagcaggctgctgaggatag

SEQ ID NO: 31103 - DNA, 1500 bp, synthetic construct
  misc_feature 1..1500: note = Description of Artificial Sequence: Synthetic coding sequence
  source 1..1500: mol_type = other DNA
  modified_base 1492: mod_base = OTHER; note = uracil
atgaacgggcctgaggacctgcctaagtcatacgactacgacttgattatcattggcggagggtcgggcggactcgcagccgcaaaggaggccgcacagtatggtaagaaagtgatggtactggacttcgttaccccaacacccctgggcacaaggtggggactgggcggaacttgtgtgaacgtgggatgtataccgaaaaagctcatgcaccaggctgccctcctggggcaggcgctgcaggattccaggaattatggatggaaagtagaggagaccgtgaaacacgattgggatcggatgatcgaagcagtgcagaatcacataggtagccttaactggggctaccgcgtcgccctgcgtgaaaagaaagtcgtctatgagaacgcatatggccagtttattggcccacacagaataaaggctacaaataacaagggcaaggaaaaaatatattccgctgagcggtttctaatcgctacgggcgaaagacctaggtatctaggcattcctggggacaaggaatattgcataagctcagacgatctcttttctttgccgtattgccctggtaaaaccttagtggtgggggcttcctacgtggcccttgagtgtgctggttttctggctggcattggattagacgtgacagtaatggtcagaagtattctacttaggggattcgatcaggatatggcaaataagatcggcgaacatatggaagagcacggaatcaagttcatacgccaatttgtacccatcaaagtagagcagattgaagcgggtacacccggaagactgagggtcgtggcccagagcaccaatagcgaggagatcatcgagggcgaatataacaccgttatgttggccattggcagagatgcctgtacacgcaagataggcctcgaaacagtaggtgtcaaaattaacgagaagacaggtaagattcctgtgacggacgaggaacagactaatgtgccatacatttacgccattggggatattctggaagataaggtagaactcactcccgtggcaattcaagccggacggttactggcccagagattgtacgctggttcaacggtgaagtgcgactacgagaatgtccctactaccgtctttactccattggaatatggtgcttgcgggctgagtgaagaaaaagccgtagagaagttcggcgaggagaacattgaggtgtaccactcttatttttggccactggagtggacgattccttctagggacaataataagtgctacgccaagattatatgcaacacgaaggataatgagcgggtggtcggatttcacgtgctgggacctaacgcaggcgaagtgactcagggatttgctgcagccttgaagtgcggacttaccaagaagcaattggacagtaccatcggcattcatcccgtctgtgctgaggtgtttacaacactgtccgtgaccaagcgctcgggcgcatctatcttgcaggctggctgctgagggtag

SEQ ID NO: 31104 - DNA, 1950 bp, synthetic construct
  misc_feature 1..1950: note = Description of Artificial Sequence: Synthetic coding sequence
  source 1..1950: mol_type = other DNA
  modified_base 1942: mod_base = OTHER; note = uracil
atgggctgcgccgaaggaaaggctgtggcggcagccgcacctacagagctgcagactaagggcaagaacggggacggaagacgacgatcagcgaaagaccatcatccaggtaaaaccctgccagaaaatccggctggtttcacatccaccgctaccgcggactcccgcgcactgcttcaggcttacattgatgggcacagtgtggtcatattttcccgatccacatgtacaaggtgcacggaggttaagaagctgttcaagtctctatgtgtgccatatttcgtgctggagctcgaccagactgaagacggaagagccctcgagggaacattatcagaactggcagctgaaactgacctcccagtcgtctttgttaagcagagaaagataggcggacatggacccacgctcaaggcttaccaggagggacggttacagaaattgttaaagatgaacgggcctgaggacctgccgaagtcatacgattacgatttgatcattattgggggaggtagcgggggtctggcagcagctaaagaagctgcgcagtacggaaaaaaggtcatggttctggactttgttacgcctactccacttggaacccggtggggcctcggaggaacttgtgtcaatgtgggatgcattcctaagaagctgatgcaccaggctgcgcttttaggacaggccctccaggattctaggaattacggctggaaggttgaagagaccgtaaaacacgattgggaccgaatgattgaggccgtccagaaccatatcgggagcctcaattggggataccgggttgccttacgtgaaaaaaaggtggtatacgagaatgcatacggccaattcatcggaccacataggatcaaggccacaaataacaagggcaaagagaagatctattccgccgaacgatttctgatagccacaggtgaaagaccgcgatatcttggcattcccggtgataaggagtattgtatctccagcgatgatctgtttagtctgccctactgtccagggaagacactggtcgtcggcgcatcatatgtcgcactcgaatgtgcaggcttcttagcaggcataggattggacgtcaccgttatggtgcggtccatcttgctccgtggattcgaccaggatatggctaacaagatcggggaacatatggaggaacatgggatcaaattcatcagacagtttgtccccatcaaggtggagcagatcgaggctgggactccgggacggctgcgggtggtggcacagtctaccaactctgaggagatcattgaaggtgagtacaatactgtgatgttggctatcgggagagacgcgtgcaccagaaagatcggcctggaaactgttggagtcaagatcaatgaaaagacagggaaaattccagtgacagatgaggaacagaccaacgttccgtatatatatgcaatcggcgacatactggaggacaaagttgagttgacacctgtggcaattcaggccggtcgcctgcttgcccaacgactctatgctggtagtaccgtgaagtgtgactacgaaaatgttccgacgaccgtgtttacccctctggagtacggggcttgtgggctctcagaggaaaaggctgtggaaaagttcggagaggaaaatattgaggtgtatcattcctacttttggcctctggagtggactatcccatctagggataataacaagtgctatgcgaagatcatttgtaacacaaaagacaatgagcgtgtggtggggttccacgtcctagggccaaacgctggcgaggtgacccagggctttgcggcagccctgaaatgtggtcttactaagaaacagttagattcaaccatcggtatccacccagtctgcgccgaggtcttcaccaccctatctgtgaccaaaaggagtggtgcatcaatcttacaggctggttgctgaggatag

SEQ ID NO: 31105 - DNA, 213 bp, synthetic construct
  misc_feature 1..213: note = Description of Artificial Sequence: Synthetic coding sequence
  source 1..213: mol_type = other DNA
atgaacggtccagaagatctgcctaaatcttatgactatgacttgatcatcattggagggggttcggggggactcgctgcggctaaggaggccgcacagtacgggaaaaaagtgatggtgcttgacttcgtgacacctacaccactcggaacccgatgggggctggggggaacttgcgtgaatgtgggctgcatacctaaaaaactgatgtag

SEQ ID NO: 31106 - DNA, 1632 bp, synthetic construct
  misc_feature 1..1632: note = Description of Artificial Sequence: Synthetic coding sequence
  source 1..1632: mol_type = other DNA
  modified_base 1624: mod_base = OTHER; note = uracil
atgctgtcacggctggtgttgaacagttgggctcaagccatcatacgccctcggccacctaaagtgttaggtcttcaggtaacaacattctcagaggcgtaccaagagggtagattgcagaaactgttgaaaatgaacggccctgaagatctgcctaaaagctacgattatgatctcatcattatcggcggtggaagcggcggtctcgcagccgcaaaagaagccgctcagtacgggaagaaagtcatggtcctggactttgtaacacctacccctctggggactcgatggggcctgggcggaacctgcgttaatgtgggttgcattccaaaaaagcttatgcatcaggctgccttgttaggccaggcattgcaggatagccgcaattatggttggaaggtagaagagaccgtgaaacatgactgggatcgcatgatagaggcagtccagaatcatataggtagtttaaattggggctatcgagtggctctaagggaaaaaaaggtggtttatgagaatgcatacggccaattcatcgggcctcatagaataaaagccaccaacaacaagggaaaggaaaagatttacagcgccgaaaggttcctcattgctacaggagagcgcccacggtacttgggcatccctggggacaaagaatattgtatctcttccgatgacctattctcgcttccatactgtccaggtaagacactagttgtgggcgcatcctacgtggcactggagtgcgccggattcctggccggaatcggcctggacgtgactgttatggtgcgaagcatacttttgcggggatttgatcaagacatggcaaacaagattggggaacacatggaggaacatgggattaagttcatcaggcaattcgtgccaattaaagtagagcagatcgaagccggaacccctgggagactgagggtggtagcccagtctacaaattctgaggaaatcatcgagggcgaatataacaccgttatgctcgccattgggagagacgcgtgcactcgcaagatcggcctggagacagtcggcgtgaaaatcaacgagaaaacgggaaaaattcccgtgaccgatgaggagcaaacgaacgtaccctacatctacgcgatcggcgatattctggaggacaaggtggagctcacacccgtcgcgatccaggccggtaggcttctggcccagaggctctacgctggctccacagtgaagtgtgattacgaaaacgtgccaacaaccgtgttcacacctctcgagtatggggcttgcggcctttccgaggagaaagccgtggagaagtttggcgaggagaacatcgaggtgtatcactcttacttctggccgctggagtggacaatccccagtcgagacaataacaagtgctacgctaagattatatgtaacactaaagacaacgaacgcgtggttgggtttcatgtgctgggacccaatgccggtgaggtaacccaaggattcgcggctgcgctgaagtgtgggctgacgaagaaacagctagactctacaatcggaatacatcctgtttgtgctgaggtgttcacaactttgagtgttacgaagagatctggagcttccatcctgcaagcaggctgctgaggatag

SEQ ID NO: 31107 - DNA, 315 bp, synthetic construct
  misc_feature 1..315: note = Description of Artificial Sequence: Synthetic coding sequence
  source 1..315: mol_type = other DNA
atgaacggcccagaagatctgcccaaatcgtacgactatgatctgataattatcggcggtgggtccggcggactggctgcggcaaaggaagcagcccagtatggcaaaaaagtcatggtgctggatttcgtgacaccgacaccactgggcacccgctggggactgggcggaacctgcgtcaatgtagggtgcattcccaagaaactcatgcatcaggccgcactcctcggccaggccctgcaggatagcagaaactatggatggaaagtcgaggagactgtaaagcacgactgggatagaatgattgaagcctag

SEQ ID NO: 31108 - DNA, 1656 bp, synthetic construct
  misc_feature 1..1656: note = Description of Artificial Sequence: Synthetic coding sequence
  source 1..1656: mol_type = other DNA
  modified_base 1648: mod_base = OTHER; note = uracil
atgtcgtgcgaagacggcagggcactcgaaggtacattaagcgagcttgcagccgagacagacctacccgtggtgttcgttaaacagcggaaaatcggcggacatgggcctacactgaaagcctatcaggaaggccgtctgcagaaactgcttaagatgaacggacccgaagatctgccaaaatcatacgattatgacttgattataattggaggtggctccgggggtctggcagccgctaaggaggcggctcagtatggcaagaaggtgatggtattagatttcgtgactcccaccccccttgggacgagatggggcttgggcggaacctgcgttaacgtgggttgcatacctaaaaagctcatgcatcaggctgctcttctggggcaggctctgcaagactctcgcaactatggatggaaagtcgaagaaacagtgaagcacgactgggatcgaatgattgaggctgtacagaaccatattgggagcctaaactgggggtacagggtggccctcagggagaagaaggttgtatatgaaaatgcttacggtcagttcattggcccacaccggataaaagcaacaaacaacaagggaaaggagaagatctatagcgcagaacggtttctcatcgccaccggagaacgaccaaggtacttgggcatcccgggagacaaagaatattgtatctcatccgacgaccttttcagcctaccctactgccctgggaagacgctcgtggtgggagcatcgtatgtcgcacttgaatgcgctggctttctcgcgggaataggattggacgtaaccgttatggtaagatccatcctgctacgaggctttgaccaggacatggcaaacaagatcggggagcacatggaggaacatggcataaagttcattagacaattcgtgcctatcaaagtcgagcagatcgaggcaggaacaccaggtaggctcagagtcgtcgctcagagcaccaacagtgaggagatcatcgagggtgagtataacactgttatgctcgcaattgggcgagacgcttgcacccgcaagattggtctggagacagtcggggtcaaaattaacgaaaagacaggaaagatccccgtgacagacgaagaacaaaccaacgtcccatatatatacgccatcggggacatcctggaggataaggtggaactgacccctgtcgctattcaggccggacggctgctcgctcagcgactttacgcaggatccacagtgaaatgcgactatgaaaacgttcccaccaccgtgttcactccactcgagtacggggcttgtggactgtcagaggagaaagctgtggagaagttcggcgaggagaatatcgaagtttaccacagctacttttggcccctagagtggaccatcccgtctagagacaataacaagtgctatgctaagatcatctgcaacacgaaagacaacgagagggtggtcggctttcacgtgcttgggccaaacgccggagaagtgacacagggatttgcagcagccctgaaatgcgggctcacgaagaaacaacttgattcaacaatcggcattcatcctgtgtgtgctgaagtcttcaccaccttgagcgttacaaaaaggagtggagcctctatcttgcaggctggatgttgaggctag

SEQ ID NO: 31109 - DNA, 1707 bp, synthetic construct
  misc_feature 1..1707: note = Description of Artificial Sequence: Synthetic coding sequence
  source 1..1707: mol_type = other DNA
  modified_base 1699: mod_base = OTHER; note = uracil
atgcccgctatgctgccgaccggatcccatagtgcggtactgccgccttcccactgttcgacagcacccccttctaccagccaagagccaagttcttctgccgaccccaagttatgcctcagtccgccaacaagcgactcccggcaggagcggaatgtgcagttcgggctcgcctatcaggaagggcgtcttcagaaattgctcaaaatgaacggcccagaagatctccccaagtcctatgactatgatttgatcatcattggtggaggaagcggcggtttggccgcagccaaggaggcagcccagtatggtaagaaagttatggtgctggattttgtgaccccgactcctttgggcacccgatggggtcttgggggaacatgcgttaacgtcggttgcattcctaaaaagctgatgcatcaggctgctttacttgggcaggccctgcaagactctaggaactacggatggaaagtggaggagaccgtgaaacacgactgggacaggatgatcgaagcagtgcagaatcatattggctctcttaattgggggtaccgggtggctcttagggagaagaaggtagtatatgaaaatgcgtacggccagtttattggtccccaccggattaaggccaccaacaataagggcaaagaaaagatttattccgccgagcgattccttattgcaacaggcgaacgacctcggtatcttgggatccccggagacaaagaatactgtatttcatctgacgaccttttttcgctcccttactgtcctggcaagaccctagtggtgggagcgagctacgtggcactggaatgtgcaggcttcctcgctggaattggcctggacgtaactgttatggtgcggtcaatcctcctgaggggtttcgaccaggatatggcaaacaagatcggcgaacacatggaagagcacggtatcaagttcatccgacagttcgttcctatcaaggtcgagcagattgaagcgggtacgccagggagacttcgtgttgtcgctcagtccacaaactccgaggagattatagagggggaatataacaccgttatgctggcaataggcagggacgcatgcacccgcaagattggcttagaaactgttggcgttaaaattaacgagaagaccgggaaaattcccgtgacggacgaggagcagacgaatgttccatacatctatgccatcggggatatcctggaggataaggtggagttaacgccagttgccattcaagccggtcgccttctggcacagcggctgtatgctggtagtacagtgaagtgtgactacgaaaacgtgcctacaacggtcttcacgcccttggagtatggagcctgcggcctcagtgaggagaaggctgttgagaaatttggggaagaaaatatagaagtctaccacagctatttctggcctctcgagtggacgattccaagtcgtgacaacaataaatgctatgctaaaattatctgtaatacaaaagacaatgaaagagtcgtgggcttccatgtgcttgggccaaacgctggagaagtcacgcagggtttcgccgctgccctcaagtgcgggctaactaagaagcagctggattcaacgatcggcatacaccccgtgtgcgctgaagtcttcaccaccctgtccgtgacgaaacgttctggcgcaagtatcctgcaagccggatgctgaggctag

SEQ ID NO: 31110 - DNA, 528 bp, synthetic construct
  misc_feature 1..528: note = Description of Artificial Sequence: Synthetic coding sequence
  source 1..528: mol_type = other DNA
atgaacggacccgaagacctgccgaaatcctatgattatgatctgatcatcatcggagggggaagtggcggactagctgcagcgaaggaggccgcacaatacggtaaaaaggtgatggtacttgattttgtaactcccacacccctcggcacgcgctggggactggggggaacctgtgtgaacgtggggtgtatccctaaaaaattgatgcaccaggctgcgcttttaggccaggcccttcaggatagtcgaaattatgggtggaaagtcgaagaaacagtaaaacatgactgggacagaatgatcgaggcagtgcagaatcatatcggatccctaaattggggatacagggttgccttgcgggagaaaaaagttgtatacgaaaatgcctacggtcaattcattggtcctcaccgcattaaagcgaccaataataaaggcaaggaaaagatttactccgccgaaaggttcttaattgcgactggcgaacgtcctaggtacctcggcatccctggcgacaaggagtag

SEQ ID NO: 31111 - DNA, 162 bp, synthetic construct
  misc_feature 1..162: note = Description of Artificial Sequence: Synthetic coding sequence
  source 1..162: mol_type = other DNA
atgaacggaccagaagacctgcctaagtcctacgattatgaccttattattattggcggtggaagtgggggactcgccgctgctaaggaggccgctcagtatggcaaaaaagtcatggtcctggacttcgtcactcctacccctttaggcacacgctggtag

SEQ ID NO: 31112 - DNA, 219 bp, synthetic construct
  misc_feature 1..219: note = Description of Artificial Sequence: Synthetic coding sequence
  source 1..219: mol_type = other DNA
atgaacggccctgaggatctgccaaaatcttacgattatgacctcataatcattggtgggggatctggcggacttgcagcggctaaggaggccgctcagtacggtaaaaaggtgatggtgcttgattttgtgacacccacaccactgggtacccgctggggactgggtggtacctgcgtgaatgtgggatgtatcccaaagaagctcatgcatcaatag

SEQ ID NO: 31113 - DNA, 420 bp, synthetic construct
  misc_feature 1..420: note = Description of Artificial Sequence: Synthetic coding sequence
  source 1..420: mol_type = other DNA
atgctgtctcgccttgttcttaactcctgggcccaggccattataaggcccaggccacccaaggttctgggtctccaagttactaccttctcggaggcgtaccaagaaggtcgactccaaaagctgctgaaaatgaatggccctgaagacctgcccaagtcatacgactacgacttgattatcataggtgggggatcaggaggtctagccgctgccaaggaggccgcacagtatgggaagaaagtaatggttctcgatttcgtcacccctacaccattgggtactagatggggccttggtggaacctgcgttaacgtcgggtgcattcccaaaaaattaatgcatcaggctgcgctccttggacaagcacttcaagactccaggaattatggatggaaagtggaggagaccggaatgtag

SEQ ID NO: 31114 - DNA, 1380 bp, synthetic construct
  misc_feature 1..1380: note = Description of Artificial Sequence: Synthetic coding sequence
  source 1..1380: mol_type = other DNA
atggtcctagatttcgtgaccccaaccccgctggggacccggtggggcctgggtgggacttgcgtgaatgtaggttgtatacctaagaaactcatgcaccaggctgcattgctgggccaggcactacaggactctagaaattatggctggaaggtggaggagaccgtgaaacatgattgggaccggatgatcgaggcagtgcaaaaccatatcgggtctctgaactggggttatcgggtggcgctgcgggagaaaaaagtcgtatacgagaacgcctatgggcagttcattgggcctcacaggatcaaggccacgaataacaaaggaaaggagaagatatatagcgctgaacgctttctaatcgcaacaggcgaacggcctcggtacctgggcattcctggcgacaaggaatactgtatatcctctgacgacctcttctctctgccgtactgtccgggaaaaaccttggtggttggagcttcctatgtcgcactcgaatgtgccggattccttgcagggatagggctcgacgtcacagtgatggttagatcgatcctcctgcgaggatttgaccaggatatggcgaacaaaattggagagcacatggaggagcacgggatcaaatttatacgccagttcgtccccattaaagttgagcagatcgaagcgggtactcctggtagactgcgagttgtggctcagtctacgaacagcgaagaaattatcgaaggcgagtacaacacagtcatgctggctatcggcagggatgcatgtacacggaaaatcgggttggagaccgtcggcgtgaaaattaacgagaagaccgggaagattcccgtgacagacgaggaacagaccaacgttccctacatttatgcgatcggtgacattcttgaagataaagtcgagctcacgcccgtcgcgattcaggcgggtcgcctgctagctcagcggctctacgcgggaagcactgttaagtgtgattacgagaacgtgcctacaactgttttcaccccacttgagtacggcgcttgtgggcttagcgaggaaaaggccgtggagaaattcggggaagaaaacattgaggtgtaccattcctatttttggcccctcgaatggacaatcccctcgagggataacaacaagtgctacgccaaaatcatctgtaacactaaagacaacgagagagtagttggctttcacgtgttgggaccgaatgcgggtgaggtgacacaaggattcgctgccgcactgaaatgcgggcttacgaagaaacagcttgatagtaccattgggattcatccagtgtgcgcagaagtgttcacgactttgtcagtgaccaaacgatccggcgcatctattctgcaggccggatgttag

SEQ ID NO: 31115 - DNA, 1644 bp, synthetic construct
  misc_feature 1..1644: note = Description of Artificial Sequence: Synthetic coding sequence
  source 1..1644: mol_type = other DNA
atggaagacggcagagcactagaaggcaccctgtcagagctcgctgccgagactgacctgcccgtggtttttgtcaaacaaaggaagatcggcggacatgggccaacactgaaggcctaccaagagggtaggttacagaagctgcttaaaatgaacggacccgaggacctgcctaagtcctatgactatgatctgattatcatcggcggagggagtgggggtctagccgctgccaaagaggcagctcaatatgggaagaaagtgatggttctggattttgtgactcctacacctctcgggactaggtggggtctgggcggtacctgcgtgaatgtgggctgcattccaaaaaagcttatgcatcaggccgcactgctcggccaagctctacaggattctcgaaactatggctggaaagtcgaggagaccgtgaagcatgattgggataggatgattgaggcggtgcagaaccatatcggctcactgaattggggttatcgggtggccctgcgtgagaagaaagtcgtatatgaaaacgcgtacggccagtttattgggcctcaccgcattaaggcaactaataacaagggtaaagagaaaatttacagtgctgagcgcttcctcattgcaactggtgaacggccacgctatttaggaattcccggtgacaaggaatattgtatctcttccgacgacctattcagtctcccctactgccccggaaagacgttagtcgtgggcgcttcctatgtagctctggagtgcgcagggttccttgcaggtatcggtttagacgttaccgttatggtgcggagcatcctgcttcgaggttttgatcaggatatggcgaataaaatcggcgagcacatggaggagcacgggattaagttcatcaggcaatttgtgccaataaaagtggaacaaattgaagccggaacccccggtagactacgtgtcgtggctcagtccactaacagcgaggagattatagaaggcgagtacaatacggtcatgcttgctatcggcagggacgcttgcactcgtaaaatcggtctagagaccgttggcgttaagattaacgagaagacaggcaaaatacccgttacggacgaggagcagactaatgtaccctacatttacgctattggagatatccttgaggataaggttgagcttacccccgtggccatacaagccggacggctgctggcgcagcgactgtacgccggttccaccgtaaagtgtgactacgaaaatgtcccaaccactgttttcacccccctcgagtacggggcatgcgggctgagtgaggagaaggccgtcgaaaagtttggggaagagaatatagaggtctaccatagttacttttggccactcgaatggacaattccttcacgggacaataacaagtgttacgctaagattatttgtaacactaaggataacgagcgagttgtcggctttcatgtgttggggccaaacgcgggtgaagtgacccaaggattcgccgctgccctaaagtgcgggttgactaaaaaacagttggactccactattggcatacatccagtctgcgctgaagtttttacaactctctctgttaccaaaaggagcggagccagtattctgcaggccggatgctag

SEQ ID NO: 31116 - DNA, 945 bp, synthetic construct
  misc_feature 1..945: note = Description of Artificial Sequence: Synthetic coding sequence
  source 1..945: mol_type = other DNA
atgggatcccaggcactgcctcccggtccaatgcagacgctgatcttctttgacatggaggcaaccggactcccattcagccagcccaaagtgaccgaattatgtcttctggccgtgcatcgatgtgccctggagagcccgccaacttcccagggaccgcctcccacagtacccccaccacctcgcgtggtagacaaactgagtctttgcgtagctcccggtaaggcctgctctccagcggcttcagagatcactgggctttccaccgccgtgctcgccgcacatggcaggcagtgtttcgatgataaccttgctaatctgttgttggctttcctgagacgtcagccacagccgtggtgccttgtggctcacaatggcgataggtacgattttcctctgctgcaagcagagctagccatgctcggcctcaccagcgctctcgatggcgcattctgcgtggacagtatcactgcccttaaggcccttgaacgtgccagttcgcccagtgaacacggccctcgcaagtcctactctttaggttccatatatacacgcctttacggtcaatctccgccagacagtcacaccgccgagggagacgtgctcgcactactctccatttgccagtggcgccctcaggctttgttacgatgggtggatgcccacgccaggcctttcggaactatccgaccaatgtatggtgtgacagcaagtgccaggaccaaaccaaggccaagcgcggtcacgaccaccgcccacttagctaccactcgcaacacatcccccagccttggtgaatcaagaggtacaaaggatctgcccccagtgaaggaccctggagctctctctagggaagggctgctggcacctctggggctcctcgcgatcctgacccttgcagtggccaccctgtatgggttatcattggctacacctggcgaatag

SEQ ID NO: 31117 - DNA, 1110 bp, synthetic construct
  misc_feature 1..1110: note = Description of Artificial Sequence: Synthetic coding sequence
  source 1..1110: mol_type = other DNA
atgggtcctggagccaggaggcagggtcgaatcgtgcagggtaggcctgagatgtgtttttgtccacccccaaccccacttccgcctctgaggattctcacattaggcacccacactcctacgccctgtagttctccaggctctgctgctgggacctaccctactatgggctcccaagctctgcccccaggacctatgcagactcttatctttttcgatatggaggccactggactgcctttttcccagcctaaggtgaccgagttgtgtctcctggcggtccaccggtgtgctttggagtcacccccaacaagccagggacctccacctactgtgccgcctcctccacgggtagtcgacaaactgagtttatgtgtagctcccggtaaggcttgctcgccagctgccagcgaaattactggcctgtcgactgctgtgctggccgctcacggccgtcaatgtttcgatgataatctcgctaatctgctgctggcctttctcagacggcagccgcaaccctggtgcctggtggcccacaacggagacaggtatgatttccccttgcttcaggctgagctcgcaatgcttggcttaacttccgccctggacggcgctttctgcgtcgacagtattactgcactgaaggcgctggaacgtgccagtagtcccagcgaacacggcccacgtaaaagttactcactggggagtatatacaccagactttatggtcagagcccaccagacagccatactgcagaaggcgatgtgctcgcactcctgtcaatctgtcagtggagacctcaggccctcctaagatgggttgatgcccatgctcgaccattcggcactatcaggcccatgtacggcgtgacagcttcagctaggacaaagccacgcccttctgctgtgactaccactgcccacctggctaccacccgtaacacatctccatctctgggcgagtcccggggaactaaagatctgccacccgtcaaggaccccggagctctctctagagaaggacttcttgctcccctggggctgctggccatcctgaccctggcagtggcgaccttatatggcctctcattggcaacaccaggagagtag

SEQ ID NO: 31118 - DNA, 528 bp, synthetic construct
  misc_feature 1..528: note = Description of Artificial Sequence: Synthetic coding sequence
  source 1..528: mol_type = other DNA
atgttgggtctcaccagtgccctcgatggagcattttgtgtggattctatcaccgcccttaaagctcttgagagagccagtagccccagcgagcacggacccaggaaatcttatagtttgggatctatatacacccggctttatggccagtccccaccagattctcatactgcagagggagacgttctcgctctgctgagtatttgccagtggagacctcaggccctgctgcgctgggtcgatgcgcacgctagaccgttcgggactatccgacccatgtatggggtcacagcaagcgcaagaacaaagcctcgcccttctgcagttactactactgcccacttagccacaactcgaaatacaagcccatcactgggtgagtcaaggggcactaaagacctgccgccagtaaaggatcccggagcactctcaagagagggcctactggccccactgggactacttgccattctgacgcttgctgttgctacactctacggtttgtcccttgctacgccaggcgagtag

SEQ ID NO: 31119 - DNA, 945 bp, synthetic construct
  misc_feature 1..945: note = Description of Artificial Sequence: Synthetic coding sequence
  source 1..945: mol_type = other DNA
atgggttctcaagcattgccacccggacctatgcagaccctaatatttttcgatatggaggccacaggattgccgttctcacagcccaaggtaacagagctctgcctccttgccgtacacagatgtgccctggaaagcccgcctacaagccaaggaccaccccctaccgtgcctccccctcctagggttgttgataagttatccctctgtgtagcccctggcaaagcctgttcacccgcagcaagtgagataactgggttaagtacagctgtgttggccgctcacggcaggcaatgttttgacgacaacctggctaatctgctgcttgccttcctgcgaagacagccacaaccatggtgtctggtagctcataacggcgatcggtacgattttccgctgctccaggctgagttagcaatgcttggtctgaccagtgccctcgatggcgcattttgcgttgacagtatcaccgccttaaaggcgctcgagcgggcatccagtccatctgaacatggacccagaaaatcctactcgttgggcagtatttacacacgtctgtacggacagtccccacccgactcccacactgccgagggagatgtgctggcgctgctgtctatttgtcagtggaggcctcaggctttgctccgatgggtcgatgcccatgcacgcccttttgggacaataaggccgatgtatggtgtgactgcatcggctaggaccaagcctagaccgtcggcggtcaccacgacagcgcacctggcaaccacccgaaacacctccccctctttgggggagtctcggggtacaaaggacctcccgccagtgaaggatccaggcgctctaagcagagagggtctgctggcgcctctgggcctgctggccatcctaacgctggcggttgctacactgtatggcctgtcactcgccaccccaggtgagtag

SEQ ID NO: 31120 - DNA, 915 bp, synthetic construct
  misc_feature 1..915: note = Description of Artificial Sequence: Synthetic coding sequence
  source 1..915: mol_type = other DNA
atgcaaactcttatctttttcgacatggaagcaacaggactgcccttctcccagccaaaggtgactgagctgtgtctgcttgccgtccaccgctgcgcgcttgagagcccgcctaccagtcaggggccacccccaacggtccctccacccccaagagttgttgataaactgagcctgtgtgtcgcaccaggaaaggcatgctcaccagccgctagcgaaattactggcctgtccaccgctgtgctggccgctcatggaaggcagtgtttcgacgataatttagccaatctactgctcgccttcctcaggaggcagccgcagccatggtgcctggtggcacacaacggagatcgctacgattttccgctcctgcaggcggaactggcaatgttgggcctgacctccgcactggacggcgctttttgtgtggacagtatcacagccctgaaagccctggagcgggcaagtagtcccagtgaacacggaccaagaaagtcctatagcctgggatccatttatactcgcttgtacggccagagtcctcctgattcgcataccgccgagggcgacgttctcgccctactgtctatttgccagtggcgtccccaggcactgctgcggtgggtggacgcccatgcaagaccctttggcacaatccggccaatgtacggcgtgaccgctagtgcaaggacgaagccacgacctagtgcggtgaccaccaccgctcacctggcaaccactcgaaacacgagcccgtcgctgggggaatcacggggaacaaaggacttgccacccgtgaaggaccccggagccctttcccgagagggactgctcgcgccactgggcctgctggccatcctgacactggccgtggcaacactgtacggtttatcccttgctacccccggagagtag

SEQ ID NO: 31121 - DNA, 528 bp, synthetic construct
  misc_feature 1..528: note = Description of Artificial Sequence: Synthetic coding sequence
  source 1..528: mol_type = other DNA
atgctgggattgacctcggctcttgacggagccttttgcgtcgacagcatcaccgctctgaaggccctggagagagccagtagcccctcagagcacggacccagaaagagttattccctcgggtcgatctatacgcggctgtacggccaaagcccccctgacagtcacaccgccgagggcgatgtcctggctctactgtccatttgtcagtggcgccctcaggcactgttacggtgggttgacgcgcacgccaggccgtttggcaccatccgtcctatgtatggcgtcaccgctagcgcccgaactaagcccagaccatcagcggttacaacgacagcccatttagcaactactagaaacacctcccctagcctgggggagtccaggggaaccaaagacctgccaccagttaaggaccccggagcattaagccgcgagggcctcctggctcccctggggctgctcgcaattttgactctggccgtcgctaccctctatggcttaagtttggccacacccggtgagtag

SEQ ID NO: 31122 - DNA, 3513 bp, synthetic construct
  misc_feature 1..3513: note = Description of Artificial Sequence: Synthetic coding sequence
  source 1..3513: mol_type = other DNA
atgggcctggcgtgggggctcggtgtattgtttctcatgcacgtctgcggtaccaaccggattcccgagtccggcggagacaactctgtatttgacatatttgagctcaccggggctgcgaggaagggcagtggaaggcgactggtcaagggcccagatcccagttcccctgcgtttagaatcgaggacgctaacctgatcccccctgtccctgatgataaatttcaggacctggtggacgctgtgagagccgagaagggttttttgctgctcgccagcctacggcagatgaagaagaccagaggcacactgctagcgctggagagaaaagaccactctggacaggtgttttctgtggttagcaacgggaaggccggaacactggatctgagtctcaccgttcaaggaaaacagcacgtagttagcgtcgaggaagccctgctggccaccggacagtggaagtctatcacattatttgtgcaggaagaccgggcacagctctacatcgactgcgagaaaatggagaacgctgaactcgatgtcccaatccaatctgtattcacaagagacctggctagtatagccaggttaagaatagcaaagggtggagttaatgataactttcagggcgtactgcaaaacgtgcggttcgtgttcgggacgaccccagaagatattcttaggaataaagggtgcagctcatctacctcagtacttttgacactggataataacgtggtgaacggtagctcccctgctatacgcacaaactacattggtcataagactaaagatctgcaggccatatgtggcatttcttgcgatgagctatcctctatggtcctggagttgaggggactacgcaccattgttaccaccctacaggactccatccggaaagtgacagaggaaaataaagaactggccaatgagctacggaggcccccactgtgctaccacaacggggtccagtaccgcaacaatgaagaatggaccgtcgacagttgcacggagtgtcactgccagaatagtgtgacgatctgcaaaaaagtgagctgccctattatgccatgttccaacgctactgtgcctgacggtgagtgctgccctaggtgttggccgtcagacagcgccgatgacggttggtctccctggtccgagtggactagctgctcgacaagctgtggtaatggtatccagcagaggggccgtagctgtgatagccttaataataggtgcgaggggtcctctgtccagaccaggacatgtcacatccaggagtgcgataaacgatttaaacaggatgggggttggtcacattggtccccatggtcctcttgttctgtaacttgcggcgatggggtgatcaccagaatcagactatgtaactcaccgtccccccagatgaatgggaaaccctgcgagggcgaggcaagggaaacaaaagcctgcaaaaaggacgcctgtcctattaacggtggctggggtccctggagcccctgggatatctgcagtgtgacatgcggagggggtgtgcagaaacgaagccggctatgtaacaatccaacacctcagtttggcggtaaggactgtgtgggcgacgtcactgaaaaccagatctgtaacaagcaggactgtcccattgacggctgtctaagtaacccttgctttgccggtgtaaagtgcacaagttaccccgacggatcatggaagtgcggcgcttgcccgcctgggtatagtggaaatggaatccagtgtacggatgttgacgagtgtaaggaggtgccagacgcatgtttcaatcacaatggcgaacatcgctgtgagaatactgacccaggctacaattgtcttccctgtcctcccagatttaccgggtctcaaccctttgggcaaggcgttgagcacgccaccgccaacaaacaagtgtgcaaacccaggaatccctgcaccgatgggactcatgactgtaataaaaacgcaaaatgcaactacttggggcactacagtgatcctatgtaccgctgtgaatgcaaacccggatatgcaggcaatggaattatttgtggagaggatactgatctcgacggctggcctaacgaaaatttagtgtgcgtcgctaatgccacgtaccattgcaagaaagacaactgtcctaatctacctaactcgggacaggaagattacgataaagacggaatcggcgacgcgtgcgacgacgacgatgataacgacaaaattcccgacgatcgggacaattgtccttttcactacaacccagcacagtacgactacgacagagacgatgtaggagaccggtgtgataactgtccttataatcacaaccccgatcaggcggacaccgataataacggagaaggagatgcttgtgccgctgacattgacggggacggcatcctgaacgaaagggacaactgtcaatacgtctacaacgtggatcagagggacaccgatatggacggggtcggggatcagtgtgataactgcccattggagcacaatcctgatcagctggacagtgactctgaccgcattggcgatacgtgcgacaacaaccaggacattgacgaggacggtcatcagaacaacctagataactgtccttacgttccgaacgctaatcaagcagaccacgacaaggacggtaaaggggatgcctgtgatcatgatgatgataatgatggcatacccgatgacaaggataactgtagactggtgccgaaccccgaccaaaaggattcagatggcgacgggagaggggacgcatgtaaagacgatttcgatcatgacagcgttccagacattgatgacatctgtccggagaatgtcgatatctctgagactgacttccgtagattccagatgattccgctggatccaaaaggtaccagtcagaacgatcccaactgggttgtgagacatcagggcaaagagctggtacaaaccgtcaactgtgaccctgggctggcagtgggctacgatgaattcaatgcagtggatttcagcggcacattcttcatcaatactgagagagatgacgattacgcaggattcgtgtttggctaccagtcatcatccaggttttatgttgttatgtggaagcaggtcactcagtcctattgggacacaaatccgacacgggctcagggatacagcggactgtcagtgaaggtggtcaattctaccaccggcccaggcgagcacctgcggaacgcactgtggcacaccggtaacactcccggacaagttcgcaccctttggcacgatcctaggcatatcggttggaaggactttactgcttaccgctggagactcagccacagacctaagaccgggtttatccgcgttgtcatgtatgaggggaaaaagatcatggcggatagtggtcccatttacgacaaaacttatgcaggcggacgtttgggcttatttgtgttcagccaggaaatggtgtttttttctgacttgaaatatgaatgtcgagatccctag

SEQ ID NO: 31123 - DNA, 285 bp, synthetic construct
  misc_feature 1..285: note = Description of Artificial Sequence: Synthetic coding sequence
  source 1..285: mol_type = other DNA
atgggactggcttggggattgggcgtcttgtttctgatgcacgtctgcggcacgaaccgtattccagagtcagggggagataacagtgtcttcgacatcttcgagctcactggtgctgcgagaaagggatccggtagaagactcgtaaagggcccagacccctcaagtcccgcatttcggatagaggacgccaacctgattcccccagttcccgatgataaattccaggatctggtggacgccgtgcgggcagagaaaggatttcttttgcttgcaagtctgtag

SEQ ID NO: 31124 - DNA, 501 bp, synthetic construct
  misc_feature 1..501: note = Description of Artificial Sequence: Synthetic coding sequence
  source 1..501: mol_type = other DNA
atggccgcaggcaatgtcgttttggtgcccctggtgacagttgagatggcctcttctgctcaaatgctgatgtccgccaagaagtgtctgatgcccgctagcaccaccatggagtcgaccggagttcggacccggacacctgccaccacagcctgccccgcacctcatgcttcccctgctcacagcccgtctgctagggtatcaaatatgcccaggccaactaaccgctgtgcttcccctattccactgtgcctgtgccatagggctgggtgctattgcgaggccatcagcgagcagtggacacaaaagcattttcaagcttgccaacgccgtgaggattccttggagcttgccaataaaactaccttaaccagctccttccggaatactggctcacggggacagagcacgaaggggagggctcataccagagatgattgcatgaaaaagatctggcgtaattgttacatgttcggcactaagagcttcagtggcgattag

SEQ ID NO: 31125 - DNA, 3519 bp, synthetic construct
  misc_feature 1..3519: note = Description of Artificial Sequence: Synthetic coding sequence
  source 1..3519: mol_type = other DNA
atggtctggcgtctcgtcctcctggccctatgggtgtggcccagcacgcaagccggtcatcaggacaaggatacaacatttgatcttttctccatttctaacataaacaggaagacgattggagccaagcagtttcggggacccgatcctggagtccctgcttacaggttcgtgcggtttgactacatcccacccgtgaacgctgacgacctttcaaagatcactaagattatgagacagaaagaagggttctttcttacagcccagcttaagcaggatggaaaaagtagaggcaccctgctggcattggagggccctggcctgagtcagcggcaatttgaaattgtctctaatgggcctgctgacaccctcgaccttacctattggattgatgggacgcgccacgttgttagtttggaagatgtcgggttggctgactcgcagtggaaaaatgttacggtgcaggtggcaggcgaaacctactctttacatgtgggatgcgacctgattgattcctttgctctcgatgaacctttctacgaacacttgcaggctgaaaagtccaggatgtacgtggcaaaaggaagcgccagggagtctcacttccgcggtttgttacagaatgtgcatctggtatttgagaactcggtagaggacattcttagcaaaaaggggtgccagcaggggcagggggctgaaataaatgcaatctccgagaacactgagactctaagactgggcccacatgttaccacagaatatgtggggccatcaagcgagaggcggccagaggtgtgcgaacgatcgtgcgaagaactcggtaacatggtgcaagagctctctggactccacgtactcgtgaaccagctgagcgaaaatctgaagcgagtctccaacgacaatcagtttctgtgggaacttattggaggcccaccaaaaacgagaaacatgagcgcttgttggcaggatggtaggttcttcgcagaaaacgaaacatgggtggtggacagctgcacgacctgcacttgtaagaagttcaagaccatctgtcatcaaattacatgcccccctgccacatgcgcttcccccagctttgtcgaaggagagtgctgcccgtcttgcctgcactcggtagacggcgaagaaggatggtcaccatgggctgagtggacacagtgttctgtcacttgtgggtcgggtacccagcagcggggaagaagctgcgacgtcactagcaacacatgcttaggcccttctatacagactcgtgcctgtagtctgagtaaatgcgacaccaggatcagacaggacggaggttggtcccattggagcccatggtcctcctgtagcgtcacttgtggggtcgggaatatcacaaggatcagactgtgcaattcacccgtgcctcagatgggcggaaagaattgcaaaggaagcgggcgagagaccaaggcatgccagggcgctccctgtccaatcgatggtcggtggtctccatggagtccctggtcagcctgtactgttacttgtgctggcggaatcagagaacgtacccgagtctgcaatagccccgagccccagtatgggggaaaagcctgtgtgggggatgtgcaggagcggcagatgtgtaacaaaagaagctgcccggtggatggttgtctcagcaacccttgctttcccggagcccagtgctccagcttccccgatggctcttggagctgcggctcctgtccggtcggctttttgggcaatggcacccattgcgaggacttggacgagtgcgctctggttccagatatttgcttctcaacgtctaaggtccctcgatgtgttaacactcaacctggattccactgcctgccatgcccccctcgatataggggtaaccagcctgtgggcgtagggctcgaagctgccaagactgaaaagcaggtctgtgagcctgaaaacccttgtaaggacaaaacacacaactgtcacaaacacgccgaatgtatttacttgggacatttctcagacccaatgtataagtgtgaatgccaaactgggtacgccggagacggcttgatttgtggagaggattctgatctggacggctggcccaatctcaatctggtgtgtgcaacaaacgctacatatcactgcatcaaagataactgcccccacttgcctaactctggccaagaggatttcgataaagacggcatcggagatgcctgtgacgatgatgatgataacgatggagtcactgatgaaaaggataattgccaactgttattcaacccgaggcaggccgattacgacaaggacgaagtgggagataggtgcgataattgtccctacgtgcacaaccccgctcagattgacacagacaacaatggtgagggcgacgcgtgttctgtggatatcgacggcgacgatgtcttcaacgaaagggataactgtccgtatgtgtacaacaccgaccagagggatacagacggcgatggggtgggggatcattgtgataattgtcccctggtgcacaatcctgatcagacagatgtggataatgatctggtaggtgaccagtgtgacaacaatgaagatatagatgatgatggccatcagaataaccaggataattgtccttatatcagtaacgcaaaccaggcggaccacgaccgcgatggtcagggcgatgcgtgtgaccctgacgatgataacgatggagtaccagacgacagagacaattgccgcctcgtgtttaatcccgatcaggaggatttggacggagatggacggggagatatctgtaaggacgactttgacaatgataatatccctgatatcgacgatgtttgccccgagaacaacgccataagcgaaactgacttccgcaatttccaaatggttccactggatccaaaagggactactcagatcgatcccaattgggttatccggcaccaaggtaaggagctcgtccagactgccaatagcgaccctgggatcgccgtcgggttcgatgaattcgggtctgtagatttcagcggcacattctacgtcaatacagacagagatgacgactacgctgggtttgtctttggttatcagagctcgtcccgtttctacgtggtcatgtggaaacaggtgacgcagacatattgggaggaccagcccaccagagcctacggttactccggtgtcagtctcaaggtggtcaatagcaccacgggcaccggcgaacacctgaggaatgcgctgtggcacactggaaataccccgggacaggtacgtacactctggcacgatcctagaaacatcggttggaaagattatactgcataccgctggcacttgacccatagacctaaaaccgggtacatccgagttctcgttcacgaaggaaagcaggtaatggccgattcaggacctatatatgaccagacctatgccggtgggcgtttaggcctgttcgttttcagccaggagatggtgtacttttctgacttgaagtacgaatgcagagacatctag

SEQ ID NO: 31126 - DNA, 1293 bp, synthetic construct
  misc_feature 1..1293: note = Description of Artificial Sequence: Synthetic coding sequence
  source 1..1293: mol_type = other DNA
gatgatgataacgacggcgttacggacgaaaaagataattgccagttgctgttcaatcccagacaagctgactacgacaaagatgaggtgggagacaggtgcgataactgtccatacgtgcacaacccagcccaaattgacacggacaacaacggagaaggggacgcctgtagcgttgatatcgatggcgatgacgttttcaacgaaagggacaattgcccgtacgtatacaatactgatcagagagataccgacggggatggggtcggcgatcactgtgacaactgcccactagtacataatcccgaccaaactgatgtggacaatgatttagttggcgatcaatgtgacaacaacgaggatatcgacgatgacggccatcagaacaatcaagacaactgcccgtatatttccaacgctaatcaggccgaccacgatcgggacggccaaggtgatgcttgtgatcccgacgacgacaacgatggggtgcctgacgatagggacaactgtagattggtgtttaaccctgaccaagaagatctggacggagatggcaggggtgacatttgtaaggatgattttgataatgataatatccctgatatcgatgatgtctgccctgagaacaatgctatctccgaaaccgatttccgaaacttccagatggtgcccttggaccctaaaggcaccactcagattgatcctaactgggtcattagacatcagggaaaggaactggtgcagaccgccaattctgatcctggaatagctgttggttttgatgagtttggctcggtggatttttccggcacattttatgttaatactgaccgtgatgacgactatgccggttttgttttcggctaccagtcctcatcacgattctatgtcgtgatgtggaaacaggttactcagacatactgggaggatcagcctactagagcctacgggtactcaggcgtaagcctcaaggtggttaactctacgactgggaccggggaacacttaagaaacgctctgtggcacactggcaacaccccgggacaggtcagaacactgtggcacgatccaaggaacatcggatggaaggactatacagcgtaccgatggcaccttactcacaggcctaagaccgggtatattcgggttctggtgcatgaaggcaagcaggtcatggccgattcaggtcccatctatgatcagacctacgctggaggcaggttggggttattcgtcttctcccaggagatggtatactttagcgacctgaaatatgaatgtcgggttatttag

SEQ ID NO: 31127 - DNA, 252 bp, synthetic construct
  misc_feature 1..252: note = Description of Artificial Sequence: Synthetic coding sequence
  source 1..252: mol_type = other DNA
atggtgtggagattggtccttctggccctttgggtctggccctcgacccaagccggacaccaggacaaagataccacctttgacttgtttagtatcagtaatataaaccggaagaccatcggagcgaaacagtttaggggcccagaccctggcgtgcctgcttacagattcgtgaggttcgattacatacccccagtgaacgccgatgacttgtccaaaatcacaaagatcatgagacagaaggaaggatag

SEQ ID NO: 31128 - DNA, 1449 bp, synthetic construct
  misc_feature 1..1449: note = Description of Artificial Sequence: Synthetic coding sequence
  source 1..1449: mol_type = other DNA
atggccgcactgatgacacccggaaccggcgctcctcccgcaccaggtgactttagcggtgaaggcagtcagggcctccccgatccatctccggagccaaaacaactccctgaattaatcagaatgaaacgtgacgggggtcggctgagcgaggcagatatccgtggatttgtggcggcagtcgtgaacggttctgctcaaggcgctcagataggggcaatgctcatggctatcaggctgaggggtatggacctggaagaaacttctgtgctgactcaggctctcgcacagagtggacaacagttggaatggcctgaggcctggagacagcaactcgtagacaaacatagcacaggtggcgtgggggacaaagtgtcgctcgtactcgcaccagctctcgctgcatgcggctgtaaagtgccaatgatatctggccgaggcctcgggcacacaggcggaaccctggacaagctagagtccatccccggtttcaatgtaatccagagccccgagcaaatgcaggtcctccttgaccaagctggctgttgcatcgtcggccagtcagaacagctcgttccagccgacgggattctatacgcagctagggacgttaccgcaaccgtggattctcttcccctcattaccgcaagcatcctgtctaagaaactggtcgaggggctctcagccctggtggtcgacgtgaaattcggaggagcggcagtgttccccaatcaagaacaagctcgtgaattggcgaagacgctggtgggcgttggcgctagcctgggcctgcgcgtggctgcggcactgacagccatggataagcccctgggtaggtgtgtgggccatgcactcgaggttgaagaggcattactgtgtatggatggcgcaggtccgccagacctgagagacctagtgaccactctaggcggagcactcctttggctgtccggccacgcaggcacgcaagctcaaggcgctgcgagggtggcagctgcactggacgacggcagtgctctgggccgttttgagagaatgttagccgcacagggagtggaccctggcctggctcgggctctttgtagtggtagtcccgctgagagacggcaactcctcccaagagctcgcgaacaagaggaactgttggcccctgcagatggcaccgtggagctggttcgggctctgcccctggctctggtccttcacgagctgggagctgggagatcaagggccggagaacctttgcgactgggagtcggagccgagctcctggtggacgttggacaaagactgcggaggggcaccccgtggctgcgcgttcaccgtgatggccctgcattgtctgggccacagtcgagggccctccaggaggctctggtactgtccgaccgggcacccttcgccgcacccagccccttcgcagagttagttctgccaccccagcaatag

SEQ ID NO: 31129 - DNA, 1449 bp, synthetic construct
  misc_feature 1..1449: note = Description of Artificial Sequence: Synthetic coding sequence
  source 1..1449: mol_type = other DNA
atggccgcactgatgactccgggtacaggagctccgccagctcccggagacttctccggagaaggcagccagggactgcctgatccctccccggagcccaagcaactgcccgagctgataaggatgaagcgggatggtggcaggctgagcgaggctgatatcagagggtttgtagccgcagtggttaatgggtcggcgcaaggagcacaaatcggggctatgctaatggctattcgactccgcggtatggacctggaggagacctccgtgctgacacaggctttggcccaaagcggacagcagctagagtggcctgaagcttggcgccagcagctggtggacaagcactccacaggcggtgtgggggataaagtgagtctagttctagcaccagctttggccgcttgtggttgtaaagtacccatgatctccggcagaggtttggggcataccggaggtacccttgacaagcttgagtcaatccccggattcaatgtgatacagagcccagagcaaatgcaagtcttattggaccaagctgggtgctgcattgtgggccagtcagagcagttggtcccagccgacggcattttgtacgcagcacgggatgtgactgccaccgtagacagcctaccccttatcacggctagtatcctctctaaaaagctggttgagggtctgtccgccctggtggtggatgtaaaattcggcggagccgctgtctttcccaaccaggagcaggcaagagaacttgcaaagacccttgtgggcgtgggggcatcactaggactgcgagtcgccgcagcgttgacagctatggacaaaccccttggtagatgcgtggggcatgcattggaagttgaggaggccctgttgtgcatggatggagctggaccgccagatctgagagaccttgtgaccaccctggggggagccctcctgtggttgagcggccacgccggtacccaggcccagggagcagccagggtagccgctgcgttagatgacggaagtgcgctgggtcgattcgagcgcatgttggctgcccagggcgtagacccgggattagcacgcgctctgtgcagcggtagtccagccgaacggcgtcagctgctgcctagggcgagggagcaagaggaactgctggccccagcagatggaacagtagagctcgttcgagctcttccactagctctcgttcttcacgagctgggtgccggacgctctcgcgcaggcgagccgcttcggctcggggtgggagcagagttactggtggatgtcggtcagagactcagacgaggcaccccctggttgagagtgcacagggatggacccgctctatctgggcctcagtctcgcgctctacaagaagccctcgtgctgagtgaccgcgctccattcgccgctccttcacccttcgccgaacttgtcctgcccccacaacagtag

SEQ ID NO: 31130 - DNA, 1449 bp, synthetic construct
  misc_feature 1..1449: note = Description of Artificial Sequence: Synthetic coding sequence
  source 1..1449: mol_type = other DNA
atggccgcattgatgacacccggtactggcgcaccccctgcccctggagacttctctggggagggcagtcagggattgcctgatcctagccctgagcctaaacagctgcccgagcttattagaatgaagcgggatggcggacggctgtctgaagccgacataaggggctttgtagccgctgtcgtgaacggaagtgcccaaggagcgcaaatcggggctatgctgatggcaataagacttcggggtatggatctggaggagacaagtgtccttacacaagccctggctcagtcagggcagcagctggagtggcctgaagcctggcggcagcagctggtggacaagcactctaccggaggcgtcggcgacaaggtttcactcgtcctagcacctgcactggctgcctgtggttgcaaggtgccaatgattagtggaaggggcttaggtcatactggagggaccctcgacaaactagagtccatccctggcttcaacgtcatccagtctcccgaacaaatgcaagtcttgctggaccaggccggttgctgtatcgtcggtcagtcagaacagttggtaccagccgatggtatcctgtatgcagcaagggatgtcacagcgaccgtcgacagcctgcccttaattaccgccagcatactgagcaagaagctcgtggaggggttatctgccctggtggtagacgtgaaattcgggggagctgctgtgtttcctaatcaggaacaagcaagagagctcgcaaagacgctcgtgggggtaggagccagcctgggcctgcgtgtcgctgccgctcttactgcaatggacaagcccctcggtcgatgcgtgggccatgctctcgaggtcgaggaggcattgttgtgcatggatggtgccggaccccctgaccttagggacttggtcactacattgggaggagcccttctgtggctaagcggccacgctggtacccaggcccagggcgctgctcgcgttgccgcagcacttgacgatggcagcgctctcggacggtttgaacgcatgctggctgcccaaggcgtggaccccggtctcgccagagccctatgctctgggtctcctgcagaacgcaggcaactgctgcctagggcacgcgagcaggaggagctgctggccccagctgatggaactgtggagctcgtgcgtgccctcccgttggccctcgtcttacacgaattgggcgctggtagaagccgcgcaggggagccattgagactgggagtgggtgctgaactgctggtggacgtgggccagcggctgcgcagaggcacaccctggctgcgcgtccacagggatggtcccgctctctctggtccccagtctcgtgcattgcaggaggccctcgtcctgagcgatcgggcaccatttgcagcaccatccccttttgctgaactggtcctgcctccacagcagtag

SEQ ID NO: 31131 - DNA, 1233 bp, synthetic construct
  misc_feature 1..1233: note = Description of Artificial Sequence: Synthetic coding sequence
  source 1..1233: mol_type = other DNA
atggaagcagaaaatgccggaagctactccctgcaacaggcgcaggccttttatacattcccttttcaacagttgatggccgaagcgcctaacatggcagttgtgaatgagcagcagatgccagaggaggttccagccccagcccctgctcaggaacccgtccaggaggcacccaagggtaggaaacgcaagccaagaaccacagaacccaagcagccagtggagcccaaaaagcctgtggagagcaagaaatcaggcaagtccgcaaagtctaaagagaagcaggaaaaaatcacagacacattcaaagtgaagagaaaggtggatcgcttcaatggcgtcagcgaggccgagctcctcactaagacacttcccgatatcctcacttttaacctggatatagtaattattgggattaatcccggacttatggccgcttataagggccatcactatccaggtccaggcaaccatttttggaaatgtctttttatgtccggactctcagaagtgcagcttaaccatatggacgaccacactctccctggtaagtatggaatcgggttcacaaatatggtggagagaaccacccctggatcaaaggacttgagctccaaagagtttagggaaggaggcaggatacttgtccagaaattgcaaaaatatcaaccacgcatcgccgtcttcaatggcaaatgtatctacgagatctttagtaaggaggtgttcggcgtgaaagtgaagaacctggagttcggtctccagccacataaaatccccgatacagagacactctgttatgtcatgccttcgagcagcgccagatgcgctcaattccctcgagcacaggataaggtgcactactacattaagctcaaggacctcagagaccagctcaaagggatcgaaagaaacatggatgtgcaggaagtgcagtacacgttcgacttgcagctcgcacaggaggacgcaaagaagatggcagtgaaagaggagaagtacgaccctgggtatgaagcggcttatgggggtgcctacggagaaaacccatgttcatcagagccctgcggatttagttcaaatggtttgattgaaagcgtcgaactccggggagagtccgccttcagcgggatacccaatggccagtggatgacacagagcttcaccgatcaaattccctctttctccaatcattgtggcacccaggagcaagaagaggagagtcacgcctag

SEQ ID NO: 31132 - DNA, 621 bp, synthetic construct
  misc_feature 1..621: note = Description of Artificial Sequence: Synthetic coding sequence
  source 1..621: mol_type = other DNA
atgatcaccctgtaccagggttccatggtgctggacctgccgacatggtggaaaggaccgaggcccgctgcaaaaattagccctgggatctatgagatattctctaaagaggtctttggagtcaaggttaagaatctggagttcggcctgcagcctcacaaaatccctgatacagagaccttatgttacgttatgccctcgagcagcgctcggtgtgctcaattccccagagctcaggacaaagtgcattactacatcaagctaaaagatttgagagatcagctgaagggaattgaacgaaatatggacgtccaggaagtgcagtatacattcgacctgcagctggcgcaggaagacgctaagaagatggccgtgaaggaggaaaaatacgaccctggctatgaggctgcctatggtggtgcctacggggagaatccttgctccagcgaaccatgcggcttctcttccaacggtctgatcgagtccgtggagcttaggggcgagtctgcttttagcggcataccaaacggccaatggatgactcagtcattcaccgaccagatcccctccttctcaaatcactgtgggactcaggaacaggaggaggagtcacacgcttag

SEQ ID NO: 31133 - DNA, 3294 bp, synthetic construct
  misc_feature 1..3294: note = Description of Artificial Sequence: Synthetic coding sequence
  source 1..3294: mol_type = other DNA
atgtcatcatgtcgctccctatgctgtggagatataagccagtcagcagtcctgtttttgtgccagggtaccctggcaatgctggattggcagaacggatccatggggcgatctggggaggccctcctcctggacacagcccatgtgctgtttaccctctcgtcacaaatcaaggagcctacacttgaaatgtttctgtctaggattttggcctcctggactaacagcgctattcaggtactggagagtagttcccccagtctgacagactcactgaatggtaatagctctatagtcggacgcctcctggaatacgtctatacccactgggagcaccctctcgatgcccttaggcatcaaaccaagattatgttcaaaaatctgttgcaaatgcaccgtctgaccgtggaaggtgctgattttgtccccgacccattcttcgtagaactgacagagtcattactgagactcgagtggcacataaaagggaagtacacttgcctgggatgccttgtcgagtgtattggcgtggagcatatcttggcgattgacaagactattccctcacagatactagaggttatgggcgatcagtcactggtgccatacgcgagcgacctgctggaaactatgttccgaaaccacaaaagccatctcaaatctcagaccgctgaaagcagttggattgatcagtggcacgagacatgggtaagtcccctgctattcattctctgtgaaggcaacctggatcagaaaagctacgtgatagattactatctcccaaagctgctatcgtattcccccgaatcactccaatacatggttaagatcctccaaaccagcatcgacgctaaaaccggccaggagcagtctttcccttccttgggctcttgtaatagcaggggggctctgggggctttgatggcctgcctccgtattgcccgtgcacacggacacctgcagtctgctacagacacctgggagaacctcgtatcggatgcacgcattaagcaaggcctgattcaccagcattgccaggtcaggatcgacacgctcggtctcctatgtgaatccaaccggagcacggaaatcgtaagtatggaagagatgcagtggatacagtttttcataacctataacctcaattctcaatcacccggagtgcgtcagcaaatctgcagtctgctcaagaaactcttctgccgaatccaggagtccagccaagtgctatacaaactggaacagtcaaaatccaaacgcgaacccgagaatgagctgaccaaacagcatccttccgtgtcgcttcagcagtacaagaattttatgtcctccatctgtaacagcctctttgaggccttgtttccaggctccagttacagcacccgctttagtgctctgacgatccttgggtccatcgccgaggtgttccatgtgccagagggacgaatctataccgtgtaccagctttcacatgacatcgacgtgggtcggttccagaccctgatggagtgctttactagcacctttgaggatgtgaaaattctggcattcgacctgctaatgaaactgagcaaaacagcagttcacttccaagactccgggaagctgcaggggctgtttcaggcagcactggaactgtctacatctacaaaaccgtacgattgtgtgaccgcctcatacctgttgaatttcctcatttggcaggatgccctgccgtcgtctctttcagcgtatcttactcaacaagtcgcctgcgacaacggggacaggccggcagcagtggttgaaagaaatactttgatggtgattaaatgcttgatggagaatctggaagaagaagtctcccaggcggaaaattccctgctgcaagcggcagccgcttttcccatgtacgggagagtacactgcataaccggcgctcttcagaaactgagcctcaactctttacagttggtgtctgagtggcggccagtggtcgaaaagctgttactgatgtcgtacagactgtcaaccgtggtgagcccagtgatccaatcctcttccccagaaggcctaatcccaatggatactgattctgaatccgccagtaggctgcagatgattcttaatgaaatccagcctcgcgacaccaacgattattttaatcaggctaagatactgaaggaacacgactcctttgacatgaaagacctaaacgcctcagtggtgaatattgacaccagtactgagataaagggcaaggaggtgaaaacatgcgatgttaccgcccagatggtcctcgtatgttgctggcggtcaatgaaagaggtcgccctgctcctggggatgctctgccaactactgcctatgcagcctgtgcccgagagcagcgacgggttgcttaccgtggagcaggttaaggagatcggggactatttcaagcagcacctgttacagagtcgccatcggggtgcctttgagcttgcatacacagggtttgtcaagcttactgaggtccttaatcgatgtcctaatgtgtcactgcagaaactccctgagcaatggttgtggagtgtgctagaagagatcaagtgttctgatccttcatctaaactatgcgctacaaggcggagtgcaggcattccattttacatccaggcccttttagcctctgagcccaagaagggacggatggatttgctgaaaatcacaatgaaggaactgatcagtctggcaggccctaccgacgacattcaatcaacggtgccccaagttcatgccctgaacatccttcgagccctgtttagggatacgcggctcggtgagaatattatcccctatgtagctgacggggctaaagcagccatcctgggttttaccagtcccgtgtgggcggtgaggaatagtagcaccctgctctttagtgctctgatcacaagaatttttggtgtgaagagagcaaaggacgaacattccaagacaaatagaatgacaggacgagaattctttagtcgcttcccggagctgtatccttttttactgaaacagcttgaaaccgttgccaacacggtggactcagacatgggggagccaaatcgacatcctagcatgttcctgctacttctggtacttgaacgcctctacgcttctcccatggatggaacaagcagcgccctgagtatgggccctttcgtaccctttataatgcgggtactgctgtgctgtcctggctggtccgccgtggccagatctcaactgacagccacaagtacgtcttgggtgcaggctatactccttcctcagcctcctgagtag

SEQ ID NO: 31134 - DNA, 5642 bp, synthetic construct
  misc_feature 1..5642: note = Description of Artificial Sequence: Synthetic coding sequence
  source 1..5642: mol_type = other DNA
atgggcgtcaaaaagaaaaaggagatgcaggttgctgctttgactatctgccatcaagacctcgaaaccctgaagagcttcgccgatgtcgaaggaaaaaacttggcatcactcctcttgcactgcgtccagctgacagacggagtttctcagatacattatattaagcagatcgttcctctgctagagaaggcggataagaatggaatgtgcgatcccaccatccagagctgcttggatattctggccggaatttatctttcgttaagtctcaagaatcctctgaaaaaagtccttgcctccagccttaactcactcccggactttttcctgccagaagcaatgcatagatttaccagccgcctgcaggaagagctaaacaccacagacctgtacagctatcgtaaggtcacagacaatatcagttcatgcatggaaaattttaatttaggcagagcatcagtgaataaccttctgaagaacgtgctccacttcttgcagaagtccctgattgagatcctggaagagaatcggaagtgtgcaggaaaccacattatacagacacagctcatgaacgacctgctagtcggtattagggtctccatgatgctggtgcagaaggttcaggatttccagggcaacctttggaaaaccagcgacagccccatttggcaaaacatgtgtggtcttctatccatctttacaaaggtcctctccgatgatgatttattgcaaaccgtacaatcaacctcagggctcgcaattatcctttttataaagaccatgttccacccctctgaaaaaatccctcatttgatctcttccgtgcttctgcgcagtgtggattgtacaagcgtacccgaatggttcatgtcatcttgccgcagcctgtgttgcggcgacatctcccaatctgcagttctgtttctctgccagggtactctcgccatgctggactggcagaacggatctatgggaagatccggagaggccttattgctggacactgctcatgtcctttttacactgagcagtcagatcaaagagcctacactggaaatgttcctctctcggattctggcctcttggacaaatagtgcaatccaggtgctggaatccagcagtccctccctaaccgattctctgaacggcaacagctctatagtcggcagactgctggaatacgtgtacacacactgggaacaccctctcgacgccctgcgccaccagactaagatcatgttcaaaaatctgctgcagatgcatcgtctcacagtagagggcgcagacttcgtcccagatcccttctttgtggaacttacagaaagtctcttgagactggaatggcacatcaaagggaagtacacatgtctcggttgtttggtggaatgtattggagtcgagcatatactcgcaatagacaaaacgatcccaagccagatcctcgaggtcatgggtgatcagtctctggtgccatacgcctctgatcttcttgagactatgtttcggaatcacaagtcacatctaaagagtcagaccgccgagtcaagttggatagatcagtggcacgagacttgggtgtccccactgctgttcatcctgtgtgagggcaatttagaccagaaatcttatgtgattgattattacttgcctaaactgctgagctatagccccgagagtctccagtacatggtcaagatcctgcagacttctattgacgccaagaccggacaggagcagtcattcccttccctgggctcttgcaacagcaggggtgcgctgggtgccctcatggcatgcctgagaattgcccgagcacacggccacttgcagtccgctactgatacctgggagaatctagtttcagacgcaaggataaagcaaggccttatccatcagcactgtcaggttaggatagacaccctgggacttctgtgtgagagcaaccgcagcaccgaaatagtgtctatggaggagatgcaatggatccagttcttcattacctacaacctaaatagccagtctccaggggtacgacagcagatctgcagtctccttaagaagaagctcttttgccggattcaggagtccagccaggttttgtataaacttgaacagagtaagagcaaaagggaacctgagaatgagctgacaaagcagcatccaagtgtctctctgcaacagtataaaaattttatgtcctctatttgcaactctctgttcgaggccctattcccaggatcatcttacagtaccagattcagcgcacttactatcttgggatcaatcgcagaagtgttccacgtacccgaaggacgaatatacactgtttaccaattatcacatgacattgatgtggggaggttccagaccttaatggagtgctttaccagcacctttgaagatgtgaagattctagccttcgacctgttgatgaaactttccaagaccgctgttcacttccaggattccggaaaacttcagggtctattccaggccgctctggagctgtctacatccactaagccttatgactgtgttactgcatcttatttgcttaacttccttatctggcaggatgcactgccatcttccctctctgcatacctaacccaacaagtggcctgcgataatggtgaccgtcccgctgccgttgtcgagcgcaacaccctaatggtgattaagtgtctcatggagaaccttgaggaggaagtttcccaggcagagaactctctactgcaggccgcagccgcattcccaatgtacggcagagtgcattgcatcacaggagcactgcagaaattgtcactaaacagcctccagctggtcagtgaatggcggcctgtagtagaaaagctattattaatgtcttaccgactgagtacggtggtctccccggtaatccaatcctcatctcccgagggcctgattcccatggacacggatagtgaaagcgcttcccgattgcagatgatcctgaacgagatccagccaagggacaccaacgactactttaaccaggccaagatcctgaaggaacacgacagttttgacatgaaggatctgaatgcttctgtggttaacattgatacatctacggaaataaaaggtaaggaagtgaaaacgtgcgacgtcactgcccagatggtactggtttgttgttggaggtccatgaaggaggtagcattgctgctcggaatgctatgtcagctgctacctatgcagcccgtccctgaaagcagtgatggcctgctgacagtagaacaggtgaaggagataggggattactttaaacagcatctgctccaaagtcgtcataggggggctttcgagctcgcctacacaggctttgttaaacttacagaggttctcaaccggtgtcctaacgtatccctgcagaaactcccggagcagtggctgtggagtgttctggaagagatcaaatgttctgacccatcgtctaaactgtgcgcaacgcgcaggagcgctgggattccattctacatccaagccctcctggcttcagagcccaaaaaaggccgtatggacctgctcaaaatcactatgaaggaactcatttcactcgccggaccaacagacgacatacaatccactgtgccgcaggtccatgccctcaatatacttcgcgcactattccgggatacacgcttgggtgaaaatataatcccctacgtggccgacggtgctaaggccgctattctgggattcacttcgccggtatgggcagttcgcaattcttccaccctgctgttcagcgccctcatcacccggatctttggagtgaaacgggctaaggacgagcactctaagacaaaccggtgtggtcacagccctgtgtatcactcccgggaaatggccgcaagggccctggtgccctttgtgatgattgaccacatccccaataccatcaggacgctgctgtcgaccttgcccagttgcacagatcagtgcttcagacagaatcacatacacggaaccttgctgcaggtctttcacctgttacaggcttattctgactccaaacatggcacaaacagcgatttccaacacgagctgaccgacatcactgtgtgcaccaaggccaagctgtggctggccaagcggcagaacccttgtttagttactcgagcggtctacattgatatcctgttccttcttacttgctgcctcaatcgcagcgcaaaggacaatcagcccgtactcgaatcacttgggttttgggaagaagtacgtggcatcattagcggaagcgagttgatcaccgggttcccttgggcctttaaagtgcctgggctgccccagtaccttcaaagcttaacaagactggccatcgctgctgtgtgggctgccgcagccaaatctggcgagagagaaacaaacgtacccatctcattttcacagctgctcgagtcagcctttcccgaggtaaggtcgttgaccctggaggctctgttggaaaaatttctggctgctgccagtggactcggagagaaaggcgtgccccctctgctgtgcaacatgggggagaaatttcttctgctggctatgaaagagaaccaccctgagtgcttctgcaagattcttaagatactccactgtatggatcctggggaatggttgccgcagaccgaacattgcgtccatctgacgccaaaagaatttctgatttggacgatggacattgcatcgaacgagaggtccgagatccagtccgttgcccttagactcgccagcaaagtgatctctcaccatatgcagacctgtgtggaaaacagggaactcatcgctgctgaactgaaacaatgggtgcaactagtcatcctgtcatgtgaggatcaccttccaacagagagccgcttggctgtagtggaggtcctgacctccaccacacctttgttcctgaccaatcctcatccaatactggagttgcaggacacgttggccctgtggaaatgcgttcttacactgttacagagcgaagagcaggcggttcgggacgcagccactgagaccgtgaccactgctatgtctcaggagaatacctgccagagtaccgaatttgctttctgccaggtagacgcgtccatagccctggccctggctctggctgtgctgtgcgaccttctgcagcagtgggaccaactggccccagggctcccaattctgttaggatggttgcttggcgaaagcgatgatttggtggcatgcgtagagtcaatgcatcaggtggaagaggactacctctttgaaaaagcagaggtcaacttttgggcagagacactgattttcgtcaagtacctctgtaagcacctgttttgcctcctgagcaagtccggctggcgtcccccttcccctgaaatgttgtgccatctccagcggatggtgtctgaacagtgccatcttctgagtcagttttttagggagctgccacctgctgccgagttcgttaagactgtggaatttactaggctgagaatccaagaggagagaacactagcctgtctgaggctgctcgcattcctggaaggaaaggaaggagaagacaccctggttctgagtgtgtgggactcctatgccgagagcaggcagttaaccttaccccgaaccgaagccgcttgcta

SEQ ID NO: 31135 - DNA, 5861 bp, synthetic construct
  misc_feature 1..5861: note = Description of Artificial Sequence: Synthetic coding sequence
  source 1..5861: mol_type = other DNA
atgggtgtcaagaaaaagaaggagatgcaagtagccgcactaacaatttgccatcaggacttagagacactgaaatcttttgctgatgtcgagggcaaaaacctcgcctccttgctactgcactgtgttcaattgacagacggagtgagccagattcactacatcaagcagatcgtccctcttctggaaaaggctgacaagaatggaatgtgtgaccctacaatccagagctgcctggatatccttgccggaatctacctctcactttctttgaagaatcccttaaaaaaggtgctggcctcttctctcaacagcttgcccgatttcttcttgccggaagctatgcaccgctttacaagccgactccaggaagaactgaatacaaccgacctttacagctatcggaaagtgactgataacatctcaagttgcatggagaatttcaaccttggccgtgccagcgttaataacctactcaaaaatgttttacattttctgcaaaaatcccttatcgagattttggaggagaaccgaaagtgcgcgggtaatcacatcatccagacacagcttatgaacgatctcttagtggggataagagtctcaatgatgttagtacagaaagtgcaggatttccaaggcaatttgtggaaaacctctgacagtcctatttggcagaacatgtgcgggttactttccatctttacgaaggtgctttctgacgatgatcttttgcagactgtccagagtacctcaggcctcgccatcatcttatttataaagactatgttccacccttctgaaaaaatcccacaccttattagcagtgtgttattgaggtcagtggactgtacctccgtgcccgaatggttcatgtcctcatgccgctcactctgctgcggtgacatatctcaaagcgccgtcttgttcctgtgccagggcacactcgcaatgctggattggcagaacggctctatgggtcgctccggtgaggccctgcttttggacacagctcacgtactgttcactctcagcagtcagattaaagaacccaccctggagatgtttctctcaaggattctggcgagttggaccaactccgctattcaggtgctcgaatcttcctctcctagtctgactgattctctgaatggtaattcttcaatcgtgggcagactcctagaatacgtctacacacattgggagcacccacttgatgccctgcgacaccagacaaaaattatgtttaaaaacctgctgcagatgcatcgtttaacggtagaaggcgcagacttcgtgcctgatccattctttgtggaactcaccgaatcgcttctgcgccttgaatggcacattaagggcaagtacacctgcctggggtgcttggttgagtgcatcggggtggaacacatcctggcgatcgacaagacaattccaagccagatcctggaggtgatgggcgatcagtcgttagtgccgtacgcctctgacctgctcgaaaccatgtttagaaaccacaagagccacctgaagagtcagactgccgagtcctcctggatcgatcagtggcacgagacttgggtctccccccttctgttcattctgtgcgaaggaaacttggaccaaaagtcttatgtcattgattattacttgccgaagttgctgtcctacagcccagaaagcctccagtacatggttaagattcttcagacctctatcgacgcaaaaactgggcaggagcagagtttcccatccttgggttcatgtaactcccgtggagctctgggagcccttatggcctgcctgaggattgccagggcgcacggtcacctgcagtccgcaactgacacctgggagaatttagtttccgacgctagaattaaacagggtctgattcaccaacattgtcaggtgcggatcgacacgctaggcctactgtgcgaatcgaaccggagtacggagatcgtgtcaatggaggagatgcagtggattcaattcttcatcacctacaatctgaatagccagagtccgggagtgaggcagcagatttgctcattgctgaaaaaactgttctgccgcatccaggaatcctctcaagtactgtataaattagaacagagcaaaagcaagcgagagcccgagaacgagttgacaaagcagcacccctctgtcagcttgcaacaatacaagaatttcatgagcagcatttgtaacagcttgttcgaggcactctttccaggcagctcttattctaccagattctcagccctgacgattcttgggtcaatagccgaggtctttcatgttccggaaggaaggatctacacggtttaccagttgagccacgacatcgacgtcggtcggtttcagacgctgatggagtgtttcaccagcacgttcgaggacgtcaagatccttgctttcgacctgctgatgaagctgagcaagacggcagtgcacttccaggattccggaaaactccaaggcctgtttcaggccgctttggagctctcaacaagtacgaaaccatacgattgcgtcacggcttcatatctcctgaacttcctcatatggcaggatgcattaccatccagcctaagcgcatatctgacccagcaggtggcgtgtgacaatggggacaggccagcggctgtcgtcgagcgaaataccttgatggtaattaaatgtttgatggagaatcttgaagaagaagtttcccaggcagagaattccctgttgcaggcagcggcagcattccctatgtatggccgagtacactgcatcaccggcgcactgcagaaactgagtttgaacagcctgcagttggtaagcgaatggcggcctgttgtggagaagcttttgctaatgagctaccggttatccactgtggtgagtccagtgattcaaagcagcagccctgagggtttgattcccatggacaccgattcagaatctgccagtaggctgcagatgatcctcaacgaaattcaaccgagagacactaatgattactttaatcaagctaaaattctgaaggagcatgactccttcgacatgaaggatctgaacgcatccgtcgtcaatatcgacaccagtacggaaataaaggggaaggaagtgaaaacctgcgacgtgactgctcagatggtcctggtttgctgttggaggtcgatgaaggaggtagcattactgctaggcatgctgtgccagctattgcccatgcaacccgtacccgagagctctgacggcctcttaactgtcgagcaggtcaaagagatcggggactactttaagcagcatttactgcagtctaggcaccggggtgctttcgaattggcctatacaggatttgttaaactcacagaggttctaaatcggtgcccgaatgtgtccctgcagaagctcccagagcagtggttatggagtgtgctcgaagaaatcaagtgttccgacccctccagcaagctgtgtgctacacggcgtagcgctgggatacctttctatatccaggctttacttgccagcgaacccaagaaggggagaatggatctgttgaagatcaccatgaaggagctgatcagccttgctggcccaactgatgacatccagtccactgtcccccaagtgcatgctctcaacatcttgcgcgcactcttcagggacacacgtttgggcgagaatatcatcccttacgttgcagacggcgctaaggcagccattctgggcttcacatcccctgtttgggcagtcagaaactctagcactttgctcttctctgccctgataacaaggatcttcggggtgaagagagctaaagatgagcattctaaaaccaaccggatgactgggagggaattcttctcaagatttccagagctatatcctttcctgcttaaacagctcgaaacagtcgccaacacagtggactcagacatgggagaacccaacaggcacccatccatgtttttgttgctcttagtcctcgaacgactgtacgcatctcccatggacggcacctcaagtgctttgagcatgggcccttttgtcccctttatcatgagatgcgggcacagcccagtataccactcccgcgaaatggccgcacgtgcgttggtgccattcgtgatgatcgatcacattccaaacaccatcagaaccctgctctctacgctgcccagttgcactgatcagtgttttcggcagaatcatatacacggaacgctgttgcaagtgtttcacctcttgcaggcctatagcgattccaagcatggcacaaatagcgactttcagcacgaactaactgacataacagtgtgcactaaagcaaagctgtggctggctaagcggcagaatccgtgtctagtgacgcgcgcagtgtacatcgatattctcttcctgctgacttgctgcctgaacaggtctgccaaggacaatcaacctgtacttgagagccttggcttctgggaggaagtaagaggcatcatatccggctccgagctgatcacagggtttccgtgggctttcaaagttccaggcctccctcaatatctacagagcctcaccagactcgcgattgccgctgtgtgggcagccgctgcgaaatcaggggaaagggagacaaatgtgcctatttccttcagccaactgctggaatccgcctttcctgaagtcaggtctttgacactggaagcccttctggagaagttcctagccgctgcctccggtttgggggagaaaggggtgcccccactgctctgcaatatgggggaaaaattcctcctgttggccatgaaagaaaatcaccctgagtgcttttgtaaaattttgaaaatcctgcactgcatggacccaggggaatggcttcctcagaccgaacactgcgttcatcttacccccaaggaattcctcatctggacaatggatattgcgtccaacgaacgcagcgagattcagagcgtggctctgaggttggcctctaaggttatttctcaccatatgcaaacctgcgtcgagaatagggagttgatagcagcggaactcaaacaatgggtgcagttggtaatactatcttgtgaagatcacctgccgactgaaagtcgtctggcggtggtagaggtgctcacttctactacaccactgtttttgactaacccacatcctatcctggagcttcaggacacactcgccctctggaaatgtgtcctaaccttgctgcaaagcgaggaacaggcggttcgcgatgcagcgactgaaacagtaactaccgctatgtcccaggaaaatacttgtcagagcaccgagttcgccttttgtcaggtggatgcctcaattgcactagcgctcgcattggcggtcttgtgtgacctgttacaacagtgggatcagctggcccctggcctcccaattctgctgggttggctgctgggggaaagtgatgacctcgttgcctgcgtcgaaagcatgcaccaggtggaggaggactacctctttgaaaaggctgaggtgaacttctgggctgaaactttgatattcgtgaaatacttgtgtaaacacctcttctgcctgctttctaagagcggatggcggcctccgtctccggagatgctctgccatctccagcgaatggtgtccgaacagtgtcatctgttgtcccagttcttccgggagctgccgcctgcagctgagtttgtgaagaccgttgagttcacccgtctaagaattcaggaggaacggacactcgcatgtttacggctactcgcctttctcgaggggaaggagggagaggataccttggtcctgtcagtgtgggacagctacgccgaatcaaggcagctgaccctgccacggaccgaggctgcctgcta

SEQ ID NO: 31136 - DNA, 5861 bp, synthetic construct
  misc_feature 1..5861: note = Description of Artificial Sequence: Synthetic coding sequence
  source 1..5861: mol_type = other DNA
atgggcgttaaaaaaaaaaaggagatgcaggtggccgcattgacgatttgtcaccaagacctggaaacattgaaatcattcgcagatgtggagggcaaaaacctggcttccctgctcctccattgcgtccagctcaccgatggcgtgtcccagattcattacataaaacagattgtacctctgttggagaaggctgacaagaatgggatgtgcgacccaacgatccaatcctgtctggatattttggcgggtatctatctatcactctccctcaagaatcccctcaaaaaggtgttggcaagctcactgaactccctgccggattttttcctccccgaagccatgcaccgtttcaccagcaggctgcaggaagagcttaacactacagatctgtactcttatcgaaaggtgaccgacaatatctcttcttgcatggagaattttaaccttggtcgcgctagcgtgaacaatctactgaagaatgtgctgcatttccttcagaagagcctcatcgagattctggaggaaaacaggaagtgcgccggaaatcatattatccagacccagctgatgaatgatttgctagtaggtatcagagtgtctatgatgctggtgcagaaagtccaggattttcagggcaatctgtggaagacatctgactctcccatatggcagaatatgtgtggtttactctcaatcttcacaaaggtgctgagtgatgatgatctgttgcagactgtgcagtccaccagcggtctggctattatcttgtttatcaagaccatgttccatccaagcgaaaaaataccccatttgatcagcagtgtcctactgcgatccgtcgattgtacttccgtccccgagtggttcatgagctcgtgccgctctttgtgctgtggcgatatcagccaatctgcagtgctattcctgtgtcaggggacgctagcaatgctggattggcagaacggctcaatggggagaagtggcgaggcacttttgctcgacacagctcatgtgctctttaccctcagtagtcagatcaaggagcccaccctagaaatgttcctgagtagaatcctggctagctggaccaactctgctatccaggtactggaatcttcttcaccaagtcttacagactccttgaacggcaacagttctatcgtaggccgtctcctcgagtacgtttacacacattgggagcaccctttagacgcattgagacatcaaacaaagattatgttcaaaaatctcttgcagatgcataggctgacagtggagggcgcagacttcgtgccggatccattcttcgtcgaactgaccgagtcgctgctgaggctggagtggcacataaaggggaagtatacctgcctgggctgtctagtagagtgtatcggagtggagcatattctcgcaattgacaaaacaatccccagccaaattttggaggtaatgggtgatcagtctctggttccgtatgcttctgatctcctggagactatgttccgcaaccataagtcgcacctgaagtctcagacggcggagtctagctggatcgaccagtggcacgagacctgggtgtcccctctcctcttcatactttgcgaaggtaatctcgaccaaaagtcatatgtcatcgattattatctgccgaaactgttaagttactcacccgagtcattgcagtacatggtcaagatactgcagacgtccatcgatgcgaaaacaggccaggagcaatctttccctagcctgggatcttgcaattcgagaggcgcactcggagctctcatggcttgtttgcgaatcgccagggcccacggccatctgcaatcggccaccgatacatgggaaaacctggtcagcgacgccagaataaaacaaggtctgatacaccagcactgccaggtccgaatcgataccttaggactgctttgcgaatccaaccgaagcactgagatagtgagcatggaagagatgcaatggattcagttttttatcacctataaccttaattcccaatctcccggagtaaggcagcaaatatgctctctgctgaagaaattattctgccgaattcaggaatcaagtcaggtcctctataagttagagcagtccaagagcaagagagagcctgagaacgagctaacgaagcagcacccaagcgtatcactccaacagtacaagaacttcatgagcagtatctgcaatagcttatttgaagctctcttcccaggctcctcttattccacaagattttctgcattaactattctgggctcaatagcggaagtgttccatgttcccgaggggaggatttatacagtctaccaactgtcccatgatatagacgtgggtcgtttccaaaccctgatggaatgctttacatcaacttttgaagacgtcaaaattctagcattcgacttactgatgaagctcagcaaaacagcggtccacttccaggattccgggaagctccaggggctgttccaagccgctcttgagctgagcacctccacgaaaccctatgattgcgtcacagcttcctatctgcttaacttcctgatctggcaggacgctctgccttccagcctgtctgcataccttacacaacaagtggcgtgcgacaatggagacagacccgctgccgtggtggagagaaacacgttgatggtgatcaaatgtttaatggagaacttagaggaagaggtatctcaggcagagaactctttgctgcaggcggctgctgcattcccaatgtacgggagagttcactgcatcaccggagccctccagaaactgagtcttaatagcttacagttggtttcagagtggcgcccagtcgtggaaaagttactgcttatgtcctaccgcctgtcaaccgtggtgtctcctgtgatccagtccagctcccccgaggggctgataccaatggacactgattcggagtcagccagcaggctgcagatgattctcaacgagattcagcctcgtgataccaacgattactttaatcaggcgaaaattttgaaagagcacgactcattcgatatgaaggaccttaatgcttccgtcgttaacattgacacatccactgagatcaaggggaaggaggtgaagacttgtgatgtaaccgcacaaatggtgctcgtgtgctgttggagatccatgaaggaagttgccttgctgctaggtatgctttgccagcttcttcctatgcagccagtgcccgaatcaagtgatggcctgctgaccgtcgaacaggttaaagaaatcggcgactattttaagcagcacctgctccagagtcggcatagaggggcattcgaactcgcctacacaggattcgtgaagttgacggaggtcctaaacaggtgcccaaatgtgtccctgcagaaactccccgaacaatggctctggtccgttctagaggagatcaaatgcagtgatccctcatctaagctctgcgccactcggaggtccgcagggatcccgttttatatccaagccctcctcgcctcagaaccgaagaagggccgtatggaccttctcaaaatcacaatgaaagaactgatttctctggccggtcccactgacgatatccagtccactgtccctcaggtgcacgccctgaacatactgagggccttattccgggataccagattgggagaaaacataattccttacgtcgccgacggcgctaaagccgcaatactcggtttcacttcccccgtttgggccgtgcgaaatagttccacccttctgttctcagcccttataactcgcatctttggggtgaagagggctaaagacgagcactctaagaccaatagaatgactgggcgagagttcttttcccgcttccctgagttatatccctttctcttgaaacaactggaaacagttgcaaatacagtcgactctgatatgggggaaccaaatcgccatccatccatgttcctgctcctactggtgctggagaggctgtatgcttcccctatggacggtacatcctctgccctctcgatgggtccattcgttcctttcatcatgcgatgcggacatagtcctgtctatcacagccgagaaatggccgcacgcgctctggtgcctttcgtaatgatcgaccacatccctaataccattcgcactctccttagcacactcccgtcatgcactgatcagtgcttcagacagaaccacatccatgggaccttgctgcaggtcttccacctccttcaggcttacagtgattctaaacatggtaccaacagtgattttcagcacgagttgaccgacattacagtgtgcactaaggctaagctgtggctggccaagcggcagaatccctgcctcgtgactagagctgtttatatcgatatcttattcttactaacttgctgtcttaataggtctgccaaggataatcagccagtgttggaaagtttgggcttttgggaagaggtgaggggcatcataagtggttccgagctgatcactggatttccatgggcatttaaggttcccggtctgcctcagtatctccagagcctgacacggcttgcgattgctgcagtgtgggcagccgcagcgaagtctggagaaagagagaccaacgtgcccatcagctttagccagttgctcgaatctgccttcccagaagtgcggagccttactttggaggcgctcctggagaagtttctagccgctgcctcgggcctcggtgaaaaaggggtccctcctctgctgtgcaatatgggcgagaaattcctcctcttggcgatgaaggagaatcatccggaatgcttttgtaagattctaaaaatcctccattgtatggaccctggggaatggcttcctcaaaccgagcattgcgtgcacctgacgccaaaagagttccttatctggaccatggatatagcgtccaatgagagaagcgaaatccagagcgtcgctttgcgactcgcaagtaaggtgatctcccatcatatgcagacttgcgtcgaaaatcgggagttgattgccgctgagctgaagcagtgggtgcaattggtaatcctttcgtgtgaggaccacctcccaacggagagcagattggccgttgtcgaggtgctcacatcgaccactcccctttttctcacaaatccacaccctattctggagctccaagacacgcttgctctgtggaagtgtgtgctcacattgctgcagagcgaagaacaggctgtcagggatgccgcaaccgagaccgttacaacagcgatgtcccaggagaatacatgccagtccacggagtttgccttttgtcaggttgatgcttctattgccctcgccctggcgttggctgtgctctgtgatctactgcaacaatgggatcagctagccccaggccttcccatacttctggggtggcttctgggggagagtgacgatctcgtggcttgtgtcgaatccatgcaccaggttgaggaagattatctatttgaaaaagctgaagttaatttttgggcggaaactctgatcttcgtgaaatatttatgcaaacacctattctgcctactgtcgaagagcggatggcgacctccctctcccgaaatgctctgtcatctgcagagaatggtgtcggagcagtgtcacttactgagccagtttttccgtgagcttccgcctgcagcagaattcgtcaagacagtggagttcacccggctgcggatccaggaggagcggaccctggcttgtctgaggctgttagcctttttagaggggaaggaaggcgaggacaccctggtgctttcagtgtgggattcttatgctgaaagccgtcagcttactctcccacggacagaagctgcttgtta

SEQ ID NO: 31137 - DNA, 4905 bp, synthetic construct
  misc_feature 1..4905: note = Description of Artificial Sequence: Synthetic coding sequence
  source 1..4905: mol_type = other DNA
atgagttcgtgccgatccctctgttgcggagacatcagccaatccgcagttctgtttctctgccagggtactctggcaatgcttgattggcagaacggtagcatggggagatccggcgaggcacttctcctggacaccgctcacgttctcttcaccctaagcagtcaaattaaggaaccaacactggaaatgtttctttctcggatcctggcaagttggacaaattccgcaattcaagttcttgagtcttcatctccttctctgaccgacagcctgaacggaaattcttccattgtgggcagactccttgagtacgtatacacacactgggagcatcctctggatgctctgagacaccaaaccaaaattatgttcaagaatctgctgcagatgcatcgtttgactgtggaaggggctgatttcgtgcccgacccttttttcgtggaacttaccgagagccttctccgactggaatggcatataaaggggaagtacacatgcctggggtgcttggtggaatgcataggcgtagaacacatcctagctatcgacaagacgatcccttctcagattctggaggttatgggggaccagagcctggtcccttatgcaagcgacctgctggagactatgttcaggaaccataagtctcatctgaagagccaaaccgcagagtcttcatggattgatcagtggcacgaaacttgggtgtcccccctgttattcatcctgtgcgagggaaatctcgatcagaaatcttatgtgattgactactacctccctaaactgttgagttatagtcctgagtctctgcagtacatggttaaaatcctacagacaagcatcgatgcaaaaacgggacaggagcaatcctttcctagtttgggatcatgtaacagccgaggagccctcggcgcattgatggcttgtttacggatcgcgagagctcatggacacctccagtcagccactgatacctgggaaaaccttgtctcagatgccagaattaaacagggactcatccaccaacactgtcaagtacgaattgacacccttggcctgttgtgcgaaagtaatcgaagcacggagatcgttagtatggaagagatgcagtggatccaattcttcatcacgtataacctgaatagtcagtcaccaggggttaggcagcaaatatgttcccttttgaagaagcttttttgtaggatccaagaatcctctcaggtgctatataagttggagcagtcaaaatctaaaagagagccagaaaacgagttgacaaaacagcacccatcagtgtccctacaacagtataagaattttatgtcatctatatgcaactcactgtttgaggcattatttccaggaagttcatatagcacacgattctctgcgttaacaattctgggatctattgcagaggttttccatgttccggaaggcaggatctacacagtgtaccagctttcccatgatattgatgtgggccgatttcaaaccctgatggagtgtttcacatctacgttcgaagacgttaagatcctggcgttcgacctgctgatgaagttgagcaaaacagccgtgcacttccaagacagcggaaagctccagggcctgttccaagccgctcttgagctttccactagtacgaagccctatgactgcgtcactgcgtcatacctcctcaatttcctgatttggcaagatgccctcccaagcagtcttagtgcttacttaacccagcaggtggcttgtgacaatggcgaccgtcccgcagcagtcgtggagcgtaacaccctgatggtgattaagtgcctcatggaaaatctcgaggaggaggtcagtcaggctgagaattccctcttgcaagcagctgcagcatttcccatgtatgggagagtacactgtatcactggggcattgcagaaactttcattgaattccctgcagcttgtgtcagagtggcgaccagttgtggagaagctgctgctcatgagttacaggctgagtacagtcgtctcccctgtgatacagtcaagtagtcctgagggtcttatccccatggacactgattcagagagcgcttctaggctccagatgatccttaatgagatccagcccagagacactaatgattacttcaaccaagcaaagatcttgaaggaacacgacagttttgacatgaaggacctgaacgcctctgtagtgaatatcgatacctccacagagatcaagggcaaagaggtcaagacctgcgacgtcaccgcacagatggtacttgtgtgctgctggcgaagtatgaaggaggtggccctgcttcttggaatgctttgccagcttcttccgatgcagccagtgcctgagtccagcgatggccttttaactgtggagcaggtgaaagagatcggcgactatttcaaacagcatttactccaaagtaggcatagaggcgcattcgaattggcctataccggattcgtgaaacttaccgaagtgctgaatagatgtcctaacgtgagccttcagaagctcccagaacagtggctgtggagcgttctcgaggaaattaaatgcagcgatccttcttctaagctctgtgcaacgcgaaggtccgccggtattccgttctacatacaggctcttctcgcgagcgagcccaagaaaggtaggatggacctcttgaagatcacaatgaaggaattgatctcactggcgggtcctaccgatgatatccagagcaccgtcccccaggtgcatgccctgaatatccttcgggctctgttcagagacacgcgcctgggcgaaaatattatcccctacgttgctgatggcgctaaggccgcaatactgggctttacatcaccagtttgggcctcacagatgacagggagagagttcttcagccgcttcccagaactctatcctttcctgttgaagcagctggagaccgtcgccaatactgtggactcagatatgggcgagcccaaccgtcacccatccatgttcctgttactacttgttcttgaaagactgtacgccagtccgatggatggaactagcagtgccctgtcaatgggacctttcgtgccatttattatgcgctgtggccactccccagtataccatagccgagaaatggcagcacgggctctggtgccgtttgtgatgatcgaccacatccccaatactatccgaaccctactgtctacccttccaagctgtacagatcagtgttttcgacagaaccatatccatggcactctgctgcaagtcttccacctgctgcaggcctattccgactctaaacacgggacaaactcagactttcaacatgaactgaccgatataaccgtatgtactaaagccaagctgtggctcgcgaagaggcaaaatccgtgcttggtcacccgcgctgtttacatcgacattctcttcctgctgacgtgttgccttaacagatctgccaaggataaccagcctgtgctggaatccttgggattctgggaggaggttcggggaattataagcggtagcgaactcattaccgggttcccctgggctttcaaagtccccggacttccacagtacctgcagtcactgaccagactggccatagccgctgtatgggccgcagcagccaagtcaggggagagagaaacaaacgttccaattagcttctcccagcttctggaatccgcctttccagaagtcagatctttaaccctggaggctctgctagaaaagtttctggcagccgctagcggactcggagaaaagggcgttccgccactactctgcaacatgggggagaagtttctccttctagccatgaaggagaaccaccccgaatgcttttgcaagattctcaagatcctgcattgcatggatcccggagagtggttgcctcagacagagcattgcgtgcacctgactccaaaagaatttcttatttggaccatggatatagcctctaacgaaagatccgaaattcagtcagttgccttgcgcttggctagcaaggtgattagccatcatatgcaaacgtgcgtggagaatcgggaacttatcgcagctgagctcaaacagtgggtacagttggttatcttatcctgcgaagaccatctccctacagaatcccgcttggctgtggttgaggtgctcacatcaacgacacctttattcttgaccaacccacatcccatcctagaactccaggacaccctcgccctgtggaagtgtgtgctcacactgctgcagagtgaagagcaggccgttagggacgctgctaccgagacggtgacaaccgccatgtcccaggaaaacacatgtcaatccaccgagtttgcattttgtcaagttgacgcatccattgcgttagctcttgccctggccgtgttgtgcgatttgctccagcagtgggaccaactggcccctggcttgcccatattgctgggctggttactcggagagagtgacgatctagtagcctgcgtcgagtctatgcaccaagtagaagaggactacttatttgaaaaggccgaggtgaacttttgggcggagactttgatctttgttaagtatttatgcaagcatctgttttgcctcttatccaaatccggctggaggcctccgtcccccgagatgctctgccatctgcaacggatggtgagcgagcagtgtcatctccttagtcagttcttccgtgaattgcctcccgctgctgagtttgtgaagacagtggagttcacacggctccggatccaggaagaacgtaccctcgcttgtctgaggttgctggccttccttgaaggtaaggagggagaggacactctcgttctttcagtctgggattcctatgccgaatctagacagttgactctgcctaggactgaggcggcatgctag

SEQ ID NO: 31138 - DNA, 2685 bp, synthetic construct
  misc_feature 1..2685: note = Description of Artificial Sequence: Synthetic coding sequence
  source 1..2685: mol_type = other DNA
atgggggtaaagaagaagaaggagatgcaggtcgccgcactgaccatttgccaccaggacctcgagacccttaaaagttttgcagacgtcgaaggaaaaaacctggcttctcttcttctgcactgtgtacagctgactgatggagtgtcccagatacactatattaagcaaatcgtgccactcctagagaaagccgataaaaacggcatgtgtgaccccactatccagtcctgcttagatatcctagccggaatatatctttccctttctttgaagaatccattaaagaaagtgctcgcttcaagcctgaatagcctgcctgactttttcctgcctgaagccatgcatcgtttcacaagtcgccttcaagaggagttaaatacaacggacctgtatagttatcgtaaggtcaccgataatataagttcctgcatggagaattttaacctggggcgagcttcggtaaataatctcctcaagaatgtgctgcacttcctccagaaaagcctcattgagatcttggaagagaataggaaatgtgcgggaaaccatatcatacagacccagctcatgaatgatcttctggttgggatcagggtcagcatgatgctagtgcaaaaggtccaggacttccaaggtaacttgtggaaaacctccgactctcctatctggcagaatatgtgcggcctcctctcaatctttacaaaagtcttatctgatgatgatctccttcaaactgtccagtctacaagcggactggctattatcttgttcattaagaccatgttccatccgtcggagaaaatcccacatctaatttccagcgttcttctgcgctcagtagattgcacctctgtgcccgagtggttcatgtctagctgcagaagcctctgttgcggcgatatctcccagtcggccgtgctgttcctttgccaaggcactctggcaatgttggattggcagaatggctctatgggcagatcaggcgaagccctcctgttggatacagcccatgtcctgtttacactctcctcgcaaataaaggagccgacgctggaaatgttcctgtctagaatccttgcaagctggacaaactcagccatccaagtcttggagagctccagcccatcactgaccgactcactgaatggtaactcctcaattgtgggcaggttgctagagtacgtttatacccactgggaacaccctctggacgctctgaggcaccagaccaagataatgtttaaaaacttactgcaaatgcatcgcctgaccgtcgaaggcgctgattttgtgcccgatcccttttttgtggaactcaccgaatcgctccttcgcctggaatggcacattaagggtaaatatacctgcctggggtgcctggttgaatgcatcggggtagaacatatcttggctattgacaaaactatccctagtcagatacttgaagtaatgggagatcaatcactggtaccctatgcctcagatctcctagagaccatgttcaggaatcataaatcgcacttaaagagtcagaccgccgaatcttcatggatcgatcagtggcatgaaacttgggtgagtccgctgctctttatcctatgcgagggtaacctggaccaaaaaagttacgttattgactattacttacccaagttactctcctattcccccgagagcctgcagtacatggtcaagatcctgcagacctccatagacgctaagacaggtcaagagcagagctttcccagcctcggttcctgcaatagccgcggagcgctgggtgccttgatggcttgtctgcggatcgccagagcccacggccatctgcagtccgcaacggatacttgggaaaatcttgtcagtgatgccaggatcaagcagggtctcattcatcaacactgccaagttaggattgacactctagggctgttgtgtgaaagtaacagatcaacagagattgtcagtatggaggagatgcagtggatccagttttttatcacctacaaccttaactctcagtcacctggcgtcagacagcaaatttgttcactcctcaagaagttattttgcagaatacaggaaagctcgcaggtgctttacaaattagaacagtcaaagtcaaagagagagcccgagaacgagctcactaaacaacacccatctgtgtctctgcagcagtacaaaaactttatgagcagcatctgtaattccctttttgaagccttatttccaggctcttcatactcgacacgcttctccgccctcaccatattaggctcaatcgccgaagtgtttcacgtgcccgagggaaggatttacacggtgtaccagctgtcccacgatatcgatgtgggtagattccagactctcatggaatgtttcacctcgacatttgaggatgtgaagattctggccttcgatttactgatgaagctaagtaagaccgcggtacacttccaggactccggaaagttacagggtctgttccaggcagccttagagctctcaacgtctacgaagccttacgactgtgtgactgcctcttatctgctgaacttccttatctggcaggacgctcttcctagcagtttatctgcctatctcactcagcaggttgcttgcgacaatggggacagaccagcagccgtggtggagcggaacaccctaatgggtctctattag

SEQ ID NO: 31139 - DNA, 2268 bp, synthetic construct
  misc_feature 1..2268: note = Description of Artificial Sequence: Synthetic coding sequence
  source 1..2268: mol_type = other DNA
atgtctggcaccaatctggacggcaatgacgaatttgacgagcaactacggatgcaggagctctatggcgatggcaaagatggtgacacacagactgacgcgggaggagagcccgatagcttgggacagcaacccaccgacaccccttacgagtgggatctagataagaaggcctggtttcccaaaatcactgaagacttcattgccacttatcaggccaattatggcttcagtaatgacggagcatcgagctccaccgctaacgtcgaggacgtgcacgcgcgtactgcagaggaacccccacaggaaaaagctccagagcccacagatgcaagaaagaagggagaaaaacgcaaagcagagagtggatggtttcacgttgaagaagaccggaacacgaacgtgtacgtttctggtctcccacctgacattaccgtcgatgagtttatccagctcatgtctaagtttggaattataatgagagatccacaaactgaagagtttaaagtaaagctgtataaggataaccagggtaacctcaaaggagacggcttgtgttgctacttaaagagggagtccgtcgagttagcattaaaactactggatgaagatgagatcagggggtataagctgcacgtggaagtcgccaaatttcagctcaagggtgaatatgacgcgtctaagaaaaaaaagaaatgtaaagactacaagaagaagctgtctatgcaacaaaagcagctcgactggcgaccagaacgccgagccggaccctctagaatgaggcacgaaagagtagtaattatcaaaaatatgttccatcctatggactttgaagatgatccactggttttaaacgagattcgggaagacctgagggtggagtgcagtaagttcggccaaatcagaaagctccttttgtttgatcggcatccagacggcgtagcatcagttagctttcgggatcctgaggaagccgattattgtattcagacactggatgggcgatggttcggcggtcggcaaattactgcacaggcgtgggacgggacaacagattatcaagttgaagaaacctcaagagagagagaggaaaggctacgagggtgggaggcctttctgaacgcgccagaagccaacaggggcctccgcaggagcgattctgtcagtgcgtccgaacgcgctgggccaagcagagcccgtcacttctcagagcacccatctacgagcaagatgaacgcccaagaaacagccaccgggatggcatttgaagagcctatcgatgagaagaaattcgagaaaacagaggatggtggagaattcgaagagggggctagcgaaaacaatgccaaggaaagcagtccagagaaagaagccgaggaaggctgcccagaaaaggaatccgaggagggctgcccaaagagagggtttgagggaagctgtagccagaaggagagcgaagaaggcaatcctgtgcgcggatcagaggaagacagcccgaaaaaagaaagcaagaagaagacattaaagaacgactgcgaggagaacggactggcaaaggagtccgaggacgacttaaacaaagagtctgaagaggaagtggggccaactaaggaaagtgaggaggacgacagtgaaaaggagtctgacgaagattgtagtgagaagcaaagtgaggatgggagcgagcgcgagtttgaggagaatggccttgaaaaggacctagatgaggaaggatctgagaaagaactgcacgagaatgtgctggacaaggagttggaagaaaacgattcagaaaactctgaatttgaagacgatggaagcgaaaaagtgctggacgaggaaggttctgagagggagtttgatgaagatagtgacgaaaaggaggaggaagaggacacatatgaaaaagttttcgatgacgaatctgacgaaaaagaggatgaggaatacgcagacgagaagggcctggaagccgctgacaagaaagctgaggaaggcgacgccgatgagaagctcttcgaggagtctgatgataaggaagacgaagacgccgatggaaaagaggtggaggatgctgacgagaaactttttgaggacgatgacagtaacgaaaagttgtttgatgaggaggaggactcatctgagaaactgttcgatgattccgacgaacgaggcacgctaggaggattcgggtccgtagaggaaggaccgctttctactgggtctagtttcatattgtcttctgacgacgacgacgacgatatctag

SEQ ID NO: 31140 - DNA, 432 bp, synthetic construct
  misc_feature 1..432: note = Description of Artificial Sequence: Synthetic coding sequence
  source 1..432: mol_type = other DNA
atgaccaagatgtataaaggtttccaggcactgggggatgctgcagacataagatttgtgtacacaccagccatggaatctgtgtgcgggtatttccaccgttcacataacagatccgaggagtttctgattgctggcaaactgcaggacggcctcctgcatatcaccacttgctctttcgtggctccatggaactcgctcagtcttgctcagcggaggggcttcacaaagacttacacagtgggctgcgaagagtgcaccgtgtttccctgtctgagcataccctgtaagctccagtctggcacccactgtctgtggacggaccaactgctccaggggtcagaaaaagggttccagtcaaggcatttggcgtgtctaccgagagaacctgggttatgtacctggcagtcccttagatcgcagattgcctag

SEQ ID NO: 31141 - DNA, 786 bp, synthetic construct
  misc_feature 1..786: note = Description of Artificial Sequence: Synthetic coding sequence
  source 1..786: mol_type = other DNA
atgcccctgaccagcggttctagcacccctcctccatggcgagtgagcgccgacacctcgactggcccaactaccgcggctcgctctttctccttattagtaagacatcgcccaagagcactttgtcacaccaatcagtctctggggcgtgggctggcaacaactcgaggacggggaagtgacggaaacgggcctacgggcaacggagaccaccctaacttttccctcagcgaaggtcgggcttttggtagtttagccgcacagcccatcaccagttgtttgagtgtgcccgctccacccttcagccttgggaagctacaagatgggctgttacacataacaacgtgtagtttcgttgccccttggaacagtctgagtctggcccagaggaggggcttcactaagacttatactgtgggttgtgaggaatgtacggtgagcgcatggacactgacaagtaacgggagatcatttcctggcccatttcctaaatcctgggcttgctttttactgcccctggccatcctgtgtccctgcgggtgctctccaaccctccgggctgtgccagacttgagttgttacttcccaaaaccggagacagcccctctccagatcttggctgctccattcccatgcgtgcagtatcgcgtgatcacatgcccttcactggtcccccttatcctgccttgtgactactctgtcatccccttgcccgtgcccgagccacctgggctattcctcggcagcccagagtgttctccaaggacccagtcagctgttccttag

SEQ ID NO: 31142 - DNA, 291 bp, synthetic construct
  misc_feature 1..291: note = Description of Artificial Sequence: Synthetic coding sequence
  source 1..291: mol_type = other DNA
atgccagtttattccgcctggcccgcagaacccactatggcaccatttgagccattagccagtggcattctgctgttactatggttgatcgcacccagcagagcctgtacctgtgtcccccctcacccccagaccgctttttgcaatagcgatctggtcatcagagcaaagttcgtcgggacacccgaagtaaaccagaccactctttaccaacggtacgaaattaagatgaccaaaatgtacaaaggtttccaggccctgggggacgccgcagatatcagatttgtgtag

SEQ ID NO: 31143 - DNA, 498 bp, synthetic construct
  misc_feature 1..498: note = Description of Artificial Sequence: Synthetic coding sequence
  source 1..498: mol_type = other DNA
tagccacgggctttgtgtcacactaatcagtccctgggacgcggtttagcaacgacccgcggaagggggtctgatgggaatggacccacgggcaatggggatcaccctaacttttccttgtcggagggcagagccttcggtagcctggcagcacagcccataacatcatgcctgagcgtcccagccccaccattttctcttggaaaactgcaggatgggcttcttcacattaccacatgcagcttcgtcgcgccttggaattcactgagcctggcccagcgcaggggctttactaagacatatacggttggatgcgaagaatgtacagtgttcccatgtctgtcgataccttgtaaacttcagagcgggactcattgcttgtggacagatcaactcctgcaggggagcgagaaaggctttcagtcccgacacttggcttgcctgccaagagagcccggactgtgcacctggcagtcactgcggagccaaatcgcctag

SEQ ID NO: 31144 - DNA, 411 bp, synthetic construct
  misc_feature 1..411: note = Description of Artificial Sequence: Synthetic coding sequence
  source 1..411: mol_type = other DNA
atggctccttttgagcctctcgcgtcaggcattttactgttgctgtggctgatcgccccttcccgcgcatgcacgtgcgttcctcctcatcctcaaaccgccttctgcaattctgacctggtaatcagggcaaagttcgttggcaccccagaagtgaatcaaactacgctttaccagagatacgagattaaaatgactaaaatgtataagggatttcaggcactaggagacgcagccgacatcagatttgtgtacacccccgctatggagtctgtgtgcgggtatttccatagatctcataataggtctgaagagttcttgattgccggagaagctccatcccccagaccagtgccacaccagcccgtccctggagctagaccgtcaaaccacgaaggcgctcgcttgtag

SEQ ID NO: 31145 - DNA, 663 bp, synthetic construct
  misc_feature 1..663: note = Description of Artificial Sequence: Synthetic coding sequence
  source 1..663: mol_type = other DNA
atgggtgcagcggctcgcactttaaggctggctctggggctcctgttgcttgctacactgcttagacctgcggacgcctgtagctgttcacccgtgcacccgcagcaggccttctgtaatgcggacgtggtcattagggccaaggcagtgtctgagaaagaagtggattccggtaacgatatatacgggaaccccatcaagcggattcaatacgagattaagcaaattaagatgttcaaggggcctgagaaggatattgagttcatatacaccgctccctcatctgccgtgtgtggcgtttccctcgacgtgggagggaagaaggagtacctgattgccggaaaggctgagggggatggaaagatgcatattacgctatgtgactttattgtcccatgggacaccctgtctactacccaaaagaaaagcctgaaccatcggtatcagatgggatgtgagtgcaagatcacacggtgtcctatgatcccctgttatatcagctcccctgacgagtgtctttggatggattgggtgaccgaaaagaacatcaatggacatcaagcaaagtttttcgcgtgtataaagcgctctgacggcagctgcgcctggtacagaggcgctgctccgcctaagcaagagtttttagacattgaagatccctag

SEQ ID NO: 31146 - DNA, 432 bp, synthetic construct
  misc_feature 1..432: note = Description of Artificial Sequence: Synthetic coding sequence
  source 1..432: mol_type = other DNA
atgttcaagggtccagaaaaagatattgaatttatctacacagccccatctagcgcagtatgcggtgttagtctggacgtgggtggcaagaaagaatacctcatcgctggcaaggcagagggtgatggtaagatgcatataacactgtgtgacttcattgttccttgggatacactgagcaccacacagaagaaatctctgaaccaccgatatcagatgggatgtgagtgcaagattacaaggtgtcctatgatcccttgttacatctctagtcccgatgagtgtctgtggatggactgggtcacggaaaagaatatcaacgggcatcaggctaagtttttcgcttgtatcaagcgcagcgacgggagttgtgcctggtataggggcgctgctccacctaaacaagagttcctggatatcgaggatccttag

SEQ ID NO: 31147 - DNA, 636 bp, synthetic construct
  misc_feature 1..636: note = Description of Artificial Sequence: Synthetic coding sequence
  source 1..636: mol_type = other DNA
atgacaccttggctgggtctgatagtgcttctggggtcttggagcctcggtgactggggcgcagaggcctgtacttgttctcccagccaccctcaggatgcgttttgcaatagcgacattgtgattcgcgctaaagtggtcgggaaaaaactcgttaaagagggcccttttgggaccctagtttataccatcaagcagatgaaaatgtaccgaggcttcacaaaaatgcctcacgttcagtacattcataccgaggcttctgagtcattgtgtgggctcaagcttgaggtgaacaagtatcagtaccttttgacgggcagggtttatgacggtaaaatgtacaccggactttgcaattttgtcgagcggtgggatcagctgaccctgtcacagcgtaaaggattgaattaccgctatcatttaggatgcaattgcaaaatcaagagctgttactacctcccttgcttcgttaccagcaaaaatgaatgcctgtggacagacatgttgagcaacttcggatacccaggatatcagagtaagcactatgcctgtataagacaaaaagggggttattgttcgtggtataggggatgggccccaccagataagtccatcatcaatgccacagatccttag

SEQ ID NO: 31148 - DNA, 438 bp, synthetic construct
  misc_feature 1..438: note = Description of Artificial Sequence: Synthetic coding sequence
  source 1..438: mol_type = other DNA
atgaaaatgtatcgaggttttacaaaaatgcctcatgttcagtacattcacacagaagcttcagaatccttgtgtggtctcaagttagaggttaataaatatcagtatttgcttaccgggagagtgtacgacggcaagatgtatacgggtctgtgtaactttgtagagagatgggaccagctgacactgtcacagagaaagggcctgaactaccggtatcaccttgggtgcaattgtaagattaagagctgttactatctcccatgctttgtcacttccaaaaacgagtgtctctggaccgatatgttgagcaacttcggatacccagggtaccagtcgaaacactatgcctgcatcagacaaaaagggggatattgcagctggtatcggggttgggcccctcccgacaaatccattataaacgccactgacccttag

SEQ ID NO: 31149 - DNA, 675 bp, synthetic construct
  misc_feature 1..675: note = Description of Artificial Sequence: Synthetic coding sequence
  source 1..675: mol_type = other DNA
atgcccggaagcccaagaccggcaccttcatgggtccttctactgcggctgctggctctcctgcgtccccctggcttgggcgaagcctgtagctgtgctcccgctcacccgcagcagcatatctgtcactcagctctagtaattagagcaaagatcagcagtgagaaggtagtcccggcaagtgctgatcccgctgatacagaaaagatgcttagatatgagattaaacagatcaagatgtttaaaggcttcgagaaagtaaaagatgtacaatatatatacacgccattcgactccagtctgtgcggtgttaagctggaagccaacagccagaaacagtacttgctaacgggccaggtgctctctgacggcaaggtgtttatccacttatgtaattacattgagccatgggaggatctcagcctcgttcagagagagtcactcaaccaccactatcaccttaactgtggctgtcagatcacaacatgttacacagtgccctgcactatttccgctcccaatgaatgcctctggaccgactggttattggagagaaagttgtatgggtaccaggctcagcactacgtttgcatgaaacatgtcgatgggacctgtagctggtatagaggtcacctcccgctgcgcaaggagtttgtggatatcgtgcagccctag

SEQ ID NO: 31150 - DNA, 1164 bp, synthetic construct
  misc_feature 1..1164: note = Description of Artificial Sequence: Synthetic coding sequence
  source 1..1164: mol_type = other DNA
atggtgcactgctcgtgcgtccttttcaggaagtacggaaacttcattgataagctccggctgttcacgagagggggatctggaggaatgggttatcccagattgggaggtgagggcggaaaaggtggggatgtttgggtcgttgctcagaaccgcatgactctaaagcagctgaaagacaggtatcccagaaaacggttcgttgcgggtgtgggggcaaatagcaagatttccgccctgaaaggctccaaggggaaggattgcgagataccggtccccgtaggcatttcagtgacagatgagaatggtaagatcatcggggagctaaataaggaaaacgatcggattctcgtagctcaaggaggactgggagggaaactgctgactaattttttgcctttaaagggccagaagaggataatacacctggacttgaagctgatagctgatgtagggctggtcgggtttccaaacgccggaaagtcctccctactttcatgcgtatcacacgcaaaaccagctatcgccgactatgcttttactacgcttaaaccagaactggggaaaattatgtatagcgactttaagcagatatccgtggctgacctgcctggcctgatcgagggagcacacatgaataaaggaatgggacacaagtttctcaaacacattgagcgtaccaggcaacttctgttcgtggttgatatttccggcttccagctgagctcccacacgcaataccgaactgcatttgaaacaataatcctgttgaccaaagaactggagctatataaggaagaactccagactaaacccgcattgctggccgtgaataagatggatctgcccgacgcccaagacaaattccacgagctgatgagtcaattgcagaaccccaaagattttcttcacctgtttgagaagaatatgatccccgaacgcaccgtggaattccagcatatcatccccatctctgccgttactggagagggcattgaagagctgaagaattgcatccgtaaaagcctggatgagcaagctaaccaagagaacgatgcactccacaagaagcagctcttgaacctgtggattagcgacacaatgagttccactgaacccccaagcaagcacgcagtcacaaccagcaaaatggacataatctag

SEQ ID NO: 31151 - DNA, 375 bp, synthetic construct
  misc_feature 1..375: note = Description of Artificial Sequence: Synthetic coding sequence
  source 1..375: mol_type = other DNA
atggaccctgcccgacccctcggcctttcaattctcctgttatttcttacagaagcagctctgggtgacgctgcccaggaaccaacaggcaacaatgcggagatctgcctgctacccctggactatggcccatgtcgtgctctcctgctacgttactattatgaccgctacacccagagttgccggcagttcctatacggcggttgtgaaggaaatgccaataacttctacacctgggaagcctgcgacgatgcctgctggcggatcgagaaggtgcctaagctgagctctatgactagcttaaaaaagaagaagaaaatgcctaagttgcggttcgcttcgcgcattcgcaaaatacgtaaaaagcaattctag

SEQ ID NO: 31152 - DNA, 1506 bp, synthetic construct
  misc_feature 1..1506: note = Description of Artificial Sequence: Synthetic coding sequence
  source 1..1506: mol_type = other DNA
atggcagcagcctcggttacaccccctggatctctggagttgttacagcctgggttctccaagacactcctaggaaccaaactggaggccaagtatctgtgtagtgcctgccgcaatgtgctgcgcaggccattccaggcgcagtgtggccaccgctattgctctttctgcctcgcatctatcctctcctctggcccacagaattgcgcagcatgcgtacatgagggaatttatgaggaaggaatatctatattagaatcatcaagtgcattccctgataatgccgctaggagggaggtagaatcgctaccggcagtgtgtccctccgatggctgcacctggaaaggtactcttaaggagtacgaatcctgtcacgaaggcagatgtccgctgatgttgactgagtgtccagcgtgcaaagggctagtgagactgggagaaaaagagcgccatcttgagcacgaatgtccagaaagaagcctgtcttgccggcattgccgcgcaccttgttgcggcgctgatgtgaaagctcaccatgaggtgtgccctaagtttccacttacctgcgatgggtgtgggaagaaaaagattcccagagagaaatttcaggaccatgtgaagacgtgcgggaagtgtagggtgccttgccggtttcacgctatcgggtgtttggaaactgtcgagggggagaaacagcaggaacatgaggttcaatggctgcgagagcatctcgcgatgctcctctcaagtgtactggaagccaaacccctgttaggtgaccagtcccacgcaggctccgagctgctccagcgatgtgaaagcctcgaaaaaaaaaccgcaaccttcgagaacatagtatgtgtgcttaacagagaggtagagagagtggccatgaccgctgaagcctgttcaagacagcacagattggatcaagataaaatagaggcgctttcttcgaaagtacagcaattggaacggtctatcggcctgaaggatttggcgatggcagatttggaacaaaaggtgttggagatggaagcctctacctacgatggagtgtttatatggaagatttccgactttgctcggaaaaggcaggaagcggtggcaggtaggatccctgccattttcagcccagcgttctataccagtcggtacgggtataagatgtgcctgagaatctatctgaacggggacggtacgggtcgagggacccacctctcccttttctttgtcgtcatgaagggcccaaatgacgcactcttacgctggcctttcaatcagaaggttacactcatgcttctggatcagaataatcgggaacacgtgattgacgcttttcgcccagacgtgacatcatctagttttcagcgaccagtaaatgacatgaacatcgcatcaggatgtcccctattctgcccagtcagcaagatggaagctaagaattcctacgtccgcgacgacgcaattttcataaaggccatcgttgacttaactggactctag

SEQ ID NO: 31153 - DNA, 1662 bp, synthetic construct
  misc_feature 1..1662: note = Description of Artificial Sequence: Synthetic coding sequence
  source 1..1662: mol_type = other DNA
atggccgcagccagcgtcactccccctggttctctggagctgctccagcctggttttagcaagacccttttggggacaaaactggaggccaagtacctgtgtagcgcctgcaggaatgttctccgccgacctttccaagcacagtgtggacacagatattgcagtttttgtctggctagcatactatcctccggtccacagaactgtgctgcatgtgtacatgaggggatctacgaagagggtattagtattctagagagctcatccgccttccccgataatgcagccagaagggaggtcgaatctctccccgcagtttgtccttctgacggctgcacttggaaaggcactcttaaggagtacgaggtcaagatgcccgcttgcggaatggtgactgaggcgccagccgtgggatcacggcctaggagtccctccagctacgacctcgtgctgcacgtccctctgactggtgccgaggcctgcttaatgagcgtagaagaggaaacagagttgctcttgcgttcttgtcatgaaggcaggtgtccactgatgctgacggagtgtcctgcctgcaaggggcttgtgcgtctgggcgaaaaagaacggcacctggagcacgaatgccccgagagatcactgagttgccgtcactgcagggcaccctgctgcggggcagacgtcaaagcccaccacgaagtgtgccccaaattccctctgacctgtgacggctgcggcaagaagaagatacctcgtgagaagttccaagatcacgtgaagacttgtgggaaatgcagagtgccctgccgttttcatgccatcggttgcctggagactgtggagggagaaaaacagcaagagcacgaggttcagtggctgcgagagcacctcgccatgctgctgtctagtgttctcgaagctaagcccctgctgggcgatcaaagccacgctggcagcgaactgctccagcgctgtgaaagcctcgagaaaaagaccgccacattcgagaatatcgtgtgcgtactgaatcgggaagttgagcgagttgccatgactgcagaagcttgttcaaggcagcacaggctagatcaggataaaattgaggccctgagcagtaaagtgcagcagctggaacgatcaatcggactgaaggacttagcaatggcggatctggagcaaaaggtacttgaaatggaggcttctacttatgacggcgttttcatctggaagatatctgatttcgctaggaagaggcaagaggctgtcgccggacgtatccctgccatttttagccccgcattctacacgagcaggtacggctacaaaatgtgcctcaggatctacttgaatggtgatgggaccggcagaggaacccatctttcattattttttgtggtcatgaagggacccaatgacgctctgttacgctggcctttcaatcaaaaggtaactctaatgttgctcgatcaaaacaatcgggagcatgtcatcgatgcttttcggcctgatgtaacatcaagtagcttccaacgtcccgtcaacgatatgaacattgcttccgggtgtcctctgttttgccctgtatccaagatggaggccaagaactcatacgtgcgggacgacgcaattttcatcaaggccattgtcgacctaaccggcctatag

SEQ ID NO: 31154 - DNA, 1269 bp, synthetic construct
  misc_feature 1..1269: note = Description of Artificial Sequence: Synthetic coding sequence
  source 1..1269: mol_type = other DNA
atggcggctgccagcgtaacacctcctgggagtctggagctacttcaaccaggcttttcaaagactcttctgggaaccaagctcgaagctaaatacctgtgtagcgcctgcagaaatgttctcagacgcccattccaggctcagtgtgggcatcggtactgtagcttctgcttggcatccatactctcctcagggccacaaaactgcgctgcctgcgttcacgagggaatatacgaggaggggatcagcattttggagagctcttcagccttccctgacaatgcagcgaggagggaagtcgagagcttgcccgcagtgtgcccttcagacggttgtacatggaaagggaccctcaaagagtatgaggtaaagatgccggcttgcggaatggtcacggaagcaccagccgtcggctcacgcccaagatccccctcttcgtacgatctggtactgcatgtgcctctcaccggggctgaagcttgtttaatgagtgtcgaggaagagaccgaactgctcttaaggtcctgtcacgagggccgatgtccactcatgcttactgaatgtccagcctgcaaggggctggtgagactgggtgaaaaggagaggcatttggaacatgaatgtcctgagcgttccctgtcatgtcggcattgtcgagctccttgttgtggtgctgacgtgaaacgacttgaccaggataagatagaggctctgtcctccaaagtgcaacagcttgaacggagtattgggttgaaggacctcgccatggcagacctggaacagaaggtgttagagatggaagccagtacctacgacggcgtttttatctggaagatcagcgatttcgccagaaaaagacaggaggccgtggccggacggatacccgcaatctttagtccggctttctacacgtcccggtacggatacaaaatgtgcctgcgaatctatttgaatggggacgggacggggagaggaacccacttgagtctgttctttgttgtgatgaaaggtccaaatgacgccctactcaggtggccctttaaccagaaagtgacactgatgttactcgatcagaataaccgggagcacgtcatagatgcttttcgacccgacgtgacgagctcctcctttcaacgccctgtgaatgatatgaatatagctagcgggtgccctctgttctgccccgtttcgaaaatggaggcgaaaaacagctatgttcgggacgacgccatcttcataaaggcaatagtggacctgaccgggctgtag

SEQ ID NO: 31155 - DNA, 366 bp, synthetic construct
  misc_feature 1..366: note = Description of Artificial Sequence: Synthetic coding sequence
  source 1..366: mol_type = other DNA
atggcagccgcttcagtgacccctcccggtagtcttgagctcctccagcccggtttttcgaagacattgctcgggactaagttagaggcaaagtacctgtgctcagcgtgccgtaatgtcctgagacgtccctttcaggcccaatgcggccacaggtattgctccttttgtctggcatccatcctgtcctcaggcccacagaactgcgctgcatgcgtgcatgaaggtatctatgaggaggggatatccatactcgagtctagctccgccttccccgataacgctgccagacgcgaagtggagtccctgccagctgtgtgtccttccgacggatgtacatggaaggggactcttaaggaatattag

SEQ ID NO: 31156 - DNA, 519 bp, synthetic construct
  misc_feature 1..519: note = Description of Artificial Sequence: Synthetic coding sequence
  source 1..519: mol_type = other DNA
atggctgctgcctcagtaacaccgcctggaagccttgagctcttacagccaggcttctccaaaacactgctgggtaccaagttggaggccaagtatctgtgctccgcatgtcgcaacgtgcttaggcgcccttttcaggcccagtgcggtcatcgctactgtagtttttgcctcgcaagcattctttccagcgggccacagaattgcgccgcttgtgtccacgaagggatatacgaggagggtatcagtatcttagaaagctcctcggcgtttccggacaatgccgctaggcgcgaggttgagtctctgcctgcagtgtgcccctcagacgggtgcacctggaaaggaacacttaaagagtacgaaagctgccacgaagggcgatgccctttaatgctgacagaatgtccagcttgcaagggacttgtccggctcggagagaaggagcggcaccttgagcacgagtgcccagagagatccctcagctgtaggcactgccgtgcgccttgctgcggttag

SEQ ID NO: 31157 - DNA, 582 bp, synthetic construct
  misc_feature 1..582: note = Description of Artificial Sequence: Synthetic coding sequence
  source 1..582: mol_type = other DNA
atggctgctgcatcagtgaccccacccggatccctggagcttttgcagcctggattctctaagaccctgttaggtactaaactggaggctaaatatttatgcagcgcatgcaggaacgtactccgcaggccattccaggctcaatgcggccatcgatactgttccttttgtcttgcgtctattctgtcctcaggtcctcagaactgcgctgcatgcgtccatgagggcatctatgaagaaggaatctctatcctggagagcagttccgctttccccgacaacgccgcacgcagggaagtagagtctctgcccgcagtctgtcctagtgacggttgcacttggaaaggtacactgaaggagtatgagtcctgccacgagggacgatgtcccctaatgctgacagaatgccccgcttgtaagggcctcgttaggttgggtgaaaaagagaggcaccttgagcatgagtgcccagagcgtagcttatcctgtcgacactgcagggccccttgctgcggggctgatgttaaagctcaccacgaagtgtgtccaaaattccccctgacctgcgacgggtgcggatag

SEQ ID NO: 31158 - DNA, 1503 bp, synthetic construct
  misc_feature 1..1503: note = Description of Artificial Sequence: Synthetic coding sequence
  source 1..1503: mol_type = other DNA
gtggctggcagggccttaagttccggtcgtgcagccactgtgggggctctctttgccggagtgaccgccttgatggcagccgcttccgtgactccaccaggttctctagagctgctccagcccggtttctctaagacactgctgggaacaaaactcgaggctaagtatctttgcagtgcctgccggaacgtgttgaggagaccgttccaggctcagtgcgggcatcgctattgtagtttctgcctggctagcatactgtcgtccggaccacaaaattgtgctgcatgtgtgcatgaaggcatttatgaagaaggaatatctattctggaaagttccagtgctttccctgataacgcagcccgtagagaagttgaatctcttcctgccgtctgtcccagcgacgggtgcacatggaaggggacactgaaagagtatgaatcttgccatgaggggaggtgtcctctgatgctgaccgagtgtcctgcctgtaaaggcctggtgcgactgggagagaaagagagacacctggagcatgagtgtcctgagcggtccctatcttgccggcactgtcgcgctccgtgttgcggtgcagacgtcaagtttcaagaccacgttaaaacttgcggcaagtgtagagttccatgtagattccacgccattggctgtctcgaaacagtagagggcgagaaacaacaggaacacgaggtgcagtggctcagagaacaccttgctatgcttttgagtagcgttctcgaggcaaagcccttattgggagaccagagccatgccggaagtgagttacttcagcggtgtgagtcgttggagaagaagaccgcaaccttcgaaaacattgtctgcgtgctgaacagagaggtggagagagtcgcaatgactgctgaggcttgcagtcgacaacatagacttgatcaggacaaaattgaagccctgagctcaaaagtccaacagctggaacgcagtatcggtttaaaagacctagccatggcggatcttgagcaaaaggtcctcgagatggaagctagcacatacgacggtgtgtttatttggaagatttccgacttcgcgcgtaaacgccaggaagcggtggcgggacgcatccccgcaatcttcagcccagcattctacactagccggtatggctataaaatgtgcttgcgtatctatctcaacggagatggcaccgggcgtggaactcacttgagtctttttttcgtcgttatgaagggtcccaacgatgctttgcttcgctggccatttaaccaaaaggtaaccttgatgctgctcgaccagaataaccgggagcacgtgattgacgcatttagacctgacgtaacttctagtagctttcagaggcccgttaacgacatgaacatagcttcaggatgcccactgttttgtcctgtgagtaagatggaggcgaaaaacagttacgtgcgcgatgatgccatattcattaaagccatcgtcgacctgaccgggctgtag

SEQ ID NO: 31159 - DNA, 1506 bp, synthetic construct
  misc_feature 1..1506: note = Description of Artificial Sequence: Synthetic coding sequence
  source 1..1506: mol_type = other DNA
atggctgccgcttcagtgacacctccaggcagcctcgagctcctgcagcccggattctctaagaccctccttgggaccaagttggaggccaagtatctctgcagcgcttgcaggaacgtcctccggagacctttccaagcacaatgtgggcatcgctattgctcattctgcctggcaagcatcctatcatccggcccacaaaattgcgcagcctgtgtgcacgagggcatttatgaggaggggatttctatccttgagagtagttcagccttccccgataacgccgctagacgagaggtggagtccctgcccgctgtgtgtccaagtgacgggtgcacttggaaagggacgctgaaggagtatgagtcttgccatgaaggtagatgccccctcatgttgacagaatgtccggcttgtaaggggctggtgcgacttggcgaaaaggagagacacctggagcatgagtgccctgagcgaagtttgtcatgtaggcattgccgggcaccttgctgcggggctgacgtgaaggcccaccatgaggtgtgtccaaaattcccattaacttgcgacggttgtgggaagaagaagatccccagggaaaaattccaagaccacgtaaagacatgtgggaagtgccgggtgccatgccgattccacgcaattggatgtctggagactgtggagggcgaaaaacagcaggagcacgaggtccagtggctgcgcgagcatctcgctatgttattgagcagcgtgctggaggccaaaccactactcggcgaccagtcccacgctggatccgagctgctgcagaggtgcgagtctttggaaaaaaaaaccgcgacctttgaaaacatcgtttgcgtgctcaatcgggaagtggaacgggtggctatgactgccgaggcttgttcccgtcagcacaggcttgatcaggacaaaatcgaagcgctgtcttctaaagtgcagcagctcgaaagatcgataggcttgaaagacctggcaatggctgacttggagcagaaagtgctcgagatggaagcctccacgtatgacggcgtgtttatctggaagatctcagacttcgctcgtaagcgccaggaggccgtggcaggcagaatccctgccatattctctccagcattctacacctcacgctacgggtataagatgtgccttcgcatatacctgaatggagatgggacaggcagagggactcatctgtcccttttcttcgtagtgatgaaaggcccaaatgacgctctgctgcggtggcctttcaatcagaaggtcactctgatgctgttagatcagaataacagagaacatgtgattgacgcctttaggccagacgtaacctcctcctctttccaacgaccagtgaacgacatgaatattgccagcggatgtcctctcttctgccccgtgtcgaaaatggaggctaaaaactcctatgtgagggatgatgcgatttttattaaggccatcgtcgacctgaccggactgtag

SEQ ID NO: 31160 - DNA, 1632 bp, synthetic construct
  misc_feature 1..1632: note = Description of Artificial Sequence: Synthetic coding sequence
  source 1..1632: mol_type = other DNA
atggagtcctccaagaagatggactccccgggagccctgcagaccaatcctcctctaaaactgcacactgatagaagtgctggaactccagtattcgtgcctgagcagggcggatataaggaaaagttcgtcaagaccgtcgaggataagtacaagtgcgaaaaatgccacctggtcttgtgctcccccaagcagaccgaatgtgggcatcgcttttgcgaaagttgcatggctgcgctgctctcgtcatcctctccaaaatgtactgcctgtcaggagagcatcgttaaggacaaagtgttcaaggacaactgttgcaagcgcgaaatcctagcgttacagatctattgcaggaacgagagccggggttgtgctgagcagttaatgctgggccacctactggttcatctaaaaaatgattgccattttgaggagctgccttgcgtgagacctgattgcaaggaaaaggtgctgagaaaggacctgagagaccatgtagagaaggcttgcaaatacagggaggcaacatgtagccattgtaagtctcaggtcccgatgatcgccctgcagaagcacgaggacaccgattgcccatgtgtggtcgtcagctgccctcacaaatgctctgtgcagaccttattgagatctgaaggtacaaaccagcaaattaaggcacatgaagcctcctcagcagtgcagcacgtaaatctactgaaggaatggtctaatagccttgagaaaaaagtctctctgctccagaacgagagcgtcgagaaaaacaaatcaatccaaagcctgcacaatcagatttgctcgtttgaaatcgaaattgaacgtcagaaggagatgctgcgcaacaacgagagcaaaattctgcacctccagagagtgatcgacagccaggctgagaaactgaaggagctcgacaaggagattcgtccatttcgtcagaactgggaagaggccgattctatgaagtcgagcgtggagtcactacaaaaccgtgtgacagagctggagtccgtggacaagagtgcgggtcaggtcgcccgtaatactggtttgctcgagtctcagctgagcaggcacgatcagatgctgtccgtacacgacattcgattagcagatatggacctgcgttttcaggttctggagaccgcatcttataacggggtccttatttggaagattagagactataagcgccgaaagcaggaggctgtcatgggcaaaactctgtcactttacagccagcctttctacacaggatacttcggttataagatgtgtgcacgtgtttatctgaatggtgacgggatgggcaagggtactcatttaagcttgtttttcgtgatcatgcgtggcgagtatgatgcgctcttgccatggccatttaagcagaaggttaccctgatgcttatggaccagggctcttctagaagacacctgggagacgcttttaaacctgacccaaactcaagctcattcaagaaaccgacaggagaaatgaatatagcttctggatgtcctgtattcgtggcccagacagtgctcgaaaacgggacttatattaaagacgacaccatttttatcaaggttatcgttgacacgagcgatttacctgatccctag

SEQ ID NO: 31161 - DNA, 1632 bp, synthetic construct
  misc_feature 1..1632: note = Description of Artificial Sequence: Synthetic coding sequence
  source 1..1632: mol_type = other DNA
atggagtctagtaaaaagatggattcccctggcgctttacagactaatccgccattaaagctgcatactgaccgatcggccggaacccccgtgtttgttcctgaacaggggggatataaggagaagtttgtaaagaccgtcgaagataaatacaagtgcgagaagtgccatttggtcctatgctccccgaagcagaccgaatgcggacaccgtttttgtgaaagttgcatggcggctctcttgtcaagttccagcccaaaatgtacagcttgtcaggagtctatcgtgaaggataaagttttcaaagataactgctgtaagagggagatcttggccctacagatctattgtcgcaatgagtcaaggggctgcgctgaacagctaatgctgggccacctgctggtgcacctcaaaaatgactgccactttgaagagctgccgtgcgtcaggccagattgtaaagaaaaggtccttagaaaggacctcagagatcatgtggagaaggcttgtaagtaccgggaagctacctgcagtcactgtaaatcccaagtgcccatgatcgcattacagaagcacgaagatacagactgtccctgtgtggttgtcagctgcccacataaatgctctgttcaaactcttttaaggtctgagggcaccaatcaacagatcaaagctcatgaagcatcctccgcagtccagcacgtgaacctgctcaaggaatggtccaactctctggaaaaaaaggtgtcactgttgcagaatgaatcagtggagaaaaacaagtccatccagtccctgcacaatcaaatttgttcctttgagatcgagatcgagaggcaaaaggagatgttgaggaataacgaatccaagattctgcacttacaacgcgtcatagactctcaagcagaaaagctgaaagagctggataaggagatccgaccattccgtcaaaactgggaggaggccgatagcatgaagagcagtgtggagtctcttcagaaccgcgtgactgaactcgagtcggtcgataagagcgctggccaggtggcccgaaacactggacttctggaatcccagctgtctcgccatgaccaaatgctttctgtccacgacatccgtctggccgatatggacctccgcttccaggttctggagaccgcctcatataatggtgtgctcatttggaaaatcagggactataaaaggaggaagcaggaggcggtgatgggtaaaacgttgtctctttacagtcaacctttttacacaggttacttcggctataaaatgtgtgcacgcgtgtacttgaatggggacgggatgggcaaaggaacacacctgtctttattttttgtgatcatgcggggagagtacgacgctctgctcccgtggccgttcaagcaaaaggtgaccttaatgctgatggaccaaggctccagcaggcgacacctgggggacgcattcaagccagatccaaactcttcctcgttcaagaagcccactggcgaaatgaacattgcttctggatgtccagtatttgtggcacagactgtcctggaaaacggcacatacatcaaagatgacactatcttcatcaaagtgatcgtagacactagcgatctcccagacccatag

SEQ ID NO: 31162 - DNA, 1707 bp, synthetic construct
  misc_feature 1..1707: note = Description of Artificial Sequence: Synthetic coding sequence
  source 1..1707: mol_type = other DNA
atggaatccagcaaaaagatggactctcctggagccctacagacaaaccctccccttaaactccacacagatcgctccgctggtacaccagtttttgtgcccgagcaaggtggctacaaggagaagttcgtcaagactgtcgaggacaaatataaatgcgaaaaatgccatttggtgctttgcagcccaaagcagacagaatgtgggcaccgcttctgcgagtcctgtatggcagccctcctctcctcctccagccctaagtgcactgcatgccaagaatctatagtcaaagacaaggtgtttaaagacaactgctgcaagagagaaatcctcgcactccagatttactgccgaaatgagagtaggggctgcgcagagcagctgatgctcgggcatctcctggtgcacctcaaaaatgactgtcactttgaagagctcccttgtgtgcgccctgactgcaaggagaaggtcctgcgtaaggacctgcgcgatcatgtagaaaaggcatgtaaatatcgcgaggcaacctgcagccactgtaagagccaggtgcccatgattgcattacagaagcatgaggatacggactgcccttgtgtggtggtgagctgcccacacaaatgctccgtgcagacgctactgagaagcgagttgtccgcccacctgtctgaatgcgtaaacgcgccttccacatgcagcttcaaaaggtacggctgcgtattccagggaaccaaccagcagatcaaagcgcacgaggcatcttctgcagtgcaacatgtaaatctgttgaaagagtggtccaactctctggagaagaaggtgtcactgcttcagaatgagagtgtggagaagaacaaaagcattcagtcactacataatcaaatctgttcctttgagatagagattgagcgccaaaaggaaatgctgaggaacaacgagtctaagattctgcacctgcagcgcgtgatagatagccaggccgagaaactgaaggagctggacaaggaaatcaggcctttccgccaaaactgggaggaggctgacagcatgaagagctcagtagagtcgttgcagaaccgcgttaccgagctggaaagtgtagacaaaagcgccggtcaggtcgctcgtaatacgggattgctggaatctcagttgagcagacacgaccagatgttgagcgtccatgacatcaggctggccgacatggacctgagattccaggtgctggagaccgccagttacaacggagtgctcatttggaaaatccgggattacaagcggcgtaagcaggaagctgtaatgggaaaaacgctctctttgtatagtcagcccttctatacaggatattttggctataagatgtgtgcgagagtgtacctgaacggcgatggtatggggaagggaactcacctctctctgtttttcgtaatcatgcgcggagaatacgacgcccttctcccctggccctttaaacagaaagtgaccctgatgctgatggaccaaggaagcagtcggaggcaccttggcgacgccttcaaaccagatccaaactctagctcctttaagaaaccaacaggagaaatgaatattgccagcgggtgcccagtgttcgtggcccaaacagtgctggagaacgggacctacatcaaggatgataccatctttatcaaagtgattgtggacaccagcgatctgcccgacccctag

SEQ ID NO: 31163 - DNA, 1458 bp, synthetic construct
  misc_feature 1..1458: note = Description of Artificial Sequence: Synthetic coding sequence
  source 1..1458: mol_type = other DNA
atggagtcttctaagaagatggactcaccgggtgcgcttcagacgaacccccctctcaaactccacactgatcggtctgccggaaccccagttttcgtgcctgagcaagggggatataaagagaagttcgtcaaaactgtagaagataaatacaaatgcgagaagtgtcatctcgtactgtgttcacctaagcagactgagtgtggccatcgattttgcgaatcttgtatggctgccttactgtcaagcagttcccccaagtgtacagcctgtcaggagtctatcgtgaaggacaaggtgttcaaggacaattgttgcaagcgggaaatcttagcactccagatctattgtaggaatgaatcaagggggtgtgcagagcagcttatgttgggccacctgctggtccatttgaagaacgattgtcattttgaggaactgccgtgcgtgcgacccgactgtaaggaaaaagtcttgaggaaggatctgagagatcatgtggagaaggcttgcaagtaccgcgaagctacctgttctcactgcaagtctcaagtgcctatgatcgctttgcaggtctcactcctgcagaacgagagtgtggagaaaaacaagtcaatccaaagtctgcacaaccagatctgttcttttgaaatcgagatcgagaggcagaaggagatgttgcgcaacaacgagtctaaaattcttcaccttcaacgcgtgattgatagtcaggccgagaagctcaaggaacttgataaggagatacgaccattccgccagaattgggaagaggccgactccatgaagagcagcgttgaaagccttcagaaccgcgtaaccgaactcgagtctgtggacaaaagcgctggccaggtggccagaaacaccgggctgttggagagtcagctatcccggcatgatcagatgctaagcgtgcatgatataaggttagccgacatggacttacgctttcaggtcctggaaactgcctcctacaatggagtgctgatctggaagattcgcgactacaagaggaggaaacaggaggccgtaatgggaaagactctttccctctactctcagcccttctacaccggctacttcggatataaaatgtgtgccagagtgtacttgaatggagatggcatggggaagggaactcatctgagcctgttctttgtaatcatgcgtggtgagtatgacgcgctactgccgtggccattcaagcagaaggtgaccttgatgctgatggaccaggggtcttctaggcgccacctcggcgacgcattcaagcctgacccaaatagctctagttttaagaaaccaacgggagagatgaatatcgctagtgggtgtccagtgtttgtggcacaaactgtgctcgagaatgggacatatattaaggacgacacaattttcattaaggttatcgttgacacatccgatctgccggacccttag

SEQ ID NO: 31164 - DNA, 1707 bp, synthetic construct
  misc_feature 1..1707: note = Description of Artificial Sequence: Synthetic coding sequence
  source 1..1707: mol_type = other DNA
atggaatcatcaaaaaaaatggatagtcctggggcactgcagacaaatcctcccttaaagctgcacactgatagaagtgctgggaccccagtttttgtgccagagcagggcggatacaaagagaagttcgtgaagacagtggaggacaaatacaaatgcgaaaaatgccaccttgtgttatgctcccccaaacagacagagtgcgggcaccgcttctgcgagtcctgtatggccgctttgctgagttcttcctctccaaaatgtaccgcctgtcaggagtcaatcgttaaggacaaggtctttaaagacaactgctgtaaaagagaaatccttgctctgcagatctactgccgtaatgagagccgtggatgtgccgagcaactgatgcttgggcatctgctggtgcacctcaagaacgactgtcatttcgaggaactcccttgtgtaaggccggactgcaaggaaaaggtgttgaggaaagacttgcgcgatcatgtggagaaagcgtgcaagtacagagaggcgacgtgctcccactgcaaaagccaggtgcctatgattgccttgcaaaagcatgaggacaccgattgcccctgcgtggtggtctcctgcccacataagtgttctgtacaaacactactcaggtcagaactttcagcacacctcagcgagtgcgttaacgctccatccacatgcagttttaaaagatatggttgcgtgtttcagggcacaaaccagcagatcaaagcccacgaggcttcctcagccgttcaacacgtcaatcttctcaaggaatggtccaatagcctggaaaaaaaggtttctctgctccaaaacgaatcagtggaaaaaaacaagtcaatccaaagcctgcataatcagatatgcagctttgaaattgaaattgaacgacagaaagagatgcttaggaacaatgagtccaagattctgcatctgcagagggtgatcgacagtcaagcagagaaacttaaagagttagacaaagagatcaggccttttcggcaaaattgggaggaggctgatagtatgaagagcagtgttgagtcacttcagaaccgcgttacagagttggagtccgtcgacaaatccgccggtcaggtggctcgaaacaccggactgttggagtcccagctgagccgccatgaccagatgctatccgtgcatgatattagactggccgatatggacttgcgcttccaggttctcgagacggcatcttacaatggcgttctcatttggaagatcagagattacaagagaagaaaacaagaggctgtcatggggaagaccctctccctgtatagtcaaccattctacacaggctacttcggttataaaatgtgcgcccgtgtatatctgaacggcgacggcatggggaaaggcacacacttgtctctcttcttcgtaatcatgaggggcgagtacgacgctctactaccctggccatttaagcaaaaagtcaccctgatgttaatggaccaggggagcagtcggagacacctgggcgacgcttttaaacctgaccccaactcaagctcgtttaagaaacctacaggagaaatgaatatcgcaagtggatgccccgtttttgtggcacaaactgtgctcgagaacggaacttacataaaggacgacacaatatttatcaaagtgatcgtagataccagcgatctgcccgatccttag

SEQ ID NO: 31165 - DNA, 285 bp, synthetic construct
  misc_feature 1..285: note = Description of Artificial Sequence: Synthetic coding sequence
  source 1..285: mol_type = other DNA
atggagagttctaaaaagatggactcccctggggcactccaaacaaaccccccactcaagcttcatacagaccgttcagctgggaccccagtcttcgtgccagaacaggggggttataaggagaagtttgtgaagaccgtggaggacaaatataagtgtgagaaatgccacctggttttgtgttcacctaagcagactgaatgtggccacagattttgcgagagttgcatggcagctttgcttagcagttcttcacccaagtgcactgcttgtcaagaatcatag

SEQ ID NO: 31166 - DNA, 939 bp, synthetic construct
  misc_feature 1..939: note = Description of Artificial Sequence: Synthetic coding sequence
  source 1..939: mol_type = other DNA
atggcagctggccagaatggccacgaggaatgggtgggctctgcctacctgttcgttgagagctctctcgacaaggtggtcctgtcggatgcgtacgcgcacccccagcagaaagtcgccgtgtacagagctttgcaggccgcactcgccgaatcggggggaagtccagacgttttgcagatgctcaagatccacagatcagatcctcagttgattgtgcagttacgcttctgtgggagacagccatgtgggaggtttttacgcgcatatagagagggggctctgcgagccgcactgcaacggagcttagcagctgccctggctcagcactccgtgccgctgcagttggaacttagagctggtgccgaacggctggatgccttgctcgccgatgaggaacgctgcctgagctgcattttagcccagcagccggatcggttgcgtgatgaggaactcgctgagcttgaggacgctctccgcaacttaaagtgcggaagtggagcaagagggggtgacggagaagtggcgagcgcccctctccagccgcctgtcccatccctctccgaagtcaaacccccacctcctccaccaccagcacagacattcctcttccagggccagcccgtcgttaatcgacctctgtcccttaaggaccagcagacgtttgccaggagtgtgggcttgaagtggagaaaggtagggcgaagtctgcagagaggctgtcgcgcacttcgggatcccgctctcgattccttggcctacgaatatgagagagagggcctttacgagcaagctttccagctgcttagacggtttgtgcaggccgaaggtcgcagggcgactctgcagcgcctcgtggaagctctagaggagaatgaactgacatcacttgccgaggatttgctgggattgaccgacccaaatggagggctcgcctag

SEQ ID NO: 31167 - DNA, 825 bp, synthetic construct
  misc_feature 1..825: note = Description of Artificial Sequence: Synthetic coding sequence
  source 1..825: mol_type = other DNA
atggccaccaccgtatccacgcagagagggccagtatatattggggagctgcctcaggacttcctgaggataaccccaacacaacaacagcggcaagtacagctggacgcacaggccgcacagcagttgcagtacggaggtgccgtggggacggtggggcgactgaacatcaccgtggtgcaggcaaaactagccaaaaattatggaatgactagaatggatccatattgccgcctgcgcctcgggtacgctgtgtatgagacaccaactgctcataatggtgcgaagaacccacgttggaataaagtcatccactgcaccgtccctcctggggtagactcattttacttggagattttcgatgaacgcgcttttagcatggacgacaggattgcctggacacacataaccattcctgaatctctgagacagggaaaggttgaggataaatggtatagcctgtcaggcagacaaggcgacgataaggagggaatgatcaacttggtcatgtcttatgccctgctgcctgcggcaatggtgatgccaccccagcctgtggttttaatgcctacggtctaccagcagggcgtgggctatgtcccaattacgggcatgccagcagtctgttcaccgggaatggttcccgtggcccttcctcccgctgcggtcaacgcgcaaccccgttgctctgaggaggatttaaaagccattcaggatatgtttcctaacatggaccaggaagtcatcagatccgttttagaggcccagaggggaaacaaggatgccgcaatcaacagcctgctccagatgggggaggagccctag

SEQ ID NO: 31168 - DNA, 1059 bp, synthetic construct
  misc_feature 1..1059: note = Description of Artificial Sequence: Synthetic coding sequence
  source 1..1059: mol_type = other DNA
caactgtcaccctctcaggcccctgctggagcgcaggaggtggccagaagagttacggtgggcagcgcctcacacggaggccgaaggagcaccatggcaaccacagtttcgacacaaaggggccctgtctacatcggggaactgccccaggacttcctccggattacccccacccagcagcaaaggcaggtgcaactcgacgcccaggctgctcaacaactgcaatacggaggggcagtcgggaccgtgggcaggttaaacatcacagtcgtacaggctaaactggccaagaactacgggatgacccgcatggacccctactgtcgcctgcggttgggctacgctgtgtatgaaacccctaccgcccacaacggcgcaaagaatcctcgatggaacaaagtgattcactgcaccgtgccccctggagtagactctttctacctggagatcttcgacgagcgcgcattctctatggacgatcggattgcctggacccatattactatcccagagtcccttcgccaaggcaaagtggaagataagtggtactctctaagcggtagacagggtgatgataaagagggcatgatcaacttggtgatgtcctacgccctactaccagctgccatggtcatgcccccacagccagttgtcctgatgccaaccgtctatcaacaaggcgtgggctacgtgcccatcaccggcatgcccgctgtatgcagccccggaatggtacccgttgcattgcccccagccgctgtgaacgcccagcctcggtgctcagaagaggatttgaaagcaattcaggacatgtttcccaacatggaccaggaggtgatccggtcggtcctcgaggctcagcgtggcaacaaggacgccgcaattccaagccacttggtcttagggggtctctccgccctcagctgtccatgggatgtgcgcttgtcttttagctgccgctccggcaagtgctcatgttgcagagaacagctactgttgccaggttgctggagatggtggtcggctttccggtttcactcctggcatttcgtgatgtag

SEQ ID NO: 31169 - DNA, 675 bp, synthetic construct
  misc_feature 1..675: note = Description of Artificial Sequence: Synthetic coding sequence
  source 1..675: mol_type = other DNA
atggccacaacagtgtccacccaacgagggcctgctaagttggctaagaactatggaatgacccgcatggatccatactgtcggctgaggctcggatatgcagtttatgagactcccacagcacacaatggggctaagaacccaaggtggaataaggtgattcactgtaccgtgccaccaggcgtggactctttttacttggaaatattcgacgaaagggctttcagtatggatgaccggattgcctggactcacatcaccattccggagtcactgagacaggggaaagtcgaggacaagtggtactcactgtctggacgccagggggacgacaaggaaggaatgatcaacctggtgatgagctacgctctcctgcctgcagcaatggtgatgccacctcagccagtggtcctaatgcctacggtgtatcaacagggggttggatacgtgccaatcaccggtatgccggcagtatgttccccaggcatggtgccagtggccttgccaccagcagcggtgaatgctcagccaagatgtagtgaggaagatctgaaagccattcaggatatgttcccaaacatggaccaggaagttattagaagcgtgctcgaagcacaacgaggtaataaagacgcagccatcaactccttgcttcagatgggcgaggaaccttag

SEQ ID NO: 31170 - DNA, 768 bp, synthetic construct
  misc_feature 1..768: note = Description of Artificial Sequence: Synthetic coding sequence
  source 1..768: mol_type = other DNA
atggctagctcaacctcacttccagcaccaggctcccgccctaagaagccactgggaaaaatggccgactggttcaggcagacactactgaagaaaccaaagaaacgccctaactcacccgagagtacatcttccgacgcctcccaacccacctcgcaggactccccactacctccaagtctctcaagcgtgacctctccatccctaccacctacgcacgcaagcgatagcggctcttcacgctggtccaaagattatgatgtctgtgtgtgccactctgaggaagaccttgttgccgcacaggatttagtgtcgtatttggagggctcgacggcatccctgcggtgcttcttgcaactgagggacgccaccccaggaggtgccatcgtatccgagttatgtcaggcgctaagttcctcccattgtcgtgtgctgctaattacacccggattcctgcaggacccctggtgtaagtatcaaatgttgcaagccttgaccgaggcccctggagccgaaggctgcaccatccccctcctttcgggcctgtcccgcgcagcctacccccctgagttgaggttcatgtactatgttgacggacgtggcccagacggagggtttcggcaggtcaaggaagcagtaatgcgatctaaccaggtgctgaagcacttgctctaccacggcacccctgaaatcggcgtcaaactggagacagaaaacccctgccgcgcatccgactctcacaaatgtgataagaggtatagggagtag

SEQ ID NO: 31171 - DNA, 708 bp, synthetic construct
  misc_feature 1..708: note = Description of Artificial Sequence: Synthetic coding sequence
  source 1..708: mol_type = other DNA
atggcaagctctacaagtcttcccgctcccggttcacgccctaaaaaacctttgggcaaaatggcagactggttcagacagacgttgctgaagaaacccaagaagcgccctaattcccctgagtccacttcaagtgatgcttcccagcctacctctcaggattccccactgccccctagcctcagtagtgttacctcgccaagcctgcccccaacacacgcctccgacagtggtagttcacggtggtcaaaggactatgatgtgtgcgtgtgccatagcgaggaagacctcgttgccgcacaggacttagtgtcttatctcgagggctctaccgcctcattgcggtgcttcctgcagcttcgggacgcaaccccgggaggggcaatagtcagcgagctgtgtcaagccctcagcagcagtcactgcagagtgctgctcatcaccccgggtttcctgcaggatccttggtgcaagtaccagatgctgcaggcccttaccgaggcccctggagctgaaggctgcaccatccctctgctctctggcctgtcccgagccgcttatcctcctgaactacgctttatgtactacgtcgacggcaggggcccagatggagggttcaggcaagttaaggaagccgtaatgcgctgtaagctgctgcaggaaggggaaggcgagcgagattccgctacagtatctgatctgctctag

SEQ ID NO: 31172 - DNA, 666 bp, synthetic construct
  misc_feature 1..666: note = Description of Artificial Sequence: Synthetic coding sequence
  source 1..666: mol_type = other DNA
atggccagtagtacgtcactgcctgcaccgggtagccgcccaaaaaagccactggggaaaatggccgactggttccgccagaccctacttaaaaaaccgaagaagcggccaaattctcctgaatcgaccagttcagacgcgagtcagccgacaagccaggatagcccgctgcctccttctctgagtagcgtgacaagtccgtccttgccaccgacccacgcttccgattcgggaagctcacgctggagtaaggattacgatgtttgcgtctgtcacagtgaggaagaccttgtggctgcccaggatctggttagctacctggagggctccactgcaagcctacggtgttttctgcagcttagggatgcaaccccaggtggggctatcgtcagcgagctgtgtcaagctctgagctcctcccactgccgggtcttgctcatcactcccggttttctgcaggacccatggtgtaaataccagatgctccaagctctaacagaagcaccaggtgcagaaggctgcaccatacctcttttatccggtctctccagagcagcttacccacccgaactgaggtttatgtactatgtggacggaagggggcctgacgggggtttccggcaggtgaaagaggcagtgatgcggtatctccagaccctatcatag

SEQ ID NO: 31173 - DNA, 666 bp, synthetic construct
  misc_feature 1..666: note = Description of Artificial Sequence: Synthetic coding sequence
  source 1..666: mol_type = other DNA
atggcctcttctaccagccttccagctcctggatctcgtcctaagaagccactggggaaaatggctgactggtttaggcagacgttactcaaaaaacccaaaaaacgccctaatagccccgagagtacttcttccgatgcttcgcagcctaccagtcaggactccccgctgcccccatcgctaagctctgtgacatcccccagcctgcctcccacccacgcaagtgatagcgggtccagtcgttggagcaaggattatgacgtgtgtgtgtgccacagtgaagaggacctcgtggctgcccaggatctcgtgtcgtacttggagggcagtacagccagcctccgctgtttcctgcagctgcgcgatgctacccccggaggagcgattgtgtcagagctgtgccaggccctaagcagcagtcactgcagagtcttgctcatcacccccggatttctgcaggacccatggtgtaaatatcagatgctgcaggccctcaccgaggccccaggagcagaggggtgtaccatcccactactttctggtctgtccagagccgcttaccctcctgagctgagattcatgtattacgttgacggccgtgggccagatgggggatttcggcaagtgaaggaagcagttatgcggtatttgcagaccctgtcatag

SEQ ID NO: 31174 - DNA, 666 bp, synthetic construct
  misc_feature 1..666: note = Description of Artificial Sequence: Synthetic coding sequence
  source 1..666: mol_type = other DNA
atggcgtcctctacatcattgcctgccccaggatcgcgacctaaaaaaccgctgggtaagatggctgactggtttcgccagacactactcaagaagcccaagaaacgacctaactcgcccgagagcacaagcagtgatgcaagccaaccaacatcccaggactcacctctgccgccatctctttcatccgtgacgtccccatcactacccccaacgcacgcatccgacagtggatcatctagatggtcgaaggactacgatgtttgcgtgtgccactctgaggaagaccttgtcgccgctcaggacctggtttcttacttggagggatctactgccagcctgagatgcttcctgcagctgcgggacgccaccccgggtggagcaattgtgtccgagctctgccaagcattgagttcaagccattgccgagtgctgctgattacccctggatttctgcaagacccttggtgtaagtaccaaatgctgcaagcattgaccgaagctccgggtgccgaagggtgtactataccacttctgtctgggctgtctagggcagcctacccaccagagctaagatttatgtactatgtcgacggcaggggacccgatggcggtttccggcaagtcaaagaggcagtgatgcgttaccttcaaacactcagttag

SEQ ID NO: 31175 - DNA, 2520 bp, synthetic construct
  misc_feature 1..2520: note = Description of Artificial Sequence: Synthetic coding sequence
  source 1..2520: mol_type = other DNA
atgatgagcgctagccgccttgctggtactctgatcccggcaatggcctttctgtcttgcgtgaggcctgaatcatgggaaccatgtgtggaggttgttcctaatatcacctatcagtgcatggaattgaacttctacaaaatacccgacaatttgccgttctccacgaagaatctagatctcagttttaacccacttaggcacttgggatcctattcgttcttttccttcccagagctccaggtgctcgacctgagcaggtgtgagatacaaactattgaagatggcgcataccagtcactctctcacttgtccacgctcattttgacgggcaatcctatccaatcgttagccctgggcgctttttcagggcttagcagtcttcagaaactagtggctgtggagacgaatctggctagtctggagaactttccaatcgggcacctaaagactctcaaggaacttaacgtggcccataatctgatccagtccttcaagctgcccgagtacttctcgaatctgacaaatctggaacaccttgacctctcgtctaataagattcagtccatttattgcaccgacctcagagtactgcatcagatgccactcctgaatcttagcctggatttatctttgaatcccatgaactttatacagccaggggctttcaaggaaataaggctccataagctcaccctacggaacaatttcgattcacttaacgttatgaagacctgtatccaaggtctggccggactcgaagtgcataggcttgttctgggcgagttccgcaatgaaggcaacttagagaagttcgataagtccgcccttgagggactatgtaatctcacaatcgaggagttcagactcgcctatctcgattactacttggatgacatcatcgatttgttcaactgcctgaccaatgtgtctagtttcagtcttgtgtcggtgaccatcgagcgcgtcaaagatttttcttacaattttggttggcagcacttggagttagtcaactgtaaattcggccagtttcctacattgaagctcaaatccctgaagcgtcttacgttcacctcaaacaagggaggtaacgctttctccgaggttgatcttccttccctggagttcctggatcttagtagaaatggactaagcttcaagggatgttgctctcaatccgacttcgggacaacttcactgaagtacctggatctcagttttaatggcgtcatcacgatgtcctccaattttctcgggctggagcaattggaacatctggattttcagcattcaaatctgaagcaaatgagcgaattcagcgtgtttcttagcctgcgaaatcttatatacctggacatctcacatacacacacaagggtcgcctttaacggcatctttaacggattatccagtctggaggtccttaagatggctgggaattccttccaggagaacttcctgccagacatctttactgagctccgaaatttaacatttctcgatctctctcagtgccagctcgagcaattaagccccactgctttcaactctctgtcatctctgcaggtgttgaacatgagccacaataactttttttccctcgacaccttcccttataaatgcctgaacagtttgcaagtcttggattattccctgaaccacattatgacatccaagaaacaggagctgcagcattttccttcgagcttggcttttttgaatctcacccagaacgactttgcgtgcacctgtgaacaccagtctttcctgcagtggattaaagatcaacgccagctcttggtggaggtggaacgcatggagtgcgccacaccgagcgacaaacagggcatgcccgtgctgtcgctgaatatcacgtgtcagatgaacaaaaccatcatcggtgtgtcagtgctttctgtcttagtggtttccgtcgtggctgtgctggtctataaattctactttcacctgatgctgctagccggatgtattaaatatggccgaggcgaaaacatctacgacgcttttgtgatatacagctcacaggacgaagattgggttagaaacgagctggttaagaatctggaggagggcgtgccaccctttcagctttgtctgcactatagggatttcattccaggagttgctatcgcagcaaatatcatccacgagggctttcacaaatctaggaaagttatagttgttgtcagtcaacactttattcaaagccgttggtgtattttcgagtacgaaatcgcccagacatggcagtttctctcaagtcgggcagggatcatatttatcgtgctgcagaaagtcgaaaagaccctcctccgacagcaggtagaactctatagactactcagtcgtaatacctacctggaatgggaagactccgttctcggcagacacatcttttggcgtcgtctgagaaaggccctcctggacggcaaatcctggaaccctgagggaaccgtcgggaccggctgtaactggcaagaagcgacgtccatctag

SEQ ID NO: 31176 - DNA, 2400 bp, synthetic construct
  misc_feature 1..2400: note = Description of Artificial Sequence: Synthetic coding sequence
  source 1..2400: mol_type = other DNA
atggaattaaatttctacaaaatccccgataacctgcccttcagcacaaaaaatctcgacctgagttttaaccctctacgccatctgggttcctacagtttctttagctttcccgaacttcaggtcctcgacctcagtagatgtgaaatacagacgatcgaggatggagcctaccaaagcctgagccatctgtcaacactgatccttaccggcaatccgatccagtccctggcactgggcgctttttctggtctcagcagcctgcagaaattagtcgcagttgaaaccaatttggcatcactggagaattttccgatcggccacctaaagactcttaaagaactgaacgtcgcccacaacctcattcagagctttaagctcccagaatacttttccaacttaacgaacctcgagcacctggaccttagcagcaataagattcaatcaatttactgtaccgatctaagggtactgcaccagatgccactgttaaacctgtcccttgatctatccctcaatccaatgaactttattcagcctggagcctttaaggagatccggctgcataagttgacattacgtaacaatttcgattctttaaacgtgatgaaaacctgcattcaaggattggctggactggaagtgcatagactagtactgggggaatttcgaaatgagggtaatctcgagaagttcgacaaaagcgccctcgaggggctctgtaatctcacgatcgaggaattccggctcgcctatttagattactatctggatgacatcatcgatctgttcaactgcctgactaatgtgtccagtttttccttggtaagtgtgacaattgagcgggtcaaggacttcagctacaatttcggatggcagcatctcgagttggtgaactgcaagttcggacagtttcctacgctcaaattgaaatctctcaagaggttgacatttaccagtaacaaggggggtaacgccttctccgaggttgaccttccatctctggagtttctcgatctttctagaaacggtctgtcatttaagggctgttgtagccagtccgacttcggaaccacgagtttgaaatatcttgatctctcttttaatggcgtcattactatgagttctaatttcttgggactggagcagctggaacatctcgactttcagcacagtaatctgaaacagatgtccgaattttcagtgttcctgtcacttagaaatttgatttacctcgatatatctcacacccacacaagggtcgctttcaatggaatatttaacggcctttcttccctcgaggtccttaaaatggcgggtaattccttccaggaaaatttcctccctgatatcttcactgaactgcggaacctcaccttcctcgatttgtcacagtgtcagctcgaacagttatctcccacggctttcaacagtttgagtagcctgcaggtactgaatatgagtcataataacttcttctcactggatactttcccctacaagtgcctgaattcccttcaagtgttagactacagcctcaaccacatcatgaccagtaagaagcaggagctgcagcatttcccatcctcactcgcctttcttaatctaacccagaatgacttcgcctgtacttgtgagcatcagtccttcctacagtggatcaaagaccaacgacaactgcttgttgaggtggaaagaatggagtgtgccaccccgagtgacaaacagggcatgcctgtccttagccttaacattacatgccaaatgaataagacgattatcggggtcagtgtactctccgtacttgtggtctctgtggtcgcagtcctggtgtataagttttactttcatctgatgctgctcgccggatgcataaaatatggtagaggcgagaatatctacgacgctttcgtgatctacagttcacaagatgaggattgggtacggaacgagttggtgaagaatctggaagagggggtcccgcctttccagctttgcctacactaccgtgatttcattcccggtgtcgcaatcgctgctaacattatccatgagggctttcataagtcacgcaaggtgatcgtcgtggtttcccagcacttcattcagagccgttggtgcattttcgagtacgaaattgcccaaacctggcagttcttgtcatctagggccggtatcattttcatagtgctccagaaggtggaaaaaacactcttgcgacagcaggtcgagctataccgtttgctcagccgaaatacctatctcgaatgggaagactcagtcttaggtagacacatcttctggagacgactgaggaaagcactgctggatgggaagtcatggaacccagagggaaccgtgggtacaggctgcaactggcaagaagcaaccagtatttag

SEQ ID NO: 31177 - DNA, 2577 bp, synthetic construct
  misc_feature 1..2577: note = Description of Artificial Sequence: Synthetic coding sequence
  source 1..2577: mol_type = other DNA
atgggcgaccacctggatctgctactcggagtcgtccttatggctgggcctgtctttggtataccttcttgttccttcgacgggcgtattgccttttaccgcttctgcaacttaacccaagtgccacaggtcttgaacaccacagaacgactcttgttgagtttcaactacatcaggacagtaaccgcatcttctttccctttcttagagcagttgcaactgctggagcttggaagccagtacacaccactgacgattgacaaagaagcatttagaaatcttccgaatctgagaatacttgatttagggtcgtcaaaaatttattttttgcatcctgacgcattccaggggttgtttcatctttttgaattgaggctctacttctgcgggctgagcgatgccgttctgaaggatggctatttcaggaatcttaaagctctcactcgactcgatttgtctaaaaaccaaatccgctcactatatcttcatcctagctttggcaaactgaatagtctcaaaagcatagacttttcatctaaccagattttcttagtatgtgagcacgaactggagcctctgcagggcaagacactctctttcttttcccttgcggcaaatagtctgtattctcgggtgtctgtcgattggggcaaatgtatgaaccctttccgaaacatggtcctggaaatcctcgacgtgtctggtaatggctggacagttgatataacagggaatttcagcaatgctatctcgaagagccaggcgtttagccttatcctagcccatcacattatgggagctggcttcggcttccacaacattaaggaccctgaccagaacacttttgccggtctagcccgaagttctgttcgtcacttggatttgtcccacggctttgtcttctccctgaactcccgggtgttcgagacgctcaaagacctcaaagtcctgaacctcgcttataataaaatcaacaagatcgcagacgaagctttctacggcctggataacctgcaggtgttaaatctttcctacaaccttctgggtgaactgtactcaagcaatttctatggactccctaaagtcgcttacatcgacctgcagaaaaaccacatcgctatcatccaggaccagaccttcaagttcttggaaaagctgcaaacgctcgacctcagagacaatgccctcaccacaatccactttatcccaagtatccccgacatttttctgagcggcaataagctggtgacgctgccgaaaataaatctgaccgcaaacttgatccacctcagtgaaaatcgcttggaaaacctggatatcctatacttcctgctgagagttccacacctgcaaattctcatcctgaaccagaatagatttagctcatgcagtggggaccagacaccaagcgagaacccttcgctggaacagctgtttctgggggagaacatgctgcagctcgcttgggagactgaactctgttgggacgtgttcgaaggcctgtcacatttacaggtgttgtaccttaatcataactacctgaactctctcccacccggtgttttttctcatttaacagccctccgaggactgtctcttaactccaaccggcttactgtcctttcgcataatgatctccccgctaatctcgagatattggatatctcccgaaaccagcttctcgctcccaaccctgatgtttttgtctccttatctgtcctggacattacacacaacaagttcatatgcgagtgcgaactcagtacctttattaactggctaaatcacactaatgttacaattgcagggcctccagctgatatctactgcgtttacccagattcttttagtggtgtgagcctgttctccctcagcaccgagggatgtgatgaggaagaagtgttgaaatctctgaaattttcactgttcattgtgtgcacagttacccttacactttttctgatgactatcttgacggtcaccaagtttagaggattctgttttatttgttacaagaccgctcagagactcgtttttaaagaccacccgcaaggcacggaacccgatatgtacaaatatgatgcgtacttgtgtttctcctccaaggactttacgtgggtacagaacgcccttctgaaacacctcgacacacagtactccgaccagaatcgcttcaatctgtgtttcgaagaacgtgactttgtccctggagaaaacagaatcgccaacattcaagatgcaatctggaatagtcgtaaaatagtttgtctcgtcagccgccacttcttgagagacggctggtgtttagaggcctttagctatgcgcaaggacgctgcttgtccgatctgaactccgcattgattatggttgtggtggggtcgctgtctcagtaccagcttatgaagcatcagtctattcggggttttgttcagaagcagcagtaccttcggtggcctgaggacttccaggatgtgggctggtttctccataagctgtctcagcaaattttgaaaaaagagaaagaaaagaagaaggacaacaacattccactgcagactgttgcaactatcagctag

SEQ ID NO: 31178 - DNA, 2577 bp, synthetic construct
  misc_feature 1..2577: note = Description of Artificial Sequence: Synthetic coding sequence
  source 1..2577: mol_type = other DNA
atgggcgatcacctagaccttctgctaggggtggtgcttatggctggaccggtgtttggaattccatcatgttcattcgacggacgtatcgccttctacagattttgtaacctgacccaagtgcctcaggttctgaatactactgaaaggttactgctgagcttcaattatattagaaccgtgaccgcatcaagcttccctttcctagaacagttacagctcctggagctgggttcacagtacacccctctgacaatagacaaagaagccttccggaatctgccgaatctgcgcatcttggatctgggatcatctaagatttattttctccaccccgatgcttttcagggcctgttccatctttttgaactgcggctttatttttgtggcctatcagacgccgtgctcaaagatggctacttcaggaatcttaaagcattgacaagacttgacctgtctaagaaccaaataagaagcctgtacctgcatccatcatttggtaaacttaattcactgaaaagtatcgacttttcaagcaatcagatatttcttgtctgcgagcacgaactcgagcctctccaaggaaagaccctttccttcttttcactggcggctaactctctgtattctcgcgtctctgttgattggggcaaatgcatgaaccccttccgcaatatggtgctggagattctcgatgttagtgggaacggctggaccgtcgatattaccgggaatttttccaacgccatcagtaagagccaggccttctctctgatcctagcacaccacattatgggggcaggattcggctttcacaacataaaagaccccgaccaaaacacctttgctggcttggccagaagttcggtgagacacctggacctgtctcatggctttgttttttccctgaacagcagggttttcgagactctgaaggacctgaaggttctcaacctggcctacaacaaaatcaacaaaattgccgacgaggccttttacggcctggacaatctgcaagtgctgaacctgagctataatcttctgggagaactctactcctcaaacttttacggcctgccgaaggtcgcctacattgatcttcagaagaaccatatcgcgattatccaggatcaaacttttaaatttctggaaaagctgcagacactggatctgagggataacgcactgaccaccattcatttcatcccctctatcccagacatttttctaagcggcaacaaactggtcactctccctaagatcaacctgaccgctaacctcatccatctgagcgagaacagacttgagaacctggacattctctactttctccttagagtgccccatctgcaaatacttattttgaatcagaataggttctctagttgcagtggcgaccaaacaccttccgaaaaccctagtctggagcagctcttcctcggcgaaaacatgctgcagctcgcctgggagactgagctgtgttgggacgtgtttgaaggactgagccacctgcaggttctgtatctcaatcacaactacctcaatagcctccccccaggcgtcttttctcaccttactgcactgcgcggactgtctttgaatagcaataggcttaccgtgttgtcacacaacgatctgcccgcaaacctcgaaatattggacatatccagaaaccagctgctcgcacccaacccagacgtgtttgttagcttgagcgtactggacattactcacaacaagtttatttgcgaatgcgagttaagcacattcatcaactggctgaatcatacaaatgtaaccatcgctggtccaccagcggacatctactgtgtttatcctgacagtttttccggcgtatctttattttcgctgagcaccgagggctgtgatgaagaggaagtgttgaagtccctaaagttcagtctctttattgtctgtacggtcaccctcactttatttctgatgacaatcttaactgtaaccaagttcagaggattctgctttatatgctataaaactgcgcagagactcgtctttaaggaccatcctcaaggcacggagccagacatgtacaaatacgacgcctatctgtgtttcagctctaaagactttacatgggtccagaacgcacttttgaaacatttggatacgcagtactcggatcagaatcgattcaacctctgctttgaagaacgcgacttcgtccccggtgaaaataggatagctaacatccaggacgcgatctggaacagcagaaaaatagtgtgcttagtcagccggcactttcttagggatggctggtgcctagaagcctttagctacgctcagggtcgatgtctgagtgatctaaactccgctttgatcatggttgtagtgggctcactgtcgcaatatcaactaatgaaacaccagtctatcagaggattcgttcagaaacagcaatacctccgctggccagaggactttcaagatgtcggctggttcctgcacaaactgtctcagcagatcctaaagaaagagaaggaaaaaaaaaaggataacaatattcctctacagactgtggctacaatcagctag

SEQ ID NO: 31179 - DNA, 66 bp, synthetic construct
  misc_feature 1..66: note = Description of Artificial Sequence: Synthetic coding sequence
  source 1..66: mol_type = other DNA
atgggagatcacctggatcttttacttggggtggtgttaatggcaggtccagtattcgggatttag

SEQ ID NO: 31180 - DNA, 2577 bp, synthetic construct
  misc_feature 1..2577: note = Description of Artificial Sequence: Synthetic coding sequence
  source 1..2577: mol_type = other DNA
atgggagatcacctggatctgctccttggggtggtcctgatggcgggacccgtgttcggaattccatcctgttcatttgatggcaggatcgctttctaccggttctgcaatttgactcaggttcctcaagtactgaacacaaccgaacggctgctcctcagtttcaactacataaggacagtcactgcttccagcttccctttcctggagcagctccagctcctcgagctgggctcacagtatactccgctgacgatagacaaagaggcttttcgcaatttgcctaatctacggattctggacctaggatcaagcaaaatatactttcttcaccctgatgctttccaagggttgtttcacctgttcgagctgcggttgtacttttgcggcctcagcgatgccgtgttaaaagacggctattttaggaacttaaaagctctcacgcgtctggatttatcaaagaaccaaatccgatctttgtacctccacccgtcatttgggaagttgaacagtctgaaatcaatcgacttttcctcgaaccagatctttctcgtgtgtgagcatgagctggagccactgcaaggaaaaacactctcttttttctctctggcggctaattcactctatagccgagtcagtgtcgactggggcaaatgcatgaatcctttccggaatatggtccttgaaatcctagacgtcagcggcaatggatggaccgtagacatcacaggaaatttctcaaacgccatcagtaaatcccaggcctttagcttgattttagcccatcatattatgggtgctgggttcggatttcataacattaaagatcccgatcagaacacattcgcagggctcgctagaagctcagttaggcaccttgacctgagccatggcttcgtattcagtctgaactccagagtttttgagacactcaaagacttgaaggtgttgaacctggcttacaacaagatcaataagattgcagatgaagctttctacgggctggacaacctgcaggtactgaatctgtcctataacctcttaggggagctatacagctcaaacttttatggattacccaaggtcgcctacatagatctccagaaaaaccatattgcgattatacaagaccagacctttaagttcttagaaaagcttcagaccctggatcttcgggacaacgctctaactacgatacacttcataccctctatccctgatatattcctttccggtaacaagctcgtaactttgccgaagatcaatttaactgccaacttaatacacctgtccgagaaccgcctggaaaatcttgatattttgtacttcctgcttcgcgtgccccacctccagattctaatcctcaaccagaatcggttctccagttgcagcggcgaccagacgccatccgagaacccgtcgcttgaacagcttttcctgggcgagaacatgctgcagctcgcctgggagacagaactttgctgggacgtgtttgaaggcctgtcacatctgcaggtactgtacctcaaccacaattacctcaattcgctgccccctggcgtcttttcccatttgaccgcgctgcgcggattaagcctcaacagcaataggcttaccgttctgtcgcacaacgatctgcccgctaacctagaaatcttggacattagcagaaatcaattattagcccctaatcctgatgtgtttgtgagtctgtctgttctcgatattactcataacaagtttatttgtgaatgcgagcttagcacatttatcaattggcttaaccacaccaacgtcaccatagcagggcctccagccgacatttactgcgtgtatccagactcctttagcggggttagcctattctccctgtccacagaagggtgcgatgaagaggaagttcttaagtcactcaaattctcgctctttattgtttgcactgtgactttgaccctgttcctgatgaccatccttacagttactaaattccggggattttgctttatctgctataagaccgcccaaaggctggtgtttaaggaccatccccagggcactgagccagacatgtataagtacgatgcttacctctgcttcagttccaaagatttcacctgggtgcagaatgctttacttaagcatctggacactcaatattcagaccagaacaggttcaatctgtgctttgaagagcgcgatttcgttcccggagagaaccggattgccaatatccaagatgccatatggaattcaagaaaaattgtgtgtttggtttcacgacactttctccgcgatgggtggtgcctcgaagccttctcttatgcccagggcaggtgcctctcagaccttaacagcgctctgatcatggttgtagtgggaagcctcagtcagtatcagttgatgaaacatcagagcatacggggatttgtccagaaacagcagtacctaagatggcctgaagacttccaagacgtaggctggttcctgcataagctctctcaacagatattgaagaaagaaaaggaaaagaaaaaagacaacaatatccccctccaaacagtcgcaaccatctcttag

SEQ ID NO: 31181 - DNA, 4836 bp, synthetic construct
  misc_feature 1..4836: note = Description of Artificial Sequence: Synthetic coding sequence
  source 1..4836: mol_type = other DNA
caggtgagccctagtcaccccgttaatgaaaacatgcaagtcaataaaatcaagaaaaacgaggacgctaagaagagactatctgtcgagcggatctatcaaaaaaagacccaactcgagcatatcctgctgcgtcctgatacttatatcgggtctgttgagctcgtcacccagcaaatgtgggtgtacgatgaagatgtcggcatcaactaccgcgaggtcacattcgtccctgggctctacaagatattcgacgaaattctggtgaacgctgccgacaacaaacagagagaccccaagatgagctgtattcgggtgaccattgatcctgagaataacttgatttccatctggaacaacgggaagggaatccccgtggtagagcataaggtggaaaagatgtacgttcctgcccttatcttcgggcagctcctgacctcgtccaattacgatgacgacgagaaaaaagtgacaggaggaaggaacggctatggagccaagctgtgcaatatctttagcacgaaattcactgtggagacggctagccgggaatacaagaaaatgtttaagcagacatggatggacaacatgggacgggcaggggaaatggaactcaagccattcaacggggaagattacacatgcatcacctttcaaccagatctgtccaaatttaaaatgcagtctctggacaaagacatcgttgcactgatggtgaggcgcgcttatgacattgccggaagcaccaaggacgtgaaggtctttctcaacgggaataaactgcctgttaagggtttcaggagctacgtagatatgtaccttaaggataagctggatgagactggtaactcccttaaagtcatccacgaacaggtgaaccacaggtgggaggtgtgcttgaccatgtcggagaaaggcttccaacagattagtttcgttaactctatcgcaacatctaaggggggacggcatgtggattacgtggccgatcagatcgtgaccaaattggtggacgttgtcaagaagaagaataaggggggagtcgcagtcaaagcacatcagcggctcgagtgcagtggcacgatcagcgcacattgcaacctgcgcctacttggattctcggacagcctagcatctgcctcccgcgtggccgaaatcactgacatgcaccatcatatccagctgatcttcgtgtttctcatcgaaatgggcttttaccacgtcggtcaggctggcctcgagctgctcgcatccctggatccaccctcctcggcatcctgcgtatcccactgcacccagctgtttgtatcaaacttcatctacctgtttctcatctttctccggaggagcttcacattcgttactcaggccggagtgcagtgcacaatcagcccgacctcttctagcgtgctcgcccagtttttcgaatcattcttattcgttgccataggatgtgggatcgtcgagtccatcctcaactgggttaaattcaaggcccaggtacagttgaacaaaaaatgttctgccgtcaaacacaaccggatcaagggcattcctaaacttgacgacgctaacgacgccggaggaaggaattctacagaatgcacactgattctgacagagggagactctgccaagactctggccgtgtcagggctgggggttgtaggacgggataagtatggggtgtttccgctgagaggcaagattcttaacgtcagagaagcctcccataagcagattatggaaaacgcggagatcaacaatatcatcaaaatcgtgggactccagtacaagaaaaattatgaggatgaggacagtcttaagacgctgcgctacgggaagataatgatcatgaccgaccaggaccaggacgggtcccacatcaagggtcttttgatcaactttattcatcataattggccaagcttgttaaggcataggtttctggaggaatttataacccctatcgtcaaggtgtccaaaaataagcaggaaatggccttttactcgctccctgaattcgaagagtggaagtcttccacccctaatcacaagaaatggaaagtaaaatactacaaaggactcgggacaagtaccagcaaagaagctaaggaatactttgcagacatgaagaggcaccggatccagtttaaatacagtggcccagaggatgacgcagctatctcactggccttctctaagaagcagattgacgatcggaaggagtggttgaccaacttcatggaggacaggcgacagcggaaactgttaggcctcccagaggattacctctatggccagacgacaacctacctcacttataatgattttatcaacaaggaactaatcctattttccaattcagacaacgaacgcagtatccccagcatggtggatggacttaaaccagggcagaggaaggtactctttacatgctttaaaagaaatgataaaagagaggtgaaggtggcccagttggccggatccgtcgctgagatgagctcataccaccacggcgagatgagtcttatgatgacgattataaatttggcacaaaatttcgttggttccaataatctgaacttgttgcagcccattggtcagttcgggacgcgccttcacggaggaaaagactccgcctccccacgctacatttttacgatgctctcatcactagcacggctgctttttccgcctaaggacgatcataccttgaagtttctgtacgacgacaaccagcgcgtagaacctgagtggtatattcccattatacccatggtgctaattaacggcgcagagggtatcggaaccggttggtcatgcaaaataccaaattttgatgtccgagagatcgtaaacaatataaggcgattgatggatggagaggaaccgctcccaatgctgccttcatacaaaaatttcaagggaaccattgaggaattggccccaaaccaatacgttatctctggcgaggtagccatcctgaactcgacaaccatcgagatatccgaacttcctgtgcgaacgtggactcagacttacaaagaacaggtccttgagcccatgctgaatggcaccgagaagactccacctcttatcactgactatagagaatatcatacagatacaaccgttaagttcgtggtgaaaatgacagaagaaaagttggcagaagctgagcgcgtgggtcttcacaaagtgtttaagctccagaccagccttacttgtaactctatggttttgtttgatcatgttggctgcctgaagaagtatgatactgtccttgatatcttgagagactttttcgagctgcggttgaagtactatggtctgcgaaaggagtggctactgggcatgcttggggctgagagtgccaaactcaataaccaagcacgtttcatcctggaaaagattgatgggaagatcatcatcgaaaacaagcccaaaaaagaattaatcaaagtgcttatccagaggggatacgatagcgacccagtgaaggcatggaaggaggcccaacagaaggtccccgatgaggaggaaaacgaagagtctgataatgaaaaagaaacagagaagagcgacagtgtgacagactccggaccgacatttaactacctgctcgacatgcccctgtggtatctcactaaggagaaaaaggacgaactctgtagactgcggaacgagaaggagcaggagctagatactttgaaacggaaatcccccagtgatctctggaaggaagacctcgccacttttatagaagaactggaagccgtcgaggcgaaggagaagcaggacgaacaagtgggcttgcccggtaaaggtgggaaggcaaaaggcaagaagacgcaaatggccgaggtacttccctcgcctcgcggacagcgggtgatccccaggatcacgatcgaaatgaaagctgaagctgaaaaaaaaaataagaagaagattaaaaatgaaaacaccgaggggagtcctcaagaagacggagtagaactcgagggactgaaacaacgacttgaaaaaaaacagaagagggagccaggaaccaaaaccaagaaacagacaactctcgccttcaaacccatcaaaaaaggaaagaagcgcaacccctggtcagactccgaaagtgatcgcagctccgatgaatctaacttcgacgtgccaccacgagagactgagccacggagagctgctacaaaaaccaagtttacaatggatttagattccgacgaggactttagtgattttgatgaaaagacggatgacgaggactttgtcccaagcgacgcatccccgcctaaaacgaagacgagcccaaagttgagcaataaagagcttaaaccacagaaatcagttgtttccgatctggaagccgatgatgtgaagggttctgtgcctctcagcagttcaccgcctgccactcattttcctgacgaaacagaaataacaaatcccgtgcctaagaagaatgtcacagtgaaaaaaacagcagccaagagtcagtcaagcacatcaacgactggggcaaagaaacgggcagctcctaaagggactaaaagagatccagcattgaactctggagtgtctcagaaacccgaccccgcaaagaccaagaatcgtagaaaaaggaaaccgtccaccagtgacgattcagactccaatttcgagaaaatcgtgagcaaggcggtcacgagcaaaaagtctaagggtgagagtgacgatttccatatggatttcgatagcgcggttgcacctcgggctaagtccgttcgtgcaaagaagccgattaagtatctagaggagtccgacgaagatgaccttttctag

SEQ ID NO: 31182 - DNA, 4665 bp, synthetic construct
  misc_feature 1..4665: note = Description of Artificial Sequence: Synthetic coding sequence
  source 1..4665: mol_type = other DNA
caagtctctcctagccatcccgtcaatgagaacatgcaagtcaacaagataaagaagaatgaggacgctaaaaaaaggctatctgtagaaaggatataccaaaagaaaacccaactggagcatatcctgctgcggccagatacctatataggtagcgttgaacttgtgacccagcagatgtgggtatatgacgaggacgtgggcatcaattacagagaggtgacttttgtgcctggactgtataagatctttgacgaaatcctggtgaacgctgccgacaataagcagagagaccccaaaatgtcctgcatccgggtcaccatcgatccagaaaacaatttaatctcgatctggaacaacggcaaaggaatcccggttgttgagcacaaagtggagaagatgtatgtaccagccctcatctttgggcagctgctgacgagtagtaattacgacgatgacgagaagaaggtgaccggtgggaggaacgggtatggggcaaagttgtgtaacatcttcagcacaaaattcacagtggagacagcttccagagaatacaaaaagatgtttaagcagacttggatggataatatgggaagggccggagaaatggaactcaaaccctttaacggagaggattacacatgcatcacttttcaacccgacctaagtaaattcaagatgcagtctctagataaggacatagtcgccctgatggtgcgccgagcctatgatattgctggtagcacaaaggacgtgaaagtcttcttaaatggtaataagttgcccgttaagggtttccgaagttatgtcgacatgtacctcaaggacaaactggacgaaacgggaaacagtctcaaggtgattcacgagcaagtcaaccatcgatgggaggtgtgcctgactatgtccgaaaaggggtttcagcagatcagctttgtcaactctatagccacctcaaaggggggaaggcatgtggactacgtggccgaccaaatagtaaccaaactggttgatgtcgtgaagaagaagaataagggaggcgtggcagtcaaagctcatcaggtcaagaatcacatgtggatcttcgtgaacgccctgattgagaaccctacattcgactcgcaaactaaagagaacatgaccctgcagccgaagtcctttggatccacttgccaactgtccgaaaaattcattaaggccgctcatctgtattccagattcctgattgatcccttcttccccaatatgatccctaatatgaatctcttccaggcgattggttgcggcatagtggaaagtatattgaattgggtaaaatttaaagcccaggtgcaactgaataagaaatgttctgcggttaagcacaaccgcatcaaaggaatccccaagctcgacgatgcgaacgacgctggaggccgtaacagcactgaatgtactttaatcctgacggaaggagacagtgcaaaaacactcgccgtgtcgggcttgggcgtcgtgggcagggataagtacggcgtcttcccattacggggtaaaattttaaatgtgcgtgaagcatcacacaagcagattatggaaaatgcagagatcaacaacatcattaaaatagtggggctccagtacaagaagaactacgaagacgaggactccctgaagacactgcggtacgggaaaattatgatcatgaccgatcaagatcaggacgggtctcacatcaagggccttttgatcaacttcattcatcacaactggccatcactgctgaggcataggtttctggaggaatttattacccccatcgtcaaggtaagcaagaacaaacaggagatggccttttactctcttcccgagtttgaagagtggaaatcttcaactccaaatcataagaaatggaaagtcaaatattacaaaggactcggtacatcaaccagcaaagaggcaaaggagtactttgctgatatgaagaggcatagaatccaatttaagtattctgggcctgaagatgatgcggcaatttccctcgctttctccaagaagcaaatcgatgatagaaaggagtggcttactaacttcatggaagataggaggcagaggaaattactgggactgcccgaggattatctctatggccaaaccaccacgtacttgacatacaacgatttcatcaataaggaactcatcttgtttagcaattctgacaacgaacgaagcatcccttctatggtcgacggtctcaaacctggccagagaaaggtgttattcacttgcttcaagcgcaatgacaagcgcgaggtgaaggtcgcccagctcgcaggcagcgttgcagagatgtcttcctaccaccacggggagatgtctctgatgatgactatcatcaatttggcccagaatttcgtgggaagcaataatctcaacttgctgcagcctatcggacaattcggcacccgtttacacggcggaaaagactccgcgtctcctaggtatatcttcacaatgctctctagtttggcaaggctcttgttcccaccaaaagacgaccacacgttaaaatttctgtacgacgacaatcagcgggttgagcctgagtggtacatcccgatcattccaatggtactgattaacggcgctgagggtattggcaccggctggagttgcaagatacctaatttcgacgtgagggaaattgttaataacatcagacgactgatggacggagaggagccacttcctatgctgccgtcctacaagaacttcaaaggcacaatcgaggaattagcgccaaatcagtacgtgatttcaggggaggtcgccattttgaattcgacaaccattgagatctcggagctgcctgtgagaacttggactcagacttacaaggaacaggtactggaaccaatgcttaatggcactgagaagacccctccattaataaccgattatagggagtaccacacagatacaaccgtcaagtttgtggtgaaaatgaccgaagagaagctggccgaagccgagcgggtgggactacacaaagtgttcaaattacagaccagtcttacatgtaatagtatggtgctgtttgaccacgtaggctgcctgaagaaatatgataccgtgttagacatcctgagggatttcttcgaactgcgactgaaatattatgggctgaggaaggaatggctattaggtatgcttggtgctgagtcagccaagctgaataaccaggcacgattcattctggagaagattgatggcaagatcatcatcgaaaataagcccaagaaggaactgattaaggtccttatccagcgagggtatgatagtgatccagtcaaagcttggaaagaggcccagcagaaagtgccggacgaagaggagaacgaagaaagcgacaatgagaaggaaactgagaaaagtgattctgtcacggactccggccctacttttaactaccttctcgacatgccactgtggtacctgacgaaggaaaagaaggacgagctgtgccgtttacgcaacgagaaagagcaagagctcgatactcttaaacgcaaaagtcctagtgatctgtggaaagaggaccttgcaacttttatcgaggagctagaggcagttgaggccaaggaaaaacaggacgagcaagtggggctccccggaaaaggaggaaaggcgaaggggaagaaaactcagatggccgaggtcctcccctcacctagggggcagcgggttattccacggataaccatcgagatgaaagctgaagctgagaagaaaaacaaaaaaaaaattaaaaatgaaaacactgaaggcagcccgcaggaggacggggtcgaactagaaggtctcaaacagaggctcgaaaagaagcagaaaagggagcccggtacgaaaacaaagaaacaaacaacccttgccttcaaacctattaaaaaggggaaaaaaagaaacccgtggtctgattcagaaagtgacaggtcatccgacgaatccaactttgatgtgccacctagggaaactgagccgagacgcgctgcaacaaaaactaaatttacaatggatttagactcagatgaggatttctctgactttgatgagaaaacggacgacgaggatttcgttccatcagatgcctccccccctaagacaaaaactagccccaagctttccaataaagagctgaagcctcaaaagtccgtggtatccgacttggaggctgacgacgttaaaggcagtgtgccgctgtcaagctcccctcccgcaactcattttcccgacgaaaccgaaatcaccaaccccgtacctaagaaaaatgtgacagtgaagaagaccgccgctaagtctcagagctcaacttcaaccaccggtgcaaaaaagagggcagccccaaaagggaccaaacgggaccccgctctaaatagcggcgtgtcacagaaaccagatccagccaaaaccaaaaaccgaagaaaaaggaagccctccactagcgatgactctgatagtaattttgaaaagatcgtatcaaaggccgtgacatccaagaagagtaaaggggaatccgatgactttcacatggattttgactctgccgtggctccacgcgcaaagtcagtgagggcaaaaaagccgattaagtacttagaagagtcggacgaagatgacttattttag

SEQ ID NO: 31183 - DNA, 4707 bp, synthetic construct
  misc_feature 1..4707: note = Description of Artificial Sequence: Synthetic coding sequence
  source 1..4707: mol_type = other DNA
atggaagtcagtcctctgcagcctgtgaacgagaacatgcaagttaataaaattaagaagaatgaagatgccaagaaacgtctgagtgtggagcgtatttaccagaagaaaacacaactcgagcatattcttctgagacctgacacgtatataggttctgtcgagctcgtgacccagcaaatgtgggtgtacgatgaggatgtcggcattaattatcgggaggtgaccttcgtgcctggcctgtacaagatatttgatgagatcttggtaaacgccgcagacaacaagcaaagagaccccaagatgagctgtatccgagtgaccatcgaccctgaaaacaacctgatcagcatttggaataacggaaagggaatccctgtcgttgagcataaagtggagaaaatgtacgtgcctgctctaatctttggccagctgctcacgtcctctaactatgacgatgatgagaaaaaggtgacaggcggaaggaatggctacggagctaaactgtgcaacatttttagcacgaagttcactgtggagaccgccagtcgagaatataaaaagatgttcaaacaagctataacgtggatggacaacatgggccgagccggagagatggagctgaaacccttcaatggcgaggactatacctgcattactttccaacctgatctcagcaagtttaagatgcagagcctggataaagacatagtcgcgctcatggtgagaagggcctacgatatagccggatctaccaaggatgtgaaggttttcctgaacgggaacaagcttcccgtgaaaggcttccggtcatatgttgacatgtacctgaaagacaagcttgatgagacgggtaactcgcttaaggttatccacgaacaggtcaatcatagatgggaagtgtgtctaaccatgtctgaaaagggctttcaacaaattagctttgtgaattcaatagccactagcaaggtaattctttttctgaattatatgatttacctgtacatctatgtttttctcctgtttctgatctataaggtcgatctcaacatcggtctcgcatactttaccgggggaagacatgttgattatgtggccgatcagattgtgactaagttggtcgacgtggttaaaaagaagaacaaggggggagtcgccgtgaaggcacaccaggtgaagaatcatatgtggattttcgttaacgcccttatcgagaaccccactttcgactctcagaccaaggaaaatatgacattgcagccaaagagcttcggatccacctgccagctttctgaaaaattcatcaaggcagccataggatgcggtattgtcgaatctattctgaactgggtaaagttcaaggcccaggttcagctgaataagaagtgctctgctgtgaaacacaatcgcattaaggggataccgaaactagatgacgcgaatgacgcaggcggacgtaacagtacggagtgcaccctgatcctaacagaaggtgactcagccaaaacgcttgccgtctctggacttggggtcgtaggacgcgacaaatatggcgtcttcccactgaggggtaagatcttgaacgttagggaagcttcccacaaacagatcatggagaatgctgagatcaacaacattatcaaaatcgtcggactacagtacaaaaaaaactacgaagatgaggactcattaaagactttgcgatatggaaaaatcatgataatgacagatcaggatcaagacgggtcacacatcaaaggactgctgattaattttatccaccataactggccatctctgttgcggcatcgttttctcgaggaattcataacacctattgtcaaggtatcaaagaacaagcaggagatggcgttttacagcctccccgagtttgaagaatggaagtcctccacgccgaatcacaaaaaatggaaggtcaagtattataaaggattaggcacctccacctcgaaggaagccaaggagtactttgcagatatgaagcgccataggatacagtttaaatattcaggccctgaggacgatgccgctatttctcttgctttcagcaagaagcaaattgatgaccgtaaggaatggttgactaatttcatggaagaccgtcggcagcggaaactcctgggtttacctgaggattatctttacggtcagaccaccacctatctgacatataatgactttatcaacaaagagctgattctctttagtaattccgacaatgaaagatcaattcccagtatggttgacggacttaaaccgggacagcgaaaggtgctgttcacctgttttaaacggaacgataagcgtgaggttaaggttgctcaacttgccggttctgtggcagagatgagctcatatcaccacggagagatgtcactgatgatgacgattatcaatctagcacagaactttgtcggctcaaacaacctgaacttactgcagcctatcggacaattcggaaccaggctgcacggcggaaaggattccgcttcgcccaggtacatcttcacgatgctgtcatcactggctaggttgctctttcccccaaaagacgatcataccttgaaatttctttatgacgacaatcaaagggttgagcctgaatggtatatcccaatcattcccatggtcttgatcaacggagcagaagggatcggtacaggatggtcgtgtaaaataccaaacttcgacgttcgagaaattgtgaacaacattagacgacttatggacggtgaagagcccctgccaatgctccccagctataagaattttaaaggaactatcgaggagctcgcaccaaaccaatacgtgatatctggggaagttgccatcctcaatagtacaacaattgaaatcagcgaactaccagtgcggacgtggacccagacgtacaaggagcaggtcctcgagcctatgctcaatggaactgagaagactcctccccttatcacagactatcgcgagtaccacacagatactactgtgaaatttgtcgtaaagatgacagaggagaagttagcagaggctgaacgcgttggcctgcataaggttttcaagctccagacctcgctgacatgtaattctatggtcctgttcgatcacgttggctgcctaaagaaatacgacaccgtgttggatatcctccgcgatttctttgagttacgcctaaaatactatggtctaagaaaggagtggctgcttggaatgctcggggctgagtccgccaagttgaataaccaagcgaggttcattcttgagaaaattgatggaaagatcatcatagagaacaagcctaagaaggaactgattaaggttcttattcagcgcggatatgactcagaccccgtcaaggcctggaaggaggctcaacaaaaggtgccagatgaggaagaaaacgaggagagtgataacgagaaggaaactgaaaagagcgattcagttacggatagcggccctacttttaactacttgctggatatgcccctctggtatctaactaaagaaaaaaaggacgaactctgtcgcttgcgcaacgagaaagaacaggagctggataccctcaagcggaaatctccctctgacctttggaaagaggacttggccacattcatcgaagagttggaagccgttgaggcgaaggaaaagcaagatgagcaggtggggctgcctggcaaagggggtaaagccaagggaaagaagacccagatggcagaagtgctacccagccccagaggacagagagttatcccgagaatcactattgagatgaaagcagaggctgagaagaaaaataaaaagaaaatcaaaaatgaaaacaccgaaggatcccctcaggaggacggagtggagctcgagggactgaagcagagactggaaaagaagcagaagagggaacccggaacaaagacaaaaaagcagacaactctggcctttaaacctatcaagaaagggaaaaagcgtaacccgtggtccgatagcgaaagcgataggtcatccgacgagagtaattttgacgtcccacccagggaaaccgagccgagaagagcagcgacaaagactaagttcaccatggatcttgattccgacgaggatttctcagacttcgatgaaaaaaccgatgatgaagacttcgtgcccagcgacgccagcccccctaagactaagaccagtccaaagcaaaattgtaacaaagagctcaagcctcagaagtccgtggtgtccgatcttgaggccgatgatgtgaaaggatccgtgcccctgtcctcttcacccccagctacacattttcccgatgagactgagatcacaaaccccgtccccaagaagaacgtcaccgtgaagaaaactgcagctaaaagccaatcaagcacttcaactactggagccaagaagcgggctgcccctaagggaaccaaaagggatccggcactcaatagtggtgtgtcgcagaaaccggacccagctaaaacaaagaacagaaggaagcggaagccaagcacatcagacgattcagattctaattttgagaaaatcgtgtcaaaagcggtgacatctaagaagtctaaaggcgagagtgatgatttccacatggatttcgatagcgccgtcgctcccagggccaagtctgtgcgcgctaagaagcctatcaaatatctcgaagagagcgatgaggacgatctgttttag

SEQ ID NO: 31184 - DNA, 4596 bp, synthetic construct
  misc_feature 1..4596: note = Description of Artificial Sequence: Synthetic coding sequence
  source 1..4596: mol_type = other DNA
atggaggtgtcacccctccagcctgttaacgagaatatgcaggttaacaagattaaaaaaaacgaggacgccaaaaagcgtctgagtgtagaacgcatctatcagaagaagactcagctggagcatattctgctccgacccgacacttatataggttcagtggagctggttacacaacagatgtgggtgtacgatgaggacgtcggcattaattaccgcgaggtgaccttcgtgcctggcctgtacaaaatattcgacgagattttggtgaatgccgcagacaataagcagagggatccaaaaatgtcatgtattagagtgaccatcgacccggagaacaatcttatatctatttggaacaatgggaaaggtataccagttgttgagcataaggttgagaagatgtatgtccctgccctcatcttcggccagctgctcacctcatctaactacgatgatgacgaaaagaaggtgacaggcggacggaatggttatggagcaaaactttgcaacatatttagtacaaagtttactgtcgaaaccgcttccagggaatataagaagatgtttaagcagacatggatggataatatgggcagggccggagaaatggagttgaaacctttcaacggcgaagactatacgtgcattactttccagcctgatctttccaagtttaaaatgcagagcctcgacaaggatatcgtggctctgatggtgaggagagcatatgatattgcaggttctacaaaagacgtgaaagtgttcctcaatgggaataagcttcctgttaagggatttcggagctatgtcgacatgtacctgaaggacaagctggacgaaacgggcaattccctgaaggtgatccatgagcaagtgaatcacagatgggaagtttgtttgactatgagcgagaaaggcttccagcaaattagctttgtaaattctatcgcgacaagtaaagggggacggcacgtcgattacgtggcagaccagattgtcaccaagttggtcgacgtggtcaagaagaagaacaagggaggcgtggcggtgaaggcccaccaggtcaagaaccacatgtggatcttcgttaacgccttgatcgagaaccccacattcgattcacagacaaaggaaaacatgaccctgcagcccaaatctttcggctccacatgccaactgtctgagaagttcataaaggctgctatcgggtgcggcattgtggagagcatcctgaattgggtgaaattcaaggcacaggtgcagctaaacaaaaagtgctctgctgtaaaacataatagaattaaaggcatacccaagctcgacgatgccaacgatgccggtggcagaaattccaccgaatgtacattgatcctgacagagggggatagcgctaaaactctcgcggtgtctggacttggtgtcgtcggcagggacaaatacggcgtgtttcccctgcggggtaagattcttaacgttagagaggcttcgcacaagcaaatcatggaaaacgcagagatcaataatatcataaagattgtcggactgcagtataagaaaaattatgaggatgaagacagtttaaaaactctgcgttacgggaaaattatgatcatgacggaccaagaccaagatgggtcacacataaaggggttactgatcaattttatccaccataactggccatcactcctgcgccatcgcttcctggaggagtttatcacccctatcgtgaaggtttctaagaacaagcaggaaatggcattctattcactgccagagtttgaagaatggaagtcttctacccccaaccataagaagtggaaagtgaagtactacaaagggctcggcacgtccacatctaaggaagccaaagagtacttcgcggacatgaagcgtcaccggattcagtttaaatactccggtccagaggacgatgcagccattagcttggcttttagcaaaaagcaaatcgacgaccgtaaggaatggctcaccaatttcatggaggatcgacgccagagaaagctactgggactgccggaggattacctgtacggccaaactaccacctatctgacatacaatgattttattaacaaggaactcattttgttctctaacagcgataacgagagaagtatcccctccatggtcgatggcctgaagcccggtcagagaaaggtcctcttcacatgcttcaaacggaacgacaagcgggaggtgaaagtcgcacagttagccggatccgtagcagagatgtcaagttaccatcatggcgagatgagcctgatgatgacgattatcaacctggcccagaattttgtgggcagcaataatctgaatctcctacagcccattgggcagttcggcacacggctccatggcggaaaggacagtgccagtcccagatacatctttaccatgttgtctagcctggcaagactgctgtttccccctaaggatgaccacacattaaagttcctgtatgatgacaatcagagagtggaacccgagtggtatataccgatcatccctatggttttgatcaacggcgctgaggggattggcactgggtggagttgtaagattcccaactttgatgtgagggagattgtgaacaatatcaggcgtctcatggacggggaggagccactgcctatgttgcccagttataaaaattttaaaggtacaatcgaggagctcgcgcctaaccaatacgtgatttcaggggaggtggccatacttaacagcaccacaattgagatttctgagctgcctgtccggacatggacccagacgtacaaggagcaggtgctagagccaatgcttaacggaactgaaaaaacccccccattgataacagactaccgggaataccatacagataccaccgtaaagttcgtggtgaaaatgacagaggagaaactagcggaggctgagagggtcgggctgcacaaggtgttcaagttgcaaacaagccttacttgtaactccatggtgctgttcgaccacgtggggtgtctgaagaagtacgatactgttctggacatcttgcgagacttctttgaactgcggttaaaatactatggtctgcggaaggaatggctccttgggatgttgggagctgaatcagccaaactgaataatcaagccagattcatcctggaaaagattgacggcaagatcatcatcgaaaataagccaaagaaagagcttattaaggttttaatccagagggggtatgactccgatccggtcaaagcttggaaagaggcacaacaaaaagtgcctgacgaggaagagaatgaagagagcgataacgagaaagagaccgagaagagcgatagcgtgaccgattcgggacccacattcaactacctgctcgatatgccactgtggtatctgaccaaggagaaaaaagatgaactgtgccgactgcgcaatgaaaaggagcaggaacttgacaccttaaaaaggaaatctcctagtgacctgtggaaagaggacctggccacatttattgaagagttggaggcagttgaagctaaagagaagcaggatgaacaagtcggacttcccggtaaagggggaaaggctaaaggaaagaagacccaaatggcggaggtcttaccaagtcctcgcggtcaaagggttattcccaggatcacaatcgaaatgaaagctgaggccgaaaagaaaaacaagaagaaaatcaaaaatgagaacactgaaggttccccacaggaggacggagttgaacttgaaggcctcaaacagcgcttagagaagaaacagaagcgcgagccgggaacaaagaccaaaaagcagacgacactggcattcaagcctataaagaagggcaagaagagaaacccttggtccgatagtgagtccgatcgtagtagtgatgaaagtaactttgatgttccaccacgcgagacagagccacgcagagcagctactaagacgaagtttaccatggatctggactccgatgaagatttcagcgattttgacgagaaaaccgacgatgaagatttcgtgcctagtgatgccagcccaccaaaaaccaagacatcaccaaaactgagtaataaagaactgaagccgcaaaaatccgttgtgagtgatctggaagcggatgatgtaaaaggctctgtccccctgagtagctcgcctccggcaactcatttccccgacgagacagagatcaccaacccagttcccaagaagaacgtgaccgtgaaaaagaccgccgcaaaatcacagagcagtacctcaaccacaggagctaagaaacgagcagcacccaagggcacaaaacgggatcctgccctgaattccggtgtgtcccagaagcccgatcctgccaaaacgaagaacaggcggaagcgaaaaccgtcgacttccgatgattcagactctaacttcgaaaagattgttagcaaagcagtcactagcaagaaaagcaagggagagagtgatgattttcatatggactttgacagcgccgtcgccccaagagctaaaagtgtgcgtgccaagaaaccaataaaatacctggaggagtccgatgaggacgatttgttctag

SEQ ID NO: 31185 - DNA, 4881 bp, synthetic construct
  misc_feature 1..4881: note = Description of Artificial Sequence: Synthetic coding sequence
  source 1..4881: mol_type = other DNA
atggcgaagtccggaggttgcggcgctggagcaggagtgggcggtggaaacggcgcactcacttgggtcaccctttttgatcagaataatgccgctaagaaggaagaatctgaaacagcgaataaaaatgacagtagcaagaagttgtccgttgaacgggtgtatcagaagaagactcagttggaacatatcctcctgagaccagatacttacatcgggtccgtggagcccctgacccagtttatgtgggtctatgatgaggatgtcggcatgaactgccgcgaggtcacattcgtgcccggactgtataagatattcgatgaaattcttgtcaacgcagctgataacaagcagagggacaagaatatgacttgcattaaggtgagcatagaccctgagagcaacattatctccatatggaacaacggtaaggggatcccagttgtggagcacaaagtggaaaaagtgtacgttccagccttaatcttcggtcagctactgacctcctctaactacgacgatgatgagaaaaaggtgactggagggagaaatggatacggcgcaaaactgtgtaacattttttcaaccaaattcaccgttgagacggcttgcaaggaatacaagcacagctttaaacagacctggatgaataatatgatgaagacctctgaggccaagattaaacacttcgacggtgaagactacacttgcattacctttcagcccgacctcagcaaattcaagatggaaaagttggataaggatatcgtggccctgatgaccagacgtgcatatgacctggcagggagctgccgcggagtgaaggtgatgtttaacggcaagaagttgccggtcaatggctttaggagctatgtggatctctatgtcaaagacaagctggatgagactggcgtcgctcttaaggtcatacacgagcttgccaacgagagatgggacgtctgccttacactgagcgaaaaaggcttccaacagatatcctttgtgaattctatcgcaactacaaagggaggccgtcacgtggattacgtcgtagatcaggtagtaggcaaactcatcgaagtagtcaagaaaaagaataaagctggtgttagtgttaagccctttcaagtgaagaatcatatctgggtgtttataaactgcctcatcgagaatccaacattcgacagccagaccaaagagaacatgacccttcagccaaagagttttggaagcaaatgccagctgagtgagaagttcttcaaagccgctagcaactgtgggatagtggaatccatcctgaactgggtgaagtttaaggcccaaactcagctcaacaaaaaatgttcttccgtgaaatactccaagataaaaggtattcctaagctcgacgatgccaatgacgccggaggaaaacatagtctggagtgtactctcatcttgactgaaggggatagtgctaaaagccttgcagtttccggcctcggagtgattgggcgtgaccgctatggagtgttccccctccggggaaagattctgaatgttcgtgaggcgtcccacaagcagatcatggaaaatgcggagatcaacaacattataaaaatcgttggactgcagtataagaagtcctatgatgacgcagaaagccttaagacactccgctatgggaaaattatgataatgaccgatcaggaccaggatggctcccacattaagggacttctgatcaacttcatacaccacaattggccatccctgctgaaacatggttttctggaagagttcattactcccattgtgaaggcaagcaagaataagcaagaactgtccttttactccattcccgagtttgatgagtggaaaaagcacatcgagaaccagaaagcttggaagattaagtactacaaaggactgggcacctcaaccgccaaggaggccaaagagtactttgctgacatggaaagacaccgcatcctgttccggtacgcaggacccgaagatgatgctgctattacgcttgctttctccaagaaaaagatcgatgacagaaaggaatggctgacgaactttatggaggacaggcgccagagacgcctgcacggactgccggagcaatttctctacggaacggcaacgaagcacctgacctataatgattttattaacaaagagttgattctgtttagcaactctgacaatgagagaagtatcccctcactagttgatgggttcaaacctggccaaagaaaagtcctctttacgtgctttaagcgtaatgataagcgagaagtgaaagtcgcccagctggcagggtccgtggccgaaatgagtgcatatcatcacggggaacaggccctgatgatgactattgttaaccttgcccagaattttgtgggttctaacaatatcaaccttctgcagccaattggtcagttcggcacacggctacacggaggcaaggacgccgcttctcccaggtacatctttaccatgctgtccacactggctaggctgctctttcccgctgtggacgataatttactgaagttcctgtatgacgataatcaacgcgtcgaacctgaatggtatattcctatcatccccatggtcctgattaacggcgctgaaggaatcggcacaggatgggcttgcaagcttccaaattatgatgccagagaaatagttaacaatgtgagaagaatgcttgatgggctggatcctcacccaatgctgcctaattataaaaacttcaagggcacgatccaggagctgggacaaaatcagtacgccgtatcgggcgaaatcttcgtggtcgataggaacacggtggaaattacagagctccccgtgcgaacgtggacacaagtgtataaagaacaggtcctggagcctatgctcaacggcaccgacaagacacctgctttgataagtgactacaaagagtaccacacagacacgacggtgaagtttgttgttaaaatgacagaggaaaagctggcgcaggcggaggccgcaggcctgcacaaggtgttcaaacttcaaactacgctcacatgtaacagtatggtcttgttcgaccacatgggttgcctgaagaaatatgaaactgtgcaggatattctcaaggaattttttgaccttcgcctgtcttactacggtctccggaaggagtggctggtgggaatgctgggcgctgaaagcaccaaactcaacaaccaggccaggtttatactggagaaaatacagggcaagatcacaattgaaaacaggtcaaagaaagatcttattcagatgctggtccagagggggtacgaatctgatcccgtgaaagcttggaaagaggcccaagagaaggccgctgaagaggatgaaactcaaaaccagcatgatgactccagcagtgatagcggaaccccttccggtcctgattttaattacatcctaaatatgagtctgtggagtctaacaaaagagaaggtggaggagctgatcaagcagagagatgccaaggggagggaggtgaacgatcttaaaaggaagtctcctagtgatctgtggaaagaggacctggcggcattcgtggaggaactggataaggtcgagagccaggagcgggaagatgtgttagccggaatgtctggcaaagccatcaaagggaaggtgggcaagcccaaggtgaaaaagctgcagctggaagagacaatgccctcgccctacggccgaagaatcattcccgagatcacagccatgaaagccgacgcttctaagaaactgctgaaaaagaaaaagggcgatctagacaccgccgcagtgaaggtggagttcgacgaggagttctctggggcacctgtggagggtgctggtgaagaagctctgaccccctctgttcctatcaataaggggcctaagccaaagcgggagaaaaaagaacccggtacccgggtgagaaagactcccacatcatccggtaagccaagtgctaagaaagtcaagaagaggaacccctggtcagacgacgaatccaaatccgaatctgacctggaagaaactgaaccagtcgtcattccgagagactccctattgcgcagagccgctgctgaacggcctaagtacaccttcgatttcagcgaagaagaagacgatgatgccgacgatgacgatgacgataataacgatttggaagagctaaaagtcaaggcttcacctataactaacgatggcgaagatgagtttgtaccctcagatggattggacaaagacgagtacacattcagtccaggaaaaagcaaagccaccccagaaaaatctctacatgataaaaaatctcaggatttcggaaacctgttttcgtttcctagttattcccagaaatccgaagacgactccgctaagttcgatagcaacgaagaggacagcgccagcgtgttcagcccctctttcggcctaaaacagactgacaaggtgcccagtaagaccgttgctgcgaagaagggcaaaccgagcagtgatacagtgccaaagcctaaacgcgcacccaagcagaagaaagtggttgaagctgtcaattccgactccgattccgaattcggtattcccaagaaaaccactactccgaaaggaaaaggccgtggtgcgaaaaaacgcaaagcctccggctcagagaacgagggcgattacaatcctggacgcaagacctcgaagaccacgagtaagaagcctaaaaagaccagtttcgatcaggattctgatgtggatatcttcccatcagatttccccacagaacctccaagtctgccccgtactgggagggccagaaaggaagttaagtacttcgcggaaagcgacgaagaagaggacgatgtggactttgctatgtttaactag

SEQ ID NO: 31186 - DNA, 3453 bp, synthetic construct
  misc_feature 1..3453: note = Description of Artificial Sequence: Synthetic coding sequence
  source 1..3453: mol_type = other DNA
atggcgaaaagcggcggttgcggggcaggcgcaggagtggggggagggaatggagcactcacctgggtcaataacgccgctaaaaaagaggaatccgaaactgctaacaagaatgacagtagtaaaaagctgagcgtagagagggtgtaccagaaaaaaacccagctggagcacattttactgagaccagacacatacatcggaagtgtggaaccactgacacagttcatgtgggtgtacgatgaagatgtgggtatgaactgtcgggaagtgaccttcgtgcccggactctacaagatttttgatgagattctcgtaaacgcggcagacaataagcagcgcgataagaatatgacgtgtataaaggttagcatcgatcccgaatctaacatcatcagtatctggaataatggcaaaggtattccagtagttgaacacaaagttgaaaaagtctacgtgccagctctgatctttggtcagctgctgacatctagcaactatgatgacgatgagaagaaggtgacggggggaagaaacggctacggggctaagctctgcaatatttttagtaccaaatttacagtagagaccgcttgtaaggaatacaagcacagcttcaaacagacttggatgaacaacatgatgaaaacatcagaagcaaagatcaaacattttgacggcgaggactatacttgcataaccttccagccagatttgtctaagtttaagatggagaaactggacaaagacatcgttgccttgatgacaagaagagcatacgacctggcgggatcttgcagaggcgtgaaagttatgtttaacggcaaaaagttacccgtgaatgggttccggagctatgtcgatctctacgtgaaggacaagctcgatgaaactggtgtggccctcaaggtcatccacgagcttgcgaatgagcgttgggatgtctgtctgacactgagcgaaaagggcttccaacaaatctccttcgttaattcgattgctacgactaaggggggtagacatgtcgactacgtcgttgaccaggtggtggggaaacttatcgaggtggtcaaaaaaaagaacaaagcgggagtaagcgtcaagcctttccaggtcaagaatcacatttgggtcttcataaattgcctgatcgagaacccaacatttgattcacagactaaagaaaacatgacactgcagccaaaatctttcggctccaagtgtcaattatccgagaagttcttcaaggcagcaagtaattgcgggatagtggaatctatactaaactgggtgaaatttaaggcacagacacagctgaataaaaaatgttccagcgttaagtacagcaagatcaaaggcattccaaagttggatgacgccaatgatgctggaggcaaacactccctcgaatgtactctcatcctgaccgaaggggatagtgccaaatcgctggccgtgtccggccttggcgtgatcggcagagatagatatggcgtctttcctctccgtgggaaaattttgaatgtccgtgaagcatctcacaaacagattatggaaaatgccgagatcaacaacattataaagatagtaggacttcagtacaaaaaatcatacgatgatgccgaaagcctcaagactttacggtacggcaagatcatgatcatgaccgaccaagaccaggatgggtctcatatcaaaggattgcttataaacttcatacatcacaactggccttctctgctgaaacacggtttcctggaggagtttatcacccccatagtgaaagcgtcgaaaaacaaacaggagttgtctttctactccatccctgagtttgacgagtggaagaaacatatcgaaaaccagaaagcttggaagatcaaatactataaggggttaggtacatctactgcaaaagaggcaaaggaatattttgcagacatggagcgccaccgcattctctttcggtatgcgggtccagaggatgacgccgctatcacgcttgctttttccaagaagaagattgacgatcgaaaagaatggctgactaactttatggaggataggcgccagagaaggctacatggacttccggagcagtttctgtatggcacagctaccaagcacctgacatacaacgatttcatcaataaagagcttatactgttctccaatagcgacaacgagcgtagtatcccctccctggtcgacggttttaaacccggtcagaggaaagtcctgtttacatgtttcaagcgtaatgataagcgggaggttaaggtggcccagctggcaggatctgtggcagagatgtctgcgtatcaccatggggaacaagccctgatgatgacaatcgttaacctggcccagaattttgtgggctctaataatatcaatcttctccagcctattggacagttcgggacgagacttcatgggggaaaggatgccgcaagcccgagatacatctttaccatgctctctaccctagctcggctgctttttcccgctgtagacgacaacctgctgaagttcctgtatgacgataatcagagagtcgagccggagtggtacattccaatcatcccaatggtgctgattaacggagctgagggtatcgggacaggatgggcgtgcaaactgcctaactacgatgctcgcgaaatcgtgaacaatgtgagacggatgctcgatgggctggatcctcaccccatgttgcccaattataaaaacttcaaggggacaatccaagaactgggacaaaaccagtatgctgtaagtggagagatctttgtggtggaccggaacactgtcgaaatcacagagcttcctgtgaggacttggacacaggtgtataaggaacaggtgctggaacccatgctgaacgggactgacaaaacaccggctctgatttccgattataaggaataccacaccgacaccacagtgaaatttgttgtcaaaatgaccgaagagaagctagctcaggccgaggccgctgggcttcataaggtcttcaagctgcagacgaccttaacctgtaactctatggttcttttcgatcacatgggatgtctcaagaagtacgagaccgtacaagacatccttaaggagtttttcgatttgcgtctgagctactacggactgcgcaaagaatggctggtggggatgctgggagcagagagtaccaaactgaacaaccaagcacggttcatcctagagaaaattcaaggcaagatcactatcgagaataggtcaaaaaaggatctgatacaaatgctggtgcagcgcggttatgagtccgatcccgttaaggcttggaaagaagctcaggaaaaggcggcagaggaggatgagacacagaaccaacacgatgactcttccagcgactccggcaccccgtctggccctgattttaactacattctcaacatgtctttgtggtccctaacctag

SEQ ID NO: 31187 - DNA, 4866 bp, synthetic construct
  misc_feature 1..4866: note = Description of Artificial Sequence: Synthetic coding sequence
  source 1..4866: mol_type = other DNA
atggctaagagcgggggatgtggagccggtgctggcgtgggtggcggaaacggagccttgacctgggtcaataatgctgcaaaaaaggaagagtcagaaaccgcaaacaaaaacgactcttcaaagaagctgtccgtggaacgagtgtatcagaagaaaacacagctggagcacatcctgctgagacccgatacctatattggctctgttgaaccattgactcaatttatgtgggtctacgatgaagacgtggggatgaattgtcgtgaggtgaccttcgtgccaggtttgtacaagatttttgatgagatccttgtgaacgctgctgataataaacagagagataagaacatgacttgtattaaggtgtctatagacccagaatcaaatataatcagcatctggaataatggcaagggcattccggttgttgagcataaagtcgagaaagtttacgtgccggctctcatttttggccagctgcttacttcctctaactatgatgatgatgaaaagaaggttactggaggtaggaacggttatggagccaaactctgtaatatcttcagcactaagttcaccgtggaaactgcttgcaaggaatataaacatagtttcaagcagacttggatgaacaatatgatgaaaaccagcgaggccaagatcaagcacttcgacggcgaggactatacctgcattacctttcaacccgacttgagtaaatttaagatggaaaaactggacaaagacatcgtggcccttatgactagacgagcatacgacttggctgggagttgtcggggtgtgaaagtcatgtttaatggcaaaaagcttccagtgaatggctttcggtcctatgtggacctgtacgtaaaggacaagctggacgagactggggtggcgctgaaggtaattcatgaactggcaaacgaacgttgggacgtgtgcctaacactcagtgaaaagggcttccagcaaatttcatttgttaattcaatcgccaccaccaagggagggagacacgtggactatgtcgtggatcaggtcgtgggaaaactaatcgaggttgttaagaaaaaaaataaggccggagtttccgtgaagccattccaggtcaagaatcacatttgggtgttcatcaactgtctaattgaaaatcccacttttgacagtcaaactaaggaaaacatgactcttcagccaaagtcattcggctctaaatgccaactgtccgaaaagttctttaaggcagctagtaattgcggtatagtggagtctatcctcaactgggtcaaatttaaagctcaaacgcagctaaataagaaatgtagcagcgtcaagtattcgaagattaaggggattcccaaactcgacgatgcaaacgatgccggagggaaacattctctcgagtgtacgttaattctaactgaaggtgacagtgcgaagtctctcgctgtcagcggtttgggggttatcggccgagaccggtatggagtgtttccactgaggggaaaaatccttaacgtgcgtgaggcttctcacaaacagattatggaaaatgctgaaatcaataatatcatcaagattgtgggtctacagtataagaaaagctacgacgacgctgaatctctgaagacgctgagatacggaaagataatgatcatgactgatcaggatcaggacggaagtcatattaagggtcttctaattaacttcatccaccacaactggccatccctcttgaaacatgggttcctggaagagtttataacacctatcgttaaggccagcaaaaacaagcaggaactcagcttttatagcattcctgagttcgacgagtggaagaagcacatcgagaaccaaaaggcttggaaaatcaaatactacaaggggctgggaacgagcaccgccaaagaagcgaaggagtatttcgcagatatggaaagacaccggatcttgttccgttatgccggtccggaagatgacgccgctataaccctcgcttttagcaaaaagaagatcgatgaccgaaaggagtggctgacaaattttatggaagatcgtcgacagaggaggctgcacggattgccagagcagttcctgtacggcacggccacgaaacatttgacctacaacgacttcatcaacaaagagctgattctgttttctaactccgacaacgagagatccattccgagcctcgtggatgggttcaagcccggtcagcggaaagtccttttcacgtgtttcaagagaaatgataagcgcgaggtgaaagtggcgcagctggccggttcagtggccgaaatgtcagcttaccaccacggagagcaagccttaatgatgaccatcgtgaacctcgcccaaaacttcgtgggttctaacaatatcaatctcttgcagccaatcggacaattcgggacgagactgcacggcggaaaagatgctgcgagtccacggtatattttcaccatgctgtccactctggccaggctactcttccctgctgtcgatgacaatctgcttaagttcctctatgacgacaaccaacgtgtcgagccagagtggtatatccctattatacccatggtgttgattaatggtgcagagggcatcggcaccggctgggcctgcaagctacccaattatgacgcgagggagatcgtgaacaacgtgaggaggatgctcgacggactcgatcctcacccaatgttaccaaactacaaaaacttcaagggtacaatccaggagctaggccaaaatcagtacgccgtgagcggcgaaatttttgtagtcgataggaacaccgtggagatcaccgagttgccagtaagaacttggacgcaggtctataaggagcaggtgctagagccaatgctgaatggcacggataaaacccctgccttgatttcggattataaagagtatcacaccgataccacagtgaagttcgtggtgaaaatgacggaggagaagctagcgcaggctgaagcagccggattgcataaagtgttcaagctccagactaccctgacatgtaacagtatggtcctgttcgatcatatgggttgcttgaaaaagtatgagacggtgcaggacattctgaaggagttctttgatcttcggctgtcctattacggtctgaggaaggagtggttagtggggatgctgggggctgagtcgacaaagctaaataatcaggctaggtttatcctggagaaaattcaaggtaaaatcaccattgaaaacaggtctaaaaaggacctgattcagatgcttgtgcagagaggttatgagtcagatccagtaaaagcatggaaggaggcacaagagaaagccgctgaggaagatgagacacaaaaccagcacgacgatagctcatccgactctggtacccccagcgggcctgactttaattacatactcaatatgtccctgtggtccctgaccaaagaaaaagtcgaggaactcatcaaacagagagacgcaaaaggtcgagaagtcaacgacctaaaacgcaaatccccatccgatttatggaaggaggacttagcagccttcgtggaagagctggataaggtggaatcgcaggagagggaagacgttttagccggtatgtccggtaaggcgatcaaaggtaaagttgggaaacccaaagtaaagaaacttcagcttgaggaaaccatgccgtctccatacgggagacgcatcatcccagaaattacagcaatgaaagcggatgcctcgaaaaagctcctcaagaaaaaaaagggcgatctcgataccgccgcagtcaaagttgaatttgatgaagagttttccggcgcacctgtggagggcgctggggaagaagctctgacaccaagcgtgcccatcaataaaggtcctaaacctaaacgcgaaaagaaggaacctgggactagagtgagaaaaacacctacttcctccgggaagccaagcgcgaagaaggtgaagaaaagaaatccttggtcagatgacgagtccaagagcgagagtgacctcgaggagaccgagccggtggttattcctcgggatagtttactcagaagagccgctgcggagcggccaaagtacacgttcgacttcagcgaggaagaggacgacgatgctgatgacgacgatgacgacaacaacgacctggaagaattgaaagtgaaagcctcgcccattacaaatgacggggaagacgagttcgtcccttcagacggtttggataaggatgagtacaccttctcccctggcaaatcaaaggctacccccgagaaatccctccatgacaaaaaaagccaggacttcggtaacctcttcagttttccatcatacagtcagaagtctgaagatgattcagctaaatttgattctaatgaagaggattcagccagcgtgttttctcctagcttcggtctgaaacaaacagataaagttcctagcaaaacagtcgcagctaagaagggtaaaccctccagtgacacagtgcccaaacccaagcgcgctcctaagcagaagaaggtcgtcgaggctgttaactcggactcagattcagaattcgggatccccaagaagactactacccctaaaggcaaagggagaggtgctaagaagcgaaaggcatccggctccgagaacgagggggattacaatccaggtagaaaaacatcaaagacaacctccaagaaacctaaaaaaacatcattcgatcaggactcggacgtggacattttcccatccgacttcccaacagagcctccatctctccctaggacgggtcgtgcccgtaaggaggtgaagtattttgcagagtcagacgaggaggaggacgacgtggacttcgccatgtttaactag

SEQ ID NO: 31188 - DNA, 174 bp, synthetic construct
  misc_feature 1..174: note = Description of Artificial Sequence: Synthetic coding sequence
  source 1..174: mol_type = other DNA
actctctttgatcagaataatgccgcaaagaaagaagagtccgagaccgctaacaagaatgactctagcaaaaaactgtccgtggagagagtataccagaagaagacccagctagagcacattctgcttcgtcccgacacatacattggatccgtcgagcccctgacacagtag

SEQ ID NO: 31189 - DNA, 1437 bp, synthetic construct
  misc_feature 1..1437: note = Description of Artificial Sequence: Synthetic coding sequence
  source 1..1437: mol_type = other DNA
atgtccctttggtcgctaactaaagagaaggtcgaggagctcatcaaacagagagacgcgaaggggagggaggtaaatgacctgaagcggaaatctcctagcgatttgtggaaggaggatctagctgcttttgtggaggagttagataaggtggagagtcaggagcgggaagatgtacttgccggtatgtccggaaaggctataaagggcaaggtgggcaaacccaaggtgaagaaattacaactagaggagacaatgccgagcccatacggtaggagaatcataccagagattacagcaatgaaggctgatgcctcaaagaaactgttgaaaaagaaaaagggagatctcgacacggccgcagtgaaagtcgaatttgacgaggagttctctggggctccagtcgaaggtgcaggtgaagaagccctcacgcctagcgtccccattaacaagggcccaaaaccaaagagggaaaagaaggagccaggcacacgagtgcgcaaaacacccacctcaagtggtaaacccagtgccaaaaaagtgaagaaacggaatccatggagcgatgatgaatcgaagtccgagtcagacctcgaggagactgaaccagtggttatccccagggattcccttttacgtcgcgctgctgcagaaagaccgaaatatacctttgacttcagtgaggaggaggatgatgatgccgatgatgacgatgacgacaataacgacctcgaagagcttaaggtgaaagccagtcctattaccaacgatggcgaagacgaattcgtgccttccgatgggcttgacaaggacgagtatactttctcgccgggaaaatctaaggcaactcctgagaagtcccttcatgacaaaaagagccaggacttcgggaatctgttcagctttcccagctactcgcaaaagagcgaggatgactccgccaagttcgactccaatgaggaagatagcgcctccgtcttcagcccttcttttggattaaagcagactgataaggtcccatctaagaccgtcgctgccaagaagggcaagcccagctctgacaccgtgcccaagcccaagagagcccctaagcagaaaaaagtggtggaagcagtgaattcagattccgactccgagtttgggatcccaaaaaagaccactacaccaaaaggaaaaggacggggagcgaaaaagagaaaggcgtctggaagcgagaatgagggggactataaccctgggaggaaaacaagcaagacaacttccaagaagccaaaaaaaacctcctttgatcaagattcagacgttgacatcttcccttctgattttcctacagagccgcctagcctgccacggacagggcgagcgcgaaaagaggtcaagtactttgcggaaagcgacgaggaagaggacgatgtggactttgccatgttcaactag

SEQ ID NO: 31190 - DNA, 1437 bp, synthetic construct
  misc_feature 1..1437: note = Description of Artificial Sequence: Synthetic coding sequence
  source 1..1437: mol_type = other DNA
atgagtctatggagcctgaccaaggagaaggtggaggaactgatcaaacagagagatgctaaaggtagggaagtcaatgatctaaaacggaaatcaccctccgacctctggaaagaagatctggcagccttcgtggaggaactcgataaggtggagagtcaggagcgggaagatgtgctcgctggaatgtctggaaaagcaataaaagggaaagtgggcaagccgaaagtgaagaaattgcagctcgaagaaaccatgccgtctccatatggtcggcgaattatacctgagatcacggctatgaaagctgacgcttcaaagaagctcctaaagaagaaaaaaggagatctggacacagcagcagtcaaggttgagtttgacgaggaatttagtggtgcacccgtggaaggcgctggagaagaggcgctcacacccagcgtgcccatcaataaaggaccaaagcccaagagagaaaagaaagagcctggcactcgggttcgtaagactccgactagctccggaaagccatcggcaaagaaagtgaaaaagcgaaacccttggagcgatgacgaatctaaaagtgaatctgatttggaggaaacggagcccgtggtgatacctcgcgactcccttctgaggagagccgctgcagaaaggcccaagtacacttttgactttagcgaagaagaagatgacgatgccgacgacgatgatgatgataataatgatctcgaggagctgaaggtaaaagctagtcccatcacaaatgatggggaagatgaattcgtccctagtgatggactcgacaaggatgagtacaccttctccccagggaaatcaaaggcgacccctgaaaaatcattgcacgacaagaaaagtcaggatttcggtaatctgttcagttttccctcctattcccaaaagtcagaagatgattcagccaaattcgatagcaacgaggaggatagcgcttctgtgttctccccgtcttttggtctgaagcagacagacaaagtcccgtcaaagacagttgctgcaaaaaagggcaaacctagcagtgataccgtcccaaaaccaaagcgggctccaaaacagaagaaggtagtggaagcagttaactccgatagcgattccgagtttggcatacccaagaagaccaccactcccaaagggaaggggcgtggagccaagaagcggaaggcttccggtagcgaaaacgagggggattataaccccggacgtaaaacctccaaaaccacctcaaagaagccaaaaaagacttcatttgaccaggattcagacgtggacattttccctagcgactttccaactgagccaccgagcctacctaggactgggagggcaaggaaggaagtgaagtatttcgcggagagtgacgaggaagaggacgacgtcgactttgccatgttcaactag

SEQ ID NO: 31191 - DNA, 3006 bp, synthetic construct
  misc_feature 1..3006: note = Description of Artificial Sequence: Synthetic coding sequence
  source 1..3006: mol_type = other DNA
atgattttcccagtggcccgatatgcacttaggtggttgcggcgaccagaggatagggccttctctcgagcagcaatggagatggcactgcggggagtgcgtaaggtgttatgtgtcgctgagaaaaatgatgccgctaaaggaattgctgatttactatccaacggacgtatgagacggcgagaaggactttcaaaattcaataagatctacgagttcgattatcacttgtacggccagaacgtgacgatggtcatgacatcagtgagtggccacctccttgcccatgatttccaaatgcagttcaggaagtggcagtcctgcaaccctctcgttctgtttgaagctgaaattgaaaagtattgtccagagaactttgtggacatcaagaaaaccctcgagagagaaactaggcagtgccaggcactagtgatttggaccgactgtgacagggaaggggagaacattgggtttgagattatccacgtgtgcaaagcagttaaaccgaatctccaggtgctccgagcaagattctcggagatcaccccgcacgccgtcagaaccgcatgtgagaatctgacggagcctgatcagagagtttcagacgccgtagacgtgcgtcaagaactggatctgaggattggagcagcattcactcgcttccagacactaagactacagaggatttttcctgaggttctggcagagcagcttatttcatatggaagctgccagttcccgactctcggattcgtagtggaaaggttcaaggctattcaggcatttgtgcccgagatatttcaccgtatcaaagtgacccacgatcacaaggatgggatagtggagtttaactggaagcgccaccggctgtttaaccacaccgcttgtttggtgctctaccaactgtgcgtggaggacccaatggccactgtggtggaagtaagaagcaagcctaagtctaagtggcgaccacaggccctcgacaccgtggaactggaaaaactggccagccgcaaactgcggataaatgcaaaggagacaatgcgcatcgcggagaaactttacacccaagggtacatcagttacccacgcacagaaacgaatatctttccaagagacctcaatctcaccgttcttgtcgagcaacaaactccggaccctcgctggggcgcattcgctcagagtattttagaaagaggtggtccaactccacggaatggaaacaaaagtgaccaagcacacccacccatccatcccaccaagtacactaacaaccttcagggggatgaacagaggctctacgagtttatagtgagacacttcctagcctgctgcagccaggatgcacagggccaagaaacaactgtcgaaatcgacattgcccaggaacgcttcgtggcccatggtctcatgatactggcaaggaattacttggacgtctacccttacgaccattggtccgacaaaatcttacctgtgtacgagcaggggtcacatttccagcctagcacagtggaaatggttgacggagaaactagcccacccaagcttttaacggaggccgacctgattgctctcatggaaaagcatggcataggtactgacgctacccatgccgaacacatcgaaaccattaaggcacgaatgtacgtcgggcttactcctgacaagaggttcctgccgggtcaccttgggatggggttggtagagggttacgattcaatggggtatgagatgagtaagccggatctgcgggctgaactggaagccgatctcaagctgatctgcgacggtaaaaaggataaattcgttgtgctccgtcaacaggtccagaaatataaacaggtgttcattgaggccgtggccaaggctaagaaactggatgaggctttagcccagtactttggcaatgggacagagctggcccaacaagaagatatttaccccgctatgccggagcccatccgcaaatgtcctcagtgcaataaagatatggtgcttaaaaccaaaaagaacggcggattttacctgtcttgcatgggcttccccgaatgcaggtcagctgtgtggctcccagattcagtccttgaggccagcagggattcatctgtctgccccgtgtgtcagccccaccccgtatatagactgaagttgaagtttaaaagaggcagcctacctcccactatgcctcttgagtttgtgtgttgcatcggcggttgcgatgatacactcagagagatcctggatctccgctttagcggagggcctcctagagcatctcagccctctggcaggctgcaggcaaaccagtccttgaaccggatggacaacagtcaacaccctcagcctgctgacagccgccagacaggctcttctaaagccctggcccagaccctcccaccgcctacagccgctggagagtccaattctgttacgtgcaactgcggccaggaagctgtcctgctcaccgtgcgcaaggaggggcctaatcggggtcgtcagttttttaagtgcaacgggggatcctgcaactttttcctttgggctgattctccaaacccaggcgctggagggccaccagccctggcctataggccactcggtgccagtttagggtgtccccctggtcccggaatacatctgggtggctttgggaatccaggagatggctctgggagcgggacttcatgcttgtgctcgcagcccagcgttacacggacggtgcagaaagacgggccaaacaaaggccgacagtttcacacgtgtgcaaagccccgagagcaacaatgtggattcttccagtgggtcgacgagaatactgcgcctggtactagcggggcacccagctggactggggataggggtcggaccctggaatcagaagctaggtcaaagcggcctagggcctcatcaagtgacatgggatcgactgcaaaaaagcccagaaagtgcagcctttgccaccagcccggacataccagacctttctgcccccagaacagatag

SEQ ID NO: 31192 - DNA, 1170 bp, synthetic construct
  misc_feature 1..1170: note = Description of Artificial Sequence: Synthetic coding sequence
  source 1..1170: mol_type = other DNA
tgatcacgtgccgctatggagatggctttgcggggagtcagaaaagttctttgtgtggctgagaaaaacgacgcggcaaaagggatagctgatttgctgtcaaacggcagaatgaggcgtcgagagggactatcgaagttcaataagatttatgagtttgattatcacctatacgggcaaaacgtgaccatggtgatgacctccgtcagcggccaccttctcgcacatgattttcagatgcaattccgtaaatggcagtcatgcaatccgttggtactgttcgaggcagagattgagaaatattgtcctgagaactttgtggatattaagaagacgttggaacgagaaactcggcaatgtcaggcactggtcatctggacggattgcgaccgtgaaggcgagaacatcggtttcgagattatccatgtctgcaaggccgtgaagcccaatcttcaagtgctcagagccaggttttcagagatcacacctcatgccgtgcgcaccgcttgcgaaaatctgaccgagccagaccaaagagtgtcagatgccgtcgacgtgcggcaggagctcgacctgaggatcggcgctgccttcacgcgattccagacgcttcgattgcagaggatctttcccgaagtgttagcggaacagcttatcagctacgggtcttgccaattccctaccctcggatttgtcgtggagagattcaaggctatccaggcgtttgtacctgagattttccataggattaaggtgacacatgatcataaagatggtattgtggagttcaactggaagcgacacaggctctttaaccacactgcctgtctggtgctatatcagctgtgtgttgaggacccgatggctaccgtggtcgaggttcggtctaaacctaagagcaaatggcgcccacaggcactggatacggttgagctagaaaagctggcatctcgtaaactccgcatcaacgccaaagagaccatgaggatagctgagaagctatacacccaaggttacatctcatacccacgaaccgagaccaacatatttccaagggatttaaatttaacagtgttagtagaacagcaaactccggatccacggtggggagcttttgcccagagtattctagagcggggagggccaaccccccgtaacggtaacaaatag

SEQ ID NO: 31193 - DNA, 1596 bp, synthetic construct
  misc_feature 1..1596: note = Description of Artificial Sequence: Synthetic coding sequence
  source 1..1596: mol_type = other DNA
atgattctggctcggaattacctcgatgtgtacccgtacgatcattggagcgataagattctgcccgtttacgaacagggttctcatttccaaccaagcacagtggagatggtagacggcgaaacctccccgccaaagctcctgaccgaagcggatcttatcgctctgatggagaaacacggtataggcactgacgccacccatgcggaacatatagaaactattaaagcccgtatgtacgtgggtttgactcccgacaagcgttttctgcctgggcaccttgggatgggtctggttgagggatatgactcgatgggctacgaaatgtccaagcccgatctgagggcagaattagaggcggatctgaaactgatatgtgacgggaagaaagacaagttcgtggtgttgaggcagcaagttcagaaatacaaacaggtctttatagaggccgtggccaaggctaaaaagctggacgaagcccttgctcaatactttggcaatggcactgagctcgctcagcaggaggacatctatccagcgatgccagagcccatccgcaagtgtccccagtgcaacaaagatatggttctgaaaaccaagaaaaacggaggtttctacctgtcatgcatgggatttcctgaatgtaggagcgcagtgtggctacctgactccgtcttggaagccagtcgagatagttctgtttgccctgtttgtcagcctcaccctgtgtacaggttaaagttaaagttcaaacggggaagtctgccgcctaccatgccattagagtttgtctgttgcatcgggggatgtgacgatactctccgtgaaatactggatttgaggttctcagggggaccaccgagagctagtcaacccagtggaaggttgcaggctaatcagtcgctgaacagaatggacaattcccagcacccacaacccgcagactcacggcagacagggagctccaaggcactggctcagacactgcccccacctaccgctgcaggcgagtccaattctgtgacatgtaattgcggccaagaggccgttctgctgacagtgcggaaggaaggaccaaacaggggcaggcagttttttaagtgcaacgggggaagctgcaatttcttcctgtgggccgattcacctaacccaggggctggagggccacctgcattggcctatagacctctgggtgccagcttgggatgccctcccggtccaggcatacaccttggagggtttggaaatcccggagatggtagtggctccgggacaagctgtctatgcagccaaccatcagtgactaggactgtacagaaggacggccctaacaagggtcggcaatttcacacctgcgcaaaaccaagggaacagcagtgcgggttttttcagtgggtggatgagaacaccgccccaggcacaagcggtgccccttcttggacaggggaccgcggaagaaccttggaaagtgaagcgcgttccaagcggccacgagctagctcttctgacatgggcagcaccgcaaagaaacccaggaagtgttctctttgtcaccaacccggacacacacggcctttctgtcctcagaatagatag

SEQ ID NO: 31194 - DNA, 2721 bp, synthetic construct
  misc_feature 1..2721: note = Description of Artificial Sequence: Synthetic coding sequence
  source 1..2721: mol_type = other DNA
atgaatctcatcattatctgtatggctagacagtcctgcaacccacttgtcttgttcgaggctgaaatcgagaagtactgtccagagaacttcgtggatattaagaagaccctggagcgggaaaccaggcagtgccaagcattggtgatttggactgactgtgatcgagagggtgaaaatatcggctttgagattattcatgtctgtaaagccgtcaaaccaaatctacaggtcctccgcgctcgcttctccgagatcacaccccacgctgttcgcacagcatgtgagaacctgaccgagcctgatcaacgggtgagcgatgcggtggatgtgaggcaggaactcgatctaaggatcggggcagcgtttacaaggttccagaccctgagacttcagcgtatttttcctgaggttctcgctgaacaattaattagttatggtagctgtcagtttccaacactcggctttgttgtcgaacgcttcaaggctatccaagctttcgtaccagagatctttcaccggattaaagtcacccatgatcataaagatggcatcgtggaatttaactggaagcggcaccgcctattcaatcacaccgcttgcctggtgctgtatcagctgtgcgtggaggaccctatggcgaccgtagtcgaggtgcggagcaaaccaaaatccaaatggcggcctcaggcattggacactgtcgagctcgagaaattggcctccaggaagctgcgaatcaatgctaaagagacaatgcgtatcgccgaaaagctatacacccagggttacatctcctaccctagaacagagaccaatattttccccagggacctgaatctgactgttctggtggagcagcagacacctgaccccagatggggagcctttgctcagagtatccttgagcgcggagggccaacacccaggaacggtaacaaatcagatcaggcccatcctcctattcatccgacaaaatatacaaacaacctccaaggagatgagcagcgactgtacgaatttattgtcagacattttttagcgtgctgttcccaggacgcacaagggcaggaaactacagtggaaatcgacatagcgcaggaaagatttgtcgcccatggcctgatgattttagcccgaaattaccttgatgtctacccttacgaccactggtcagataagatcctgcctgtgtatgaacaagggtcacacttccaaccttctactgtggaaatggttgacggagaaaccagccctcctaaactgctcaccgaggcagatctgatcgcactgatggaaaagcacgggattgggaccgatgcaacacatgccgagcatatcgagaccatcaaggctcgtatgtatgtgggccttactccagataagcgattcctgcccggtcatctggggatggggctggtcgaggggtacgactccatgggatacgaaatgagcaagcctgacttgcgtgctgagctagaggctgatctgaaattgatatgtgacggaaaaaaggacaagtttgtggtgctcagacagcaagttcagaagtataaacaggtgttcattgaggccgtggctaaagccaagaagctggatgaggcattggcacaatacttcggaaatggaaccgaactcgcgcaacaggaggatatctaccctgccatgcccgagccaattcggaagtgcccacagtgcaataaagacatggtcctgaagaccaagaagaacggcggtttttatctctcctgcatgggatttccagaatgtcgtagcgcggtgtggctaccagacagtgtgctcgaggcgagcagggattctagtgtttgtcccgtctgccaacctcacccggtctaccgactgaaactgaagtttaagcgaggtagcctgcccccaacaatgcccctcgagttcgtctgttgtatcggcggatgtgatgatacgcttcgcgaaatattagacctccggtttagcggtggtcccccacgagcttcccagccgtcaggtcgactgcaggccaatcagtccctgaacaggatggataactcccaacacccccagcccgcagactctaggcaaactggctccagcaaggccctggcccagaccttgccaccacctacagcggcaggcgaatccaattccgtcacctgcaactgcgggcaggaggctgtgctgctgacggtgcgcaaggaggggccaaaccgtggccgacagtttttcaaatgtaacggaggctcatgcaattttttcctgtgggccgacagccctaaccctggcgcaggtggccctcccgcactggcatacagacctcttggagcaagcctgggatgtcctccagggccaggaatccacctagggggtttcggcaatcccggagacggtagcgggtcaggcacaagctgcctgtgctcacagccatccgttacacgcacagtgcagaaggatggtccgaataaaggccgacaattccatacgtgcgccaaacccagagaacagcagtgtggattcttccaatgggtcgatgaaaatacggccccaggaacaagtggtgcaccctcctggaccggggacagggggagaacactggaaagcgaagctaggtcaaagcgccctcgggcttcctctagcgacatgggcagcacagcaaaaaagcccagaaagtgctctctctgccaccagcccggtcatacacgccctttctgccctcaaaacaggtag

SEQ ID NO: 31195 - DNA, 2589 bp, synthetic construct
  misc_feature 1..2589: note = Description of Artificial Sequence: Synthetic coding sequence
  source 1..2589: mol_type = other DNA
atgaaaactgtcttaatggttgccgaaaagccctccctggctcagagcattgcaaagatcctatcacgcggatccttatccagccataagggtctcaatggagcctgctccgtacacgagtacactggcactttcgccggtcagccagtgcggttcaagatgacaagtgtgtgcggtcacgtcatgactctcgatttcctcggcaagtacaacaagtgggacaaagtcgatcccgctgaactcttttctcaggcacctacagaaaaaaaagaagctaacccaaagttgaacatggtgaaatttctacaagtggagggcagaggttgcgattatatcgtcctctggcttgattgcgacaaagagggcgaaaacatctgctttgaggtgctagacgctgtactcccagttatgaataaggcacatggcggtgagaagactgtgttcagggcgcgttttagcagcatcaccgacacagatatctgcaacgctatggcatgtctcggggaacccgatcataacgaagctctgagtgttgacgcacggcaggagctcgacttgcgtatcggttgcgcttttactcgcttccagaccaaatacttccaggggaagtacggcgatttggactccagcctgatctcatttgggccttgtcagaccccaactcttggtttttgtgtagaacgccatgataaaattcagagcttcaagcctgagacatattgggtcctgcaggccaaagtgaataccgacaaagaccgctccctactgcttgattgggatcgcgtgcgtgtgttcgaccgggagatagcccagatgtttctcaatatgactaaactggagaaagaagctcaggttgaggcgactagtagaaaggagaaggctaagcagagaccgctggctctcaacacagtggagatgctgcgggttgcgagctcctcactgggcatgggccctcagcacgccatgcaaactgccgagcggttgtatacccagggatacatttcatatcctagaaccgagacaacacattaccccgagaattttgacttgaagggctccttgcggcagcaagctaatcacccctactgggctgacacagttaagaggctgctagcagaggggattaatagacccaggaagggccacgacgctggcgatcaccctcctattaccccaatgaaatccgcaaccgaggctgagcttggaggagacgcatggcgcctatacgaatacatcacaagacattttatcgcgacagtgtcccatgattgcaaatacctgcaaagcacgatctcttttcgtattgggcctgagctgtttacatgtagtgggaaaactgtcctcagtcctggatttacagaagtgatgccttggcagtctgtgccactggaggaaagcctcccaacgtgccaacggggagacgcctttcccgtaggcgaagtgaaaatgctggagaagcaaaccaatccccctgattacctgacagaggcagaactaataacgcttatggagaagcatggcattggcaccgatgcatcaattcccgtgcatataaacaatatttgccagcgaaactatgttaccgtggagtcagggaggcgccttaaacctactaacctcgggattgtgctggtccacggctactataaaatcgatgctgaattggtccttcctaccatcaggtcagcggttgagaagcagctgaacctgattgcccaaggtaaggccgactatcgacaggtgctgggtcacacactcgacgtctttaagaggaagttccactacttcgttgactccatcgcgggaatggacgaattaatggaagtctctttctccccccttgcggctacggggaagcccctgtctagatgtgggaagtgccaccggttcatgaagtacatccaggcgaagccaagcaggttgcactgtagccactgcgacgagacctatactttaccacagaatggcacaattaaactgtataaagagttgcgctgccccctagacgatttcgagctggtactgtggtccagcggcagcagaggaaagagctaccctttatgtccgtattgctataaccatcccccatttcgggacatgaaaaaaggaatggggtgtaacgagtgcacacacccctcatgccagcactcgttatcaatgttgggaattgggcagtgtgtggaatgtgagagcggtgtgctggttctggatccaacctctggaccgaagtggaaagtggcatgtaacaaatgcaacgtggtggctcactgtttcgagaatgcgcaccgtgtccgtgtctccgccgacacctgctccgtatgtgaggctgccttactggatgtcgacttcaataaggccaagtcaccgctcccaggtgatgaaacacagcatatgggttgcgtgttttgtgatcctgtttttcaggaactcgtggagctcaaacatgctgcctcctgccatccaatgcacaggggaggacccggtcggcgacagggcagaggtcggggaagggctcgtaggccccctggcaaaccaaaccctcggagacccaaagataaaatgagtgcccttgcagcgtacttcgtctag

SEQ ID NO: 31196 - DNA, 2589 bp, synthetic construct
  misc_feature 1..2589: note = Description of Artificial Sequence: Synthetic coding sequence
  source 1..2589: mol_type = other DNA
atgaagactgtgttgatggtagctgagaaaccaagcttggctcaaagcatcgctaagatcctctcccgaggatctctctctagtcataagggccttaacggcgcatgctcagtacatgagtatactgggacattcgcaggacaacctgtacggtttaagatgaccagcgtgtgcggacacgtgatgacactagacttcctcggaaagtacaacaaatgggataaggttgacccagcagagctgttcagtcaggcccctaccgagaaaaaagaggcaaatcccaagttgaacatggttaaatttttacaggtcgagggtaggggatgcgactacatagtgctatggttagactgcgacaaggaaggcgaaaatatttgtttcgaggttctcgacgccgtgctcccagtcatgaacaaggcccacggtggggaaaaaaccgtttttagagcgaggttctcatcgattactgacaccgatatctgcaacgccatggcgtgtctgggtgaaccagatcacaacgaagcactgagcgtggacgcccgtcaagagctggatctccgtatcggctgcgcatttacgcgttttcagacgaagtacttccaggggaagtatggagacctggattcgtctctcataagcttcgggccttgtcagacccctaccttaggcttctgtgtagagagacacgacaaaatccaaagttttaaaccagaaacatattgggttctgcaggcgaaggtgaacacggataaagatcgtagcctgttgctggattgggatagggtgcgcgtattcgaccgagagatcgctcagatgttcctcaatatgacaaaactggagaaagaggctcaggtggaagccacctcacgtaaagagaaggctaagcaacggcctctggctcttaacactgtggaaatgttaagggtcgcttccagctctctgggtatggggcctcaacacgcgatgcaaaccgccgaacgcttgtacacccaaggttatatatcctatccacgcacggagaccacccactacccggagaacttcgatctcaagggatcactccgccaacaggctaaccacccgtactgggctgacacagttaaacgactgttggcggaggggattaacagacccaggaagggccatgacgccggtgaccacccccctatcacccccatgaagagtgccacggaggctgagctgggaggcgatgcctggaggctgtatgaatatattacgaggcattttattgctactgtctctcacgactgcaagtatctgcagtctacaattagctttagaatcggcccagagttgtttacttgctcgggtaaaacggtgctttctcctggattcaccgaagttatgccatggcagagcgtcccactagaggagtctctgcctacgtgtcagcgcggagatgccttccccgtcggggaagtaaagatgcttgagaaacagactaacccaccagactatcttaccgaggcggaactcattacactgatggaaaaacacggaatcggtaccgacgcctctattcctgtgcacataaataacatttgccaacgaaactacgtgaccgtggaatctgggaggaggctgaagcctacgaacctgggcatcgtcttggtgcacgggtattacaagatcgatgctgagctggtccttccaacaatccggagcgcggttgaaaaacagctgaacctgatagcccaggggaaggccgactaccggcaagtgctgggacacaccttagacgtttttaaacgtaagttccattacttcgtcgactccatcgcgggtatggacgagttaatggaggtaagcttttccccactggctgccactggcaaacctctgtctcgctgcggtaagtgtcatcgattcatgaaatacattcaagctaagcccagccggttgcactgtagccactgtgacgagacttacaccctgccccagaacggcacaattaagctctacaaggaattgaggtgccccttggacgactttgagctcgtcctgtggagtagcggttcacggggtaagagctaccccctgtgcccatactgctacaatcatccgccttttcgcgacatgaagaagggtatgggctgcaatgaatgtactcatccttcctgtcagcacagtctaagtatgctggggattggtcagtgcgtggagtgtgaatctggggttctcgtgctcgatccaacctctggacctaagtggaaggtggcgtgtaataagtgtaatgtggtggctcactgtttcgagaatgcccatcgcgtacgggtgtctgcggatacctgttctgtttgtgaagcagccttgcttgacgtcgacttcaacaaagcaaagtcgccattgcccggagacgagacccagcacatggggtgtgtgttctgcgacccagtgttccaggagttagtggaacttaagcacgccgctagttgtcatcccatgcatcgaggaggacccggtaggcggcagggcagggggaggggcagagccaggcgaccccctggcaaacctaaccctcgacggcctaaggacaagatgtctgccctagccgcttattttgtgtag

SEQ ID NO: 31197 - DNA, 849 bp, synthetic construct
  misc_feature 1..849: note = Description of Artificial Sequence: Synthetic coding sequence
  source 1..849: mol_type = other DNA
atgtttttgaatatgactaagctcgagaaagaggctcaggtggaagctacctcccggaaagagaaggcaaagcagcggccactagcattgaacacagtggagatgctacgtgtggctagttctagcttggggatgggccctcaacacgcaatgcagacggccgaaaggctctacactcaggggtatatctcatacccacggaccgaaaccacccattaccctgagaactttgatttgaagggatcattgcggcagcaggccaatcacccttactgggctgacacagtgaagcggctgttggcagaaggaattaacaggcctcggaagggccatgacgcaggggatcaccccccaataactcccatgaaatcagccactgaggccgaactgggcggagatgcctggcgcctttacgaatacatcactcgacacttcatagcaaccgtgtctcacgactgtaaatacctgcagtccacaattagtttcaggatcggacccgagctcttcacttgttcagggaaaacagttctgagccccggattcacagaagtgatgccgtggcagtccgtcccactggaagagtctctgcccacctgccagagaggtgatgcattccctgtgggggaggtcaagatgctcgaaaagcagactaacccacccgactacctcactgaagctgaactaattaccctgatggagaaacacggtattggcggatgtgcctgccctggcccacgagccggttctgtgtcttccactcaagcttcatctctgctaacaaagctccctaggcagccttgtgttcccagccctgcacccctccacggtctggtctccggcaactggtag

SEQ ID NO: 31198 - DNA, 741 bp, synthetic construct
  misc_feature 1..741: note = Description of Artificial Sequence: Synthetic coding sequence
  source 1..741: mol_type = other DNA
atgaagacggtgttaatggtagcggaaaagcctagcttagctcagtccattgctaaaattctgtctcgcggatcgttatcatcccacaaaggactgaatggcgcatgttccgttcatgaatataccggcacgttcgcgggacagccggtgcggttcaagatgacgtctgtctgcggccacgtcatgacattagacttccttggtaaatacaataagtgggacaaagtggacccagcagaactcttctctcaggccccaacggagaagaaagaagcaaatcccaagttgaatatggtgaagtttctccaggtagaagggcgtggttgcgattacattgtcctgtggcttgattgtgataaagaaggggagaacatctgtttcgaggtgctcgacgctgttctgccagtgatgaacaaggcacacggcggtgagaagactgtgtttcgtgcaagatttagttccatcactgacactgacatttgtaacgccatggcatgcctcggagagccagatcacaatgaggcccttagtgttgacgcccgacaggaactcgatctcagaatcggctgcgcattcacgaggtttcagacgaaatactttcaaggcaaatacggagatctggacagtagtttaatttccttcggaccctgtcaaacacctaccttgggcttctgcgtcgagcgccacgacaagatccaaagctttaaaccagagacctactgggtgctgcaggcaaagtag

SEQ ID NO: 31199 - DNA, 366 bp, synthetic construct
  misc_feature 1..366: note = Description of Artificial Sequence: Synthetic coding sequence
  source 1..366: mol_type = other DNA
atgaagaccgtgctcatggttgccgaaaaaccttccctcgctcagtcaattgcgaagatcctatcgcgaggatcgcttagtagccataagggtctgaatggagcatgttcggttcacgaatatacaggtacctttgccggacagcccgtaaggttcaaaatgactagtgtgtgtggtcacgtcatgacgctggattttcttggaaaatacaataaatgggataaggtggatcctgccgaactgttttcacaagctccaaccgagaaaaaagaagccaaccccaaactcaacatggtgaagttcttgcaagtggaaggcaggggatgcgactatattgtgctctggctcgactgcgataaagagtag

SEQ ID NO: 31200 - DNA, 66 bp, synthetic construct
  misc_feature 1..66: note = Description of Artificial Sequence: Synthetic coding sequence
  source 1..66: mol_type = other DNA
atgaagaccgtcctcatggtggctgagaagcccagcttggcccagtccatcgctaagatactctag

SEQ ID NO: 31201 - DNA, 129 bp, synthetic construct
  misc_feature 1..129: note = Description of Artificial Sequence: Synthetic coding sequence
  source 1..129: mol_type = other DNA
atgaagaccgtgcttatggtggcagagaaaccaagtctggcgcagtcaatcgctaagattctctctcggggttctttgtctagtcacaaggggctgaatggggcatgtagcgtgcacgagtacacttag

SEQ ID NO: 31202 - DNA, 369 bp, synthetic construct
  misc_feature 1..369: note = Description of Artificial Sequence: Synthetic coding sequence
  source 1..369: mol_type = other DNA
atgaaaactgtgctgatggtcgctgaaaagcccagccttgctcagtctatagccaaaatcctgagcaggggctctctctcttcccataagggattgaacggagcgtgctcagtgcatgaatacactggaacattcgccggtcagccagtgcgcttcaagatgacaagtgtctgcggtcacgttatgacattagactttctggggaagtacaacaaatgggacaaggtcgaccctgctgaattattttcacaggcaccaacagagaagaaggaggctaatcccaagctgaatatggtgaagttcttgcaggttgaaggaagaggatgcgattatattgtgctctggcttgactgtgataaggaggggtag

SEQ ID NO: 31203 - DNA, 144 bp, synthetic construct
  misc_feature 1..144: note = Description of Artificial Sequence: Synthetic coding sequence
  source 1..144: mol_type = other DNA
atgaaaaccgtgctgatggtggccgaaaaaccctcactggcccagagcatcgccaagatactcagtagggggtccctgtcctcccataaagggctcaacggtgcctgttcagtgcatgagtatacgggcactttcgcagggtag

SEQ ID NO: 31204 - DNA, 399 bp, synthetic construct
  misc_feature 1..399: note = Description of Artificial Sequence: Synthetic coding sequence
  source 1..399: mol_type = other DNA
atgaagactgttctcatggtcgccgaaaagccctccttagcacagtcaatcgctaaaatcttgtctcgtggaagcctgtcttctcataagggactcaacggggcttgcagcgtgcacgaatataccggcaccttcgccggtcagcccgtgaggtttaagatgacaagtgtgtgcgggcatgtcatgaccctcgattttctaggcaaatataacaagtgggataaagtagaccccgctgaactcttctctcaggccccaacagagaagaaagaggccaatcctaaactgccccaggcctctgtttgcactcaagcagcccctggtgtgcggccacatccttgtccaccagccgcagctagggttgcagacagggtagtaccatgtgggccagtgacttag

SEQ ID NO: 31205 - DNA, 183 bp, synthetic construct
  misc_feature 1..183: note = Description of Artificial Sequence: Synthetic coding sequence
  source 1..183: mol_type = other DNA
atgaagaccgtcttaatggtggcggagaaaccatcattggctcagtctattgccaagattcttagccggggttccctgagctcccacaagggcctgaacggcgcatgcagcgtacatgagtacacagggacttttgctggccaacctgtgaggttcaagatgactagcgtgtgcgggcactag

SEQ ID NO: 31206 - DNA, 186 bp, synthetic construct
  misc_feature 1..186: note = Description of Artificial Sequence: Synthetic coding sequence
  source 1..186: mol_type = other DNA
atgaagaccgtacttatggtcgccgaaaaaccctctctagcacagtcaatcgccaagatattgtcacgaggatcgctgagctcgcacaaggggctcaatggggcttgcagtgtgcacgaatacactggcaccttcgctggtcaaccagtgcggtttaaaatgaccagcgtctgcggacacgtgtag

SEQ ID NO: 31207 - DNA, 1578 bp, synthetic construct
  misc_feature 1..1578: note = Description of Artificial Sequence: Synthetic coding sequence
  source 1..1578: mol_type = other DNA
tgacttgactcctccctgatctcatttggtccctgccagactcccaccctggggttctgtgttgaacggcatgataaaattcagagcttcaagcccgagacgtactgggtgttacaagccaaggtgaacacggacaaagacagatccctgttactcgactgggaccgggtacgggtgttcgatagagaaatcgcgcaaatgtttctgaatatgactaagcttgaaaaagaggcgcaagtggaggcaactagcaggaaggagaaagctaaacagcgcccactcgcgctgaatacagtggaaatgcttcgggtggctagcagcagtctaggcatgggaccacagcacgccatgcagactgccgagcgactgtacacgcagggctacatctcctacccacgtaccgagaccacccactatcctgagaacttcgatctgaaaggaagcctacggcagcaggccaatcatccgtactgggccgataccgttaaaaggttactcgctgagggaatcaaccgccctcggaaaggacacgacgccggagaccatccgcctataacccctatgaaatcagccaccgaagctgaacttgggggagacgcttggcggctgtatgagtacataacaagacattttatcgctacagtatcccacgattgcaaatatctacaatcgacaatcagttttaggattgggcctgaactttttacttgcagcggaaaaaccgtcctttcgcccggtttcaccgaagtcatgccttggcagtcagtgccgcttgaagaatccctgccgacctgccagcgcggagatgcttttcccgtgggcgaggtgaagatgctggaaaaacagaccaatccaccagattatctgaccgaggctgagttaattactctgatggaaaaacacggcatcgggactgacgccagcattcctgtgcacattaataacatttgtcagcgcaattacgtcactgtggaaagcggccgaagattgaaacccacgaatctaggcattgtgctcgtgcatgggtactacaagatagacgccgagctggtgcttcctacaatcaggtcggcagtagaaaagcagctaaacttgattgctcaaggcaaagccgattataggcaagttctcgggcacactttggatgttttcaagcgaaagtttcactacttcgtggattctatcgccggtatggatgagctcatggaggtttccttcagccccctcgccgctacagggaagcccttgtcccgttgtgggaagtgccacagatttatgaagtacatacaggcaaaaccctccaggctccattgttctcactgtgatgagacatacaccctcccacagaacggcacaattaaattgtataaagagctccggtgtcctctcgatgattttgaattagtgctgtggtcttccggctctcggggaaagtcatatcccctgtgtccctattgttacaaccatccacctttccgagatatgaaaaaaggggagtgttcccactctctgctgtctactgggagctgcagccttttctccgtccccaccccagctctccatcaggccggactgtag

SEQ ID NO: 31208 - DNA, 951 bp, synthetic construct
  misc_feature 1..951: note = Description of Artificial Sequence: Synthetic coding sequence
  source 1..951: mol_type = other DNA
atgtcagccgaggtggagacatccgagggtgttgatgaatctgaaaagaagaactctggtgccctggaaaaagagaatcagatgcggatggcagatctaagcgaactgttgaaagagggcaccaaagaagcacacgaccgggctgaaaacacacagttcgtaaaagacttcctgaaggggaacatcaaaaaagagctcttcaagctggccaccacagcactctacttcacatactcagccctggaggaagaaatggagcgtaacaaagaccacccagccttcgccccactctactttccaatggagctgcatcgcaaggaagccttgaccaaggatatggaatatttcttcggcgagaattgggaggaacaggtgcagtgccctaaagcagcgcagaagtatgtggagagaatccactacataggccaaaatgaacccgagctcctggtagctcacgcttatacccgctacatgggggatctctcaggcggtcaggtgctgaaaaaagtggcccaaagggctctgaaactgccatccacaggggaaggcacccagttttatctatttgaaaacgtggataatgctcagcagttcaagcagctctaccgggctcgcatgaatgccctggatctcaatatgaagactaaggagcggatagtggaagaggccaacaaggctttcgagtacaatatgcagatctttaacgagttagaccaggctggatcaaccctcgcccgtgaaaccctagaggatggtttcccggtgcacgacggaaaaggcgacatgagaaaatgtccattctatgccgctgagcaggataagggtgctcttgagggatcctcctgccctttccggacagccatggcagtgctaagaaagccaagtttacagttcattttggccgctggagtagctctcgctgccggactcctcgcatggtattacatgtag

SEQ ID NO: 31209 - DNA, 1716 bp, synthetic construct
  misc_feature 1..1716: note = Description of Artificial Sequence: Synthetic coding sequence
  source 1..1716: mol_type = other DNA
atgaaatgtcaaccacgcagtggagcccgtagaattgaggagcgcctccactacctgataaccacctaccttaagttcggaaacaacaataactatatgaatatggcagaggcgaacaacgcattcttcgcggcatctgaaacatttcacactccatcgctgggggacgaggaatttgagatcccacccattactcccccacccgagagtgaccccgctttaggaatgcccgatgtgctgcttccctttcaggctctttccgaccccctgccgagtcaaggcagcgaatttactccacagtttccgccacagtccttggatctgccctcgatcactattagccgaaacctcgttgagcaagacggcgttctgcattcgagtgggctgcacatggaccagtcccacacacaggttagtcaatacaggcaggacccatcgctaatcatgagatctattgtgcacatgacggacgccgctagaagtggggtgatgccccctgctcagctgacgacgattaaccaatcccagctgtccgcgcagctgggtcttaatctgggcggagccagtatgccacatacttctcctagccctcctgcgtccaaatccgccacgccaagcccgagtagttctattaacgaagaggatgctgatgaggccaatcgtgccattggagaaaaacgtgccgctcctgactcaggcaagaaaccaaagacacctaagaagaagaagaaaaaagacccaaatgaaccacagaagccagtatccgcttatgcgctgtttttcagagacacccaggccgcaataaagggtcagaaccccaatgcgacgttcggcgaagtatccaagatcgtagcttctatgtgggactccctgggcgaggaacaaaagcaggtgtataaacgcaaaacagaagcagccaaaaaagagtaccttaaggctctcgcagcatatcgcgcttctctggtctcgaaggccgcagctgaaagcgcagaagcccagactatacgaagtgtgcagcagacattggcaagtacaaatttaaccagctccctgcttctgaatacccccctaagccagcatggaactgtgtcagcaagtcctcaaaccctacagcaatccctgcctagatcaatcgcaccaaagccattaacaatgaggctacccatgaaccagatcgtaacgagcgttacaatagccgcaaatatgccttccaacataggggctcccctaatcagcagcatgggtaccaccatggtgggatctgcgccatcaacgcaggtgtcccccagtgtgcagactcagcagcatcaaatgcagttgcagcaacagcaacagcagcaacagcagcaaatgcaacaaatgcaacagcaacagctgcaacagcaccaaatgcaccagcagattcaacagcaaatgcagcagcagcacttccagcaccacatgcagcagcacctccagcagcagcagcagcatctccagcagcagatcaaccagcagcaactccagcaacagttgcagcagagactgcagctgcaacagttacagcatatgcagcatcagtcccagccaagcccacggcagcactcccccgtggcctcccaaatcactagcccaatacctgccatcggttctcctcagcccgctagccagcagcaccagtcccagattcagtcacaaactcagacccaagtgctaagtcaggttagcatcttctag

SEQ ID NO: 31210 - DNA, 5816 bp, synthetic construct
  misc_feature 1..5816: note = Description of Artificial Sequence: Synthetic coding sequence
  source 1..5816: mol_type = other DNA
atgcagtcattccgtgagcagtcctcttatcatgggaatcaacagtcatatcctcaggaagtccatggaagcagccgactggaggagtttagccccaggcaggctcagatgttccagaattttggtggcacagggggatcttccggctccagcggtagtgggtctggcggaggaagaaggggcgcagcggcagccgcagccgcaatggcttcagagacaagcgggcatcagggataccaggggttccggaaggaagcaggagacttttactatatggcaggcaataaggatcctgttactactggtactcctcagccgcctcagagacgcccaagtggacccgttcagtcgtacgggcctccacaggggtcttcgttcggaaatcagtatggctctgaaggtcatgttggtcaatttcaggcgcagcattctggtctcgggggtgtgagccattaccagcaggattacacagggccattctcccccggatcggcacagtatcagcagcaagcttcttcgcagcagcagcagcagcaggttcagcagctgcgtcagcaattataccagagtcatcagcccctgcctcaggcgacaggtcagccggcatctagcagcagccacctacagcctatgcagagacccagcacactccccagtagcgccgctggctatcagctgagagtggggcagttcggtcaacactaccagtcgtctgctagctcgagctcctcatcctctttcccctccccacagaggttcagccagtccgggcagagctacgacggctcctataacgtaaatgcaggttcccaatacgagggtcacaatgtgggctcaaacgctcaggcttacggaacccagagcaattactcttaccagccgcagtctatgaaaaattttgaacaggctaaaattccgcaggggacgcagcaggggcaacaacagcagcagcctcaacagcagcaacacccctcccaacacgtgatgcagtacaccaacgcagctactaagcttcctctgcagtcacaggtcgggcaatataaccaaccagaagtgcccgtgcggtctccgatgcaatttcaccagaacttcagtcccattagcaaccctagccccgctgcatcagtggtgcaaagcccttcttgctcttcaacacctagccctctgatgcagactggcgagaacctgcagtgcgggcaaggcagtgtccccatgggttctcgcaatcggatcctgcaattaatgccgcagctctcgcctaccccaagtatgatgccgagccccaactcacatgccgctgggttcaagggcttcggactggaaggcgtacctgagaaaaggctgacggacccaggcctatccagcctttcagcactgagtacccaagtagctaatctgcctaacaccgtccaacacatgctactctcggacgcgttgaccccccagaaaaaaacttccaagagaccttcttccagcaaaaaggctgactcctgtactaatagcgagggctctagtcagccggaggagcaattgaagagccctatggctgaaagtctggatggaggctgctcttcctcttcagaagaccagggagagcgggtgaggcagttgtcagggcagtccacttcctccgacacaacctacaagggcggtgctagtgagaaagctggcagctctcctgcgcagggggctcagaacgagccccctagactgaacgctagccctgcagccagagaggaggctaccagccccggagctaaggacatgcctctcagcagcgatgggaatccaaaggtgaacgagaaaactgtgggtgttatcgtaagccgggaagccatgactggccgagtagaaaaacctggtggacaggataagggcagccaagaggatgatccagctgccacccaacgacctccttctaatggcggagccaaggagacctctcacgccagcctgccccagcctgagcctcccggaggcggaggcagtaaaggaaacaagaacggcgataacaactctaaccataacggagaaggcaatgggcagagtgggcactcggcggctggcccagggtttacgagtcgaacagagcccagcaaatccccagggagtctgcgctatagttataaagatagcttcgggtctgcagttcctaggaacgtctctgggttcccccagtatcccaccgggcaggaaaagggcgacttcacagggcacggcgagcggaaagggcgtaatgagaaatttccctccttgttgcaggaggtcttgcagggttatcaccaccatcctgaccgacgctatagtcggtcaacacaagagcaccagggcatggccggaagtctggagggcaccacccgcccaaatgtgctcgtctcacaaaccaatgaactggccagccgaggactcctgaataaatccatcggctccctgctggagaatccccactggggaccttgggaacggaagtcttcatccacagcacctgagatgaagcaaataaacttaactgactatcccatccctcgtaagttcgagattgagccccagagcagcgcgcacgaacctggcggtagcctttccgagagacgcagtgtgatttgtgatatttcccctctgcggcaaatagtgagggaccccggtgcacactcattagggcacatgtcagctgacacccggatcggtcggaacgatcggctaaatcctaccctttctcagtcggtaatccttcccggagggctggtttcaatggagaccaaactcaagtcccagtctggtcagattaaggaagaagacttcgagcaatcaaaaagccaagccagtttcaataataagaaatccggcgaccattgtcatccaccttccattaaacacgagagctaccggggaaacgcctcacccggtgcggctacccatgatagcttgtccgattacggtccccaggatagccggcctacccccatgcgccgtgtcccagggagagtcggcggacgggagggaatgaggggacggtccccctctcaataccatgactttgctgagaaattaaaaatgagtcctggcaggagccggggtcccggaggagacccccatcatatgaaccctcatatgaccttttccgagagggctaatcggtcgtcgctgcacacgcccttttccccaaatagcgaaacattggcatctgcataccacgcgaatacgagggctcacgcatacggcgaccctaatgccggattgaattcccaactgcactacaagagacagatgtatcagcaacagccagaagaatataaagactggtcatcaggttctgctcaaggtgtaatcgcagcagctcagcatcggcaggagggtccacggaaaagcccaagacaacaacagttccttgatagggtgcggagccccctgaaaaacgacaaagacggcatgatgtacgggccacctgtcggaacatatcatgatccaagtgctcaggaagcaggcagatgcctgatgagttcagatggcctgcccaataagggaatggagctaaaacatggatcacagaagctccaggagtcctgctgggatctatccagacaaacttcaccagcgaaatcatccggccctcccggtatgtcatcgcagaaacgctatggccctccccatgagaccgacggacatggacttgcagaagccacgcagtcctctaaacccggaagcgtgatgctgcgcctgcctggacaggaggaccactcctcgcagaaccccttaattatgaggaggagggttagatcttttatttcccccattccctcgaaacgacagagccaggatgtcaaaaactcaagcaccgaggataaaggccgtctcctgcacagctcgaaggaaggcgcagataaagccttcaattcatatgctcatcttagtcatagccaggatattaaatctatccccaagagagatagcagcaaagatctaccgtcccctgactctaggaactgtcctgccgtgacactgacttctcctgctaaaaccaagattctccccccacgaaaaggaaggggactgaaactggaggccatcgtgcagaagatcactagcccgaacattaggagatctgcttcatctaactctgctgaggctgggggtgacactgtgaccctggacgatatcttatcccttaagagcggcccaccagagggcggatctgtggctgtacaggacgccgacatcgaaaagcgcaagggcgaggtggcctccgatctggtgtctcctgcaaaccaagagctccacgtcgaaaagccgcttccacgcagctctgaagaatggcgcggttctgtcgatgataaggtcaaaaccgaaactcatgcggagacggtgacggcgggaaaagagcctcctggagcgatgactagcactacaagtcagaagcctggttcgaatcaggggcgaccagatggatctttggggggaactgcacctctgatttttcccgactccaaaaacgtgcctcccgtgggcatcctggcccctgaggccaacccgaaagcggaggaaaaagagaacgatacagtgactatatctcccaaacaggaaggcttcccgccaaagggctatttcccttctgggaaaaagaaaggcagaccaatcggctccgtgaacaagcagaaaaaacagcaacagccaccaccgcctcctccccaaccacctcagatcccagagggcagcgccgacggggaacccaaacccaaaaaacagcgacagcgtcgcgaacgcagaaaacccggagctcaacccaggaaacgcaagacaaagcaggcagtgccgatcgtagaaccacaggagcctgagatcaagctgaagtacgctactcagcccctggacaaaactgatgccaaaaacaaatcattctacccatatatccacgtcgtgaataaatgcgagcttggtgcagtttgcaccattattaacgctgaggaggaggagcaaacaaagctggttcgtgggcgtaagggacaacggagtctgacaccccctcctagtagcactgagtctaaggcgctgcctgcatcctcctttatgctgcaagggccagtcgtgacagagtcaagtgtcatgggccatctggtctgttgcctgtgtggtaagtgggcctcttacagaaatatgggagacctgtttggaccattctatccccaagattacgctgccacactgcccaaaaaccctccgccaaagcgggcaactgagatgcaatcaaaggtgaaggtcaggcataagagcgcaagcaatggttcaaagaccgataccgaggaggaagaggaacaacaacaacagcagaaagagcagagatctttggccgctcacccacggtttaaacggagacatcgctcagaggattgtggcggaggtcccaggtctcttagcaggggtctcccctgcaaaaaggctgcaaccgagggctcgagcgaaaagaccgtactggacagcaaaccaagcgtacccacaacaagcgaaggaggccctgagttagaactgcaaatacccgagctccccttggacagcaacgagttttgggtgcacgagggctgtatcctttgggccaatggcatttatctcgtgtgcggaaggctttatggcctgcaggaggctcttgaaatagcacgtgagatgaagtgtagccactgtcaggaagctggtgctaccttaggatgttacaacaaaggttgttctttccgctaccactacccgtgcgctatagacgccgactgtctcctgcacgaagaaaattttagtgttagatgcccaaagcacaaggtacgcttgtggcgcta

SEQ ID NO: 31211 - DNA, 5882 bp, synthetic construct
  misc_feature 1..5882: note = Description of Artificial Sequence: Synthetic coding sequence
  source 1..5882: mol_type = other DNA
atgcagtctttccgagagcagtccagctatcacggtaaccagcagagctatcctcaggaggttcatgggagcagcaggctagaggaattctcacccaggcaggcccagatgttccaaaattttggcggaactggcggatctagcggctcatcaggatccggctctgggggaggcaggcgcggtgccgcagccgcagctgcggcaatggcatcggaaacatcaggacaccagggttatcagggcttccgaaaggaggcaggcgacttttactacatggccggaaacaaggatccagtgactaccgggaccccccagccaccccagcgaagaccaagtggacctgtgcagtcatatgggccaccccagggcagtagctttgggaatcagtacggttctgagggccacgtgggccaattccaggcccagcacagcggtttaggaggcgtctctcactaccagcaggattacactgggccattctctccagggtcggcccagtaccagcagcaggctagctctcaacagcagcagcagcaggtgcagcagcttaggcagcaactgtaccaatcacatcaaccactccctcaagcgaccgggcaacctgctagcagcagtagtcacctgcagcccatgcaacgccctagcaccctcccgagttctgcggcaggttatcagcttcgcgtagggcagttcgggcaacactaccagtctagcgcaagtagtagtagtagttcttccttcccatccccacagagattttcccagagtggccagtcgtatgacggcagctataatgtgaatgcaggctcgcagtacgaaggtcacaatgtcgggagtaacgcgcaggcttacggaacgcagagcaattattcttaccagccacagagcatgaaaaactttgagcaagccaaaattccacaaggcacccagcagggccagcaacaacaacagccccaacaacaacagcacccatcacagcacgtgatgcaatacaccaacgcagccaccaagctgcccctacaatctcaggttggacagtacaatcagcctgaagtgcccgttcgtagtcccatgcagtttcaccaaaactttagtccaatctctaatccttcccccgctgctagtgtggtgcaaagtccatcttgcagctccacgccttctcctctgatgcagaccggagagaacttacaatgtggacagggctccgtaccaatgggttcacgtaaccggatcctccagctcatgccgcaactgagcccaaccccgagcatgatgccatcacctaacagccatgccgctggatttaagggatttggcctcgagggagtgccagaaaagcggctgaccgaccccggtctctcttctctctccgccctctccacacaggtggctaacctcccaaacacagtgcagcacatgctgctgagtgatgctctcacacctcagaagaagacaagcaagagacctagtagctccaagaaggccgactcctgtacaaacagcgagggctcctctcagcctgaagagcagctgaaaagtccgatggccgagtctctggacggaggctgctcatcttctagcgaggaccagggcgaacgggtcagacagttgtcaggtcagtctacgagctcggacaccacttacaaaggcggagcctccgaaaaagccggtagcagccctgcacagggagcacagaacgaacctccgcgactgaacgcttctcctgccgctagagaggaggccacttcacccggtgccaaggacatgcctctcagctctgacgggaatcccaaggtgaacgaaaaaaccgtgggagtcatagtgagccgtgaagcaatgactggccgtgtagagaagccgggaggccaagataaggggtcgcaggaggacgatccagccgctactcagcggccaccctccaacggaggcgcaaaagaaacgagtcacgcttctctgccccagcctgagccccctggcggtgggggttctaaagggaataagaacggcgacaacaactccaatcataacggcgaaggaaatggccaatcaggacacagcgcagccggtcccggtttcacatcgcgaactgaaccctctaagtccccagggagcttacgatatagctacaaagattctttcggttcagccgtccccaggaacgtaagtggtttcccccagtatcccactgggcaggagaaaggggatttcaccgggcatggggagcggaaggggagaaatgaaaaattcccctccctgctccaagaggtactgcagggataccaccaccatcccgaccggagatactcaagatcaactcaagagcaccaggggatggcaggttcgctggagggcacgactagaccaaacgtcctagtatctcagacaaatgagttggcatctaggggtctgctgaacaaatcgatagggtctttgttggagaaccctcactggggaccatgggagaggaaatcgagttccactgcacctgaaatgaagcaaataaatctcacagattacccgataccgaggaaatttgagatcgaaccacagagttctgcccatgagccaggcggtagcctgagtgagcgccgttccgtgatatgtgatatatctccactccggcagatagtccgggaccccggtgcccactcccttggacatatgtctgctgacacccggattgggaggaatgaccgcctaaatcctactctgtcccagtcagtcatcctgccgggtgggctcgtgagtatggagaccaaactcaagagtcagagtggacaaattaaggaagaggactttgaacaaagtaagagccaggcatcgttcaataacaagaagtctggggatcactgccatccaccaagcatcaagcacgaaagctatcggggaaacgctagcccgggagctgccacccacgactcactgtcagactatgggccacaggactctaggcccactcccatgagaagggtacccggacgcgtgggcggtagggaggggatgcgcggtcgcagtccctctcaatatcatgacttcgctgaaaaactcaagatgtctccgggtcgaagtcgtggcccagggggtgatcctcatcatatgaatccccatatgacatttagcgagcgggctaatagaagctctctacatacaccctttagtccaaactcggaaacccttgcctcagcctatcacgccaatacccgggctcacgcctatggcgaccccaacgccggacttaattcacagttgcactacaaacgccagatgtaccagcagcagccagaggagtacaaggactggtcctccgggagtgcacagggagtaattgccgctgcccagcataggcaggaaggccctcgcaagtctcctcggcagcaacagttcctagacagggtgagaagccccttgaaaaatgacaaagacgggatgatgtacggacctccggtgggaacataccacgacccatctgctcaggaggctgggagatgcctaatgtcaagtgacgggctccctaacaagggtatggaattaaaacacggcagccaaaagttgcaggagtcctgctgggatctcagtcgacaaacatcaccagcaaagagttcaggacctcctggcatgtcctcacagaaaaggtacggacctccacatgaaacagatgggcatggactggccgaggcaactcagtcaagcaagcctggatcagtcatgctgaggctgccagggcaggaggaccactcttcgcaaaatccattgattatgagacgacgggtacggtcgttcatttcaccaattccttcaaaacgacagtcacaggatgtaaaaaatagctctacagaggataagggtcgtctattgcactcatcaaaggaaggcgctgataaagcttttaactcttacgctcatctgtcacactcacaggacatcaagtctatcccaaagcgcgacagctccaaagacctgccttcgcccgactctcgcaactgtcccgcagttacattaacctctcccgctaagacaaagattcttccccctcgaaaaggtcggggtttgaaactggaagccatcgtgcagaagatcacctcgccaaatatacggaggagtgcatcttcaaattccgcagaagccggaggagacactgttacattggatgatatcctgagcttgaaatctgggcctccagaaggaggctctgtagccgtgcaagacgccgacatcgaaaagcgcaagggagaagtcgcctctgacctcgtcagccccgctaatcaggagctccacgtggaaaagccccttcccaggtcttccgaggagtggcggggttcagtcgacgataaagtgaaaaccgaaactcacgccgaaacagtaaccgcgggaaaagagcctcccggtgccatgacttctacgacgagtcagaagcccggatccaaccagggccgtcccgatggcagcctgggcggaaccgccccactcatcttccccgattcaaaaaacgtgccccctgtgggcattctggctcccgaggccaacccgaaggccgaagagaaggagaacgacacagtcactatatcacctaaacaggagggattccctcctaaaggctatttcccctccgggaaaaagaagggtcggcctatcgggagcgtcaataagcagaagaagcagcaacagccccctccccctccacctcagccgcctcagatcccggaaggttctgcagatggcgagcctaaaccaaagaaacaacgccagcggcgagagcgccgaaaacccggtgcccaaccacggaaaaggaaaaccaagcaggccgtacctatcgtggaacctcaggagcccgaaatcaagctgaagtacgccacacagcccctggataagactgacgcaaagaataaatctttttacccttatattcacgtcgtgaacaagtgtgagttaggtgccgtttgcaccattatcaacgcagaggaagaggagcagacaaagttggtgcggggtcgcaagggccagagatccctgaccccccctccatcttcaacagagtccaaggctctgcctgcgtcaagctttatgctgcagggtccagttgtgaccgagagtagtgtcatggggcacctggtgtgctgcttgtgcgggaaatgggcaagttatcgtaatatgggagacctcttcggccctttctacccgcaggactatgccgctacactgcccaagaaccctcccccaaaacgcgcaaccgagatgcaatcgaaagtgaaggtgaggcacaaatcggcgtccaacggatccaagactgacactgaagaggaagaggagcaacagcaacaacagaaggaacagcgttctctagcggctcatcctagattcaagagacggcaccgctctgaagactgtggaggcggacccaggtccctatcccggggtctcccctgtaagaaggctgctacagagggctctagtgaaaaaaccgtcctggacagcaagccttctgtccctacaacctcagaggggggacccgagttggaactgcagattccagagctgcctctcgacagcaacgagttttgggtgcacgagggctgtatcttgtgggcaaatggcatctatctggtttgcggtcgcctgtatggccttcaggaggctctcgaaatcgctcgagagatgaagtgtagccactgtcaggaagctggcgctactcttggatgctataataaggggtgtagtttcagataccactatccgtgcgcaattgacgccgattgcctgctgcatgaggaaaatttttctgttagatgtcctaagcataaacccccacttccttgcccccttcctccactgcagaataaaacagctaaagggtccctgtccactgaacagagcgaaagaggcta

SEQ ID NO: 31212 - DNA, 540 bp, synthetic construct
  misc_feature 1..540: note = Description of Artificial Sequence: Synthetic coding sequence
  source 1..540: mol_type = other DNA
atgtcaacagggagcctttcagatgtggaggacctgcaggaggtcgaaatgctggagtgcgacggattgaagatggactccaataaagagttcgtgacctccaacgagagcacggaggaatcctccaactgtgagaatggtagtcctcagaaaggcaggggcggtctggggaagcgccgaaaggccccaactaagaagtctcccctttccggagttagtcaggagggtaagcaagtccaaaggaatgctgctaatgccagagaaagggctaggatgagagtgttgtcgaaagcctttagccgcctgaagaccacactgccttgggttcctccagacaccaagcttagtaaactggatactttgcgtttagcatccagctatatcgctcacctccgacagatcctggctaatgacaaatacgagaacggctatatccatcctgtaaatctgacatggccattcatggtggcaggaaagcccgaaagcgaccttaaagaggtggtgacagcatcgcggctatgtgggaccacagctagctag

SEQ ID NO: 31213 - DNA, 540 bp, synthetic construct
  misc_feature 1..540: note = Description of Artificial Sequence: Synthetic coding sequence
  source 1..540: mol_type = other DNA
atgagcactggctccctctccgacgtcgaggatttgcaggaagtggagatgctggaatgtgatgggctgaagatggattctaataaagaattcgtgacaagcaacgagtcaacggaagagtccagcaactgcgaaaacggcagcccccagaaaggaaggggcggattgggcaagcgcaggaaagccccaactaagaagtctcccctgtctggtgtcagtcaagagggcaagcaggtgcaaaggaatgccgcaaacgcgagagaaagggcccgaatgcgagtgctgagcaaggccttctcacggctgaagactaccctgccttgggtgccaccagacaccaagctgagtaaattggacacgctcaggctggcttcatcatacattgcacatttgcgacaaatcctcgctaatgacaagtacgaaaacggctacatacaccctgtgaaccttacctggccatttatggttgctggaaagcctgagtccgacctgaaggaggttgtaacagcatcaaggctgtgcggaactacagcttcatag

SEQ ID NO: 31214 - DNA, 1965 bp, synthetic construct
  misc_feature 1..1965: note = Description of Artificial Sequence: Synthetic coding sequence
  source 1..1965: mol_type = other DNA
atgaatcagcctcagcggatggcaccagtggggaccgataaggagctctccgatctcctggatttttcaatgatgtttccgctgcctgtgaccaacggaaaaggcagacccgcttcattggcaggcgctcagtttggcggatccgggctggaggacagaccctcatctggttcatggggaagcggcgatcagtcatctagttcctttgatcctagccggaccttcagtgaggggacgcactttacggagagccattccagccttagttcaagcacattcctcggtccaggtctgggcggaaaatcaggcgagcgaggggcatacgcgagcttcggcagagacgcaggcgtggggggacttacccaggctggatttctcagcggagaacttgcgctcaacagccccggtcctttgtcaccgtccggcatgaaggggactagccaatattaccccagctattcaggctcttctcgcaggcgcgctgccgacggctctctggacacccagcccaagaaagtgcggaaggtgccccctggcctgcccagctccgtataccccccttcaagcggtgaagattacggtagggatgcaacggcctacccttctgcgaaaacgccatccagcacataccccgctccattttacgtcgccgacggctccttgcatcccagtgctgaattatggagccccccaggacaagctggattcggcccaatgctcggcggtgggtccagtcccctgccactgcccccaggcagcggccctgtgggtagctccggaagtagtagcactttcggaggcctccatcaacacgagcgaatggggtatcaattgcacggcgcagaagtcaacggcggacttccttcagcatcatcctttagttcagccccaggcgcaacctacggcggtgtgtcatctcacaccccacctgtttctggggctgactcactgctaggctctcgcggtaccactgcaggaagcagcggcgacgcccttggaaaagccctcgcttccatttattcacctgatcactccagcaacaatttctcaagttcacctagtacaccagtaggctcccctcaaggactggctggaacctcccagtggccgagggctggggcacccggtgctctgtcgcctagttacgacggcggattgcatggcttgcagtccaagatcgaggatcatctggatgaagcaatccacgtcctgaggtctcatgccgttggtaccgcaggggatatgcacactctgctcccagggcacggcgctctcgcttctgggtttaccgggccaatgagtctgggcggaaggcatgcgggtttggtggggggatcgcatcctgaggatggcctcgctgggagcacaagtctgatgcataaccatgctgcactgccttctcagccgggaactcttccagacctttctagaccacctgatagttactctggtctgggtcgcgcaggtgccactgctgctgcatccgagataaaacgtgaagagaaggaggacgaagaaaatacttccgcggcagaccattctgaggaggaaaagaaagaattaaaggctccacgggcaaggacttcccccgatgaggatgaggacgatctccttccacccgaacaaaaagccgagagggaaaaggaacggagagtcgcgaataacgctcgggaacgcctccgggtccgggacatcaatgaggcttttaaagaattaggccgaatgtgccagttgcatcttaattcagaaaagccacagacaaaactgcttatcctgcaccaggccgtgtctgtgattctgaatttggaacagcaggtgagagaaagaaacctgaatcccaaggccgcttgcctcaagaggagggaggaagagaaagtcagcggagtcgtgggtgacccacagatggtgctatccgctccacaccccggattatctgaagcccataatccagctggacatatgtag

SEQ ID NO: 31215 - DNA, 1956 bp, synthetic construct
  misc_feature 1..1956: note = Description of Artificial Sequence: Synthetic coding sequence
  source 1..1956: mol_type = other DNA
atgaatcagcctcagcgcatggcgcctgtgggcacggacaaggagctgtccgatctgctggatttcagtatgatgttccccttgccggtcacaaatggcaagggcagacccgctagtctggccggagcacagttcggaggatccggactggaggatagaccatcttccggcagctggggcagcggagatcagagctcatcttccttcgatccaagtagaacctttagcgaaggaacacatttcacagagtcccacagctccctatcctcttccacattcctgggtccaggtctcggagggaaaagtggcgaacggggagcatacgcctcatttgggagagatgccggagttggcggtctgacccaggccggattcctgtcaggtgaactcgccctaaacagcccgggaccgctaagtccatccggaatgaaaggaacctcccagtactatccgtcatacagcggatcatctaggagacgagctgcagatggcagtctggatacacaacccaagaaggtgcggaaggttcctccagggctgcctagtagtgtgtacccaccgtcatctggcgaagactacggccgagatgcaaccgcctatcccagcgcgaagactccctcctcaacataccccgcacccttttatgttgccgacgggtcactgcacccatccgcagaactgtggtcccctcccggtcaggccggtttcggccctatgttgggaggcggaagtagccccctgccccttccgccaggctctggacccgtgggtagctctggctcttccagtacatttggcggtctacaccaacacgaaagaatgggataccaactgcacggagctgaggtgaacgggggactgccctccgcgtcatctttttccagtgcgccaggcgctacctacggcggagtgtcaagccatacccctccagtgtcgggcgcagattccctgttgggcagtagaggcactaccgctggcagctctggcgacgctctggggaaagctctggcctctatctatagcccagaccattcgagtaacaattttagcagtagcccttctaccccagtgggctctcctcagggcctggcgggaacaagccagtggccgcgtgctggcgctccaggcgcattatcgcctagttatgacgggggactccacggcctccagagcaagattgaggatcacctggacgaagcgatccatgtgcttcggtcccatgccgtggggacagccggagatatgcacacgctgcttcccggacacggtgccctggcttccggatttactggaccaatgagcctaggtgggcgtcacgctggtctggttgggggtagccatcccgaggacggcctggcgggatcgacctccctgatgcataaccatgccgctctgccttcgcagcctgggacactcccggatctttctcgtccccctgactcttatagcggccttggacgggctggcgcaaccgctgccgcatcagagataaaacgggaagagaaagaggacgaggagaatacatccgcggcagaccactccgaggaggaaaagaaggagctcaaggcaccccgagccaggacctcctccaccgatgaggtgctgtccctcgaggaaaaggatctgcgcgatcgtgagcgcagaatggctaataatgcccgtgagagggtacgagtgcgcgacattaatgaggccttccgtgaactgggtagaatgtgtcaaatgcacttaaaaagtgataaggcgcagaccaagctgctgatcttgcagcaggctgtccaggttattctgggcctagaacaacaggtcagggaacggaatctaaacccgaaggccgcttgccttaagagaagggaggaagaaaaagtgagtggggtcgttggagatccccagatggtactcagcgccccacatcccggactgtctgaggcccataacccagcaggacacatgtag

SEQ ID NO: 31216 - DNA, 1977 bp, synthetic construct
  misc_feature 1..1977: note = Description of Artificial Sequence: Synthetic coding sequence
  source 1..1977: mol_type = other DNA
atgaaccagccacagcggatggctcctgttgggaccgataaagagttgagcgatctattggatttttcaatgatgttcccactccccgttactaatggaaaggggagacccgcatcactggctggagctcagttcggaggttccgggaaatccggcgaaaggggggcttacgcttcttttggcagagatgctggcgtgggtggactaactcaggcaggctttctgagcggtgagctagcactaaattctccgggacctctctctccttctggaatgaaaggtacttctcaatattacccatcatattcaggctcttcccgacgccgtgcagccgatgggtctcttgatacccagccaaaaaaggtcaggaaagtcccgcctggattgcctagctccgtataccccccatccagcggtgaggattatggacgagacgcaacagcctacccttccgccaaaacaccgagcagcacctacccagctcctttctatgttgcagatggatctttgcatccctctgcggagctctggtctcctccgggtcaggctgggttcggaccaatgcttgggggaggctcatctccccttcctctccctccaggatccggacctgttggatcttcggggagttcctccacatttggcggactgcaccagcatgagcggatggggtaccagttacacggcgctgaggtgaacggaggtctcccctctgcatcttctttctcttccgctcccggtgctacatacggcggagtcagttcgcacacgcctcctgtatcaggggctgacagtctcctgggtagtcgcggaaccactgcgggttctagtggggatgcgcttggcaaggcgctggcctccatctattcaccggatcacagtagcaacaatttctctagcagcccaagtacccccgtaggcagcccccaaggccttgctgggacttcgcagtggcccagagctggcgcacctggggctctttccccctcttatgacggaggcctccatggtcttcaaagcaagatagaggaccatttagacgaagctatccatgtactgcgaagccacgcagttggaaccgctggagacatgcacactttactgcctggacacggggctctcgctagtggcttcacaggcccaatgagcctgggtggaaggcacgctggattggtaggaggctcccacccagaggacggcctagcaggatctaccagtcttatgcataatcatgcagcgctccccagtcagccgggtaccctgcccgacttgagccgcccacctgacagctactctggtctcgggagggcaggagcaaccgcagcagcttcagagatcaagcgagaggagaaggaggacgaagagaacacgtctgccgctgatcattccgaggaggagaagaaggaacttaaggcaccgagggcacgtacacggtgccagcctactccaagacacagccctcctagtcctcaccaggatgcccacgtccaccgaccccacgcccatcggactcataccgggcgaccttccgccggacctaccctatttccgcagccgcactgcctccctctcgcgccatcacggagacctccccactccccagacgaagacgaggacgacctcttgcccccagaacagaaagctgaaagggagaaagaacgcagggtcgccaacaatgctagagagcgcctccgcgtcagagatatcaacgaagcgttcaaggagttggggcgtatgtgtcagctccacttgaacagcgaaaaacctcaaactaagctgctcatactgcaccaggccgtgtctgtcattttaaatctggagcagcaagtccgtgagagaaatctgaatcctaaggctgcttgtttgaagagacgggaagaggaaaaggtttcaggcgtagtgggagatcctcagatggtcctatctgctccacacccaggtctgagcgaagcccacaatcccgcagggcacatgtag

SEQ ID NO: 31217 - DNA, 1956 bp, synthetic construct
  misc_feature 1..1956: note = Description of Artificial Sequence: Synthetic coding sequence
  source 1..1956: mol_type = other DNA
atgaaccagcctcagagaatggcccctgtcgggaccgacaaagagttgtctgatctgcttgacttcagtatgatgttcccgctaccagtgaccaacggcaaaggcagacccgcatccctggctggcgcacagttcgggggttcaggactggaagaccggccaagcagcggatcctggggtagcggagatcagagcagttcttcttttgacccctccagaaccttcagcgagggcactcactttaccgagtcacattcctccctctcgagtagcacttttctgggccctggactgggaggcaagagcggggaacggggtgcctacgcatccttcgggcgtgacgctggcgtgggagggttgacacaggccggattcctgtctggggaactagcactgaattctcctggtcccctttcgccatctggtatgaaggggactagccagtattatccaagttacagtggtagtagcagacgcagggcagccgatggctctctggatactcaacccaaaaaggtgcgcaaagttccccctggcttaccctcatccgtgtatccacctagtagcggggaggattatggacgggatgcaactgcctaccccagtgccaaaaccccaagttccacataccctgctcctttttacgttgcggatggctccttgcacccttcagctgagctgtggtcacccccaggtcaggctggattcggacctatgttaggcggtggctctagtccactgcctctgccccctggctcaggacccgtcggctcatcgggcagtagctcaacattcggcggactacaccaacatgagcggatgggttaccagctccatggcgctgaggtgaacggtgggttgccgtccgcttccagcttttccagcgcccctggggctacctacggcggtgttagcagtcatacaccccctgtgtcaggggctgattccctgctgggctctagaggtacgaccgccggttcgagtggtgatgcgctcgggaaagccctcgcttctatttattcccccgatcactcatcaaacaacttttcgtccagcccatcaacccccgtgggatcccctcaggggctcgccggaacctctcaatggcctagggcaggcgctcctggcgcactgagtccctcgtacgacggaggtcttcacggacttcagtctaagattgaagaccatttggatgaagcaatccacgtgttgagaagccatgccgtgggaaccgcaggtgacatgcataccctcctgccaggccacggggcactggcctccgggtttaccggtccgatgagtcttggaggccgacacgctggcctggtgggcggttcccacccagaggatggactagccggttcaacctccctcatgcacaaccacgcggctctgccctcccagcctggaacactcccagacctgtctagaccaccagatagctactcaggcttaggcagagccggagccacagcagctgcctccgagataaagcgcgaggaaaaagaggacgaggagaacacttcggccgctgatcactcagaagaagaaaagaaagaactaaaagctccacgggctagaacaagttcgactgatgaagtgttaagcctggaagaaaaagatttaagagaccgggagcggaggatggccaacaatgcaagggagagagtgagggtgcgagatattaacgaggcctttcgagagctggggaggatgtgccagatgcacctgaagagcgacaaagcccaaaccaagctgctcattctgcagcaggctgtgcaagtcatcctcggcctagaacagcaagtccgggagcgaaatttgaaccccaaagccgcttgcttgaagcgccgagaggaggaaaaagtcagcggggtggtgggggatccacagatggtgttgtcagctcctcacccgggtctaagtgaggctcataaccccgctgggcatatgtag

SEQ ID NO: 31218 - DNA, 474 bp, synthetic construct
  misc_feature 1..474: note = Description of Artificial Sequence: Synthetic coding sequence
  source 1..474: mol_type = other DNA
atgggttaccagctccatggtgcggaggtgaatggaggccttccctcagcttcttccttttcatccgctcccggagcaacatacgggggagtaagcagccatactcctcctgtgagcggggctgacagtctactcggttccagaggaactaccgccggatcctccggagacgcacttggaaaggccttggccagtatttacagccctgatcactcaagtaacaacttttcatcctcaccgtctacccccgtcggctccccacagggacttgctggaacatctcaatggcctcgggcaggcgcacccggagccttatccccctcttacgacggaggacttcatggcctcgtgggaggctctcatcctgaggacgggctggctggatccacgtctctcatgcacaaccatgccgcactcccctcacagccaggcaccctcccagacctatcgcgacccccagactcttattcttag

SEQ ID NO: 31219 - DNA, 2016 bp, synthetic construct
  misc_feature 1..2016: note = Description of Artificial Sequence: Synthetic coding sequence
  source 1..2016: mol_type = other DNA
atgcatcatcagcagcggatggccgcactgggtactgacaaagaactttctgatctcctggacttttcagccatgtttagccctccagtgtccagcggaaagaatggccctacctcccttgctagcgggcacttcactgggagcaatgtggaagaccgatcatcctccggaagttggggtaacggcggacatccttccccctcccgcaactatggagatggcaccccctatgaccatatgacttctagggacctgggatcccatgacaacctgtccccacccttcgtcaattcccggatccagtccaagacggagcgcggaagttattcatcgtacggtagagaaagcaacttgcagggatgtcatcagcagtctctgctgggcggagacatggacatgggaaatccaggtacgctgagccccacaaaacccggttctcagtactaccagtattcatccaataaccccagacggagacctctgcactcgagtgccatggaagtgcagactaaaaaggtgcgcaaagtaccgcctggcctgccctcctctgtgtatgcccctagcgcttctactgccgactacaatagagattcaccgggatatcccagcagtaagcccgctacctccaccttccccagttctttcttcatgcaagatggccaccatagctcggatccctggtcctcatcctcgggaatgaatcagcctgggtacgcgggtatgttagggaactcctcccacatcccacagtccagctcctattgttccttgcacccccatgagcggctctcatacccaagtcattctagtgcagacatcaattccagccttccaccaatgtctacctttcaccggtctggcaccaatcactactccacctcttcctgcacaccccctgccaacggcacagactctattatggctaacaggggcagtggggctgccggatcgtctcagacaggcgacgcactgggcaaggccctggctagcatttattcccctgatcatacaaataattctttcagctccaatcctagcacacctgttggctccccaccgtccctgtccgccggtaccgcggtctggtcacggaatgggggacaggcgagctccagtcccaactacgaggggccattacactctctgcaatcacggatcgaggataggcttgagcgcctcgacgacgcgatacacgtactcaggaatcatgccgtgggacccagcactgccatgccaggagggcatggcgacatgcatggcattatagggccatcacacaacggggcaatggggggactcggctcaggatatggcacgggcctgctgtccgcgaacagacatagccttatggtcgggacacatcgagaggatggggtcgcgctgcgtggctcccacagtttgctgcctaatcaggtgccagtcccacagctgccagtgcagtcggcgacctccccagaccttaacccccctcaggatccctaccgcggaatgccacctgggttgcaaggccagagcgtttctagcggcagcagcgagatcaagtcggatgatgagggcgatgaaaatctccaggatacaaaaagctccgaggacaagaagctggacgacgacaagaaagatattaagagcatcaccagaagtagatccagcaacaacgacgacgaagacctgactccagagcagaaagctgagcgtgagaaagaacggaggatggccaacaatgccagggagaggctccgcgtacgcgacatcaacgaagcatttaaagaactgggccgtatggttcagcttcacctgaagtcggataagccccagaccaagttgctcatcctccaccaagccgtcgccgtgattctgtcccttgaacagcaggttcgcgagaggaatctaaatccaaaggcggcatgcctcaagaggcgggaggaagagaaggtcagcagcgagccccctccattaagcctagcgggacctcatccagggatgggtgatgcttcaaaccacatgggccagatgtag

SEQ ID NO: 31220 - DNA, 2004 bp, synthetic construct
  misc_feature 1..2004: note = Description of Artificial Sequence: Synthetic coding sequence
  source 1..2004: mol_type = other DNA
atgcatcaccaacagcgcatggccgcattgggaacggataaggagctatccgatttgttagattttagtgcgatgttttcccccccagtctcttcaggcaaaaacggcccaactagcctcgcaagcggtcacttcaccggctctaatgttgaggaccgaagctcaagtggtagttggggtaacggaggacacccaagtccatctagaaattacggggatgggaccccctatgaccatatgacatcacgggacttaggcagccacgacaacctcagcccaccgtttgtcaatagccgaattcagtccaagaccgaacggggtagctacagcagctatggcagagagtccaacttgcagggttgtcaccagcagtcccttttggggggagacatggatatgggcaaccccggaacactctctcccactaagcctggctcccagtattatcagtatagttccaacaatcctcgacggcgtcccctgcactctagcgctatggaggtacagacaaagaaagtgagaaaggtgcccccaggcctgccttccagtgtctacgcgccaagtgcctctacagcagactataaccgagactcaccgggataccctagttctaaaccagccacctctacttttcctagctccttcttcatgcaggacggacaccactcatccgacccgtggagctccagctctgggatgaaccagcccggatacgccggtatgctaggaaattccagtcatatcccccaaagcagttcttactgttcactgcaccctcacgaaaggttgagctaccctagccacagcagcgcagacataaacagtagcctgccacctatgtcaaccttccacaggagcgggactaaccattatagcacctccagctgcactcctcccgctaatggcacagactcaatcatggctaatcgaggatccggtgcggctggtagtagccagactggcgatgctctgggcaaagctttagccagtatctactccccagatcatactaataactcgttttcctccaacccctctaccccagtgggttcccctccttcattgagcgccggaaccgccgtgtggagcagaaacggtggtcaggcttccagctctccaaattatgaagggccactgcacagcctgcagagtcgcatagaagaccgattagagcggctcgacgacgctatccacgtactgaggaaccacgcagtaggaccttccacagcaatgcctggtggccatggggatatgcacggaatcatcggacccagccacaacggagctatggggggtctgggtagcgggtacggtaccggattgctatcagctaaccgacatagccttatggtcggcacgcacagggaggacggcgtggccttaagaggctcacactccctgctacctaatcaggttccggtccctcagctgcctgtgcaatcagctacaagtcctgacctaaatcctccacaagacccctacagaggcatgcctccaggtctccaggggcaaagcgttagttccgggagcagcgaaatcaagtctgatgacgaaggggacgagaacctgcaggatacaaaatcatccgaggataaaaaattggacgatgataagaaagacataaagagcattaccagtaataatgacgatgaagatctaacacctgagcagaaggctgagagggagaaagaacgtcgtatggctaataatgcacgagagcgactgagagtcagggacatcaatgaggcctttaaggaactgggacgaatggtgcagctccatctgaagtcggataaaccacagaccaaattgcttatacttcatcaggcagtcgccgttatcttgagccttgagcagcaggtgcgcgagcgtaatctaaatccgaaagccgcatgtctgaaaagacgcgaggaagaaaaagttagtagcgaaccgccaccattgagcctggctgggcctcaccccggaatgggcgacgcgtctaatcacatgggccagatgtag

SEQ ID NO: 31221 - DNA, 2322 bp, synthetic construct
  misc_feature 1..2322: note = Description of Artificial Sequence: Synthetic coding sequence
  source 1..2322: mol_type = other DNA
atgttttccaaaagattggaaaaaatcgcacaggtgcccttgctattccctttcattttcattattctgactaactactctaaaatggagggtgccgtagaaagtcagccttctttctttaagacctctcaggatattgtgacctgtacgtgggttgaaaactgctattcctccttttcacgtagaccgctcgaacagatgttttgcaagcatcagtccaaaaatatcatctcttggaccgggatggtggcccatacctgtaaccccagcactctcgggggacagggtctttgcgacttcgcgaagatgcaccaccagcagcgcatggctgcactcggcacggacaaagagctcagtgaccttctcgacttcagtgccatgttttcgcccccagtctcgagtgggaaaaatggcccaacatctttggcatcgggccatttcacgggctccaatgtcgaggatcggtcatcgtcaggatcgtggggcaatggtggacacccatcaccttcccgcaactacggtgatgggaccccatacgatcatatgaccagtcgggacttaggctctcacgataacctgtctcctcccttcgtaaattctcgcatccagtccaagaccgaacgtggcagctattcttcatatggacgggaaagtaacctgcaggggtgtcaccagcagagccttctgggtggcgacatggatatgggcaaccctggcactctgagccccactaaacctgggagccagtattaccagtactcgtctaataaccctcggcgaagacctctgcattcctccgccatggaggtacaaacaaagaaggtccggaaggtcccacctggactgccctcatccgtgtatgcgccatccgcttctaccgcggattacaaccgggatagccccggataccctagctccaagccagcaacatcaacattcccatcgtcctttttcatgcaggatggccatcactcatccgatccttggagtagcagcagcggtatgaaccagccaggttatgccggaatgctcggcaactcctcacatattcctcagagcagttcttactgcagcctgcacccgcatgaacgactctcctacccttcccattcaagtgccgatatcaacagctccctcccccctatgagcacattccaccggtctgggaccaaccactattctacatctagctgtacaccgccagcaaacggaacagattcaatcatggctaacaggggcagcggcgctgccggttcctcacagaccggggatgcccttgggaaggcgctagcctctatttactctccggatcacactaataacagtttctcaagtaatcctagcacacctgttgggagccctccaagtctctcggcgggaaccgcagtgtggtctaggaatggtggacaagcaagcagcagccctaactacgagggtcccctgcactccttacaaagtcggattgaagaccggctagaaagacttgacgacgcaattcacgtattacgtaatcacgctgttggaccctccacggctatgccaggcggacatggcgacatgcacgggattattggcccaagtcataatggggctatgggaggccttggctccggatacgggactggcctactgagcgccaaccggcacagcttgatggttgggactcaccgtgaagacggggttgccctgcggggatcacatagtctcctgcctaaccaggtgcctgtgccccagctacccgtacagagcgccacctcccctgacctgaacccaccgcaggatccctatagaggcatgccacccggtttgcagggccagagcgtttccagtggcagtagtgaaataaagtcagatgacgagggcgacgagaacttgcaagataccaaaagctccgaggataagaagttggatgacgacaaaaaggatattaaaagtatcacccggtctcgcagctccaacaacgacgacgaggatctcacccctgagcagaaagctgagcgagagaaggaacgtcggatggccaacaatgcacgggagcggctgcgggtccgggatatcaacgaggctttcaaggagcttggacgcatggtgcagctgcatctcaaatccgataagcctcagaccaaactattgatcttgcatcaggctgtggctgtgattctaagcctggaacagcaggtacgggagcgtaatttgaatcctaaagcggcttgtctcaaacgcagggaagaggagaaagtcagcagcgaaccaccccctctgtccctggcagggcctcaccccggaatgggcgacgctagcaaccatatgggccagatgtag

SEQ ID NO: 31222 - DNA, 1536 bp, synthetic construct
  misc_feature 1..1536: note = Description of Artificial Sequence: Synthetic coding sequence
  source 1..1536: mol_type = other DNA
atgtattgcgcctataccataccgggaatgggaggaaacagtctcatgtattactacaacggcaaggccgtgtatgctccctcagcctctaccgccgactataatagggactctcccggatatccaagctcaaagcccgcaacgtctaccttcccctcttcatttttcatgcaagacggacaccattccagcgatccgtggagttcaagcagcggcatgaaccagcccggttatgcgggaatgctgggcaattcatcccatatcccgcagtccagcagctactgctccctgcatccacatgagagactgagctacccaagccacagctccgccgatatcaactctagcctgccacccatgtcaaccttccatcggtcaggcacaaaccactattctacatcctcctgcaccccgccagccaacggcactgactcgataatggctaatagaggctcaggcgctgcgggaagcagccagaccggcgatgccctggggaaagctctggcaagtatctattcaccagatcatactaacaattcattttcctctaacccatccacccccgtgggctcaccccctagcctgtcagcagggacggcagtgtggtctaggaacggaggccaggcctcttcaagtcccaattatgagggacccctgcatagtctgcagtccagaatagaagatcgccttgaaaggttagatgacgccattcacgtgttgaggaaccacgccgtggggccatctacggctatgcctggcggtcatggtgacatgcacggaatcattggtccttctcacaacggggctatggggggacttggctctggatatggcactgggttgctgtcagcgaaccggcacagcttgatggttggcacacaccgggaggacggcgtagctctcaggggctcgcactcactgttgccaaaccaagtgcctgttccgcagctccccgtccagagtgctacctctcccgacctgaatcctccccaagacccttacagaggaatgccacctgggctgcaaggtcaaagcgtttctagcggctccagcgagatcaaatcggacgacgaaggtgatgaaaacctgcaagataccaagtcgtccgaagacaagaagctggatgacgacaaaaaggatatcaagagcatcaccaggtccagatcctccaacaacgatgacgaagacctcacacctgagcagaaggccgagagagagaaggagaggagaatggctaacaacgctagggagcggctcagagttcgggacattaatgaagccttcaaggagttgggaaggatggtccagcttcatctcaaatccgataagccgcagactaagttgctgatattgcaccaggccgtcgcagtgattctgtcactggagcaacaagtgcgagagaggaatctgaaccccaaagcagcctgcctcaagcggagggaagaggaaaaagtgtccagcgagcccccaccattaagcttagccggaccacacccgggaatgggcgatgcttctaatcatatgggccaaatgtag

SEQ ID NO: 31223 - DNA, 1944 bp, synthetic construct
  misc_feature 1..1944: note = Description of Artificial Sequence: Synthetic coding sequence
  source 1..1944: mol_type = other DNA
atgtttagtccgcctgtgagctctggcaaaaacgggccaacatccctagcttccgggcacttcaccggctccaatgtggaagaccggagtagctctggatcttggggaaacggcggtcatccatctccttcaagaaattacggtgacggtacgccgtatgatcatatgacatcaagagatctcggatctcacgacaatctgtctcctccctttgtgaactcacggatacagtctaaaaccgagagaggcagctattcttcatacggcagggagtcgaatctgcaagggtgccatcagcagtcccttctgggtggtgatatggatatgggaaaccctggaacacttagtccaacaaaaccagggtcccagtactatcagtactctagcaacaaccccaggagaaggcccttacatagctctgcaatggaagtgcagacaaaaaaagtcagaaaggttcctcctggtttgcccagcagcgtgtacgccccatccgcaagcactgccgactataatcgggactcccctgggtaccccagcagcaagcccgcaacatctacattccccagtagtttcttcatgcaggacggacatcactcaagtgacccttggagttccagctcaggtatgaaccagccagggtacgctggcatgctcggaaattcctctcatattcctcagagtagcagctactgctccctgcacccacatgagcgcctttcctacccgagccactctagtgccgacataaattcttctctgcctcctatgagtacctttcacagatccgggaccaatcactattccacatcatcttgcactccaccagccaacggcaccgacagtattatggccaataggggctcaggtgctgctggaagctctcagaccggcgatgcattaggaaaagcgcttgcctccatatattctccagatcataccaacaactctttctcgtctaacccatctacccccgtgggcagccccccatctcttagcgctgggactgcagtgtggtctcgcaacgggggacaggcttctagcagtcccaactacgaaggccctctgcactcacttcagtctagaattgaggaccgcctcgaaagattagacgatgccatccatgttctgaggaatcacgccgtcggtccatcgaccgcaatgccagggggtcacggtgatatgcacggcatcattggacctagtcacaatggtgccatgggcggactaggttcgggctacggcaccggtttactgtccgcaaataggcatagtctaatggtaggcacacatcgtgaggatggagtggccctgcgcggtagccacagtcttctgcccaaccaggtgccagtcccacaattaccagtccagtccgccacgtccccggacctaaacccaccgcaggacccttacaggggaatgcctccgggtttgcagggccagagtgtgagcagcggatcttctgagataaagtccgatgacgagggagatgaaaatcttcaggacacaaagagctcagaggataaaaagcttgacgacgataaaaaggacattaagtcgatcacaaggagcaggtcatccaacaacgatgatgaggatttgacgcctgaacagaaagcagaacgggagaaagagagacggatggccaataatgcgagagagcgccttagagttcgtgacattaatgaggccttcaaagaattgggacgcatggtacagctgcatctcaagtcagataagccccagaccaagctgttgatcctccaccaagctgtcgctgtgatactctctttagaacagcaggtacgcgagcgcaatctcaatccgaaggccgcttgcctcaagcgacgagaggaggaaaaagtgagcagcgagccacctcctctcagtctggctggaccgcatcctggaatgggggacgcgagtaatcatatggggcagatgtag

SEQ ID NO: 31224 - DNA, 1614 bp, synthetic construct
  misc_feature 1..1614: note = Description of Artificial Sequence: Synthetic coding sequence
  source 1..1614: mol_type = other DNA
atggatatggggaacccgggtacactctcacccacaaaaccgggtagtcagtactatcagtactcatcaaacaaccctcgccgtcgccctctgcacagttcagccatggaagtgcagactaagaaggtcaggaaggtgccgcctggccttccttccagcgtctatgctcccagtgcttccaccgcagactataatcgagatagtcctgggtacccgtctagcaagccggcaacgagcacttttcccagctcgtttttcatgcaggatggccaccattccagtgacccctggagctcatccagtgggatgaaccagcctggctacgctggcatgctaggcaactcttcgcacataccacaatcaagctcgtactgctcactgcaccctcacgagagattgagctatcctagccatagctcagctgacattaactcaagcctcccaccaatgtctacgtttcacaggtccggaaccaatcactactcaacctctagctgtacccctccggctaacggaacagacagtataatggccaatagaggaagtggcgctgcaggctctagccagacaggcgatgccttaggaaaggcactcgcctccatctattctcccgaccatacaaacaattccttcagttccaatccatcaacacccgtcgggagccccccaagcctatccgctggcacagccgtctggtctcgcaatggcggacaggccagcagctctcctaactacgaaggccctcttcacagcttacaaagcagaatcgaggatcgattggaaagactcgacgacgccattcacgtcctccgcaatcacgcagtgggccctagtaccgcgatgccaggagggcacggcgatatgcatggtatcatcggaccatcccataacggagccatgggaggtttaggaagtggctacggcacgggattgctctccgccaatagacacagtctgatggttgggacacatcgggaagacggagtggctctgcgcggttctcattctttgctgcccaaccaagtaccagtgccccaactacctgtacagtcggccacctcccctgatttaaatccaccccaggacccctaccgaggcatgccacccggacttcaagggcagagcgtgagcagtggaagcagcgagatcaaatccgatgatgaaggagacgagaatcttcaggatacgaagtcatctgaggataagaaactagacgacgacaagaaggacatcaagtccatcacctcgaataacgatgatgaagatctgaccccagaacagaaagccgaacgggagaaggagcggagaatggccaacaatgccagagagagactgagagtgcgtgacattaatgaggctttcaaggagctgggacgaatggtgcaactccacctcaagagtgacaaaccacagacgaaattgctgatcctgcaccaggccgttgctgttattctgagcttagagcagcaggtgagagagcgcaacctaaatcctaaggcagcgtgtcttaagcggcgagaagaagaaaaagtgagctccgagccaccccctctgtctctggccggaccccatccaggaatgggtgacgcctctaaccatatgggccagatgtag

SEQ ID NO: 31225 - DNA, 1932 bp, synthetic construct
  misc_feature 1..1932: note = Description of Artificial Sequence: Synthetic coding sequence
  source 1..1932: mol_type = other DNA
atgttctctcccccagtgtcaagcggcaaaaatgggcctaccagcctggcctctggtcactttaccggctccaacgttgaggaccgctcctcctccgggagctggggcaatggcggacatccatccccctccagaaactacggggacggcaccccctacgatcatatgacatcccgtgatctgggctctcacgacaatttaagtcccccatttgttaactcccgaatacagagcaagacagagcgtggaagctacagttcttacgggcgtgagtccaatctgcagggctgccatcagcaaagtctgttagggggtgacatggacatgggcaacccgggtactctcagtcctaccaaaccgggttcacagtattaccaatattccagcaataatccccgtcgaaggccactgcattcatcagcgatggaggtgcaaactaagaaagtacgtaaagttccccctggcctgccatcctccgtgtatgctccaagcgcttcaacagctgattacaaccgggactctcctggatacccttcctctaagccagccacatccacttttcctagcagtttctttatgcaggacgggcatcactcctcagacccatggtcgagctctagtggaatgaatcagcccggatacgccggaatgctgggcaacagctcacatattccacagtctagcagttactgcagtcttcatccccatgagcgtctgtcttacccgtcccactcctccgccgacatcaactcctcgctgcctcccatgtcgacattccataggtccggtactaaccactactcaacatctagctgcacccctcccgcaaacggaactgatagtattatggctaacagagggagtggcgcagcaggaagctcccaaactggtgatgctctggggaaggctttggcgtcgatttactctccagatcacaccaataactcattctctagtaaccctagcactccagtcgggtcccccccaagcctgagtgccggaaccgccgtgtggagccgaaacggcggtcaggcatcgtcttcccctaattacgaaggccctttacattccctgcagagccggatcgaggacagattggagagactggatgatgcgatacacgtgctccggaaccacgcagttggaccgtcaaccgccatgcccggagggcatggagatatgcatggtatcatcggaccttctcataacggtgcaatgggtggccttggctccggctacggcaccggcctgctcagcgctaaccggcacagtttaatggtgggaacccacagagaagatggtgtggcccttagaggctcacactcactgctgcccaaccaggtgcccgtgccacagctacctgtccaaagcgccactagtcccgacctgaatccccctcaggacccctatagagggatgccccctggcctgcagggccagtcagtgagtagtggatcttccgagatcaagtccgacgacgaaggcgacgagaacctccaggacaccaagtcttctgaggacaagaagttagacgatgataaaaaagacattaaatcgatcacctccaataatgacgatgaagacctcacacccgaacaaaaggccgagagagagaaagagcgacgcatggccaacaatgccagggagagactgagggtgcgggacattaacgaagcgtttaaagagcttggccgaatggtgcagcttcacctaaagagtgacaaaccccagaccaaactcctgatcctgcaccaagccgtcgcagttattctttccctcgaacagcaggtacgagaacgaaatctgaatcccaaagcggcatgtctgaagcggagagaagaagagaaagtcagctcagaacccccacccctttccctggccggaccccaccccggaatgggcgatgcctccaaccatatggggcagatgtag

SEQ ID NO: 31226 - DNA, 1878 bp, synthetic construct
  misc_feature 1..1878: note = Description of Artificial Sequence: Synthetic coding sequence
  source 1..1878: mol_type = other DNA
atggaagaggatagccgggatgtggaggaccgttcttcctctggaagttggggcaacggcggacacccgagtccctcccggaactacggtgatggcactccgtatgatcacatgactagtcgggatctgggctcacacgataacctgtcaccaccgtttgtgaactctagaatccaatccaaaacggagcgaggttcctactcatcgtatggaagagaatcgaatctgcaaggctgtcatcagcagtcactcctggggggagatatggacatgggcaaccctggcaccctgagccctactaagcccggatcccagtactaccagtacagctcgaacaaccctaggcgaagacctttacacagtagcgccatggaagtccagacaaaaaaagttcgaaaagtcccacctggattgcctagcagtgtctacgctccgtctgcatcaacagcggattacaaccgcgatagccccggttacccctcatcaaagcccgcaacttctacgttcccgagttcattcttcatgcaggatggtcaccacagtagtgatccttggtcctcctccagcggtatgaatcagcccggatacgctggaatgctgggcaatagttctcatattccacagtcgagtagttattgtagcctgcatccccacgagaggctgagctacccatcccattcttcagctgacataaacagctcacttcctcccatgagcacatttcatagatctggtacaaatcactactctactagcagttgcactccacccgctaacggaaccgactctattatggccaatcggggatcaggggctgccggtagctcccagacaggcgacgccctcggcaaagcactggcatctatctattcccctgaccatacaaataattccttttcatctaatcctagcacccccgtggggtcacccccaagcctgagcgctggaaccgccgtgtggagccgcaatgggggtcaggcctcctccagccccaactatgaaggcccattacactctttgcaatcgagaattgaggaccgccttgagcgtctggacgacgccattcacgtactacgaaaccacgctgttgggccaagcacagcaatgcctggagggcacggcgatatgcatgggatcatcgggccaagtcacaatggagccatgggcggattgggcagcggctatgggacaggcctactgtctgcgaatagacacagcttgatggtgggaacccatcgggaggacggtgtggctttaagagggtctcattccctgctgccaaaccaggtacctgtgccgcaactgcccgtgcaatcagccacatcacctgatctcaaccccccacaagatccatatcgagggatgcccccagggttgcagggccagagcgtcagctccggatccagtgaaattaagtctgatgacgaaggtgacgagaatttgcaggacactaagtcttccgaggacaaaaaattagacgacgataagaaggatatcaaatcaattacctctaacaacgacgatgaggatctgacaccagaacagaaagctgaaagagagaaagagagacgcatggccaataacgctcgcgagcgcttgcgagtgagagacattaatgaggctttcaaggagttaggtcgcatggtacagctccacctgaagtcagataaaccccaaactaagctgcttatattgcatcaagcggtggctgtgatcctctccttggagcagcaagtgcgggagcggaatttaaatcctaaagctgcttgcctgaagcgcagggaggaggagaaggttagcagtgagcctccaccccttagtctggccggtccccatcccggaatgggtgatgcctcaaaccatatggggcagatgtag

SEQ ID NO: 31227 - DNA, 1803 bp, synthetic construct
  misc_feature 1..1803: note = Description of Artificial Sequence: Synthetic coding sequence
  source 1..1803: mol_type = other DNA
atgaaagatattttctttcaattcattatcgcccgtgtgagaaagtgctatagcctgtcttgcctgcatacgctgcctgtggtgcctactttacggaaaaccgaacggggatcttattcaagctacggcagggagtctaacctacaggggtgtcaccaaagccttctgggaggcgatatggacatgggtaaccctggcactctcagcccaaccaagccaggcagtcaatactatcagtacagcagcaacaacccgagacggagacccctgcacagtagcgccatggaggtgcagacaaagaaagtgagaaaggtgcctccgggattaccctcaagcgtttacgctccctccgcttcgaccgcagattataatcgggactccccaggttacccgagctccaaacctgccacatccaccttcccctcaagctttttcatgcaggacgggcatcacagttcagatccctggtcaagcagcagcggcatgaaccaacccggatatgccggtatgctcggcaactcatcgcacatcccgcagagctcgagctactgcagtctgcaccctcatgagaggttgtcctaccccagccattcctccgcagatattaattcctcactgccgccaatgagcacctttcacagatcagggactaatcattactctacatcttcatgtacccctccagctaacggtaccgactcaataatggccaaccgaggtagtggtgctgcaggctctagccagaccggagacgcgcttggcaaagctctggcaagcatttattctcccgaccacacgaataactccttctcaagtaaccctagtaccccagtaggaagccctccatccttgtctgccggaactgcagtatggtcgcgtaatggcggtcaggccagctcctcacccaattacgagggacccctgcatagcctacagtcacgcattgaggatcgactggagcgacttgatgacgccatacatgtcctgcgcaatcacgccgtggggccatccacagcaatgcctggcggacatggagatatgcatgggattattggaccatcgcataacggtgccatgggtggcttagggagtgggtacggtactgggctcctctccgccaacaggcactcactgatggtggggacccaccgggaggatggggtcgccttaaggggctcgcattcactactccctaatcaagtgccagttccacagctgcccgtccagagtgccacatctcctgatcttaatccaccccaagatccttataggggcatgccacctggactccagggccaaagcgtttccagcggtagcagtgagataaagtccgatgatgagggcgacgaaaatctccaggatacaaaatctagtgaggacaagaaactggacgacgataagaaggatataaagtctattacacgcagtaggagctcaaacaacgatgatgaggatctgacaccggagcagaaagctgagagagagaaagaaaggcgaatggccaacaacgccagggagaggctgcgcgtcagggatataaacgaggctttcaaagaattgggacgcatggtacagttacacctcaagtcagataaacctcagacgaaacttctgatcctgcatcaggcagtcgcggttatactctctttggagcagcaggtgcgcgagaggaacctcaatccaaaggcagcctgcctcaaacggcgagaggaagaaaaggtgtcttcagagcccccacccctgtcactcgctggtcctcatcctgggatgggagatgctagtaatcacatggggcagatgtag

SEQ ID NO: 31228 - DNA, 1233 bp, synthetic construct
  misc_feature 1..1233: note = Description of Artificial Sequence: Synthetic coding sequence
  source 1..1233: mol_type = other DNA
atggcaaaagatgccggtctgatcgaagcgaacggagagttaaaggtgttcatcgaccagaacttgagtccaggcaagggcgtggtgtccctggtggccgtgcatcccagcactgtgaaccctttggggaagcagttgctacccaaaacttttgggcaatccaacgtgaacatcgcgcagcaggtggtgattgggactcctcagcgacctgccgcatccaacaccctcgttgtcggatccccccatacaccgtccacccattttgcttcccagaaccagccatctgattcttctccgtggagtgccggtaagaggaatagaaagggggaaaagaatggcaaaggactgagacacttttccatgaaagtctgcgagaaggtgcagagaaagggcacaacgtcatacaacgaagtggcagacgagctcgtcgctgagttctctgcagctgacaatcacatacttccgaatgagtcagcttacgaccagaaaaacatccgtcgcagggtatacgacgcattgaacgtgctgatggccatgaacatcatctcaaaagaaaaaaaggaaattaaatggatcggcctaccgactaactcggcccaggagtgtcaaaacctcgaggtggagaggcaacgaagattagaacggattaagcaaaagcagagccagcttcaggagcttatcctgcagcagattgcttttaagaatcttgtacagaggaaccggcacgcagagcaacaggcctcccggcctcccccaccaaattccgtgattcacctgcccttcattattgtgaacaccagcaagaaaactgtaattgactgcagcatcagcaacgataagttcgaatacctgtttaatttcgataatacgttcgagattcacgacgacatcgaggttctcaagagaatgggaatggcctgtggactcgagtccggcagttgttccgcagaagacttaaagatggcccgatctctggtgcccaaggctttagagccttatgtaactgagatggcacagggtacagttggaggggtgtttataaccaccgcagggtcgaccagtaatggcactcggtttagcgcatctgacctcacgaacggggcagatggtatgcttgccacgtcaagcaacggctcccagtactcgggctcacgagtggagacacctgtatcctatgttggcgaagacgacgaagaggatgatgacttcaatgaaaatgacgaggacgactag

SEQ ID NO: 31229 - DNA, 711 bp, synthetic construct
  misc_feature 1..711: note = Description of Artificial Sequence: Synthetic coding sequence
  source 1..711: mol_type = other DNA
atggcgaaggatgccggattgatagaggccaacggggaacttaaggtgtttatcgatcagaacctatcccccggaaagggggttgttagccttgttgccgttcacccatctacagttaaccctttgggtaaacaactgctgcctaagaccttcggtcaatcaaacgtgaacatcgctcagcaagtggttattggcaccccccagcgccctgctgcctctaatacgctggtagtcggttccccgcataccccaagcacacatttcgctagccagaaccaacctagtgacagcagcccttggagcgcagggaaacgcaataggaaaggcgaaaagaacggaaagggactgcgtcactttagcatgaaggtctgtgaaaaagtgcagcggaaaggcactacctcatataatgaggtggcagatgagctcgtagccgaattttctgctgcagataaccacatcttacccaatgagtctgcctatgatcaaaaaaacatcagacgcagagtctatgacgccctgaacgtactgatggcaatgaacattatcagtaaagagaagaaagaaattaagtggataggcctgccaacaaattccgcacaggagtgccagaatctggaggtggaacgccagaggcgcctggagcgtattaagcagaaacagagtcagctgcaggagctgatattgcagcaaatcgccttcaaaaacctttag

SEQ ID NO: 31230 - DNA, 480 bp, synthetic construct
  misc_feature 1..480: note = Description of Artificial Sequence: Synthetic coding sequence
  source 1..480: mol_type = other DNA
atggccaaagacgctggtctcattgaggcgaacggggaactcaaggtattcatcgatcagaacctgtcacccggaaaaggagtcgtgagcctcgtggccgtacacccatccactgtgaaccccttaggcaaacagctgctgcccaagacattcgggcaatctaacgtgaacatcgcacagcaggtggtcatcggtacgccccagcggccagcagctagtaatacgctggtggtcgggtccccgcacacacctagcacacatttcgcatcacagaaccagccatccgatagctcgccttggagcgcaggtaagcggaatagaaagggcgaaaagaacggcaagggcctccgacattttagcatgaaggtatgcgaaaaggtccagcgcaagggaactacaagctataatgaggttgctgatgagttagtggccgagttcagcgccgctgataatcacattttacctaacgaatcagtctag

SEQ ID NO: 31231 - DNA, 936 bp, synthetic construct
  misc_feature 1..936: note = Description of Artificial Sequence: Synthetic coding sequence
  source 1..936: mol_type = other DNA
atgagtactctcccaagcaaatggaagcgtaatcgaaaaggggaaaagaacggtaaagggctgaggcatttttccatgaaggtgtgcgagaaggtacagcggaagggaactactagctacaatgaagttgcagatgagctggtggccgagttttccgctgctgataatcatattctgcccaacgagtcagcctacgaccagaaaaatattagacgtcgcgtgtatgacgctctaaacgtgctaatggctatgaatatcatttccaaagaaaagaaggaaattaaatggatcgggctacctacgaattcagcacaggagtgccagaacctggaagttgaacggcagaggaggttggagcgaattaaacagaaacagtcacagttgcaggaactgattttacaacagattgcctttaagaacctcgtgcagcggaaccggcacgcagagcagcaggcttccaggccaccccctccaaactccgtgatccacctgccctttattatcgtgaatacatctaagaagacagtcatcgattgcagtatatccaacgataagttcgaatacctttttaactttgacaacaccttcgagattcacgatgatatcgaggtcctcaagagaatgggcatggcatgcgggctggaaagcggcagctgttctgcagaagatctgaagatggctagaagcctcgttcccaaagcgctggagccatacgttactgagatggcacaaggcactgtgggtggtgtgttcatcactacggccggatctacaagcaatggtacatctgaccttacgaacggtgcagacgggatgttagccacctcatctaatggctcccagtatagcgggagcagagttgaaactcctgtcagctatgtcggggaggatgacgaagaggacgatgatttcaacgagaacgacgaggatgactag

SEQ ID NO: 31232 - DNA, 1146 bp, synthetic construct
  misc_feature 1..1146: note = Description of Artificial Sequence: Synthetic coding sequence
  source 1..1146: mol_type = other DNA
atgagtactttgcctagcaaatggaagagaaatcggaaaggcgaaaagaatggtaagggactccggcacttcagcatgaaagtgtgtgaaaaagttcagcggaaaggtacaacaagttataacgaggttgccgatgagcttgttgccgaattcagtgcggcagacaatcacatcctgcctaacgaatcagcctacgatcagaaaaacatacgtcggagggtgtacgacgccttgaacgtgctaatggctatgaacataatcagcaaggaaaaaaaagaaataaaatggattggtctcccgaccaatagcgcccaggagtgtcagaacttggaggtggaaaggcagaggagacttgagcgtattaaacagaagcagagccagctgcaggaattgatcctccagcagatcgcatttaaaaatttggtgcagagaaatcgccatgctgagcaacaggcttctcgtcctcccccaccaaactccgttatacacctccccttcatcatcgtgaatacatccaaaaagaccgtgatagactgttcaatttctaacgataagtttgagtacctgttcaatttcgacaatacattcgagatacacgacgatatagaggtgttgaaaaggatgggcatggcctgtggcttggagagcgggtcatgttccgcagaagacctgaagatggctcggtctctcgtgcctaaagcattggagccctacgtcaccgagaaaaccgggctctgtgactgtacagccggttgccctgccccatggcgcagtgtcgaaaataccgggcaggctaaagacataaggaaactgctgcaaccttccgtgctctggaactgcgccagcttctgctggctgcctgtccgtttggtgttattcctctttcacgaccactccttgatcttttttcccttttctgaaatggcacaggggacggtgggaggcgttttcattactactgcgggatcgacctcaaatggtacgcgtttttccgctagcgatctgaccaacggggctgacggcatgctagccacttcaagtaatggaagccagtactcagggtcacgagttgaaacgccagtgtcatatgtgggcgaggatgatgaagaggacgatgacttcaacgagaacgatgaagacgactag

SEQ ID NO: 31233 - DNA, 1161 bp, synthetic construct
  misc_feature 1..1161: note = Description of Artificial Sequence: Synthetic coding sequence
  source 1..1161: mol_type = other DNA
atgataatttctaccccacaacggctgacaagcagcggctcagtgttgatcggatccccttacactccagcgccagccatggtgacgcagacgcacatagcagaggccactggctgggtaccaggtgatcgcaagagagccagaaagttcattgacagcgatttcagtgaaagtaagcggtcaaaaaaaggcgacaagaatggtaagggtctgcggcatttcagtatgaaagtgtgcgaaaaagtgcagcggaaaggcacaacatcctataatgaggtcgctgacgaattagtgtcggagttcacgaacagcaacaatcatctggcggctgactcccaggcctatgaccagaagaatatcaggaggcgcgtctacgacgctcttaacgtgcttatggcaatgaatattatcagcaaggagaaaaaagaaattaagtggattggcctgcctacgaactccgctcaggagtgtcagaacctggaaatcgagaagcaaaggaggatagagaggatcaagcagaagcgcgctcagctgcaggaactgctgctgcagcagatcgccttcaagaatctggtgcagcggaaccgacagaacgaacagcaaaatcaagggccaccggcacttaacagtaccatacagctccccttcataatcattaacaccagccggaaaacagtgatcgactgcagcatcagtagcgacaaatttgaatatctgttcaacttcgataacacatttgagattcatgacgacattgaagtgctgaaacgcatgggaatgtcctttgggctcgagtccgggaaatgttcactggaggatcttaaactggccaagagccttgtgccaaaggcactcgaaggctacatcacagacatcagtactggcccaagctggctcaaccagggtcttttacttaatagtacacagtccgtgtccaacctggaccttaccacaggtgccacccttccccagtcttccgtcaatcaggggctgtgtctggatgcagaggtggcgcttgcgacgggccagttcctcgcccctaactcgcatcaatcttcttccgctgcgtctcattgctcagaaagccgaggagaaaccccatgcagctttaacgacgaggacgaggaggatgatgaggaggattcctcctcccccgaatag

SEQ ID NO: 31234 - DNA, 1113 bp, synthetic construct
  misc_feature 1..1113: note = Description of Artificial Sequence: Synthetic coding sequence
  source 1..1113: mol_type = other DNA
atgatcatttcaaccccccagcgccttacttccagtggctccgttcttatcggttcaccttacactccagcccctgccatggttacacagacccatatcgctgaggcaaccgggtgggtgccagggaaacggtcaaagaaaggggacaagaacggtaaaggcctccgccattttagcatgaaggtctgtgagaaggtccaaagaaaggggacaacctcctacaatgaagtggctgatgagctggtcagtgagttcactaactctaacaaccacctggctgccgactcccaagcatacgatcagaagaacattaggcggagggtctacgatgctttgaacgtgctcatggccatgaacatcatctctaaggagaaaaaagagatcaagtggatcggcctgcccaccaactcagctcaagaatgtcagaacttggagattgaaaagcagcgcagaatcgagaggatcaaacagaaaagagctcagctgcaggagctactgctgcagcagatcgcatttaagaacctggtccagaggaaccgccaaaatgaacagcagaaccaaggcccaccagctctaaattccaccatccagttgccctttattattatcaatacgtccagaaagaccgtgattgactgctcgatcagctcggacaagttcgaatacttatttaacttcgacaacacctttgaaatacatgacgatattgaagtccttaagagaatggggatgagcttcggcttagaatcaggcaagtgttccctcgaggacctaaagcttgccaagtcccttgtgccgaaagccctggaggggtacattaccgacatatccaccggacccagctggctgaatcagggtcttctgctaaattccacacagtcagtgtctaacctcgatctgacaaccggcgctactctgcctcagtcttcagtcaaccaggggctgtgtttagacgccgaggtggccctggccaccggtcaatttcttgcccctaactcacatcagtccagcagtgcggctagccactgttctgagagtcggggagagaccccttgcagcttcaatgatgaagatgaggaagacgacgaagaggatagctctagcccggagtag

SEQ ID NO: 31235 - DNA, 1257 bp, synthetic construct
  misc_feature 1..1257: note = Description of Artificial Sequence: Synthetic coding sequence
  source 1..1257: mol_type = other DNA
atgcagcccgaagggattatcttcgaagcagaaaataagccaagtcccggtactgagtccgctggcacctttatcctggatctgagcgctacctcaagaaccataatctccacccctcagcgcctgacttcatccggatctgtgctcatcggcagtccttatacacccgctccagccatggtgactcagacacacatcgcggaagccactggctgggtgccaggcgaccggaagcgcgctcgaaaattcatagactccgatttctccgaatccaagcggtctaaaaagggggataaaaatgggaaggggctcagacacttcagcatgaaggtgtgtgagaaggtccaaagaaagggaacaactagttataacgaagtagccgatgaacttgtgagcgagttcacaaattccaacaaccacctggccgcagatagcgcttatgatcagaaaaatatccgccgtcgggtgtacgatgctctcaatgttttgatggctatgaacattatcagcaaggaaaagaaggagattaagtggatcggcctccctactaactccgcgcaagagtgccaaaatctggaaatagagaaacagcggagaatagagcgtattaagcagaagcgggctcaattgcaggagctgctgctgcagcagatcgcttttaagaacctggtccagcgaaaccgccagaatgagcagcagaaccaggggccaccagcactgaattccactattcagttgcccttcattatcatcaacacgagtcggaagacagtgatcgactgttctataagcagtgataaattcgagtacctgttcaactttgataacacgttcgagatccatgatgacatagaagtcctgaaacgtatgggcatgtccttcgggctcgagagcggaaaatgctcactggaagatctgaaactcgccaagtcactagtacccaaagctttggaagggtatatcaccgatatctccaccgggccaagctggctaaaccagggcctgctactgaattccacccagtccgtctctaatctcgatctgaccaccggggctacactgccacagagtagtgtcaaccaaggcctctgcctggatgccgaagttgccctcgccactgggcagttcctggctcctaatagtcatcagtccagctccgctgcatcacattgttctgaatcccgcggagagacaccctgttcttttaatgacgaggatgaggaagacgacgaggaggatagctccagtccagagtag

SEQ ID NO: 31236 - DNA, 1161 bp, synthetic construct
  misc_feature 1..1161: note = Description of Artificial Sequence: Synthetic coding sequence
  source 1..1161: mol_type = other DNA
atgattatatcaaccccccagaggctgacctcatccggatctgtgctgatcggatccccctacacccctgcccctgcaatggtcacacagacacatattgcagaagcaacagggtgggtgccgggagaccgaaaaagggcccgtaagtttattgacagcgacttctctgagagcaaaaggagtaagaaaggtgacaagaatggtaaaggcctgagacacttcagcatgaaggtgtgcgagaaggtgcaaaggaaaggcaccacctcatacaacgaagtggctgacgagcttgtgtcagaattcaccaattctaacaatcacctggccgctgacagccaggcctatgaccagaaaaatattcgcaggagagtctatgatgcccttaatgtcctgatggccatgaacataatctctaaggagaagaaagagatcaaatggatcggcttacctacgaatagcgcccaggaatgtcagaacctggagattgaaaaacagcggagaatagagaggatcaagcagaagcgcgctcaacttcaagagctactcctccaacagattgcatttaagaacttggttcaaagaaataggcagaacgagcagcagaaccaaggcccaccagcccttaactctaccattcagctgccatttatcatcataaatacctccagaaagacagtgattgactgtagcattagcagcgataaattcgagtacctattcaattttgataatacatttgagatccacgacgacatagaggtcctgaagcgtatggggatgtcctttgggttggaatctggcaaatgttccctggaagatctgaagctagccaagtccctggtgcccaaagccctggagggctacatcaccgacatcagcacgggcccatcttggctgaatcagggtctgctcctgaactctacccagtcggtgtccaacctcgacctcaccaccggtgccaccttgccccaatcatctgtgaaccagggcctgtgcctcgatgccgaggtagccttagcaacgggccagttcctggcacccaactcacaccagagctcttctgcggcatcccactgcagtgaaagcagaggcgaaactccctgctcttttaacgacgaagatgaggaggacgatgaggaagactcgtctagcccagagtag

SEQ ID NO: 31237 - DNA, 261 bp, synthetic construct
  misc_feature 1..261: note = Description of Artificial Sequence: Synthetic coding sequence
  source 1..261: mol_type = other DNA
atgaccgcaaaaaacgtgggactgacctcaacgaatgccgaggtgcgaggcttcattgatcaaaatctcagcccgacaaagggcaacatttccttcgtggcctttccggtgtccaatactaactcaccaacaaaaattctgcccaagacgctaggacctatcaacgtcaatgttggaccacagatgattatttctactcctcaaaggctgaccagctctgggagtgtgctgatcggctctccttacaccccagctccatag

SEQ ID NO: 31238 - DNA, 141 bp, synthetic construct
  misc_feature 1..141: note = Description of Artificial Sequence: Synthetic coding sequence
  source 1..141: mol_type = other DNA
atgattataagcacaccacaaaggctgacgtccagcggttccgtgctgattggatccccgtacaccccggcacccgctatggtaacacagacccacatcgctgaagccaccggctgggtgcccggagaccgcaaacgctag

SEQ ID NO: 31239 - DNA, 1158 bp, synthetic construct
  misc_feature 1..1158: note = Description of Artificial Sequence: Synthetic coding sequence
  source 1..1158: mol_type = other DNA
atgataatcagcaccccacagcggttgacatcgagcggaagcgtactgatcggaagcccgtatacaccagccccagccatggtgacgcagacccacattgcggaagctaccggatgggtccctggggacaggaagagggcaagaaagtttatagactctgacttctctgagagcaaacgcagcaagaaaggcgacaagaacggcaaagggcttcgccacttttctatgaaggtgtgcgaaaaggtgcagaggaaaggcaccacttcgtacaatgaggtagcagacgaattggtgtcagagtttaccaattccaacaatcacctcgccgctgactctgcctatgatcaaaagaacattagaagaagggtgtatgacgcactgaatgtcctgatggcaatgaacataatctccaaggagaagaaggagataaaatggatcggcctgccgacaaacagtgcgcaagagtgccaaaacttagagattgagaagcagaggcgaatcgagcggattaaacagaaacgcgctcaactgcaggaactgctgctgcagcagattgcctttaaaaacttagtgcagcgtaaccgccagaatgagcaacagaaccagggaccaccagccctcaacagcaccatccagctcccctttattatcattaatacatctcgaaagactgtcatagactgttccatttcttccgataaattcgagtatctctttaatttcgataacacattcgagattcacgacgatatcgaagttctgaagagaatgggaatgtcgtttgggctcgaaagcggcaaatgttcccttgaggatctcaaactcgcaaagtccctggttcctaaggctctggaggggtatattacggacatctctacaggcccatcctggctaaatcagggcttgcttttaaatagcacacagagcgtctcaaatctggatcttactacaggagcaacactgcctcagtcttctgtgaaccaggggctgtgtctcgacgccgaagtggctctggccaccggccagttcttagctccgaattctcaccagagcagtagcgcagcatcgcactgctccgagtctcgaggcgagacaccctgtagctttaacgacgaagacgaggaagatgatgaagaggatagtagtagtcctgaatag

SEQ ID NO: 31240 - DNA, 270 bp, synthetic construct
  misc_feature 1..270: note = Description of Artificial Sequence: Synthetic coding sequence
  source 1..270: mol_type = other DNA
atgattatctctaccccacagcgtttaacaagttccgggtcggtgctgattggatcaccttacaccccggctccagccatggtcactcagacccatatagctgaagctacaggatgggtcccaggagaccggaaacgggcaagaaaattcattgattcagatttctccgaaagtaagcgctctaagaagggggataagaacggtaagggcctgcgacactttagtatgaaggtttgtgagaaagtgcagaggaagggcactacatcatag

SEQ ID NO: 31241 - DNA, 1341 bp, synthetic construct
  misc_feature 1..1341: note = Description of Artificial Sequence: Synthetic coding sequence
  source 1..1341: mol_type = other DNA
atgaccgccaagaacgtggggcttacaagcactaacgcagaggtcaggggcttcatcgaccagaatctgagtccaactaagggtaacatatcttttgtggcatttccagtgtctaacactaactctccaactaaaatcctgcccaaaacgctgggccctattaacgtgaatgtggggccacagatgatcattagtaccccacaacgacttacgagctcaggtagcgtgttgatagggtcaccctatacgcctgcacccgctatggtcacacaaacccacattgctgaggccaccggctgggtcccaggggataggaagagggccaggaaatttatagattctgatttttccgaaagtaagcgaagcaaaaaaggcgacaaaaacggcaaaggactgcgccacttctctatgaaagtttgtgaaaaggtacagcgaaaggggacaaccagctacaatgaagtggctgacgagctggtgtcagagtttacgaacagcaacaatcacctggcggctgacagcgcctacgaccagaaaaatatcagacggcgagtgtacgacgccctgaacgtcctgatggccatgaacataatatctaaagaaaagaaggagataaagtggatcgggctgcccacaaactcagcacaggagtgccagaacctcgaaattgaaaaacagagacgaattgagaggataaaacaaaagcgcgctcagctgcaggagcttcttttacagcagatcgcctttaagaacctggtgcaacgcaacaggcaaaatgaacagcagaaccagggcccaccggctctgaattctacaattcagttgccttttattatcatcaacacgagccgtaaaacggttatagactgcagcatctcaagcgataaattcgaatacctgtttaatttcgataatacatttgagatccatgatgacatcgaggtgctcaagagaatgggaatgtctttcgggctcgagagtggaaagtgcagcctcgaagacctaaaattagcgaagtccttggtgccaaaggctttggagggctatatcaccgacatctccacaggtccaagttggctgaaccagggccttctcctgaattccacccagagtgtaagcaatcttgacctgactactggggcaaccttgcctcagagctctgtaaaccagggcttatgcttagatgcagaggtggctctcgctaccggtcagttcctggctcctaatagtcatcagtcctcttccgctgcaagccattgcagcgagtcacggggagagaccccatgctcctttaacgatgaagacgaggaggacgacgaagaggatagttcgagccctgagtag

SEQ ID NO: 31242 - DNA, 84 bp, synthetic construct
  misc_feature 1..84: note = Description of Artificial Sequence: Synthetic coding sequence
  source 1..84: mol_type = other DNA
atgattatttcaaccccacagagactaaccagctcgggttcagtgttaatcggctcaccgtatacacctgcaccagccatgtag

SEQ ID NO: 31243 - DNA, 1050 bp, synthetic construct
  misc_feature 1..1050: note = Description of Artificial Sequence: Synthetic coding sequence
  source 1..1050: mol_type = other DNA
atgttagaccctaagtgtgacaggaaacgcgcacgcaagttcatcgattctgattttagcgagagcaagcgctctaagaaaggtgataagaacggtaaagggcttagacatttctctatgaaagtatgcgagaaagtccagaggaaaggtaccacctcgtacaatgaggtggccgacgaactagtctccgaatttaccaattcaaacaatcatcttgccgcagactctgcctacgatcagaaaaacatccgccgtcgcgtatacgacgctctgaacgtgctcatggcgatgaacatcatttctaaggaaaaaaaggagataaaatggatcgggctgccaaccaactctgcacaggagtgccagaacctcgaaatcgaaaagcagcgccgaatcgaaaggattaaacagaaaagagcgcaactccaagagcttcttctccagcagatcgccttcaaaaacctggttcagcgaaatcggcagaacgaacagcagaatcaggggccacccgcactgaacagcaccatacagttaccctttataatcatcaacacttcccggaagaccgtgatcgattgctcgatttcctcagataaattcgaatatctcttcaattttgacaatacctttgaaatccatgatgatatcgaggtgctcaagcggatgggaatgagctttggacttgagtctggaaagtgcagtctggaggatctgaagctagcgaagtcccttgtccccaaagccctcgaaggatatataaccgacatcagtactggcccatcatggctgaaccagggcctcctgctcaattctacacagtctgtgtctaacttagatctgaccaccggtgctaccctgccccagagctccgtcaatcagggcctgtgcctagacgctgaggtggcattagccaccggccagttccttgcaccaaacagccaccagagctcctccgctgcatcccactgcagtgaatcccggggagagaccccatgtagttttaatgacgaggatgaagaggacgacgaagaagactctagttcccctgagtag

SEQ ID NO: 31244 - DNA, 663 bp, synthetic construct
  misc_feature 1..663: note = Description of Artificial Sequence: Synthetic coding sequence
  source 1..663: mol_type = other DNA
atgatcatcagcacaccccagaggcttacctcctctggatccgtgctaataggctcaccttacacgccagctccagctatggtgactcagacacacatagctgaggccaccggatgggtgcccggagaccgaaaacgagcaaggaagttcatagatagcgactttagcgagtcaaagagatccaaaaagggtgacaaaaacggaaagggactacggcatttcagtatgaaagtgtgtgaaaaagttcagagaaagggcacaacctcttacaatgaggtggcagacgaattggtgtccgaatttaccaactctaataatcacctggcagctgattctgcctacgatcagaagaacattaggagaagggtctatgacgcactgaacgtgctgatggccatgaatatcataagcaaagaaaagaaggagattaagtggataggcctgcctacgaacagtgcccaggaatgccagaacctcgagatcgagaagcagcggagaattgaacggattaaacaaaagagggcacaactacaggaactgctgctgcaacagatagcctttaagaacctggttcaacgcaatcgtcaaaatgaacagcaaaaccagggtcccccagctttgaattccactatccagctgccattcatcattatcaacacatag

SEQ ID NO: 31245 - DNA, 1161 bp, synthetic construct
  misc_feature 1..1161: note = Description of Artificial Sequence: Synthetic coding sequence
  source 1..1161: mol_type = other DNA
atgataatctctactcctcagagactcaccagcagcggtagcgtactcattgggagcccttatacacccgcacccgctatggtgacccaaacccacattgctgaggccaccggctgggttcccggtgacagaaaacgagctcgcaagttcatcgattcagacttttctgagagtaaacgatccaaaaagggtgataagaacggtaagggcctccgacacttctcaatgaaggtgtgcgaaaaagtgcaaaggaaggggaccacatcgtacaatgaggtggctgacgaactggtttcggagtttaccaacagtaacaaccatctggccgctgattcccaagcttatgaccagaaaaatatccgtcgtcgggtctatgacgccttgaatgtgctgatggccatgaacatcatctccaaagaaaagaaggagatcaagtggattggccttccgaccaactccgcacaggagtgccagaaccttgagatcgaaaaacagcgtcggatcgagcggatcaaacagaaacgcgcacaactgcaggaactgctgctacaacagattgcatttaagaatttggtgcagagaaatcgccagaacgagcagcagaatcaggggcctccggctttgaactccacaattcagctgcccttcattatcattaatactagccggaaaaccgtcattgactgttctatttcatccgacaagtttgagtacctgttcaacttcgacaacacctttgaaattcacgatgacatcgaggtccttaaacgcatgggcatgtcctttggcctggagtcaggcaaatgcagtctggaggacctcaagctggcgaagtctctggttccaaaggcgctcgagggctacataactgacattagcactggaccaagctggctgaaccagggcctgttacttaactctacccaatcggtgtctaacctggacctgaccaccggagcaaccctgcctcagagttccgtgaaccagggcctctgtcttgacgcagaggtcgctttggccactggccagttcctcgcaccaaactctcatcagtcctctagtgctgcttcccactgctccgagtctcgcggagaaaccccctgctcatttaatgacgaggacgaggaagatgacgaggaagacagcagttccccagagtag

SEQ ID NO: 31246 - DNA, 933 bp, synthetic construct
  misc_feature 1..933: note = Description of Artificial Sequence: Synthetic coding sequence
  source 1..933: mol_type = other DNA
atgaaggtgtgcgaaaaggtacagcgcaagggaacgacttcctacaacgaagtagcagacgaacttgtgagcgaattcactaattctaacaaccacttagctgccgatagtgcttacgaccagaaaaacattcgtagaagagtgtacgatgccttgaatgtgctgatggccatgaacatcattagcaaggaaaaaaaggagatcaagtggatcggtctacctaccaattccgcccaggaatgtcagaatctggaaatcgaaaagcagaggcggatcgagaggattaaacagaaacgcgcacaactgcaggagcttctgctgcagcagatagcctttaaaaatctggtgcagagaaaccggcagaacgagcagcagaaccaaggacctccagccctcaatagcaccattcagcttccgttcattatcattaatacaagtcgtaagaccgtaatagactgtagcattagttcagacaagttcgaatacctgttcaattttgacaacaccttcgaaatacacgatgacatagaagttctaaaacggatgggcatgagctttggcctggagagtggaaaatgtagtctggaagacctgaaactggcaaagagcctggttccaaaggctcttgaggggtacattacggatatctccactggcccaagctggctgaaccaggggctgctgctgaatagtacacaaagcgtctccaaccttgatttaaccaccggcgctactctgccccaaagttcggttaaccaaggcctctgtctcgacgcagaggtggctttagctaccggccagtttctcgctcccaacagccatcaaagctcaagtgctgcatctcactgctctgagtcaaggggggagaccccctgcagttttaatgatgaagatgaagaagacgatgaggaagatagctcatctcctgaatag

SEQ ID NO: 31247 - DNA, 1335 bp, synthetic construct
  misc_feature 1..1335: note = Description of Artificial Sequence: Synthetic coding sequence
  source 1..1335: mol_type = other DNA
atgcccaggagcggcgctcctaaggagaggcccgctgagcctcttacacccccaccatcctatggacatcagcctcagacgggaagcggggaatccagcggcgcaagtggagacaaggatcatctttacagcacagtctgtaaaccgagatctcctaagcccgctgccccagccgctccaccgttttcctcctccagcggcgtcctgggaaccggcctgtgcgagctcgacaggctgttacaggaattgaacgccactcagttcaacatcaccgacgaaatcatgagccagtttccgagcagcaaggtggcatccggcgagcagaaggaggaccagagcgaagataagaagcggccttcgctcccctccagcccctcacctggactcccaaaggccagcgccacctctgctaccctggaactggaccggctgatggccagcttatccgacttcagggttcagaatcacctcccagcatccggaccaactcagcctcccgtcgtaagcagcaccaacgaagggagcccctctccacctgaacccacaggtaaggggtccttagatacaatgctgggcttgctgcaaagtgacctgtcccggagaggagtcccaactcaagcgaagggcctgtgcggatcttgcaacaagcccattgccggacaggttgttactgctctcggcagagcctggcaccccgagcactttgtgtgtggtggatgcagcaccgcactggggggtagtagttttttcgaaaaagacggggctcctttttgcccagaatgctatttcgagcggttttcccccaggtgcggattctgtaaccagcccatcagacataagatggtgactgctctaggaactcactggcatcccgagcacttctgttgtgtgtcttgtggtgaacctttcggggacgagggtttccatgaaagggaaggcaggccttattgtcgcagggactttttgcagctctttgcgcctaggtgccagggatgccagggaccaattctggataactacatcagcgcactgtctgccctgtggcatccagattgcttcgtatgtagagaatgctttgcccctttttctggcggatcgttctttgaacacgagggcagaccgttatgcgaaaaccatttccatgccaggcgcggaagtctgtgtgccacttgtggccttcctgtgacaggcagatgtgtttcagcccttggtcgcagattccaccccgatcacttcacgtgcacgttctgtctgcggccactgactaagggatctttccaggaaagggccggaaaaccttactgccagccgtgttttctgaagctgttcggctag

SEQ ID NO: 31248 - DNA, 1335 bp, synthetic construct
  misc_feature 1..1335: note = Description of Artificial Sequence: Synthetic coding sequence
  source 1..1335: mol_type = other DNA
atgccaagatctggggctcctaaagagcgacccgcagagcccctgactcctcctccgagttacggacatcaaccacagactggttccggcgagagttccggtgccagcggagataaggaccatctctatagtacggtgtgcaaacccaggtctccaaaacctgccgctccagctgcaccccctttttcctcatcttcaggcgtcctcggaactggcctgtgcgaactcgatagactgctccaggaattgaacgctacccagttcaacatcactgatgaaatcatgagtcagtttccatccagcaaggtcgcctcaggcgaacagaaagaggaccagtccgaggacaaaaagcggccaagcttaccatcctctccctcacctgggctgcctaaagcttccgccactagtgccacgctagagctggacagactgatggcaagtttgtcagactttcgtgtgcaaaatcaccttcccgcttcggggccaactcagcccccagtggtgagcagcaccaacgagggcagcccaagcccacctgagcccactggcaaagggtcactggatactatgttgggcttactgcagagcgacctgtccaggcggggagtccctacacaggctaagggcttgtgtggaagctgtaacaaacctatcgcaggccaggtggttacagcactgggcagagcttggcaccctgaacattttgtttgtggtggctgctctacagctttgggcggaagcagcttttttgagaaagatggagcccctttctgtccagagtgttatttcgaacggttctcgcctcggtgtggtttctgtaatcaacctatcagacataaaatggtgaccgccttggggacacactggcaccctgaacacttctgctgcgttagctgcggcgaacccttcggagacgagggtttccatgagagggagggacgcccatactgccgtcgcgacttcttacagctgtttgctcccaggtgccagggttgccaggggcctatacttgacaactacatcagtgcattgagcgcactctggcatccagactgttttgtttgccgggagtgttttgctcccttttcaggaggttctttttttgaacatgagggcagaccgctgtgtgaaaaccatttccatgcaaggagggggagcctgtgcgccacatgtggcctaccagtaacagggcgatgcgttagtgcccttggtaggagattccaccccgaccactttacctgcactttctgtctgcgtcccctgaccaagggctccttccaagagcgggctggaaagccatactgccagccgtgttttctcaaactgtttggctag

SEQ ID NO: 31249 - DNA, 1386 bp, synthetic construct
  misc_feature 1..1386: note = Description of Artificial Sequence: Synthetic coding sequence
  source 1..1386: mol_type = other DNA
atggaggacctggacgccctgctcagcgacctggaaactaccacctcccacatgcctcgttcaggggctccgaaggagcgccctgcagagccactgaccccgccaccttcttatgggcaccagccacaaaccggctctggcgagtcctccggtgcttccggggacaaggaccatctctacagcaccgtctgtaaacccaggtcccccaagccagcagctcctgccgctcctcccttcagctcctcctccggagtgctcggaacagggctatgcgagctcgaccggctgttacaagaactgaatgctacacagttcaacatcacagatgaaattatgagccaatttcccagcagtaaggtggctagcggtgaacagaaggaggaccagtcagaagataagaagaggccctcccttccaagcagccctagccccggtctgccaaaagcttcagccacctcagctaccctggagttggacagactgatggcttctttatccgattttcgggttcaaaaccacctgccggcatcaggtcctacccagccacctgtggtctcctccactaacgagggctctcctagccccccagaacccactgggaagggctccttagatacaatgttaggcttattgcaaagtgatttgagtcgacggggtgtgccaacccaggccaaagggctttgtggtagttgtaacaagcccatagctggacaagtagtcacagcgctgggacgcgcatggcaccccgagcacttcgtttgcggaggatgcagtactgccctcggaggcagtagcttctttgaaaaggacggagcacctttctgtccagagtgttatttcgagagattctcaccacgctgcggattctgtaatcagcctattagacacaaaatggtcacagctttaggcacccactggcatcctgagcacttctgctgtgtgagttgtggcgaaccatttggcgacgaaggcttccatgagcgagagggccgaccatactgccggagggattttctccagctgtttgcaccacgctgccagggttgccagggccctatcctagataactacatttccgccctgtctgctctctggcaccctgactgcttcgtttgccgagagtgcttcgcgccattttctggtggttcttttttcgagcacgagggcagacccctgtgcgagaatcacttccacgcacgcagagggagcctgtgcgcgacctgtggactgcccgttactggcaggtgtgtgagtgccttggggcgtaggtttcacccagatcacttcacctgtacgttttgcctgcggcctctcacaaagggctcctttcaagagcgtgcaggaaaaccttattgccaaccctgcttcctaaaactattcggctag

SEQ ID NO: 31250 - DNA, 783 bp, synthetic construct
  misc_feature 1..783: note = Description of Artificial Sequence: Synthetic coding sequence
  source 1..783: mol_type = other DNA
atggtttggcccgctctctgggagctataccgggagctcggactttttcaagggcctgcactaggcctgcggaaccacctgggccgtaagttaagaaggcgcaaaaagaagaaggccaagcgaactacaaattggaaaataataaccgaccgccctggcttccatgatgagtcagccatttatccagtggggtactgttctactcgaatatacgctagcatgaagtgccctgaccaaaaatgcttgtatacttgtcagatcaaggatgggggagtgcagccccagtttgaaatagtgccagaggatgacccccagaatgccatcgtgagtagttccgctgacgcatgccatgctgaactgctgaggaccatcagcacgacaatgggtaaactgatgcccaaccttctgcctgcgggagcagacttcttcggattcagtcaccctgccatccacaacctgatacagtcctgtccaggagctagaaagtgtatcaattatcagtgggtcaagttcgatgtctgtaaacctggggatggccagttgcccgagggtttgcctgaaaatgacgccgctatgagctttgaggcattccagagacagatttttgacgaggatcagaatgatcctctcctgcctggctccctggatttgcccgaactccaacctgccgcatttgtctcctcatatcagccaatgtatctaacccacgaacctctcgtcgatacacacctccagcacttgaaatcaccaagtcagggctcaccaatccaatcctcagactag

SEQ ID NO: 31251 - DNA, 1236 bp, synthetic construct
  misc_feature 1..1236: note = Description of Artificial Sequence: Synthetic coding sequence
  source 1..1236: mol_type = other DNA
atgagtctcctggacggcctggcttctagtccacgagcccctctgcaaagtagcaaagccagaatgaaaaaactgccgaagaagtcacaaaatgagaaatatcggttaaagtatctccgtctgcggaaggcggctaaagcgaccgtattcgagaatgctgccatttgtgatgaaatcgcacgcctagaagagaaatttttgaaggccaaggaggagcgccgatatctcctgaagaaactgctgcagctgcaggccctaacggaaggcgaggttcaagcagctgctccatcccactcctcctccctgccgctaacttacggggtggcatcgagtgtgggcactattcagggagccggacccatctccggaccttctactggcgcagaagagcctttcggcaaaaagactaagaaagaaaaaaaggagaagggcaaggagaacaacaaattggaggtgctgaagaagacttgcaaaaagaaaaaaatggccggaggcgctcggaagttagtgcaaccaatcgccctggatccatctggcaggcctgtttttccaataggactcggagggctgaccgtgtattcactgggcgagataattaccgaccgcccaggatttcatgatgaatcagctatttaccctgtcgggtactgtagcactaggatctacgccagtatgaagtgcccggaccaaaaatgcctctacacatgtcagataaaagacggaggtgtccaaccccagttcgagatcgtacccgaagatgacccacagaatgccatagtctctagctctgcggatgcgtgtcatgctgaactactccgtaccatcagcacaactatgggtaagctgatgcctaacctgctcccagcgggagcggatttctttggcttttcacaccctgctatccacaatctcatacaatcctgccctggggctcgtaagtgtattaactatcagtgggttaaatttgacgtctgcaaaccgggagacggtcaacttccagaggggttgcccgaaaacgatgcggcaatgtccttcgaggccttccagcgacagatcttcgatgaagaccagaacgaccctctgttaccagggtcacttgatctgccagagctccagcccgcagctttcgtttccagctaccagccgatgtaccttacacatgagcccctagtggatacacacctgcaacatttgaagtcaccctcccaaggttctcccatccaaagttccgactag

SEQ ID NO: 31252 - DNA, 1281 bp, synthetic construct
  misc_feature 1..1281: note = Description of Artificial Sequence: Synthetic coding sequence
  source 1..1281: mol_type = other DNA
atggaggccgctgttgcagccccaagacccagactgctgctgttggtactggcagctgccgcagcggcagcagctgctttgctccctggagcgacggcactgcagtgcttttgccatctatgtacaaaggacaacttcacttgcgtaacagacgggctatgtttcgtctcggtgaccgagaccactgacaaagtgattcacaactctatgtgcattgctgaaatagatctgattcccagagatcgtccattcgtgtgcgccccaagctcaaaaacgggctccgttacaaccacctactgctgcaaccaagatcactgtaacaagattgaactgcctaccactggcctgcctctccttgttcagcgtacaatagcacgaaccattgtattacaggagagtatagggaagggtcgttttggagaagtctggcggggaaagtggcgtggtgaagaagtggcagtgaagatcttttctagccgggaggaacgttcctggttcagggaagcagaaatctatcaaacagtaatgctgaggcacgagaacattctgggctttattgctgcggacaataaggacaatggaacttggacacagctgtggttggtaagcgactaccatgagcatggtagtctatttgattacctgaaccgctataccgtcaccgttgaggggatgataaagcttgccctctctacagcttccggactggcccacttgcacatggagatagtggggacgcagggcaagcccgctattgcacacagggatctaaagtctaagaatatcctggtgaagaagaatggcacctgctgcattgctgatttgggactcgccgttcgtcacgactctgcaaccgatactatcgatattgccccaaaccatagggtggggaccaaaagatacatggcacccgaagtccttgatgactcaattaacatgaaacactttgaaagtttcaaacgggctgatatctacgcaatggggctagtcttctgggagatcgctcgccgttgctccattggtggaatccatgaagactaccagctgccctactacgacctggttcccagcgatccgtctgtcgaggagatgcgtaaggtcgtgtgcgagcaaaaactgaggccgaatattccaaaccggtggcaatcttgtgaggctctgcgcgtgatggctaagatcatgagggagtgttggtacgccaacggtgccgcaaggctgaccgcactcagaatcaaaaaaacactctcacaattgtcacaacaggagggcatcaaaatgtag

SEQ ID NO: 31253 - DNA, 1512 bp, synthetic construct
  misc_feature 1..1512: note = Description of Artificial Sequence: Synthetic coding sequence
  source 1..1512: mol_type = other DNA
atggaggccgcagtagcagcccctagacctaggctgctcctcctcgtcctggccgcagccgctgctgccgctgcagcacttctgccaggtgctactgctcttcagtgtttctgccacctgtgtaccaaggacaattttacgtgtgtcaccgatggactctgcttcgtgagcgtcactgagaccaccgacaaggttatccacaactccatgtgcattgccgaaattgatcttatcccacgcgaccgtccattcgtgtgtgctccttccagcaagaccggcagtgtgacaaccacatactgttgcaaccaggatcactgtaacaagatcgagttgccaaccactgtgaagtcttctcccggactgggtccagtagaactggcagctgtcattgccggacctgtgtgcttcgtctgtatatcacttatgctcatggtgtacatttgtcataatcgaaccgtgatccaccaccgcgtcccaaacgaggaggatccctctctcgacaggccgttcattagcgaaggcaccactcttaaggacctgatctacgatatgaccacttcaggttctgggagtggactaccccttctggtacagcggacaatcgcccgaacaatcgtgctacaggaaagtattggaaaggggaggtttggagaggtgtggaggggaaagtggcggggagaagaagtcgccgtcaagatattctcttccagggaagagaggagctggtttagggaagcagagatttaccagaccgtgatgctgaggcatgagaacattttgggttttatcgccgcagacaataaggacaacggcacatggacacaactctggctcgtgtctgattaccacgagcacggtagtctcttcgactatttgaacaggtatactgtgaccgttgaagggatgatcaagctagccctctcaaccgcatccgggctagcccatctgcacatggaaattgttggaacacaggggaagccggcaatcgctcatcgcgacctcaagtccaagaatatactcgtgaaaaagaatggcacctgctgtattgccgacctgggtcttgctgtgagacatgactctgctactgacacaatcgatattgctcctaatcaccgcgtaggtaccaaaaggtacatggctcctgaagtactcgacgactccataaacatgaagcattttgaaagctttaagagagctgacatttacgccatgggacttgtattttgggagatcgcacgacggtgttccattggcggtatacatgaggactaccagcttccatattatgacctcgtgccatccgatccaagtgtggaggaaatgcgcaaggtggtatgtgagcagaagcttagaccaaacatcccaaatcggtggcaatcctgcgaggccctgagggtgatggccaagataatgagggaatgttggtacgcaaatggtgcagctagactcactgctctgagaatcaagaagacattgagtcaactgtctcagcaagagggaatcaagatgtag

SEQ ID NO: 31254 - DNA, 1398 bp, synthetic construct
  misc_feature 1..1398: note = Description of Artificial Sequence: Synthetic coding sequence
  source 1..1398: mol_type = other DNA
atggaagccgcagtggcagccccacgtcctcgcctgctcctcctggtgctcgccgcagcagccgctgccgcagccgcattacttccaggggcaacggctcttcagtgtttctgtcatttgtgtacaaaggacaactttacttgcgtaacagatgggctgtgttttgtgagtgtcactgaaaccacagacaaggtcatccacaactcgatgtgtatagcagagattgatctgatcccccgagatagacccttcgtgtgcgctcccagtagcaagaccggaagtgtcacaaccacatactgctgtaaccaagaccactgcaataagatagagctgcctacaaccgtcaaatcaagtcccggactaggtcctgtggagttagccgcagtgatcgcgggacctgtttgtttcgtatgcatctcgttgatgcttatggtgtacatctgccacaatagaaccgtgattcaccacagagttccaaacgaggaggatccaagtctcgataggccttttatttctgagggtacaacactgaaggacttaatttatgacatgacaacttccggctccgggtccggccttcccctcctggtacaacgcaccatcgcacggaccatcgttctgcaggaatccatcggcaaggggaggtttggagaggtatggagaggcaagtggcgcggagaggaggtggctgttaagatatttagctcccgtgaagaaaggtcttggttccgtgaagccgagatctaccagaccgtaatgctcagacacgagaatatcttgggcttcattgctgctgacaataaagataatggaacatggactcaattatggctcgtgtctgactaccatgaacacgggtcgctatttgactaccttaacaggtatacagtaacggttgaggggatgattaagctggcactaagcactgcatctggcctggctcatctgcatatggaaatcgtgggtactcaaggcaaaccagccatcgctcccaaccaccgcgtgggcacgaaaaggtacatggctccggaagtgctagacgactcgatcaacatgaagcacttcgagtccttcaaaagagcagatatctacgccatggggctagtcttctgggagattgccaggcgctgctcgatcggcggtattcatgaagactatcagcttccctactacgacctggtgcctagtgatccctctgtggaggaaatgcggaaggtggtgtgtgagcagaaactgcgcccaaatattcccaaccgctggcagtcgtgcgaggcgcttagagtgatggcgaaaatcatgagggagtgctggtacgccaacggcgcagcgagactgacagccctgcgaattaagaaaactcttagccagttaagccagcaggagggtattaagatgtag

SEQ ID NO: 31255 - DNA, 216 bp, synthetic construct
  misc_feature 1..216: note = Description of Artificial Sequence: Synthetic coding sequence
  source 1..216: mol_type = other DNA
atggaagcagccgtggctgccccacgacccaggctcctgttggcttctacgagccttcagtgtttttgtcacctctgcaccaaagacaattttacgtgtgtcaccgatggcttgtgctttgtctctgtgaccgagaccactgataaggtgatccataactccatgtgtatagcagaaatcgatttaattccacgcgatcgacctttcgtctgttag

SEQ ID NO: 31256 - DNA, 1305 bp, synthetic construct
  misc_feature 1..1305: note = Description of Artificial Sequence: Synthetic coding sequence
  source 1..1305: mol_type = other DNA
atgtgcatcgctgagatagaccttattccgagagaccgtcccttcgtgtgtgccccttctagtaaaacaggatctgttaccactacgtactgctgcaaccaggaccattgcaacaaaattgagcttccaactactgtgaagagcagtcctggccttggaccggtcgaattagccgctgtgattgcgggtcctgtgtgctttgtgtgtatctctttgatgttaatggtctatatctgccacaacaggacggtgattcatcatagggtgccgaacgaagaagacccttctctcgataggccatttatctccgagggcacaaccttgaaggacctgatctatgatatgactacgtctggaagcggctctgggctgccattgctggtacagaggaccatcgcaaggacgattgttttgcaggagtccattggcaaaggcagattcggcgaagtatggagaggcaagtggcgcggagaagaggtagcagtcaagattttctcctctagagaggaacgttcttggtttcgggaggccgagatataccagacggtcatgctgagacacgaaaatatcctggggttcatcgccgctgataataaagacaacgggacctggactcagttgtggttggtctcagattaccacgaacacggatctctctttgattacctcaatcgctacaccgtgaccgttgaaggtatgatcaagttagcgctctccaccgcgtcagggctcgcgcatctgcatatggaaatagtcggcacacagggaaaaccggctattgctcatcgtgatctcaaatctaagaatatcctcgtgaaaaaaaatggcacctgctgtatcgccgatttaggattagccgtgcggcacgactccgcgacggacaccatcgatattgccccaaaccacagagtgggcactaagaggtatatggcccctgaggtcctggacgattccatcaacatgaagcactttgaatccttcaaaagagctgatatttatgcaatgggcctggtattttgggagattgctcgcagatgttctatcggtgggattcacgaggattatcagctgccatattacgatttagtaccctctgacccaagcgtggaggaaatgagaaaagtggtctgtgaacagaagctgaggccaaacataccaaaccgctggcaatcctgtgaagctctgagagttatggctaaaattatgcgcgaatgttggtatgccaatggagccgctcggctgaccgcattgaggatcaagaaaacgttatcccaactttcccagcaagaaggaatcaaaatgtag

SEQ ID NO: 31257 - DNA, 411 bp, synthetic construct
  misc_feature 1..411: note = Description of Artificial Sequence: Synthetic coding sequence
  source 1..411: mol_type = other DNA
atgaaagatagtaaccgctgttgttgtgggcagtttacaaaccagcacatcccaccgttaccatcagccaccccgtccaaaaacgaagaggaatctaaacaggtagaaacgcagcctgagaaatggagtgtcgctaagcacacccagtcataccctacagattcgtacggagttctggagtttcaggggggaggatactccaataaggcaatggtgcgtaaagccttcaggcatggggcaacgaggatcactgcctttatcggagggcagtcacccagtccaaagctccagatccccggacttttacacggttgcggctccatctttttggacatttcactaaagaaccaggagatttatctgtgtacctggctgctcgccatgcggctgggtaattggacgccactgtag

SEQ ID NO: 31258 - DNA, 4878 bp, synthetic construct
  misc_feature 1..4878: note = Description of Artificial Sequence: Synthetic coding sequence
  source 1..4878: mol_type = other DNA
atgggccagaaatcctggatcgagaagaccttttgtaaaagagaatgcatctttgtgatccccagcatgaaagacagcaaccggtgttgctgcggacaattcactaaccaacacattccaccactgccatcggctaccccatctaagaacgaagaagaatcaaagcaggtagaaactcagccagagaaatggtcagttgctaaacacactcaatcctaccccaccgacagttacggagttctggagtttcagggcggagggtacagcaataaagctatgtacatccgtgtgagctatgatacgaagcccgactcattgttgcatctgatggtaaaggactggcaactcgagctccccaagctgctgatcagtgtgcatggcggtctccagaacttcgagatgcagcctaagctaaagcaggtttttggcaagggcttgataaaggcagcaatgaccacaggggcatggatcttcactggtggcgtttccaccggcgtaatctctcatgtgggagatgcgttgaaggatcactcctccaagagccggggtcgagtctgtgcaatcgggatcgccccttggggcatcgttgagaataaagaagaccttgtgggcaaagatgtgacccgggtctaccagacaatgagtaaccctttgagcaaactgtctgtcctcaacaactcacatactcactttatactcgctgacaatgggacgctgggaaagtatggtgccgaagtgaagctgcgaaggctgttggaaaagcacatctcactgcagaagatcaataccagactggggcagggtgttcccctggtgggactcgtagtggagggtggtcccaatgtagtgtccatagttctggagtacctccaggaggagccacctattccagtggtaatttgtgatggcagcgggcgtgcaagcgatatattgtcattcgcccacaaatattgtgaagagggtgggatcattaacgagtcccttagagaacagctcttggtgaccattcagaagacttttaactacaataaagcccagtctcatcagctctttgccataataatggaatgtatgaaaaaaaaggaacttgtgacggtctttagaatgggatccgaaggacagcaggatatcgagatggccattctgacagctcttttgaaggggacgaatgtgagcgcccctgaccaactctcactagctttggcttggaatcgagtggacatcgctcgctcccaaatatttgtcttcggtcctcactggccccctctcggctctctggctccccctacggactccaaggctaccgaaaaggaaaaaaaacccccaatggccactaccaaaggtggcaggggaaagggaaagggtaagaaaaagggcaaagttaaggaagaggtggaggaagaaaccgatcccaggaagattgagctgttgaattgggtgaacgcgctggagcaggctatgttggatgccttagtccttgatcgggtggacttcgtgaagctgctgatcgaaaacggagtgaatatgcagcacttcttaacaatacctcgccttgaagaactttacaacactagactcggccctcccaataccctgcatctgctagttagggacgtgaaaaagtcgaatctcccacctgattatcacatcagcctgatcgatataggactggttcttgaatatctgatgggcggagcctataggtgtaattatacgagaaagaattttcgtacgctgtataacaacctgttcgggccaaaacgtcctaaggctctcaagctgcttggtatggaggacgatgaaccgcctgccaagggcaaaaagaagaagaaaaaaaaaaaggaggaggaaattgatatcgatgtggacgatccagcagtcagtcgcttccaatatccgttccacgagctcatggtgtgggccgtgttaatgaagagacaaaagatggctgtcttcctgtggcaacgtggagaggagtcaatggctaaggccctggtcgcatgtaagctgtacaaagctatggcacacgaatccagcgagagtgacctggtagacgatatcagccaggacttagataacaattccaaggactttggccaactggctctggaattgctggatcaatcttataagcacgatgaacagatcgctatgaaattgctgacatatgaacttaaaaactggtcaaattccacgtgtctgaagctcgctgtggcggctaagcatagagactttattgctcacacttgcagtcaaatgctcctcactgatatgtggatggggaggctcaggatgagaaagaaccctgggctcaaggtgattatgggaattttgctcccgcctactatcctgtttctggagttccgcacatacgacgacttttcctatcagacgtccaaggagaacgaagacggtaaggagaaggaggaagagaacactgatgccaacgccgacgcgggttccaggaaaggcgatgaagagaacgagcacaaaaaacagcggagcatccctatcggcaccaagatttgcgagttctataatgcacccattgtcaagttttggttctacactatcagttacttggggtacctgctgttattcaactatgtcattctggtgcgcatggatggttggccgtcccttcaagagtggatcgttatcagttacatagtttctttggcactggaaaagattagggaaatcctgatgtccgaacccggtaaactgagtcagaagataaaggtatggctccaggagtattggaacattaccgatctggtggcgatcagcacttttatgattggagccatactacgtctccagaatcaaccctacatggggtacgggagggttatatactgcgtggatatcatattttggtacattcgcgtattggacatatttggcgtgaacaagtaccttggaccatatgtaatgatgataggtaagatgatgatcgacatgttgtactttgtggtcataatgctggtggtgctgatgtcctttggcgtggcccgtcaggccatcctgcacccagaggaaaaaccctcctggaagctggctcggaacatattctacatgccctattggatgatttacggcgaagtgtttgccgaccagattgatctgtacgcgatggagataaaccccccatgcggtgaaaacctctacgacgaagaggggaagaggctgcctccatgtatccccggagcctggctgacgcctgctttaatggcctgttacctactcgtggccaatattctcttggtgaatctcctgatagcagtcttcaataacacattcttcgaggtgaaatctatctccaaccaggtgtggaagtttcagcgctatcagctcatcatgacgtttcacgacaggcctgtgttgccccctcccatgatcatcctgtctcacatttacatcattattatgagactctctggacggtgtcgtaaaaaaagggagggcgatcaggaggagcgtgacaggggactgaaactatttctgtcagacgaggaattaaagcgtctccacgaatttgaggagcagtgtgtacaagagcactttcgtgagaaagaagatgaacagcagagctcttccgacgagcggatccgagtgacttcagaacgtgtggaaaatatgagtatgcgcctggaggagataaacgagagggagacgttcatgaaaacatctctgcagaccgtggatctgaggttagcccaattagaggagttgtctaataggatggtcaacgctctcgagaatctggcgggaatagatcggagtgatctgatccaggcccgttctcgcgcatcatcagaatgtgaagcaacatacctgctccgccaatccagcattaactcagccgatggctatagcctgtatcggtaccatttcaacggggaggaactgttgttcgaggatacctctctctcaaccagtcctgggacaggggttagaaaaaagacctgttcatttagaataaaagaggaaaaggatgtgaagacgcacttggtaccggagtgccaaaactccttacacctttctcttgggacctcaacttcagcaacaccagatggcagccaccttgcagtggacgatctgaagaacgccgaagaatctaagttgggacccgatatcggcatttcaaaagaagacgatgaaaggcaaaccgattccaagaaggaggagacaatcagtccctccctgaataagacagacgtcatccatggccaggacaagagtgatgtccaaaatacgcagctgacggtggagaccacaaatattgaaggtaccatatcctatcccctcgaagaaacgaagattacacggtactttcctgacgagaccattaacgcttgcaagacaatgaaatcaaggtccttcgtgtactcacgcggtagaaagctggtcggcggagtaaatcaggatgtagagtactcaagtatcacagaccagcagctgacgacggagtggcagtgtcaagtccagaagatcactagaagccacagtacagacatcccatacattgtgtctgaggccgcagtccaggctgagcacaaagaacagttcgccgacatgcaagacgagcaccatgtggcagaggcaattcccaggatcccacgcctcagcctgactatcaccgacaggaatgggatggagaatttgctttccgtgaaaccagaccaaaccctgggttttccttccctgcgctccaagtcattacacggacaccccagaaacgtgaagtcaattcagggtaaactcgaccggtctggtcacgccagtagcgtgtcttcattggtgattgttagtggtatgactgccgaagaaaagaaagttaaaaaggagaaggcaagcaccgaaaccgagtgctag

SEQ ID NO: 31259 - DNA, 4812 bp, synthetic construct
  misc_feature 1..4812: note = Description of Artificial Sequence: Synthetic coding sequence
  source 1..4812: mol_type = other DNA
attaagacttctaagcggtgctgctgtggccagttcaccaaccaacacatcccaccacttccttccgccactccgtcaaagaacgaggaagagtcaaagcaggtcgagacacagcccgaaaaatggagtgtggcaaagcacacacaatcctacccaacggattcctatggagtgctggaattccaaggcggaggctactccaataaagccatgtacatcagagtgtcatacgataccaaaccagattccctgctgcatttaatggtgaaagattggcaactggaactgcccaaattactcattagtgttcacggcggtctccagaactttgagatgcagccgaagcttaagcaagtcttcggtaaaggcctgatcaaagctgctatgaccactggcgcttggatatttacgggaggtgtgtccaccggggtcatctcacacgtaggagacgcattaaaagaccactcaagtaaatctcgaggaagagtgtgcgccattggcattgccccatgggggatcgttgaaaacaaagaagacctcgtgggcaaggacgtgaccagggtgtaccaaacaatgtctaatcccctcagcaagctctccgtgctcaacaacagtcatacccatttcatactcgctgacaatggaacattggggaaatatggagcagaggtgaaattgcggagactcttagagaaacacatctctctgcagaagatcaatacgcgccttggacagggggtgcctctggtgggcctggtggtggagggtggacctaatgtagtttccattgttttggagtacctgcaagaggaaccaccaattccagtcgtaatctgtgacggcagcggtcgggcatccgacattctgtcatttgctcacaaatactgcgaagagggaggcatcataaatgagagtttgcgtgaacaactgctggttacaatccagaagacttttaattacaacaaagctcagtcccaccaattgtttgccattatcatggagtgtatgaaaaagaaagaacttgttaccgtattcaggatgggctctgagggacagcaggatattgagatggcaatattaaccgcgctcttaaaagggacaaatgttagcgctcctgatcagttgtctctggccctggcctggaacagagtggatatagccagatctcaaattttcgtgttcgggccacactggccacccctgggttcactggctccgcctaccgatagcaaagcaaccgagaaggagaagaaaccacccatggccacgactaagggtggacggggaaaaggtaaaggtaaaaagaaggggaaagtcaaagaggaagtggaggaggaaaccgatccacggaagattgagttgctgaactgggtcaatgccctggaacaggcaatgcttgacgctctggttctggatcgcgtggattttgtcaaactgctcattgaaaatggtgtgaacatgcagcattttctgactatacctagactagaagaattgtacaacacacggttggggcctcccaatacactccaccttctggtacgcgacgtcaaaaagtccaacctaccgcctgactatcacatatctctgatcgacatcggccttgttctggagtacctgatgggaggcgcatatcgatgcaactacacacggaaaaacttccgcaccctctataacaatctgttcggaccaaagagacccaaagctttaaagctcctcggcatggaggacgatgagccacccgcaaaagggaaaaaaaaaaagaagaaaaagaaagaagaggagatcgatatagacgtcgatgaccctgccgtgtctcgctttcagtaccccttccacgagctgatggtctgggccgtcctgatgaagaggcagaagatggcggtgttcctctggcaaagaggggaagaatctatggctaaggcactggtggcctgcaaactgtacaaagccatggcccacgagtcaagcgaatcggatctcgtcgacgacatcagccaggacctggacaataactctaaagattttggacagctggcactcgaactgttggaccagagctacaagcacgacgagcaaatcgcaatgaaactcctcacctatgagctgaagaactggagtaacagcacctgtctgaaactagcggtcgcggcaaagcatagagactttatcgctcatacctgttcacagatgttgttgaccgacatgtggatgggacgcctccgtatgcggaagaaccccggtctgaaggtgataatgggtatccttctgccacctactatcctgtttctagaattcaggacttacgacgatttttcctatcaaacttcaaaagagaacgaagacggcaaggagaaagaagaagaaaatacagacgccaacgccgacgctgggagccgtaaaggggacgaagaaaatgagcataaaaaacaaagatcaattcctatcggcacaaaaatttgtgaattttacaacgcgcctatcgtaaagttctggttttacacaatttcctacctgggttacctgctgctgttcaattacgtgattctagtgcgcatggatggttggcccagcctccaggaatggatagtgatttcatacatagtcagcctggccctcgagaaaatcagggaaattctgatgagcgagcccggaaagctgagtcagaagatcaaagtgtggctccaggagtattggaacattactgacctggttgccatcagcacattcatgattggcgcaatcctccggctacagaaccagccttacatgggatacggcagggtgatctattgcgtggacatcatcttttggtacataagggttctggatattttcggggtcaataaatatcttggaccttatgtcatgatgataggtaaaatgatgatcgacatgctgtatttcgtggtgattatgctcgtggtattgatgagcttcggggtcgctcgacaggctattctgcaccctgaagagaagccttcttggaaattagcccgtaacattttttatatgccgtactggatgatatatggcgaagtgttcgccgaccagatcgacctttacgctatggagattaaccctccgtgtggcgaaaatctgtatgacgaggaaggcaaacggctccctccatgtatccccggtgcctggctcactccagctctgatggcgtgctacctgctggttgccaacatattgctagtcaacctgttgattgctgttttcaacaacactttctttgaagttaagagtatctccaatcaggtgtggaaatttcagcgctaccagctgattatgacctttcatgaccggcctgtgctgcccccacccatgatcatcctgtctcatatttatattattattatgagactctcgggacgctgccgcaagaagcgcgagggtgaccaggaagaaagagaccggggactgaagttgtttctttctgacgaagaattaaaacgactccacgagtttgaagaacagtgtgtacaagaacatttccgagagaaggaggatgagcagcaatcttcctctgatgagagaatccgagtgacttctgaacgcgtggagaatatgtccatgaggctagaggagatcaatgaaagagagacattcatgaagacatctctccaaacagtcgatctaagattggcacagctcgaggaactgagcaaccggatggtgaacgccttggagaacttagcaggaattgatagatctgacttgattcaagctcgatcccgagccagttctgagtgcgaggccacttacctgcttcgccagtcctccattaattccgctgacggctattccttgtatcgataccacttcaacggggaggaacttcttttcgaggatacaagcctgtctacatcgccaggcacgggagtacggaagaaaacttgttccttcaggatcaaggaggagaaggatgtcaaaacccaccttgtcccggaatgccaaaatagtctgcacctgtccttgggtactagtacctctgcaactcccgacgggtctcacctcgccgttgacgacttgaaaaatgctgaggagagcaaactggggcctgatatcggcatctcaaaagaagatgatgagaggcaaacagacagtaaaaaggaggaaactatctcccccagtctgaacaaaaccgatgtgatccatggccaggataagagcgacgtccagaacacccagctcaccgtggaaacaacaaacatagaggggacaatctcgtacccacttgaagaaacaaagatcaccaggtacttcccagacgaaactatcaatgcatgcaagactatgaaatcaagatcgtttgtctactcaagggggaggaaactcgttggaggcgtgaaccaagatgtcgagtactcaagtataaccgatcagcagctcacaacagaatggcagtgtcaggtgcaaaaaatcactcgaagccacagcaccgatattccctacatcgtttccgaagcggcagtccaggcagagcataaggagcaattcgccgacatgcaagatgaacaccatgttgcggaagctatcccaaggataccgaggttatccttgacaataaccgatcggaatggcatggagaacctgctctccgttaagccagaccagacacttggttttccctctttgcgctcaaagtctttgcatggtcaccctaggaatgttaaaagcatccaaggaaagctcgaccgtagtggccacgcttcaagcgttagctctctcgtgatcgtctcaggaatgacagcggaggagaagaaagttaaaaaagaaaaggcatcgactgagactgagtgctag

SEQ ID NO: 31260 - DNA, 4812 bp, synthetic construct
  misc_feature 1..4812: note = Description of Artificial Sequence: Synthetic coding sequence
  source 1..4812: mol_type = other DNA
atgaaagactccaacaggtgttgctgtggacagttcaccaatcagcatatccctcctcttccttccgccaccccttctaagaacgaggaggagtccaaacaggtggagacacagccggaaaagtggagcgtggccaagcacacccagagttaccctacagactcctacggggtcttagagttccagggtggaggctactctaataaagccatgtatatccgcgtgtcatacgacactaagcccgacagcctgctgcacctcatggttaaagattggcagcttgagctacctaagctgctcatcagcgtccatggagggttgcagaatttcgagatgcagccaaagcttaagcaggtcttcggaaagggcttgataaaggccgctatgaccactggggcatggatctttaccgggggtgtcagcacgggtgtgatctcacacgttggtgatgccctgaaggatcacagctccaaaagtagggggcgtgtttgtgccatcggcatcgccccatggggtatcgtcgaaaacaaggaggacctggtaggtaaagatgtcacacgagtctaccagacgatgtctaacccactgtccaaactgagcgtgctcaacaactcccacacccactttattttagcggataatggtacgctcggtaagtatggagccgaggtaaaactgcggagacttctggagaagcacattagtctacaaaagatcaatacccgtctggggcagggggtgccattggtggggcttgtggtcgaaggcggtcccaacgtagtgtctatcgtcctggagtatttgcaggaagagcccccaatccctgtcgtaatctgtgatggttcgggtcgcgctagtgatattctgtccttcgctcacaagtactgcgaggagggcggtataatcaatgagtctctgcgtgaacaactgttggtgacaatacagaagacattcaattataacaaggcacagagccatcagctgttcgcaatcataatggaatgcatgaagaaaaaggagctcgtcactgtttttaggatgggctccgagggacagcaagacatcgagatggctatactgacagcacttttaaaagggaccaatgtgagtgctcccgaccagctgagtctggctctggcctggaatagagtcgacatcgctagatctcagatctttgtttttggacctcattggccccctctagggagcctggcccctccaacagactctaaggcaacggagaaggagaagaagcctcccatggcaaccacaaaaggcggacggggtaaaggtaaggggaagaagaaggggaaagttaaagaagaggtggaagaggagacagaccctcggaagatcgagctcttaaattgggtgaacgcccttgaacaggccatgctggacgccctggtgcttgatcgcgtggatttcgtcaagttgctcattgaaaacggagttaacatgcagcactttcttacaattcccagactcgaagagctgtataatacacgcctcgggccaccaaatacccttcacctcctagtccgcgatgtcaaaaaatcaaatctgcctcctgactatcatatttctctgatcgacatcggcctggtgctagaatatctgatgggcggagcctatcggtgcaactacacccggaaaaatttcagaacgctctacaataacctgtttgggccaaaacgcccaaaagccctaaagttgctcggcatggaggacgacgaacctcctgcgaagggaaagaagaaaaagaaaaaaaagaaggaggaggagattgatatagatgtggacgatccagccgtgagccggtttcagtacccttttcacgaactgatggtctgggccgtcctgatgaagcgtcagaagatggctgtgttcctgtggcagcggggagaggagtctatggccaaggctcttgtggcgtgtaagttgtacaaagcgatggcccacgaaagtagcgagtccgacttagtggacgacatctcccaggatctggataataattcaaaagattttggccaactcgcgttagaacttctggaccagtcgtataagcatgatgaacaaatagctatgaagctgctgacctacgaactgaagaattggtctaacagtacatgcctgaagctagcggttgccgctaaacatcgtgatttcattgctcatacatgtagccagatgttattaacggacatgtggatgggccgacttcggatgcgtaagaaccctggtctgaaagtgattatgggcatcctactcccccctacaattcttttcctagaattcaggacctacgacgatttctcataccagacaagtaaagagaacgaggacggcaaagagaaggaagaggagaacacggatgccaacgccgatgccggtagccgcaaaggggatgaggaaaatgaacataaaaagcagaggtccatcccgatcgggaccaagatttgtgaattctacaacgcacctatcgtgaagttttggttctacacaatttcctacttaggctatcttctcctatttaactacgtaatactcgtcaggatggacggctggcctagcctgcaggaatggatcgttatctcatatatcgtgtcactggctctcgagaagatacgcgagattctgatgagcgaacccggaaagttgtcccagaagatcaaggtgtggctgcaggagtattggaatataacagatctcgtggctatcagcaccttcatgattggcgctattctgaggctacaaaaccagccatacatgggctatggacgggtgatttactgcgtggatatcatcttctggtatataagagtcttagacattttcggtgtgaacaaatatttgggcccttacgtgatgatgatcggcaaaatgatgatcgacatgctctacttcgtggtcataatgttagttgttctaatgtcgttcggggtggctcgccaggctatactacaccctgaggagaaaccctcttggaaactagcgcgaaatatcttctacatgccttactggatgatttatggggaggtcttcgccgaccagattgatctgtacgctatggaaattaaccccccttgtggggagaacctgtatgatgaagaggggaaaaggctcccaccatgcattccgggagcctggctgacacctgcactgatggcgtgttatcttctggtggctaatattctgttggtgaatttgctcatcgcagtgttcaataacacattcttcgaggtgaagagcatctccaaccaggtgtggaagttccagagataccaattgattatgacgtttcacgaccgaccagtgctgcccccaccgatgattatcctgtctcacatctatattattatcatgcggctgtctggcaggtgccggaaaaagcgcgagggtgatcaggaagagcgcgaccggggactcaagttgttcctgtccgatgaggaactgaaaaggctgcacgagtttgaggagcagtgcgtccaggaacactttagagagaaggaggatgaacagcagtcatcctccgatgaaaggattcgtgtgacgtcagagcgggtggagaatatgtccatgagacttgaggagattaatgaacgggaaacctttatgaaaacttccctgcagactgtggaccttcgcctggcccagctggaagaattatccaatagaatggtgaatgctctggagaatctggccggtattgacagaagtgatttgatacaagctagatctagggctagttcagagtgcgaggcgacatacctgctccggcagtcaagcatcaattccgcagacggatactccctgtaccggtaccacttcaacggagaagagttgctgtttgaagatacttcgctgtccacgagtcccggaactggtgttagaaagaaaacttgctcatttaggatcaaggaggagaaagacgtcaaaacacatcttgtaccggaatgtcagaattcactgcacttaagtctggggacttccacatccgccacacctgacgggagccatttagcagtcgatgatttgaaaaacgcagaagaaagcaaactcggtcccgacatcggcatctctaaggaagacgatgagagacagactgattctaagaaggaggaaactatctctccttctctcaacaaaacagacgtgatccacggccaagataagtccgacgtgcagaacacacagttgacggtcgagactaccaacatcgagggaacaatcagctacccactcgaagaaacaaagataactcgttactttccagatgaaacgataaatgcatgcaagaccatgaagtccagatctttcgtctactcaagaggccgaaagctggtaggtggagtgaaccaagacgtggaatacagctcaattaccgaccagcagctgacgactgaatggcagtgtcaggttcagaagataactaggtcgcacagcactgacattccatacattgtttccgaggccgcagtgcaggccgaacacaaggagcaattcgccgatatgcaggacgagcatcacgtggctgaagctatcccaaggatccctcgactgagcctgacaataaccgaccggaacggtatggagaaccttttgtctgtgaaaccagaccaaacccttggattcccgagtcttcgcagtaaatcactccacgggcacccacgaaatgttaaatccatccaagggaaactggaccggtccggccacgccagcagtgtcagttcactagtaatcgtctctggtatgacggccgaggagaagaaggtaaaaaaggaaaaggcctctactgagaccgagtgttag

SEQ ID NO: 31261 - DNA, 4929 bp, synthetic construct
  misc_feature 1..4929: note = Description of Artificial Sequence: Synthetic coding sequence
  source 1..4929: mol_type = other DNA
atgagctcctttaagcgcggtagtcttaagagcagtacctccggcagccagaagggtcaaaaatcatggatcgagaagaccttctgcaaacgggaatgcatcttcgttattccctccatgaaggactctaacaggtgctgttgcggtcagttcactaaccagcacattccccctttacccagcgcaacaccttcaaaaaatgaggaagagagcaaacaggtcgaaacgcagcctgaaaaatggtctgtagctaagcacacccaaagctaccctacggattcctacggcgtgctggagttccagggcggtggatacagtaacaaggccatgtatatccgtgtgagttacgatactaaacctgattctctgttgcatctgatggttaaggactggcaacttgaactcccgaagctgctcatttcagtgcatggagggctgcagaattttgaaatgcagcctaaactgaagcaggtattcggcaagggcttgatcaaggccgcaatgactaccggggcatggatatttacaggcggagtcagcactggggtgatatcccatgtgggcgacgctctgaaggaccattcttccaagagtcgtggacgggtttgcgcgattggtattgcgccatggggaatcgtcgaaaataaagaggacctggtgggtaaagatgtgactagagtgtatcagacaatgtccaaccccctgtccaagctgtccgttttgaataattctcacactcattttatcctggcggataatggcacgctgggcaagtatggcgctgaagtaaagctgaggagacttttggaaaaacacatttcgcttcagaaaattaacactcggttaggccagggcgtccccctggtgggcctggtggtggaagggggacctaatgtcgtcagtatcgtgctggagtatttgcaggaggaaccacctattccagtggtgatctgcgatggctcaggtcgggcatcagatatcctgtcatttgcccataaatattgtgaggaaggagggattatcaatgagagtctcagggagcaactcttggtgacaattcaaaagaccttcaattataacaaggcccaatctcaccagctgttcgcaatcatcatggaatgtatgaaaaagaaagagcttgttactgtgttccggatgggttctgaaggtcagcaggatatcgagatggctatactcacagctctccttaaaggcaccaatgtgagtgccccagatcagctttcactggcgttagcctggaatcgcgtcgacatagctcgttcccaaatctttgtgttcggccctcattggcctccactagggtccctggctcctcctactgacagcaaagctacagaaaaagaaaagaagccacccatggccacaactaaggggggtcgaggcaaggggaagggaaagaagaagggtaaggtgaaagaagaggtcgaagaagagactgatcctcgaaagatcgaacttctcaattgggtcaacgccctcgagcaagctatgctcgatgctcttgtgctggaccgtgtggatttcgtgaagctcctgattgagaatggcgtgaacatgcaacactttcttactattccgagactcgaggagctttataacacgcggttgggcccaccgaacacactccatctgctcgttagggacgtgaagaaatcaaacctacctcctgactaccatatttctctcatcgacatcggcctcgtattagagtaccttatgggcggagcctataggtgcaattatacccgcaagaattttaggactctctacaacaacctgttcggccctaagcgtccaaaagccctgaagcttcttggcatggaggacgacgagcccccagctaaaggtaagaagaaaaaaaaaaagaaaaaggaagaagaaatcgatatagatgtggacgacccagctgtgtctagattccagtacccctttcacgagttaatggtctgggctgtgctgatgaagcggcagaagatggccgtgttcctctggcaacggggtgaagagagcatggcgaaggcacttgttgcgtgcaagctatacaaggccatggcgcacgagagcagcgagtccgacctggtggatgatatttcacaggaccttgacaacaattcaaaagatttcgggcagttggcgctggagctacttgatcagtcgtataaacacgatgaacaaatagctatgaagctgctgacctatgagctgaaaaactggtctaattctacttgtctgaagttggccgttgctgccaagcaccgcgatttcatcgctcatacatgcagccaaatgctccttaccgacatgtggatgggtcggttgcggatgagaaagaacccaggactgaaggttattatgggaatcttgcttccacccaccatactgttcctggagttccgcacatacgatgatttctcctatcagacctctaaggaaaacgaggatggcaaggagaaagaggaggaaaatacggacgctaatgcagacgcagggtcccggaagggtgatgaggaaaacgaacacaagaaacagcgttcgatccccattgggactaagatttgtgaattctataatgcaccgatagtcaaattctggttttacacaatctcttatctgggataccttctcctgtttaactacgttattctggtcaggatggacggatggcctagccttcaggagtggattgttatctcatacatcgtcagcttggctctggagaagatccgggagattctgatgtccgagcctggaaaactgagccagaagatcaaagtctggttgcaggaatattggaatatcacagatctggtggcaatcagtacctttatgattggcgctatcttacgtcttcagaatcagccctatatggggtacggaagggtgatttactgtgtggatattatcttttggtacatacgcgtgctggatatcttcggcgtgaacaaatacctgggcccttacgtgatgatgattggcaaaatgatgatagacatgctctactttgtcgttataatgttagttgtcctgatgtcttttggtgtcgccagacaagctatattgcatcctgaagaaaagccttcatggaaactggcacgaaacatcttttacatgccatattggatgatttacggtgaagtatttgctgatcagattgatctctacgcgatggagattaacccgccttgcggtgagaatctctacgatgaggaaggcaaacggctcccaccttgcatccctggggcttggctgaccccagccttaatggcatgctacttgttggtggccaatattctgctggtgaacctcctcatcgcggtgtttaataacaccttttttgaagttaaaagcatttccaatcaggtctggaaattccaaagataccagctgattatgaccttccatgacagacccgtgctcccaccaccaatgataatcctgtctcacatctatattatcattatgcgtttgagcgggaggtgtcgaaaaaagcgcgagggtgatcaggaggagcgggatcgcggactgaagctgttcttgtcggatgaagagttaaagagactccacgagttcgaggagcagtgtgtgcaggagcattttagggaaaaggaggacgaacagcaatcgagctccgatgagcgaattcgcgtgacgagtgagagggttgaaaacatgagtatgcgcttggaggagattaatgagcgcgaaacttttatgaagacatcactgcagacagtagacctcagactcgctcagctggaagaactgagcaaccgcatggtaaacgctcttgagaatctggctgggattgatcggtcagacctcatacaggcccgatcacgagcctcaagtgaatgtgaggccacctatctccttaggcagagttctatcaattccgccgatggctatagcctttacaggtatcacttcaacggcgaggagctcctgttcgaagacacctcacttagtacgagccctgggaccggtgtacgcaagaagacttgtagcttccgcatcaaggaagagaaggatgtcaagacacacctggtccccgaatgccagaacagcttgcacctgtccctgggtacctcaacctccgcgacccctgatgggagtcacctggccgtggacgacctgaaaaatgctgaagaaagcaagcttggaccagacatcggtatctcgaaagaggacgacgaacggcagacagactctaagaaggaggagaccatctctccgtcccttaacaaaacagacgtcattcacgggcaggataaatcagatgtccaaaatactcagctgactgtcgaaactactaatatcgagggtaccatttcataccccttggaggagaccaagattaccaggtattttccagatgaaacaatcaacgcgtgtaaaacaatgaagtccaggtcttttgtatactcgcgcggaagaaagctggtgggcggagtaaaccaggacgtagagtatagctctatcacagaccagcagctgacaaccgaatggcagtgtcaggtccaaaaaattaccaggagccatagcactgacattccttacatcgtgtctgaggcagcggtgcaggccgaacataaggagcagtttgcggacatgcaagatgagcatcacgtggccgaagcaattccacggattccaagactgtccttaacaattactgacagaaatgggatggaaaacctcctatcagtgaaaccggaccagacactaggcttcccctccctgcggtcaaagtctcttcacgggcatccacgcaacgtgaagtccatccagggtaagctggatagatctggccacgcaagctccgtcagcagcttggtgatcgtgagcggcatgaccgctgaggagaagaaagtgaaaaaagaaaaggcttcaacagaaacagagtgttag

SEQ ID NO: 31262 - DNA, 4173 bp, synthetic construct
  misc_feature 1..4173: note = Description of Artificial Sequence: Synthetic coding sequence
  source 1..4173: mol_type = other DNA
atgaaagactcaaaccgctgttgttgtgggcagtttacgaatcaacacatcccgcctttgccttccgccacaccatctaagaatgaagaagagtccaagcaagtggagacgcagcctgagaagtggagcgtggcgaagcatacacagtcctatcccactgactcgtacggtgtactggagtttcaggggggaggctacagcaataaagcaatgtacatcagagtcagctatgacacgaaacccgactctctgcttcatctgatggtcaaagattggcagcttgagctcccgaaattgcttatttctgtgcatgggggtctgcagaactttgagatgcagcccaaactgaagcaggtgttcggcaagggactcatcaaagctgcaatgactactggcgcttggatattcacagggggagtgagcacaggagtcatcagccatgtgggagacgcactcaaggatcacagttccaaatcgcggggaagagtgtgcgcaattggcatcgccccatggggtatcgtggagaacaaggaagatctggttggtaaggacgtcacaagggtttatcagaccatgagtaacccgctgtcgaagctcagcgtgctcaacaatagccacacgcattttatcttggccgacaacggaacattgggtaaatacggtgctgaggtgaagcttaggcgtctccttgagaagcacatctccctgcaaaagatcaacacacgcttaggccaaggcgttcctttggttggcctggtggtcgaaggagggccaaacgtggttagcatagtactggagtaccttcaggaagaaccacccatcccagtcgtgatttgtgatggaagcgggagagcttctgatatcttgtccttcgcacataagtattgtgaggaagggggtattatcaatgaatcactgcgagaacagcttctcgtcaccatccaaaagacatttaactataataaagcgcaaagccatcagctcttcgccataatcatggagtgtatgaagaagaaggagctggtgacggtgttcagaatggggtctgaaggacagcaggatatcgaaatggcaatattaaccgccttactcaaggggacaaatgtctcggctcctgatcaactgagtctggccttagcctggaaccgggtggacatagcaagatcccagattttcgtgtttgggccacactggcctccactaggttccctcgccccacctacggacagcaaagctaccgagaaggagaagaaaccgccaatggcgaccactaaggggggtcgaggcaaggggaagggaaagaagaagggaaaagtgaaggaagaagttgaagaagagactgatcccaggaagatcgaactcctgaactgggtgaacgcactggagcaggctatgcttgatgctctagtcctggacagagtcgatttcgtaaagctcctaatagaaaatggagtgaacatgcaacactttctgacgattcccaggctcgaggaactttataatacaaggctgggaccaccaaatacgctgcatcttctcgtgcgagacgtgaaaaagagcaacttgcccccagattaccacatcagtctgattgacattggcctcgtgttagaatacctgatggggggtgcgtataggtgcaattacactcgtaaaaacttcaggacactttataataacctgttcgggcctaagaggcccaaggctctgaaactgctgggcatggaggatgacgagcccccagcaaagggcaagaagaaaaaaaagaagaagaaagaggaggagattgatattgatgtcgatgaccctgccgttagcaggtttcagtacccgtttcatgaactaatggtgtgggcagtccttatgaaaagacagaagatggcggtctttctgtggcagaggggagaggagagcatggccaaggctctcgtggcttgcaaactatataaggccatggcacacgaatcctctgaatccgatctggtcgacgatatcagccaggatttagataacaatagtaaagatttcgggcagctcgctctcgagctgttggatcagtcgtacaagcacgacgaacagatagctatgaagcttctcacctatgagcttaagaattggagcaactccacgtgcttaaagcttgctgttgccgctaagcaccgggactttattgcccatacatgctcccagatgctgctaaccgacatgtggatgggcagattacggatgagaaagaatcctggcctgaaagtgatcatgggcattctactgccccctacaattctgttccttgagtttcggacgtatgatgatttttcttatcagacctccaaagagaatgaggatggtaaagaaaaggaagaggaaaataccgacgcgaacgcggatgccggaagcaggaagggtgacgaagaaaacgagcataagaaacagaggtctattcctatcggaaccaagatttgtgaattctacaacgcacccatcgtgaaattttggttttataccatttcttaccttggttaccttctgcttttcaattacgtgattctggttcgaatggatggttggccatcgctgcaggaatggatcgtcatctcttatatcgtgagtctagccctcgaaaaaatccgggagatcctcatgtccgagcccggaaagctgtctcagaaaatcaaagtgtggctccaggagtactggaacataactgatcttgtcgccatatctaccttcatgattggcgcaattcttaggttgcagaaccagccctatatgggctacggcagggtgatatactgtgtagacatcatcttttggtatattcgcgtcttagatattttcggagttaacaagtatctggggccatacgtaatgatgattgggaagatgatgatagacatgttatatttcgtggtcatcatgttggtggtgctcatgagtttcggggtggcacgccaggccatcctccatccggaggagaagcccagttggaagctggctagaaacatcttttacatgccctattggatgatttacggtgaggtattcgcggaccagattgacctgtacgccatggagatcaatcctccttgcggcgagaacttatacgatgaagaaggtaagcgtcttcccccatgcattccgggagcctggctaactccagcactgatggcatgttatttactggtcgccaatattcttctggtgaacctcctgattgcagtttttaacaacacgttctttgaagtgaaaagcatttcaaaccaggtgtggaagttccagcgttatcagctgattatgactttccatgacagacccgtgttgcctcctcccatgatcattctctctcacatctacattataatcatgcgtttaagcggcaggtgccgcaaaaaaagggagggcgaccaggaagaaagagatcggggacttaaacttttcctctctgacgaggagctaaagagattacacgagttcgaggaacagtgcgtccaggaacactttagggaaaaagaggatgaacagcaatctagtagcgatgagcgaattcgggttacatccgagcgggttgaaaatatgagcatgagacttgaggaaattaacgagagagagacatttatgaagacctctctgcagaccgtggatctgcgcctggctcagctcgaagagctcagcaatagaatggtgaacgctctggagaacctcgctgggatcgataggagtgatctaattcaggcgcgatcacgggcttcaagcgagtgtgaggcaacctatctgcttcgccagtctagtataaattcggcagacggctattcattgtatcggtatcatttcaatggagaggagctgctgtttgaagacacctcgctctccactagtccgggaactggcgtaaggaagaagacatgcagttttaggattaaagaagagaaagacgtgaagacccatcttgtgcctgagtgtcagaactccctacacctctcactaggcacaagcacctctgcaacgccagacggctcccacctggccgtagatgacctgaagaatgccgaggaatctaaactgggacccgatatcggcatcagtaaggaagacgacgagcgacaaacagacagcaagaaagaggaaactatctcgcctagcctgaataaaaccgatgtcattcacgggcagtag

SEQ ID NO: 31263 - DNA, 4584 bp, synthetic construct
  misc_feature 1..4584: note = Description of Artificial Sequence: Synthetic coding sequence
  source 1..4584: mol_type = other DNA
atgtacattagggttagctacgacaccaagcctgatagtttgttacacctgatggtaaaagattggcagttagaactgcctaaactgctaatctctgttcacggcggacttcagaattttgagatgcaacctaaactgaagcaggtcttcggcaaggggctgattaaagccgctatgaccacgggagcgtggatcttcaccggtggagtctccaccggcgttatcagccacgtgggcgatgcactaaaggaccactcttccaagagccgcggaagagtctgtgctatcgggattgccccttgggggatcgtggagaataaggaggatctcgtgggcaaggacgttacccgagtttatcagactatgagcaatcccctctcaaagctctccgtgctcaacaacagccacacgcacttcattctggccgataatggtactcttggcaagtatggagccgaggtaaagctgcgccgtttattagaaaaacacatctcactgcagaaaatcaataccagactgggccagggtgtgcctctggtgggattggtggtcgaggggggtcccaacgtggtgtctattgtgctagaatacctgcaggaggaaccacctattccagtagttatatgcgacggatccgggagggcctccgatatcctgtcattcgcacataagattattaacgaaagcctgcgtgaacagctgctcgtgacaatccagaaaacctttaattacaacaaagcccagagccaccagctgtttgccattatcatggagtgtatgaagaagaaagagctggtcacagtattcaggatgggaagcgaaggccagcaggatatcgagatggccatactgaccgccctgctcaaaggcacaaatgtctctgcaccagaccagctgtcgctcgcgctcgcctggaatcgcgtggacatcgcccgatcccaaatctttgtgttcgggccacactggcctcccctgggctcacttgcgccaccaaccgacagtaaagcgaccgagaaagaaaaaaagcccccaatggcaaccacaaagggagggcgtgggaaaggtaagggcaagaaaaaagggaaggtcaaggaagaagtggaagaagaaacagacccccgtaagattgagctcctaaactgggttaacgctttggaacaggcaatgctggacgcccttgttcttgatcgcgtggattttgtgaaacttcttatcgagaatggcgtcaatatgcagcatttcctaacaattcctcgcctagaagagctgtataacaccaggctcgggccacccaataccttgcatctcctcgtccgggatgtgaagaagagtaatcttccccctgattaccatatcagtctgatagatataggattagttttggaataccttatggggggagcataccggtgcaactacacacggaagaattttaggacgttatacaataatttgttcggtcccaagagaccaaaagccttaaaacttctaggaatggaggatgacgagccaccagccaaaggcaagaagaagaaaaagaaaaaaaaggaagaagagatcgatattgacgtcgatgaccccgctgtgtcgagatttcagtatccctttcacgagcttatggtctgggccgtgctgatgaagcggcaaaagatggctgtgttcctgtggcagagaggggaagaatcgatggccaaagctctggtggcttgcaaattatataaggccatggctcatgaaagctctgagtcagacctggtcgacgacatttcccaggacctcgacaataattcaaaagattttggacagttggcactggagctgctagaccagagttacaagcacgacgaacagatcgccatgaagctgctgacgtacgaactgaaaaactggagtaactccacttgccttaaattagccgtggctgccaagcaccgggacttcattgcccatacctgctctcaaatgctgctgaccgacatgtggatgggccgattaagaatgcgtaagaaccccggattgaaggtgatcatgggaatcttacttcctcctacaattctgtttctcgagttcagaacctacgacgatttcagctaccagacatccaaagagaatgaagatggtaaagagaaggaggaagagaacaccgacgccaacgccgacgccggtagtcggaagggcgatgaggagaatgagcataagaaacaacggagcatcccaataggaacaaaaatctgcgagttctacaatgccccaatcgtaaaattttggttttacaccataagctacctgggttatttgctactttttaattacgtcatactcgttaggatggatggatggcccagcctccaggaatggatcgtaatctcttacattgtgagcctggcgttagagaagataagggagattcttatgtcagaacctggtaaactgagtcagaagattaaagtgtggcttcaggagtattggaatatcaccgatctcgttgcgataagcacgttcatgattggggctatcctcaggcttcagaatcagccttatatggggtacggccgagttatctactgtgttgacattatcttctggtacattcgtgtgcttgacatctttggagtgaataagtatctgggaccctatgttatgatgatcggaaagatgatgatcgatatgctttactttgtggtgatcatgctggtcgtattgatgtcctttggagtcgcccgacaagcgattctgcatccagaggaaaagccgtcatggaagctggctcgaaacatcttttacatgccttactggatgatttacggggaggttttcgctgatcagatagacctatatgcaatggagatcaatcctccgtgtggcgaaaatctctacgacgaggaggggaaaagacttccaccctgtatccccggagcttggttgacccccgcactcatggcttgctacctcctcgtcgctaacattttgctggttaatcttttgatcgccgtcttcaataacacgttcttcgaggttaaaagtatcagtaatcaggtctggaagttccaacgttatcagctgatcatgacatttcacgatcgacccgttctcccgcctcctatgattattctttctcacatatacattatcattatgcgcttaagcggcaggtgtcggaaaaagcgtgaaggcgaccaggaggagagggacagagggttaaagttatttctctctgatgaggagctcaaaagactgcacgaattcgaagagcagtgcgtgcaagagcactttagagagaaggaggacgaacagcagagcagttcagatgaaaggatccgagtgacttcagaaagggtggagaatatgagcatgagactcgaagagatcaacgaaagggaaacgtttatgaagacatctctgcagacggtggacctccggctggctcagctcgaggagctgtccaaccggatggttaatgccctagagaatctggctggaattgaccgctcagatcttatacaggcccgatcacgtgctagctccgagtgcgaggcgacctacctgctgcgtcaatcctccattaactccgcagatggctactcactctacagataccactttaatggggaggagttgctgttcgaagataccagtttaagcaccagcccaggcacgggagtgaggaagaagacctgttcttttcggattaaggaggagaaagatgtaaagacacacttagtaccagaatgccaaaacagcctgcatctaagtctaggtacaagcaccagcgcaaccccagacgggtctcacctggccgtcgacgatctgaagaacgcagaggaatcgaaactgggacctgacataggtatttctaaggaggatgacgagcggcagacagattccaagaaagaggagactatctctcccagcctgaataagacggacgttatccacggacaagacaagagcgacgtgcagaacacacagctgaccgtggagacgaccaatatcgaagggacgatctcctatcctctcgaggagacaaagataacgagatacttcccagatgagactattaacgcttgcaaaaccatgaagagcagatcattcgtctactcacgtggaagaaagctggtagggggagtaaaccaggatgtcgaatattcgtctatcaccgatcagcagttgaccaccgagtggcaatgtcaggtacagaagataacccggagccactccacagacatcccctatattgtgtcagaagctgccgttcaggctgagcataaggaacaattcgctgacatgcaggatgagcaccatgtggcagaggctatcccgaggatccctcgcctctccctgacgataactgatcggaatggtatggagaatcttttatccgtgaaacctgatcagactctcggctttccatccttgaggtcaaaaagcctgcacgggcaccctcgaaatgtcaaaagcatccaggggaaactggatcgttctggacacgcttcatcagtaagtagcctggtgatcgtgtctgggatgactgccgaggagaaaaaagttaagaaagagaaagcgtccaccgaaacagagtgctag

SEQ ID NO: 31264 - DNA, 1479 bp, synthetic construct
  misc_feature 1..1479: note = Description of Artificial Sequence: Synthetic coding sequence
  source 1..1479: mol_type = other DNA
atggccttgaatagtggtagtcctcccgctatagggccttattacgaaaaccatggataccagccagaaaatccctatcctgcccagccaacagtggtgcccaccgtgtatgaggtacatcccgcacaatattaccccagccctgttcctcagtacgccccaagggtgctcacacaagcctctaacccagtcgtgtgcacccaaccaaaatccccatcaggaacagtgtgtacgagtaagacgaaaaaggccctgtgtatcacattaaccctcgggacttttctcgtcggtgcagccctggctgctgggctgctgtggaagtttatgggatctaaatgtagcaattccggcatagaatgtgattcctcgggcacttgcatcaacccctcaaactggtgtgacggggtgagccactgtccgggaggcgaagatgaaaatagatgtgtgaggttgtacgggcctaactttatcttgcaggtgtactcctcccagagaaagagctggcaccccgtgtgccaggacgattggaacgagaactatggccgagccgcatgtcgcgacatgggttataagaataacttctactcttctcaaggcattgtcgacgattccggcagcacctcctttatgaagctgaacacctctgcgggtaacgtagacatttacaagaaactgtaccattccgacgcatgttcctctaaagctgtagtatccttgcggtgtatagcctgtggcgtgaacctgaatagcagccgacagtcccgcattgttggaggcgaaagcgctcttcccggtgcgtggccatggcaggtgtctcttcacgtgcagaacgttcacgtctgcgggggtagcatcattacacccgagtggattgttaccgcagcacattgcgttgaaaagccactaaataacccttggcactggacagccttcgcaggaatcctaagacaaagtttcatgttctacggagctggataccaggtagaaaaggtgatcagtcaccctaactacgactccaaaacaaagaataatgatattgctctgatgaaactgcagaaaccattaaccttcaacgatcttgtgaagcccgtgtgccttcctaatcctggaatgatgctccaacctgagcaactttgttggatttccggctggggtgccaccgaagagaaaggcaaaacaagcgaagttctgaacgcggcaaaagtgttgctaatcgagacacaaagatgcaattcaagatacgtctacgacaatctgattaccccggctatgatttgcgctgggtttttacagggtaatgtcgactcttgtcagggtgatagcggcggacctctggttacttccaagaacaatatctggtggttgatcggcgatacatcgtgggggagcggttgcgctaaagcctatagaccaggcgtgtacggcaatgtgatggtttttaccgattggatttacaggcagatgcgggctgatggttag

SEQ ID NO: 31265 - DNA, 1590 bp, synthetic construct
  misc_feature 1..1590: note = Description of Artificial Sequence: Synthetic coding sequence
  source 1..1590: mol_type = other DNA
atgcctcctgcaccccctggaggggagtccggctgtgaagaaagaggtgccgctgggcatatcgaacacagtcggtatctttccttattggacgccgtagataattctaaaatggctctgaacagcggcagtcctcctgccatcggtccttactacgagaatcatgggtaccagcctgaaaacccttacccagcccaaccaacggtcgtacctacggtgtacgaggtgcaccccgcacagtactatcctagtcctgtcccgcaatacgctccaagagtccttacgcaggcttctaatcccgttgtgtgtacccagccaaagtcaccatcgggaaccgtctgcactagcaaaaccaaaaaggccctgtgcatcacactaacactgggtacatttctcgtgggggcagcgctggccgcaggcttactgtggaagtttatgggtagcaagtgcagcaattctggcatagagtgcgattcatcaggtacatgtattaacccttcaaattggtgtgacggagtcagtcactgccccggaggagaagatgagaatcggtgcgtacgcctctacggcccaaatttcattctccaggtgtacagcagccagaggaagagttggcatcctgtctgccaagatgattggaacgaaaattatggaagggcagcttgccgtgacatggggtacaagaataacttttacagcagtcaaggcatagtagacgactcagggtcaacctccttcatgaaactgaacaccagcgccggaaatgttgatatctataagaaattgtatcattccgacgcgtgttccagcaaggcagttgtgtccctccgctgtatagcctgcggggtgaatctgaactcctcgcggcagtcccgcatcgtgggtggagagagcgctctccctggtgcttggccttggcaagttagtctgcatgtgcagaatgtgcacgtctgtggaggaagcatcatcacgccagaatggatcgttactgcagctcactgcgtggaaaagcccctgaataatccttggcattggacggcttttgctggtatcttgagacagagttttatgttctacggggcaggctatcaagtggagaaagtcatttcccaccccaactacgactcaaaaacaaaaaataacgacattgctttgatgaagctgcagaaaccgctgactttcaacgatcttgtcaaaccagtgtgcttgccgaatcccggaatgatgctgcagccggaacagctgtgctggatcagtgggtggggggcaacggaggagaagggcaaaacctcggaggtgctgaatgcagccaaggtcctcctcattgagacacagagatgtaacagtcgatatgtttacgataacctaattacgccagccatgatctgcgccggatttctccaggggaatgtcgactcatgccaaggtgacagcgggggacctctggtgacaagcaagaataacatctggtggctgataggcgatacatcctgggggtcaggctgtgcaaaagcgtatcggccaggggtttatggcaacgtaatggtgttcacggactggatctataggcagatgcgggctgatggctag

SEQ ID NO: 31266 - DNA, 1470 bp, synthetic construct
  misc_feature 1..1470: note = Description of Artificial Sequence: Synthetic coding sequence
  source 1..1470: mol_type = other DNA
atggccttgaattctggaagtccccctgctattgggccatactacgaaaatcacggttaccaaccggagaacccctacccagcacagcccacggttgtccctacagtgtacgaggtgcacccagcccaatactatccttctcccgttccacagtacgcgccacgggtgctgacgcaggctagcaatccagtagtgtgtacgcagccaaagagcccaagcgggaccgtttgtacgagtaaaacaaaaaaagccctgtgtatcacactgactctggggaccttcctggtgggcgcagccctggctgcgggattgttatggaaattcatgggctccaagtgcagtaactccggaattgaatgtgactccagcggaacctgtataaatccctccaactggtgtgatggtgttagccactgccccggaggagaggatgagaaccgctgcgtgaggctgtatggacctaatttcatattacaggtttatagtagtcagcggaagtcttggcatcctgtatgccaggatgattggaacgagaattatggaagggcagcgtgccgagatatgggatataaaaataatttttattcctcccagggcattgttgacgattccggctcgactagcttcatgaaactcaacacttcagctggaaacgtggatatctataagaagttataccatagtgatgcttgctcctccaaagcagtggtttccctgagatgtatcgcttgtggtgttaacctgaattcctcacgccagagccgcatcgtcggcggagagtctgcactgccaggcgcatggccatggcaggtctctcttcacgtgcaaaacgtacacgtatgtggaggctcaataatcaccccggagtggatcgtgacagcagcccactgcgttgagaaacccctcaataatccctggcactggactgccttcgctggaattctgagacaatctttcatgttttacggagctgggtatcaggtggaaaaagtcatttcacatcctaactatgacagcaagacaaagaacaatgatatcgccctcatgaagctgcagaaaccattaacctttaatgacctggtgaagcccgtgtgcctaccaaaccctgggatgatgctacagcccgaacagctgtgctggattagtggctggggtgcaaccgaggagaagggcaagaccagcgaagtccttaatgccgcaaaggtgttgcttattgagactcaaaggtgcaattccaggtacgtgtacgataatctgattactcccgctatgatttgtgcaggttttctccagggcaacgtggatagttgccagggagacagtggcggacccctcgtaacttcaaaaaataacatctggtggctcataggagacacctcctgggggagcgggtgcgccaaagcttacagaccaggagtatacggaaatgttatggtgtttacagattggatttatagacaaatgaggtag

SEQ ID NO: 31267 - DNA, 240 bp, synthetic construct
  misc_feature 1..240: note = Description of Artificial Sequence: Synthetic coding sequence
  source 1..240: mol_type = other DNA
atggccctgaacagcgggtcgcctcctgcaatcggcccttattatgaaaaccacgggtatcagcctgagaacccatatcccgctcagcccactgttgtgcctaccgtgtacgaggtccaccctgctcagtattacccttcacccgtgcctcagtacgccccaagggtgctgactcaagcctccaatcctgtggtgtgtacacagccaaagagcccctccggtacggtctgtacctcctag

SEQ ID NO: 31268 - DNA, 1479 bp, synthetic construct
  misc_feature 1..1479: note = Description of Artificial Sequence: Synthetic coding sequence
  source 1..1479: mol_type = other DNA
atggcgctgaactctggctctccaccggctatcggcccatattacgaaaaccacggctatcagccagaaaatccttacccagcccagccgacggttgtcccaacggtgtatgaagtccatcctgctcaatattacccctccccagtgccccagtatgctccaagggtgttaacgcaggctagtaaccccgtcgtctgcacccagcccaaatccccctccggtacggtctgcacaagcaagacaaagaaggccctgtgtatcacactgaccctcggcaccttccttgtgggggcagccttagccgctggcctgctgtggaaattcatgggaagcaagtgttccaattcaggaatcgaatgtgattccagcggcacgtgtatcaacccaagtaactggtgtgatggggtcagccactgtccaggaggcgaggacgagaaccgatgcgtccggctgtacggacctaattttatcctgcaggtgtactcttcccagcgaaagtcctggcacccagtctgccaggatgattggaatgagaattacggccgtgctgcgtgccgtgacatggggtataaaaacaatttctactcctctcagggcattgtggacgactcgggcagcacatcgttcatgaagttgaacacttccgctggcaacgtcgacatctataagaagctgtatcattccgatgcttgctccagcaaggctgtcgtgtccctgagatgcattgcgtgtggggtgaacctaaacagctcccgtcaatctcggattgttggaggggagagcgctttaccaggggcttggccctggcaagtgtccctccatgtgcagaatgtgcatgtctgcggaggatccataattacccccgagtggatcgtaactgccgctcactgcgttgaaaagcctctgaacaacccgtggcattggaccgccttcgctgggatcctgaggcagagcttcatgttttatggcgcaggctatcaggtggagaaggtcattagtcacccaaactatgacagtaaaactaagaataacgatatagccctgatgaagttgcagaaacccctgacgtttaatgacctcgtgaaacccgtttgtctccccaaccccggtatgatgttgcagcccgaacagctctgctggatatccggatggggtgcaacagaggaaaaaggtaaaacctctgaggtgctgaacgctgctaaagtcctgctgattgaaactcagaggtgcaactctaggtacgtgtacgataatctgattactcctgcgatgatttgtgcaggttttctccaggggaacgttgatagctgtcagggggatagcgggggtccactggtaacctccaagaacaacatctggtggttgataggggacacctcttggggcagcggctgtgcaaaggcttatcgacctggcgtttacggcaacgtgatggtttttacagactggatttaccgtcagatgagggcagacgggtag

SEQ ID NO: 31269 - DNA, 717 bp, synthetic construct
  misc_feature 1..717: note = Description of Artificial Sequence: Synthetic coding sequence
  source 1..717: mol_type = other DNA
atgtacgcgccagggggtgcagggctacccggagggagaaggcgcaggtctcctgggggatccgcactgcctaagcagcccgagagatctctcgcctccgccctgcctggcgcactgtccattactgccctctgtaccgctctggctgaacctgcttggctgcatattcatgggggaacttgctccagacaggaactgggagtcagcgatgtgttgggatacgtgcatcccgacctgctgaaggacttctgtatgaacccgcaaactgtgttgcttttgcgggtgatcgcagccttctgctttctgggcatcctttgttcgctctccgcttttttgttagacgttttcggtccgaagcacccagcgcttaagatcacacgcagatatgcgttcgcgcacattctgacagtactgcagtgcgcgacagtgatcggtttttcttattgggcctccgaactaattctggctcaacagcagcagcataaaaagtatcatgggagccaggtctatgtaacattcgcagtgtccttctacctcgttgccggtgccggtggagcatcaattctggccactgcagctaacctgctgcggcattatccgacagaagaagaggaacaggcactggaactcctgagcgagatggaagagaacgagccataccccgcagagtatgaggttattaaccagtttcagccccctcccgcatacacaccatag

SEQ ID NO: 31270 - DNA, 717 bp, synthetic construct
  misc_feature 1..717: note = Description of Artificial Sequence: Synthetic coding sequence
  source 1..717: mol_type = other DNA
atgtacgcgccaggcggagctggcctgccaggaggcaggaggaggcggtcacctggaggaagcgccctcccaaagcagcctgagagatcactggcatctgctctgccaggcgctctgtcaattaccgctctgtgcactgctctggcagagccggcttggctgcacatccatgggggaacttgctctaggcaggagctgggcgtgtcagacgtgctgggttatgtgcaccctgatctgctgaaagacttctgcatgaaccctcagaccgttcttctcctgcgcgtgattgctgctttctgttttctggggatcctctgctctctttctgcctttctcctcgacgtgtttggtccaaaacatcctgccctgaagataacacgcaggtatgctttcgctcacatcttgacggtcttacagtgcgccacagttataggattttcctattgggcctctgaactcattttagctcagcagcagcagcacaaaaaataccacggttcgcaagtctacgtgacatttgctgtgagcttctacttggtcgccggtgcaggtggtgcatccattctggcaaccgcagcaaacctgttgcggcattaccccacagaggaggaagaacaggcactggaactgctctcagaaatggaggagaatgagccctacccagctgagtatgaggtgataaaccaatttcagcccccaccagcctacactccgtag

SEQ ID NO: 31271 - DNA, 3075 bp, synthetic construct
  misc_feature 1..3075: note = Description of Artificial Sequence: Synthetic coding sequence
  source 1..3075: mol_type = other DNA
atgtgtgctcgcatggcaggtagaacaactgctgcccctcgtggaccctatggcccttggttgtgcctgctggtcgccctcgcactggacgtggtgcgggtggattgcgggcaggcccctctcgaccctgtgtatttacctgcagcactcgagctgctggacgccccagaacatttcagggttcagcaggtgggccattatccccctgctaactctagcctcagttctaggagtgaaaccttcctgctgctccagccgtggccacgagcacagcccctgctcagagccagttatcctcctttcgcaacccaacaagtggtacctcctcgcgtgactgaaccgcaccaaaggcctgtcccctgggatgtacgggctgtgtctgttgaggcagctgtgaccccggctgaaccatacgctcgggtgctgtttcacctcaaaggacaggattggcctcccggtagcggttcattgccgtgtgcacgactccatgcaacacaccctgctggcactgcccatcaggcatgtaggtttcagccatcactcggcgcttgcgtggtggagttggagcttccctctcattggttctctcaagcttcaaccacgagggcggagctcgcttacactctggaacccgcagctgaggggcctggaggatgcggctcaggagaagagaatgaccccggtgaacaagccctcccagttgggggagtggaattgaggcctgccgatcctccgcagtatcaggaagtccccctcgatgaagcggtgaccctccgcgtcccagacatgccagtgaggcctggccagctttttagcgccaccctcctgctccgtcacaactttaccgcttctcttttgaccttgcgtattaaggtgaaaaagggactgcacgtgactgcagccaggcccgctcagccaaccttgtggaccgcgaagctcgacaggtttaaaggttctcgacaccacactaccctcataacttgccatagggccggactaacagaaccagactcctcaagtcctctggagttgagtgaattcctctgggtggatttcgtggtggagaatagtacagggggaggtgtcgccgtgacacgccctgtgacgtggcaattagaatatcctgggcaggctcccgaagctgaaaaggacaaaatggtctgggaaattctcgtgagtgagagagatatccgggcactgatccctcttgccaaagctgaggagcttgtaaataccgcgcctctgacaggggtaccccagcacgtccccgttagactggtcaccgtggatggtggtggggcactggtcgaagtgaccgagcacgtaggctgcgagagcgctaacacacaagtgctgcaggtgagcgaagcgtgtgacgctgtttttgtcgcgggtaaggagtctcgaggcgctcgcggagtgagggttgatttctggtggcgtaggctccgggcaagcctgcgcctgactgtgtgggcgcctctgcttccattgagaattgagctcaccgacacaactcttgaacaagtgagaggttggagggtgccgggtccagccgagggaccagccgagcccgcagctgaggccagtgacgaagctgagaggcgtgcccgaggctgtcatctccagtaccaaagggcaggcgttcggttcctggccccttttgccgcacatcccctcgacgggggaaggcgactgacccacctgctcggcccagactggctccttgatgtatcccacctagtcgctccccatgcccgagtgcttgactcccgcgtggctagcttggagggaggcagagtcgtggtcggacgtgagcctggagtcacctctatcgaggtgcgcagcccactgagcgatagcattctcggcgagcaagcgctggccgtcaccgacgataaagtatcagttctggagctgagggtgcagccagtgatgggtatcagtctgacactctctcgcggtaccgcccatccgggagaagtaactgctacttgctgggctcagtcagcactgcctgctcctaagcaagaggtggccttgtctctctggctgtccttcagcgatcacaccgtagccccagctgagctctacgatcgccgagacctgggactgtcggttagcgccgaagagcccggtgcaattttaccagccgaggagcaaggcgcacagctaggagttgtggttagtggggctggggctgaaggccttccgctacatgtcgctttacatcctccggagccatgcagacgaggccgtcatcgggtcccactggcatccggaactgcctggctgggcctgcctcctgcttcaacaccagccccagcattaccgagtagtccagcctggtctccgcctgctaccgaggcaaccatgggtgggaagaggcaagtggctggaagcgtcggtggcaacacgggcgtccggggaaaatttgaacgggcagaggaggaggccagaaaggaggagacggaggctcgggaagaggaagaggaggaggaagaagagatggtacccgcacctcaacatgtcaccgagcttgagctcgggatgtatgcgcttcttggagtcttttgtgtcgctatttttatatttctagtgaacggcgtggttttcgttctgaggtaccagcggaaggagccacccgactccgccactgatccaacctccccacagccccacaattgggtctggctgggcactgatcaggaagagttgagcaggcaacttgaccgccaaagcccaggcccacccaaaggcgagggcagctgtccttgcgaatctggcggaggcggagaggctcccaccctggcacccggtccgccaggaggcactacttcttccagcagtacgttggctcgaaaggaggctgggggacgaagaaagcgagtggagttcgtgaccttcgctcctgcccctccagcccaatcacctgaagagccagtgggggcaccagctgtccagagtatcctcgtggccggtgaggaggatattcgttgggtctgtgaggatatgggattgaaagaccctgaagagttgcgcaactacatggagaggatccgaggctccagttag

SEQ ID NO: 31272 - DNA, 3072 bp, synthetic construct
  misc_feature 1..3072: note = Description of Artificial Sequence: Synthetic coding sequence
  source 1..3072: mol_type = other DNA
atgtgcgcacgaatggcagggagaactactgcagctccgagaggcccatatggaccctggctgtgtctactggtagccctggccttggatgttgtgagggtagactgcggacaggccccattagatccagtgtacctacccgctgcactggaactgctggacgcccctgagcattttagagtgcaacaggttggccactaccccccagctaattcttccctgtcaagcagatctgaaaccttccttttgctgcagccttggccaagagcccagcccttgctgagggcatcttatccaccttttgcaacgcaacaggtggtcccaccccgtgttacagagccccaccagagacccgttccatgggacgtccgggctgtttccgtagaagccgctgtcactcctgccgaaccttacgccagggtgctcttccatttgaagggccaggattggccacctggttctgggagccttccctgtgctcgactccacgccacacatccggctggcacagcacatcaggcatgccggttccagccatctctcggcgcatgtgtggtagaactggaacttcccagccactggttctcccaggcttccacgactcgggcagagctggcctatacgctggaacctgccgcagaaggaccaggaggatgtggttcaggagaagaaaatgatcccggtgaacaggcattgccggtgggaggtgtggaactgcggcctgccgacccccctcagtaccaagaggtgccactggacgaggcagtgaccttgagagtgccagatatgcccgtccggccaggccagctgttcagcgctacactgctcttaaggcacaactttaccgcctctttgctgactctgcgcatcaaggttaaaaagggtctccatgtgacagctgcgagaccagcacagccaacgctatggacggcgaaactcgacagattcaaagggtcacggcaccacacaacactgattacatgccaccgcgcaggtctaacagaacctgatagcagccccctggagctgtcagaattcctttgggtcgactttgtcgtcgagaactcaacgggaggaggcgtggctgtgactaggcctgtcacttggcagctggagtacccagggcaggcaccagaggctgagaaagataagatggtatgggagatcctcgtgtccgaaagagacatcagagctctgatcccactagcaaaagctgaagagctggtgaacaccgccccactgacgggcgtacctcagcatgtgccagtccggttagtgactgttgatggtgggggtgctttggtcgaggtcacggagcacgttggttgtgagtctgccaacacccaggtactgcaagtgtctgaggcctgtgacgccgtgttcgtcgcaggaaaggagagccgcggagcaagaggagtgagggtcgatttctggtggcgccgactgcgcgctagcctcagactcactgtctgggccccattactgcctctgcgtattgagctgacagacacaactctggagcaggtcagagggtggcgggttcccggacccgctgaaggtcccgcagagcctgccgcagaagctagtgatgaggcagagcggcgtgcccgtggctgccacctgcagtaccaacgggctggtgttcgcttcttggccccttttgctgcacatccgttggatgggggacgacgtctgacccatctgctgggcccagattggttgctggacgtctcacacctggtcgcaccccacgctagagtactggactccagagtggcctctctggaagggggtcgtgtggttgtggggagagagccgggtgtcacttccatagaagtgcgctctcctctgtccgatagcatcttaggagagcaggccctggccgtcaccgatgacaaggtaagcgttttagagttgagagtacagccagttatgggtatctccctgaccctgtctcgaggtacagcccaccccggagaggtgacagctacatgctgggcccaatccgccttaccagcacctaagcaagaggtagccctttcactgtggctgtcattcagtgaccatacagtggctccagccgagctctacgaccggagagatttgggcctgagcgttagcgccgaggagcccggagctattctccccgctgaagagcagggcgcacagttgggggtcgtggtcagtggggctggagcagaaggccttccgctccatgtcgccctgcaccccccagagccctgccgaaggggcaggcacagagtgccgctcgccagcggaaccgcctggctggggctccctcccgcttctacgcccgcacccgctctgccttcatcacccgcttggagccctccggcaacagaggccaccatgggaggaaagaggcaagtggcgggtagcgtgggtgggaacaccggagtcagaggtaagttcgagcgagcagaagaggaggctcgcaaggaagagacggaggctagagaggaggaagaagaggaggaagaggaaatggtaccggctcctcagcacgtgactgaattagaactcggtatgtacgcattgctgggagttttctgcgtcgctatcttcatcttcctcgtgaacggagtggtcttcgtgctccgatatcagcgcaaagaacccccagacagtgccaccgatccaacctccccacagccacacaattgggtatggttagggaccgatcaggaggaactatctagacagctcgacagacagagtcccggacctcccaagggagaaggctcctgtccttgtgaaagtggagggggaggtgaggcccctacgctggccccagggcctcccggtgggacaacttcttctagttcgacactagctaggaaagaggcaggcggacgtcgcaagcgcgttgaatttgtaacatttgccccagcacctcccgctcagagtccagaagaaccagttggagctcccgctgttcagagtatcctggtggcgggagaggaggatatccgttgggtgtgcgaggacatgggtctgaaagatcctgaagaactgcgcaattacatggagaggatccggggtagctcttag

SEQ ID NO: 31273 - DNA, 1026 bp, synthetic construct
  misc_feature 1..1026: note = Description of Artificial Sequence: Synthetic coding sequence
  source 1..1026: mol_type = other DNA
atgctccctgagcagctctactttttacagtctccccctgaggaagagcctgagtaccacccagatgccagcgcacaggagctaaatgtacgggagtccgatgtgcgagtttgtgacgaatcgtcttgtaagtatggcggtgtgtgtaaggaggatggagatggactcaaatgcgcttgccagttccagtgccacactaattatattcccgtgtgcggttccaacggagatacataccaaaacgagtgcttcttacggagagccgcttgtaaacatcagaaagaaatcactgttatcgctcgcggtccgtgttactccgataatggctctggaagtggcgaaggcgaggaggaaggttcaggcgcagaggtgcatcgcaaacacagtaaatgtggcccttgcaaatacaaagcggagtgtgacgaagatgccgagaatgtgggctgcgtatgcaatatcgattgttccggatactcattcaaccctgtctgcgcttcggacggctcctcttataataatccctgcttcgttagggaggcctcgtgcattaaacaggaacaaatagacatccgtcatcttggacattgcactgacaccgatgatacctctttactgggaaaaaaggatgatggacttcagtatcgacctgacgtcaaagacgcatcagatcagagagaagatgtctacataggcaatcatatgccttgcccagagaacctgaatggttattgcattcatgggaaatgtgagttcatctacagtactcaaaaggcatcttgcagatgcgagagcggttataccggccagcattgtgagaaaaccgatttttccatcctctatgtcgtgcccagccgacagaaactgacccacgttcttattgccgcaatcatcggcgcagttcaaattgccatcatcgtcgcgatcgttatgtgtattactcggaagtgccccaaaaacaacagagggcgtaggcaaaaacagaacctcggtcatttcacttctgacacatcttctcgaatggtgtag

SEQ ID NO: 31274 - DNA, 1143 bp, synthetic construct
  misc_feature 1..1143: note = Description of Artificial Sequence: Synthetic coding sequence
  source 1..1143: mol_type = other DNA
atgggggctgcagctgcagaggcgccactccgactgcccgctgctccccctcttgcattctgttgctacacttctgtgttacttttgttcgcctttagccttcccggtagcagggcgtcaaaccaaccacctgggggagggggtggtagcgggggagattgcccagggggtaaaggcaagtctattaactgttccgagcttaacgttagggaaagcgacgtcagagtttgcgacgaatcatcatgtaagtatggcggagtctgcaaagaggacggtgacggtttgaaatgtgcctgccagtttcaatgccacacaaattacattcccgtctgcggcagcaatggagacacctaccagaatgaatgcttcctccgcagggcagcatgcaagcatcagaaagaaatcaccgtcatcgcgagagggccatgctactctgataacgggtctgggtctggcgaaggggaggaagagggatctggggctgaagtccataggaagcatagtaagtgcgggccatgtaagtataaagctgaatgtgatgaggacgcggagaatgttggttgcgtgtgtaacattgactgctccggctattcctttaatcctgtatgtgctagtgacggctctagctacaataacccatgttttgttcgtgaagcttcgtgcatcaaacaggaacagattgacatcagacacctcgggcactgtactgatacagacgataccagcctgctcggcaagaaggacgatggtcttcagtaccgcccagacgtgaaagacgcgtcagatcagcgtgaagacgtgtacattggcaatcacatgccttgccccgaaaaccttaatgggtactgtattcatggtaagtgtgaattcatctacagcacacagaaagcctcatgtagatgcgagagtggctacacaggccagcactgtgaaaagaccgatttctcaatcctgtacgtggtgccatcccggcaaaagctcacccacgtcctaattgctgctatcattggtgcagtgcaaatagccattattgtggcaatcgtcatgtgtattactagaaagtgtcccaagaataacagaggacgtcggcagaaacagaacctcggccattttacgagcgacacatctagtagaatggtctag

SEQ ID NO: 31275 - DNA, 393 bp, synthetic construct
  misc_feature 1..393: note = Description of Artificial Sequence: Synthetic coding sequence
  source 1..393: mol_type = other DNA
atgcaggagcgaaccggggcagccacagcccgtcgagagagcctaccccaggcgaacaacccagagcaactgtgtaaacagcgatgcataaatgaggcctcatggacaatgaagagagtcctaagctgcgtacctgagcccaccgtggttatggcagcccgagcattatgtatgctcgggctcgtgctggcgctgttatctagttccagtgccgaggagtatgtgggactgagcgccaatcagtgcgctgtaccagctaaagatagggtggactgcggctatccccatgtcacaccgaaagagtgcaataacagggggtgttgtttcgattcaaggatcccaggagtgccctggtgcttcaagccccttcaggaagcagaatgtacattctag

SEQ ID NO: 31276 - DNA, 285 bp, synthetic construct
  misc_feature 1..285: note = Description of Artificial Sequence: Synthetic coding sequence
  source 1..285: mol_type = other DNA
atgaaaagagtgttatcttgtgtgccggaaccaacggtggttatggctgccagggccttatgcatgctcggactagtcttggccctgctcagctcatcatccgctgaggagtacgtgggactgtcagcaaaccaatgtgccgtgccagcaaaagaccgagtggattgtggctaccctcatgtcacccctaaggaatgcaataatcgcggttgttgctttgactcgagaatcccaggtgtgccgtggtgcttcaaaccactccaagaggcggagtgtactttttag

SEQ ID NO: 31277 - DNA, 1497 bp, synthetic construct
  misc_feature 1..1497: note = Description of Artificial Sequence: Synthetic coding sequence
  source 1..1497: mol_type = other DNA
atggctctccctactctccccagctactggtgttcacagcaacgactgaaccagcagctggcccgtcagcgggagcaagaggcaaggctgcgtcagcagtgggagcagaattcacggtattttcgcatgagtgatatatgcagcagcaagcaggcagaatggagcagtaagacaagttatcagcggtccatgcacgcataccagcgagagaagatgaaggaagagaagcgacgatcactggaggccaggcgcgagaagctccgtcaactcatgcaggaagagcaggatctgttggccagggagctagaggaacttcgcttgtctatgaatttacaagagcgacgaatacgggagcagcacggaaagttgaagtccgccaaggaagaacagcggaagctgatcgccgaacagttactgtacgagcattggaagaagaacaaccctaagctaagggaaatggaacttgacctccaccagaaacacgtggtcaatagctgggagatgcagaaggaagagaagaagcagcaagaggccacagcggagcaggaaaataaacgatacgaaaacgaatatgagcgggctaggagagaggctctggagcgcatgaaagccgaggaggaaaggcgacagctggaagacaaattgcaggcggaggctctgctgcagcagatggaggagctaaagcttaaagaagtagaagctacgaaactcaagaaagagcaggagaacttgctcaaacagcgctgggagctcgaaagactggaggaggagcggaaacagatggaggcattccgccaaaaggctgagcttggacgattcctccggcaccaatataacgcccaactgtcccgaagaacccagcagatccaggaggagcttgaagccgaccggaggattctacaagcactgctcgagaaagaggatgaatcacagcgattacatctggccaggagggagcaggtaatggcagacgtcgcgtggatgaagcaggcaatagaagagcagttgcaacttgagagggccagagaagccgaactgcagatgctgctcagggaagaggccaaggagatgtgggaaaaacgagaggcagaatgggctagagaaaggtccgcacgagaccgcctgatgtcagaggtcttaaccgggcgacagcagcagatacaggagaagatagagcagaaccggagggcacaggaggagagcttgaagcaccgcgagcaactcatcagaaatttagaagaagtacgggagttggcccgtcgagagaaagaggagtctgaaaagctgaagtccgcaagaaaacaagagttagaggcacaggtggctgaaagaaggctacaagcctgggaggcagaccaacaggaagaagaagaggaagaggaagccagacgcgtcgaacagctgtctgatgccctgctgcagcaggaagcagaaacaatggcagaacagggctacagaccgaaaccctacggccaccccaagatcgcttggaattag

SEQ ID NO: 31278 - DNA, 1497 bp, synthetic construct
  misc_feature 1..1497: note = Description of Artificial Sequence: Synthetic coding sequence
  source 1..1497: mol_type = other DNA
atggcactcccaacactccctagctactggtgtagtcagcagaggcttaaccagcagttggctcgacagcgggagcaggaggccagactgcgtcagcagtgggagcagaacagcaggtacttccgaatgagtgacatttgctccagcaagcaggccgagtggtcaagtaagacatcgtaccagcgatcaatgcacgcatatcagcgggagaaaatgaaggaggagaaacggagatctttggaagctcgacgcgagaaactgcgacaactgatgcaagaggagcaggacttgctcgccagggagttggaagagttacggctgagtatgaacctacaagagcggagaataagggagcaacacggaaagttgaaatccgccaaagaggagcagagaaaactgatcgctgagcagcttctgtatgaacattggaaaaaaaataacccaaaactacgcgaaatggaactggacctgcatcaaaagcatgttgttaattcatgggaaatgcaaaaggaagagaagaaacagcaggaagctacagcagagcaggaaaataagaggtatgaaaatgaatatgagcgcgcacggagagaggcacttgaaaggatgaaagccgaggaggaaaggcggcagctcgaggacaagctgcaagccgaagccctcctccagcaaatggaggaactgaagctcaaagaggtggaagccaccaagctcaagaaggaacaggagaatctcttaaagcagagatgggaactggaacgcctcgaggaagagcgtaagcaaatggaggcattccggcagaaagctgagttaggaagattccttcggcatcaatataatgcacagctgtcccgaaggacacagcaaattcaggaggaactggaagcggaccgccgtatcctgcaggctctgctggagaaagaggacgagtctcagcggctgcatctggcgcgtcgagagcaggtgatggccgatgtagcctggatgaagcaggctattgaagaacagttgcagctggagagagcacgggaggcagaacttcagatgcttctccgcgaagaagccaaggagatgtgggaaaagcgggaagctgaatgggccagagaaaggagcgcgagggataggttgatgagtgaggttctgactgggaggcagcagcagatacaggaaaagatcgagcagaacagacgcgcacaggaggaaagcttgaagcacagagagcagttgatccgaaacctcgaggaggtgcgggaacttgctcgcagggagaaggaggaatcagagaagctaaagagtgcacggaagcaggaattagaggcacaggtcgccgagagaagactccaggcgtgggaggccgatcagcaggaggaggaggaagaggaagaagcacgaagggttgaacagctgtccgatgcactgctgcaacaggaggccgagacgatggccgagcagggctacagacctaagccttacggccacccaaaaatcgcctggaactag

SEQ ID NO: 31279 - DNA, 525 bp, synthetic construct
  misc_feature 1..525: note = Description of Artificial Sequence: Synthetic coding sequence
  source 1..525: mol_type = other DNA
atggccctgccaacgctaccgagttactggtgttcccaacagcggttaaatcagcagctggccaggcaacgcgagcaggaggccagactccgacaacagtgggagcagaattcacgctatttcagaatgtctgacatatgcagctctaaacaagctgaatggagcagcaagacaagttaccagaggtctatgcatgcttaccagcgagagaagatgaaggaagaaaaaagacgaagcttggaggcccgacgggaaaagctcaggcagctgatgcaggaggagcaggacctacttgccagggaactcgaggagcttcgtctctcgatgaaccttcaagagagacggatccgtgaacaacatgggaagttaaagagcgctaaggaggagcagagaaagttgattgctgagcagctgctctacgaacattggaagaagaataaccctaaacttcgggaaatggagctggacttgcaccagaaacacgtcgtgaatagttgggagatgcagaaagaagagaagaagtag

SEQ ID NO: 31280 - DNA, 663 bp, synthetic construct
  misc_feature 1..663: note = Description of Artificial Sequence: Synthetic coding sequence
  source 1..663: mol_type = other DNA
atggccctgcctaccctaccttcctattggtgtagtcagcagagactgaatcagcagctcgcaagacagcgggaacaggaggccaggcttaggcagcagtgggagcagaattctagatactttaggatgagcgacatatgttcctcaaagcaggctgagtggagctcaaagacttcctatcaaagaagtatgcacgcctaccaacgggagaaaatgaaggaggagaagcgcaggtcgctggaggccagaagagagaaattgcggcagctcatgcaggaagaacaagaccttctggcaagggaactcgaggagctcagactgtctatgaatcttcaggaacgcaggattagagagcagcacgggaagctaaaaagcgcaaaagaagaacaacggaagctgattgccgaacagctgctgtacgaacattggaagaagaacaatcccaagttgcgggagatggagcttgatctccaccaaaaacatgtcgtgaatagctgggaaatgcagaaggaggaaaagaagcagcaggaagctacagccgaacaagagaacaagcggtatgaaaacgaatacgagcgagcaagaagagaggctctagagcggatgaaggctgaagaggaacgcagactgagtcggacagatggtcacaaacgcaatccatag

SEQ ID NO: 31281 - DNA, 1497 bp, synthetic construct
  misc_feature 1..1497: note = Description of Artificial Sequence: Synthetic coding sequence
  source 1..1497: mol_type = other DNA
atggcattgcctaccctgccaagctattggtgttctcagcaacggctcaaccagcagcttgctcgtcaacgggagcaggaggccagactgcgccagcagtgggagcagaatagcagatactttaggatgagcgacatttgcagcagcaaacaggcagagtggtcctctaagacgagttaccagaggtccatgcatgcatatcagcgcgagaagatgaaagaggaaaagcgacggagtctcgaagccaggagggagaaacttagacagcttatgcaggaggagcaagacctgctcgcgagggaactcgaggaattacgtctttcgatgaatctgcaggagcgaagaatcagggagcagcatggtaagcttaagagcgccaaggaggaacaacgtaaattgattgctgagcagctgctctatgagcactggaaaaagaataatccgaagctgcgcgaaatggagctggatttacatcagaagcacgtggtcaactcttgggagatgcaaaaggaagagaagaagcagcaggaggcaacagcagagcaggagaataaaaggtacgaaaatgagtacgaacgcgctcgaagagaagcgctggaacgcatgaaggcagaagaggagcgcagacaactggaagataaactgcaagctgaagccttgctccagcagatggaagaacttaagcttaaagaggtagaagctactaaacttaaaaaggagcaggagaacctcctgaaacaaaggtgggaacttgagcgactggaagaggaaagaaaacagatggaggcattccggcagaaggctgaactggggcgatttctgcgccaccagtataatgcgcagctgagcaggcgcacccagcaaattcaggaggaactagaagccgatcgcagaattctgcaggccctgttggaaaaggaagatgagagtcagaggctgcatcttgctcgacgggagcaggtcatggccgatgtggcttggatgaagcaagcaattgaggagcaactacaactggaacgcgcacgggaagcagagcttcagatgctcttgcgcgaagaggctaaggaaatgtgggagaagagagaggccgaatgggctagagagaggagcgcgcgagacaggcttatgagtgaagttctgacgggaagacagcagcagatacaggagaaaatcgagcagaatcggagagctcaggaggagtccctgaaacaccgcgagcagctgatacggaatttagaagaggtgcgggagctggcaagacgtgaaaaagaagaatcagagaagctaaaatctgctcggaagcaagagctggaggcccaggtcgccgaacgaagactgcaggcctgggaagccgaccaacaagaggaggaagaagaagaggaggcacgcagggttgagcagctgtcagatgcactcttgcaacaggaggccgagacgatggcagagcaagggtaccggcctaaaccctacggtcaccccaagatcgcttggaattag

SEQ ID NO: 31282 - DNA, 3090 bp, synthetic construct
  misc_feature 1..3090: note = Description of Artificial Sequence: Synthetic coding sequence
  source 1..3090: mol_type = other DNA
atgcagactaatgaaggcgaggtctccgaggagagcagttccaaagttgaacaggaggactttgtgatggagggacatgggaagactccgccaccgggagaggagtccaaacaggagaaggaacaggaacgggaagagcaactcatggaggacaaaaaacggaagaaggaagataaaaagaagaaagaggcgacccagaaagtcacagaacaaaagacaaaagtgcctgaagtgacaaaaccttcactaagccagccaaccgcggcatctcctataggcagcagcccttccccgccagtaaacgggggaaataacgctaagagagtggccgtccctaatggacaacccccatccgccgctcgctacatgcctagagaagtcccacctaggttccgctgtcagcaggatcacaaggtgctcctgaaaaggggtcagcctcctccaccttcctgtatgctccttgggggtggagcgggacccccaccatgcaccgcaccaggggcaaaccccaataatgcgcaggtcactggggctttgctacagagtgagtcaggaaccgctcctgtgtggtcgaagagtactcctcccgctccagacaatgggacgtccgcatggggcgaacctaatgaatcctcccccggatggggcgaaatggatgacacaggtgcctctacgacagggtggggtaacacaccagctaacgcccctaacgcaatgaagccgaactcgaagagcatgcaagacggctggggggagagtgatggtccagtaaccggagcccgacatccctcctgggaggaagaggaggacggtggagtgtggaacaccactggatcacaagggtctgcctctagccacaatagcgcttcatggggacaggggggtaagaagcagatgaaatgttcactcaaaggcggaaataatgactcgtggatgaatcccctggcgaagcagttctccaatatgggtttactgtcacagactgaagacaacccatcctctaagatggacttatcagtggggtcactgtccgacaagaagttcgatgtggacaaaagggcgatgaacctgggagattttaatgacattatgcgaaaggacaggtctggtttcaggcccccaaattctaaagacatggggacgactgacagcggcccttacttcgaaaaaggaggaagccatggcctttttggcaactccaccgctcaatcaagaggcctgcatactcccgttcagcccttaaactcttctcctagcctacgggcacaggttccaccacaatttatcagtccacaggtttccgctagcatgctcaagcaatttccaaatagcggcctctctcctggcctatttaatgtcgggccacagctcagtccccagcagatcgctatgctgtctcagctgccgcagataccccagtttcagttggcctgtcaattgctcctccagcagcaacagcaacagcagttgctgcagaaccagaggaagattagccaagcagtgcggcagcagcaggagcagcagctggccagaatggtatctgcccttcagcaacagcagcagcagcagcagcgccagcctggtatgaaacacagtcctagccaccccgtagggcctaagccgcatctggacaacatggtgcccaacgccttaaacgtgggcctgccagatctccaaacgaaaggccctatacccggttacggcagtgggtttagttcaggtgggatggattacgggatggtcggagggaaagaagcaggaactgagagcagattcaagcagtggacatcaatgatggaagggctcccttccgttgcaactcaggaggcaaatatgcataagaacggggcaatcgtggcccctggtaagacgcgcggaggttctccctacaaccagtttgacatcatccccggagatacgctcggcggtcacacaggaccagcaggggattcctggctcccagcgaagtctccaccaacaaataagatcggctcgaagtcttccaacgcctcttggccccctgagttccagcccggagttccttggaaggggatccagaacatcgaccccgagagtgacccatacgtgactcccggttccgtcctggggggaactgccacctcaccaattgtggacactgaccatcagttgctgagagacaacaccactggtagcaacagttctctgaataccagcctgcctagtccgggagcctggccctacagtgccagtgacaattccttcacaaacgtgcattctacctcagccaaattccctgactacaaatctacttggagtcctgatccaattggacacaatcccacacatctgagtaacaagatgtggaagaaccacatctcgtcacggaacacaacgcctcttccaaggccaccccctgggctgacaaatcctaaaccttcctctccttggagttccaccgcacccagaagtgtccgtggatggggtacacaggactctcggctggcctccgcttccacttggagcgacggagggtccgttagaccttcttactggcttgtgttacacaacctgacccctcaaatagacggcagtactctgcggacaatttgcatgcagcatggccctctgctcacattccacttaaatctcactcagggaaccgccctgataagatacagtaccaagcaggaggcagccaaggcacagaccgccttgcatatgtgtgttctgggcaacaccacgatcctagcagagttcgcaacagatgacgaggttagccggttcttggcgcaggctcaacctcctacccccgcagccaccccttccgcaccagccgctggctggcagtccctggagaccggacagaaccagagcgaccctgttgggcctgcattaaacctttttggtgggagcacaggactgggtcagtggagtagctccgctgggggatcatcaggcgctgatctggctggagcctccctatggggcccaccaaattattctagctctctttggggagtgccaaccgtggaggatccccaccgcatgggcagcccagcacccctcctgcccggagaccttctgggcggtggtagcgactctatttag

SEQ ID NO: 31283 - DNA, 5171 bp, synthetic construct
  misc_feature 1..5171: note = Description of Artificial Sequence: Synthetic coding sequence
  source 1..5171: mol_type = other DNA
atgagggagaaagagcaggagagagaagagcagctcatggaggacaagaagcgcaagaaggaagataaaaagaaaaaagaggcaacacagaaagtgacagaacagaaaaccaaggtgccagaggtgactaaacctagcttgtctcagcccaccgcagcaagtcctatcgggagcagcccttctccccctgtgaatggaggcaataatgccaagcgcgtggccgttcctaatggtcaacccccatcggcggctagatacatgcccagggaggtaccaccacgctttcgttgccagcaggaccataaagtacttctcaaacgcggtcagccccctccaccatcttgtatgcttctaggtggcggtgcaggcccacccccttgcacagccccaggggcaaatcctaataacgcccaggtgaccggcgctcttctgcagagcgagagtggaaccgcgcctgactccaccctgggaggggcagccgctagtaattacgcaaattcgacatggggcagcggggcatcttccaacaacggtacatccccaaacccaatccacatttgggacaaggtcattgtcgacggatctgacatggaggaatggccctgcatagccagtaaagatacagaaagctcctcagagaatacaacagacaacaattccgcctctaaccctggcagcgagaagtctaccctgccaggttctaccactagcaacaaaggtaagggaagtcagtgccagagcgccagttctgggaatgaatgcaatcttggagtctggaaaagcgatcctaaagccaagagcgtgcagtcctctaatagcactacggagaacaacaacgggcttggaaattggcggaatgtgagcggccaagataggatcggacccggatcgggattctcaaacttcaacccaaactctaacccatctgcctggcctgccctggtccaggaaggtactagcaggaagggcgcactggagaccgacaatagcaacagttctgctcaagtctcaaccgtcggccaaaccagtcgggagcaacagagtaaaatggaaaacgccggagtgaatttcgtagtgagcggccgagagcaggctcagattcacaatacggacgggccaaaaaatggcaataccaattcactgaacctgtcctccccaaaccctatggagaacaaaggaatgccctttggaatgggactgggcaacacatccaggtccaccgatgcaccaagtcagtctactggcgatcgcaagaccggaagcgtgggatcatggggcgctgctcgcggtcccagcggcacagacaccgtgagcggccaatccaatagtgggaacaacggcaacaatggcaaagagcgagaggatagctggaaaggggcttcagtgcaaaaatccaccggatcaaaaaatgattcttgggataacaacaatcgaagcactggcggatcttggaacttcgggcctcaggactcaaatgacaacaagtggggcgaggggaataagatgacttccggcgtctcccagggcgagtggaaacaaccgactgggagcgacgaactaaagattggtgaatggtcaggcccaaaccaacccaactcatcaactggcgcttgggacaaccaaaaggggcaccccctccctgagaaccagggcaacgctcaagctccgtgctggggccgatcctcttctagcaccggttcggaagtaggtggtcaatccactggcagtaaccataaagccggatcctccgactctcacaattcgggcagaagatcttatcgaccaactcaccctgactgccaggctgtgctccaaactctattaagcaggacagacctggatccaagagtgttgtctaataccggttggggtcagacacagattaaacaagataccgtgtgggacattgaagaggtgcccaggcccgaaggcaagtccgacaaagggaccgagggatgggagtcagctgcaactcagaccaaaaactccggaggttggggcgatgccccatcccagtccaatcagatgaaaagcgggtggggcgagctgagtgctagcaccgaatggaaagatcctaaaaataccggcggatggaacgattacaagaataacaacagtagtaattggggcggagggaggccggatgaaaagaccccatcaagttggaacgaaaacccttccaaagatcagggctggggagggggacggcaacccaaccaggggtggagcagtggaaagaacgggtggggcgaggaggttgatcagaccaaaaattccaactgggaatcctctgcgagcaagccggtatccggttggggagaaggcggacagaatgagatcggaacctgggggaacgggggaaacgcttcactggcatcgaagggtgggtgggaggactgtaagcggtcacccgcttggaacgaaacaggcagacagcccaattcctggaacaaacaacatcaacagcagcagccccctcagcagccacctcccccacagcccgaggcaagtggcagttggggaggaccgccaccaccaccacctggaaatgtgagacctagcaattcttcctggtcgagcgggcctcaacctgccaccccaaaagacgaggaaccctccgggtgggaggagccttcccctcagagcatctcaaggaaaatggatatcgatgatgggactagcgcatggggggacccgaactcttacaattacaagaacgtgaatctatgggataaaaatagccaggggggaccagcccctagggaacccaatctgccaactccaatgacatccaaatctgcaagtgactccaaatcaatgcaggatggttggggtgaatcagacggtccagtgaccggggctcgccacccttcgtgggaggaggaagaggacggaggagtgtggaacacaacgggtagccagggatcagcctctagccacaactccgccagctggggccaggggggtaagaagcagatgaagtgctcgctcaagggaggaaacaacgactcatggatgaaccctctagccaagcagttctctaacatgggactcctttcacagaccgaggacaaccctagcagtaagatggatcttagtgtgggatcgctgtccgacaaaaagtttgatgtagataagagggcaatgaaccttggcgactttaatgacatcatgcgaaaagacaggtccggatttcgccctcctaatagcaaagatatgggcaccacagactcggggccttacttcgagaaaggcggtagccatggactgttcggtaattcaactgcacagtccagagggcttcacactcccgtacagccactgaattcctctccatccctgcgggcacaggttccccctcagttcatatctccccaggtctctgcaagtatgctcaagcagtttccaaactctggcctctcccctggactcttcaatgtgggtccacagctgtctccccagcagattgccatgctttcacagttacctcaaattcctcagttccagctcgcctgccagttactgctccagcagcagcaacagcaacagctgcttcagaatcaacgaaaaatctctcaagccgttcgccagcagcaggagcagcagttagcacgtatggtaagtgctctgcaacagcagcagcagcaacagcagcgacagcccggtatgaagcactctccaagccatcccgtgggtcctaagccccacctagacaatatggtcccgaacgcacttaatgttggcttacctgatttgcaaacaaaaggtcccatccccggatacggaagcgggttcagttctgggggtatggactatggtatggtcgggggaaaggaagcaggaactgagagtcggtttaagcagtggacaagtatgatggagggtctgccctctgtcgccacccaggaggctaacatgcataaaaatggggcaattgtcgccccaggtaagacaagggggggatctccttacaaccaattcgatattattccgggtgacacgctggggggacatacaggacccgctggggactcatggttaccagccaaatccccacccaccaataagattggatcaaagtccagtaatgcttcgtggccgcctgaattccaacctggcgtgccatggaaagggatccagaacattgaccctgaatccgatccatacgtgactccaggctctgtgctggggggaaccgccacaagccctatcgtggacactgaccatcagcttctgcgtgataatactacaggtagcaatagctcactcaatacaagcttgccatcgccaggcgcttggccttactcagcctccgacaacagttttactaacgtccactctacctcggccaaattcccggactataagagtacctggtcccctgaccccatcgggcacaatcctactcatctgtcaaataaaatgtggaaaaaccacatttcgtcccgcaacactactcctttgccccgtccgccaccgggactgacaaacccaaagcccagctcaccttggtcatctaccgctcctagatcagtgcgaggatgggggacccaggacagccgcctggcaagtgcctccacttggtccgacggaggttcagttagaccctcttattggctagtgttgcacaatttgaccccacaaatcgacggttccacgttgagaaccatttgtatgcagcatggtccactgcttacatttcatctgaacctgacccagggcacagcgttgatccgctatagtaccaaacaggaggctgcaaaggcccagaccgcactgcatatgtgtgtattaggcaatacaaccatcctggccgagttcgctaccgacgatgaggtatctagatttttggctcaagcccaaccccctaccccagcagccacaccctctgcacctgcagccggttggcaaagcctcgagactggccaaaatcagtccgatcccgtcggcccagcccttaatcttttcgggggatcaactggcctgggacagtggagctccagtgccggtggatccagcggtgcggatttggccggtgcgtccttgtggggtcccccaaattactcctcttccctgtggggcgtccccacagttgaggacccccaccgcatgggttcacctgcccctcttttaccaggtgacctgctggggggaggcagcgactcaatcta

SEQ ID NO: 31284 - DNA, 5171 bp, synthetic construct
  misc_feature 1..5171: note = Description of Artificial Sequence: Synthetic coding sequence
  source 1..5171: mol_type = other DNA
atgcgtgagaaggaacaagaacgcgaagagcaactgatggaagataaaaagagaaaaaaagaagacaaaaaaaagaaagaggcgacacaaaagcatagtaaccagaaaaccgccatgcccgaggttaccaagccctctctgtctcaaccaaccgccgcaagtccaattggaagctcaccgtccccgcctgttaacgggggtaacaacgcaaagcgagtggcagtgcccaacgggcagcccccatccgccgcacgctacatgcctagggaagtgccccctcggtttaggtgtcagcaggatcacaaggtgctcctgaagcgcggtcagcctcctcccccatcatgcatgctgttgggcggaggcgctggtcctcctccctgcacggcacctggtgcaaaccccaataacgcgcaggtcaccggggctctgcttcagtcggaaagtgggaccgctcccgacagtacgctaggtggcgctgcggcttcaaattacgccaactctacctgggggagtggagcaagctcaaacaatggcaccagccccaaccctatccacatttgggacaaggtcatcgtcgacggttccgacatggaggagtggccatgcatcgcaagtaaggatactgagtccagttccgaaaacacgactgataacaatagcgcctccaatcccggttctgaaaagagcaccttacccggaagcactacctcaaataaaggtaagggctctcaatgccagtcagcctctagcgggaatgaatgtaatcttggtgtgtggaagagcgacccaaaggccaaaagtgtccagagctccaactctactacagaaaacaataacggtctgggtaattggcggaacgtctctggccaagatagaattggccctggctccggattttctaactttaaccccaactctaacccatctgcttggcctgcactcgtacaagaagggacctctcgaaaaggagcattggaaaccgataactcaaattctagtgcccaagtgtctacagttggccaaacttccagggaacagcaatcaaagatggagaatgctggagtgaacttcgttgtgtctggccgtgagcaagctcagatacataacacggacggccctaaaaacggcaataccaatagtctgaacctgagcagccccaaccccatggagaataaaggaatgcccttcgggatgggcctcggtaacacaagcaggtcgacagacgccccttctcagagcaccggtgatcggaagactggaagtgtcggcagctggggggcagcccgagggcctagcggtactgataccgtaagcggccagtccaactccggcaacaatggaaataacggaaaggagagggaggatagctggaagggcgcatccgtgcagaaaagtaccggctctaaaaacgatagttgggacaacaacaacaggagtacagggggttcctggaattttggaccacaagactcaaacgataataagtggggcgagggtaacaagatgacctctggcgtgagccagggcgagtggaagcagcctacaggatccgacgagttgaaaatcggggagtggtcaggacccaaccaacccaatagctccactggtgcctgggataatcagaagggtcacccactgcccgaaaatcagggaaatgctcaagccccttgttgggggcgatcatcctcctctacgggcagcgaggtggggggtcagtcaaccggatccaaccataaggcaggcagcagcgacagtcataattctggacggagatcatacagaccaacacaccctgactgtcaagccgtgctgcagactttgctgtccagaactgacttagacccacgcgtgctgagcaacaccggatggggccaaacccagatcaagcaggataccgtgtgggacattgaggaagttcccaggccagagggcaagagtgacaaagggactgagggctgggagtctgccgctacgcaaacaaaaaattctggcggttggggtgacgccccttcacaatctaaccagatgaaaagtggatggggagagctctcagccagtacagaatggaaggacccaaagaacactggcggttggaatgactacaagaataacaacagttccaactggggaggaggcagacctgatgaaaaaaccccctcctcatggaatgagaatccgtctaaggatcagggctggggaggcggaagacagccaaaccaaggctggagcagcgggaagaacggctggggagaagaagtggaccagacgaagaacagcaattgggagtcttctgcatccaagccagtctccgggtggggcgagggtggccagaatgagatcgggacatggggcaacggcggaaacgctagcctggcctccaagggtggttgggaagactgcaagcggtctcctgcctggaacgaaacaggacgccagccaaattcttggaacaagcaacaccagcagcagcagccacctcagcagccgcctccccctcaacctgaggcctccggctcatggggaggcccaccaccccctccccctggcaatgttaggccatcaaactcctcctggtcgtccgggcctcagccggcaacgccgaaagacgaggagccttcagggtgggaggagcccagcccccagagtatatccaggaagatggacatagatgatgggacgagcgcctggggggatcctaattcatataactataagaatgtgaacttgtgggataagaattctcaaggtgggccagcccctagagagcctaaccttccaacccctatgacatccaagtccgcatccgatagtaagagcatgcaggatggctggggggaatcagatggtcccgtaacaggcgctaggcatccttcttgggaggaagaagaggacggaggagtgtggaatacaaccggcagtcagggttccgctagctctcataattctgcttcgtggggtcaaggaggtaaaaaacagatgaagtgttctctgaaagggggaaacaacgatagctggatgaatccactcgccaaacagttctctaatatgggactcctttctcaaacagaggacaacccctcctcgaagatggacctgtcggtggggtccttatctgacaaaaaattcgacgtggacaaacgggcaatgaacctgggcgatttcaatgatattatgcggaaggaccggtccggcttccgcccaccaaacagtaaggatatgggaaccacggattcaggcccttactttgaaaaaggtgggtcacacgggctctttggcaactcaacagctcagtccaggggactacatactccggtacaacccctgaacagtagcccatccctccgggcacaggttccaccccagtttatttcaccacaggtttcagcctccatgctgaagcagttcccgaacagcggtctctctcctggcctgtttaatgtggggccacaactgtccccccaacagattgccatgctgagtcaattgccccagatcccccagtttcaattggcttgtcagctcctgctgcagcagcagcagcagcagcaattactgcagaatcagaggaaaatatcgcaggctgtgcgccaacagcaagagcagcagctggcccgaatggtgtcggctctgcagcagcagcagcagcagcagcagaggcaacccggaatgaagcacagtccttcacatcccgtgggtccaaagcctcacttggataacatggttccgaacgccctaaatgtgggtctgcctgacttacagacgaagggccctatcccaggttatgggtctggtttttctagcggaggtatggattatggcatggtcggcggtaaggaggctgggactgaaagcaggttcaagcagtggacatcaatgatggagggacttcccagcgtggcaacccaagaagcaaacatgcacaagaacggagcaattgtggctcctggtaaaaccaggggcggaagcccctacaaccagtttgatatcattcctggcgacacattgggtggccataccgggccagccggagactcttggctccctgctaagtcgcctcctacaaataagataggatctaagagtagcaatgcttcttggccacccgaattccagcccggagttccctggaagggcatccagaacattgatccggagtcggatccctacgtgacgcccggaagcgtgctcgggggaacagctacgagccccattgtcgacactgatcaccagctgttgcgcgacaacactacagggtccaactccagtctgaacacgagcctcccaagtcctggggcttggccttattcagcctccgacaacagctttacaaatgtacactccactagcgcaaagttccctgactataaatcgacgtggagtccagacccgattggacataaccccacgcacctctcaaacaagatgtggaagaaccacattagctctagaaatactaccccactgcccaggccaccgccaggattgacaaatccaaaaccttcttctccatggtcctccaccgcacccagatcagtgcgagggtggggtacacaggactcccggttggcttctgcgagcacgtggagcgatggcggaagcgttcgtcccagttattggctggttctccataatctcacgccccaaatcgacgggtcaaccctaagaacaatttgcatgcaacatgggcctttgttgacgttccacctgaatctgacacaggggacggcgttgattaggtattccacaaagcaggaggcagccaaggcccagacggctctccacatgtgcgtgctaggaaacacaacaatacttgccgaatttgctaccgacgacgaggtgtcacggtttttggctcaggcccaaccaccaactcctgccgcaacgcccagcgcccctgccgctggttggcagtctctggagacaggacagaaccaatcggatccagttggtccggcactgaatctctttggcggatccacaggacttggccaatggtcttcttcagcaggcggatcttcaggcgctgacctcgccggagcttccctgtggggtcctcctaactatagttcctcgctttggggcgtgccaacagttgaggaccctcaccgcatgggatcacccgctccattactccccggtgacctgttgggcggtggcagtgactctatcta

SEQ ID NO: 31285 - DNA, 3090 bp, synthetic construct
  misc_feature 1..3090: note = Description of Artificial Sequence: Synthetic coding sequence
  source 1..3090: mol_type = other DNA
atgcaaaccaatgagggagaagtgtccgaggagagcagtagcaaggtggaacaggaggacttcgtgatggagggacacgggaagactcccccaccaggggaagagtctaagcaggagaaggagcaggagagagaagaacaactgatggaggacaaaaagcgaaaaaaagaggacaaaaagaaaaaggaggccacccagaaagtgaccgaacagaagaccaaagtgcctgaggtgaccaaaccgagcctgtctcagccaactgccgcttcacctattgggtccagcccctcaccaccagtgaacggtgggaacaacgcaaaacgcgtagccgtgccaaacgggcaaccaccctcagccgcacgctatatgcctcgggaggtcccgccaagattccggtgccagcaggaccacaaggttctgttgaaaaggggccaacctcctccaccctcttgcatgttgctcggtggaggtgcaggcccaccaccctgtaccgcccctggggctaacccaaacaacgcacaggtaaccggcgcattactgcagtctgagtccggtactgctcccgtctggtctaagtctacacctccagcgccagacaatgggacttccgcttggggagaacctaatgagagctcccctggttggggcgaaatggatgacaccggcgctagtaccactggttggggaaatactccagccaatgcccctaatgcaatgaagcccaattctaaatccatgcaggacggttggggcgagagcgacggccctgttaccggggctaggcacccctcttgggaggaggaggaggacggcggtgtttggaataccacaggatcacaggggtctgccagctctcataacagcgcatcttggggacagggagggaaaaaacagatgaaatgttcactaaagggagggaacaatgatagttggatgaaccccctcgctaagcagtttagcaatatgggtttactgtctcaaacagaggataatccttcttccaagatggatctgagtgtaggatcgctctccgacaagaagttcgatgtggacaaacgggctatgaacctgggggactttaatgatattatgagaaaggatagaagcggctttaggccaccaaactcaaaggacatggggaccacagactcagggccttactttgagaaaggcggatcacatggtttgttcggaaactccacagcacagagtcgtggactgcatacccctgtacaacccttaaactctagcccaagcctcagagctcaggtgccccctcaatttatctcgccacaggtatcagcttcaatgctgaaacagtttcccaattctgggctgtcacccggtctattcaacgtgggccctcagttgtctccgcagcagatcgctatgctttcacagttgccccagattcctcagttccagttggcatgccagctattgttgcaacagcagcagcagcagcagctgctccagaatcagaggaaaatctcgcaggctgtgcgccaacagcaggaacagcagctggccaggatggtgtccgccctgcagcagcagcaacaacagcagcagagacagcccggaatgaagcatagccctagccacccagttggccctaaaccccatctagacaatatggttcctaatgcattaaatgttgggcttcctgatctgcaaaccaaaggtcctattccaggttacggcagcgggtttagcagcggtggcatggattacggcatggtgggtggcaaggaggccggtaccgaatcaaggttcaagcagtggacatcaatgatggaagggcttccatctgtggcaacgcaggaggcgaatatgcataagaacggggctatcgtagctcccggaaagactagaggcggttcaccctacaaccagttcgatattatccccggagatactcttgggggtcacacaggcccagccggagactcttggctgcccgctaagtcccctccaactaataagattggcagcaaaagctctaacgcctcttggcccccagagtttcaacccggagtgccatggaaaggaatccaaaacatcgatccagagtctgacccatatgttacccctggcagcgtcctgggcggtactgcaaccagccccatcgtggatacagaccatcagctgttgcgggacaataccaccggttccaattcttcgttgaataccagcctccctagccccggagcttggccttactccgccagcgataattcgttcactaacgtgcacagcacttcagccaagttccctgattacaaatctacttggagccccgacccaattgggcataaccccacacatctgagcaacaagatgtggaaaaatcatattagctcaagaaataccaccccactacctaggccgcctcctggcctgactaaccccaaaccttccagtccatggtcttccaccgcaccaaggtcagtgagaggttggggcactcaagacagtaggctggcctccgctagtacctggagcgacgggggtagcgtgagaccctcatactggttggtgctgcataatctcacacctcaaatcgatgggagtaccctgcgaacaatctgtatgcaacacggtcccctgctcactttccacctgaatctcacccagggaaccgcgttgatccggtattccacaaagcaggaggccgcaaaagcacagacggctctgcacatgtgcgtgctcggcaacacgactatccttgctgagtttgccaccgatgacgaagtgtcccggttcctcgcacaggcccaacctccaacccctgcagccacgccaagtgcccctgctgccggttggcagagtctcgagacaggccagaatcagtcagatccagtaggtccagcactgaatttattcgggggatcgactggcttgggtcagtggtccagttcagccggaggctcctccggagctgatctggccggtgctagtctttgggggccacctaattacagtagcagtctctggggcgtgcccactgtcgaggatccccaccgtatgggctccccagctcctttactgcccggagacctcctcggaggcggttctgactctatctag

SEQ ID NO: 31286 - DNA, 114 bp, synthetic construct
  misc_feature 1..114: note = Description of Artificial Sequence: Synthetic coding sequence
  source 1..114: mol_type = other DNA
atgcagaccaatgagggggaggtgtcagaggaatcttcctctaaagtggaacaggaagactttgtaatggaaggccacggcaagacacccccaccaggagaggagtccaaatag

SEQ ID NO: 31287 - DNA, 5501 bp, synthetic construct
  misc_feature 1..5501: note = Description of Artificial Sequence: Synthetic coding sequence
  source 1..5501: mol_type = other DNA
atgagggaaaaagagcaggagcgtgaggagcagctcatggaagataaaaagcgaaaaaaggaagataagaaaaagaaggaggctacccagaaggtgacagagcagaagaccaaggtacccgaggtgaccaagccgagtctttctcagccaacagccgcatctccgattggaagcagcccatctcctcccgtgaatggcggaaataatgcaaaacgagtagcagttccaaatggacagcctcccagcgcagcacgttacatgccacgtgaggttcctcctcgattccggtgccagcaagatcataaggtcctgctgaagcgcggacaaccacccccaccatcctgcatgctattgggtggaggtgcaggacccccaccgtgcacagctcccggagctaacccaaacaacgctcaggtgaccggcgcattactccaatccgaatcaggaacggcacctgattccacactgggtggtgccgcagcttccaattatgcaaactcgacatggggaagcggcgcttcttcaaataatggcaccagcccaaacccgattcatatctgggacaaggtgatagtggatggctctgatatggaggaatggccttgtattgcctccaaagatactgagtcctcctccgaaaataccacggacaacaatagtgcaagtaatccaggctccgagaaaagcaccctgccaggctcaactaccagcaataaaggaaagggctctcagtgccagtccgcctcttccggtaacgagtgtaacttgggtgtctggaaaagcgaccccaaagccaaaagcgtgcagagttcgaactcgactaccgagaataacaatggcttggggaattggcgcaacgttagtggccaggatagaatagggccagggagcggctttagcaattttaaccctaactccaacccttccgcctggcctgcactcgtacaggaaggaacaagtagaaaaggagctctcgaaaccgataacagtaactcttccgctcaggtgtcaaccgtcggccagacctcacgggagcagcaatccaaaatggagaatgccggagttaatttcgtcgtgagcggcagggaacaggcgcagattcacaacaccgacggcccaaaaaacgggaacactaattccctcaatctgtcgtctcctaaccccatggaaaacaagggtatgccatttggcatgggtctgggcaatacatctcggtctaccgacgccccttcccagtccactggtgaccgcaagactgggtccgtgggctcttggggagctgcccgtggcccttccggtaccgataccgtcagtggccagtcaaattcaggcaacaatggaaacaacggaaaggagcgtgaggattcctggaagggggctagcgtccagaaaagtaccggatctaaaaatgattcctgggataataacaataggagtaccggtggatcatggaactttgggccacaggactctaacgacaataagtggggggaagggaacaaaatgacgagtggcgtatcccagggcgagtggaagcagcccacgggttcagacgagctgaaaattggtgagtggagcggaccaaaccagcctaactcatctacgggagcttgggacaaccagaagggtcaccctcttcccgagaatcaggggaatgcgcaggccccttgctggggccgttcttcttcatccactgggtcagaagttgggggtcaatccaccggaagcaatcacaaggcgggaagcagcgatagtcacaactcaggccgtcggagctacagaccaactcatcctgactgccaggctgttctgcagaccctgctctcccggactgacctggatcctcgagtgctctccaacaccggttggggccagacccagattaaacaggacaccgtatgggacatcgaggaagtgccgaggcctgagggaaaatcggataagggcacagagggttgggagtctgccgcaacccagaccaagaacagtgggggatggggtgacgcgccttctcagtctaaccagatgaagtcaggttggggagagttaagtgccagcacagagtggaaggatcccaagaacacaggtggttggaacgattataagaataataattctagtaattggggtgggggacgccctgatgaaaagactccaagttcctggaacgagaatcctagcaaggatcaaggctggggcggaggacggcaaccaaaccaggggtggagctcaggcaagaacgggtggggcgaggaggtggatcaaacaaaaaactcaaattgggaaagtagcgcaagcaagcccgtaagtgggtggggagaaggaggccagaacgaaatcggtacctggggaaatggaggaaacgcttccctggcttcgaagggaggttgggaggactgcaaaaggagccccgcatggaacgaaacaggtaggcagcccaattcgtggaacaaacagcaccaacagcaacagccaccgcaacagcctccaccccctcagcccgaagccagcgggtcatggggaggtccgcctccgccacctcccggaaacgtgcggccatcaaattcctcatggtcctccggcccacagccagccacaccgaaggacgaagagccatcgggttgggaggaaccctcacctcagagcatctcgcggaagatggatattgacgacggcaccagcgcatggggcgatccaaatagctacaattacaaaaatgttaatctgtgggacaaaaatagccaaggtggccctgctcctagagagccgaacctgccaacaccaatgacctcaaagtccgcttccgtctggagtaagtccaccccacccgcaccagacaacggtacctccgcatggggcgagccgaacgagtcttcccctggttggggcgagatggatgacacaggcgcttccaccactggatggggcaacacccctgcaaacgcgcctaacgcaatgaagccaaatagcaagtcaatgcaggacggatggggcgagtccgacggccctgtgacaggagcaagacacccctcttgggaggaagaagaagacggcggagtatggaatacgactgggtcccagggctccgcatctagccacaactctgcgagctgggggcagggcggtaagaagcagatgaagtgcagcttgaagggtggtaataatgactcatggatgaacccactggcaaagcaattcagtaacatgggacttctgtcacagacggaagacaatccatcctcgaaaatggacctgagcgtgggttccctctccgataagaaatttgatgtcgacaagcgggcaatgaatctcggggacttcaacgacattatgaggaaggataggagcggatttaggcctccaaactctaaggacatgggaactaccgattcaggaccatatttcgaaaaactgaccctgcccttctccaatcaggacggatgcctcggtgacgaggctccctgttccccattttcacccagcccctcctacaagttgtcaccctccgggtccactcttccaaatgtgagcctgggcgcaatcggaaccggattaaacccccaaaatttcgctgctcggcagggaggcagccatgggctgttcggcaattccactgcccagagtcgaggcttgcataccccggttcagcccctgaacagcagtccaagtctccgggcacaggtgcctccgcagttcattagcccccaggtctcggcatctatgctcaaacagttccccaattcaggactcagcccaggcttgttcaacgtcggaccacaactctcacctcagcagatagcaatgcttagccagttaccacaaatcccgcagttccaactggcctgccaacttctcctgcaacagcagcagcaacagcaattactacagaaccaaagaaaaatttcacaggcagtacgccagcaacaagagcagcaacttgccaggatggtgtccgcattgcaacagcagcaacagcaacagcagcggcagcctggaatgaagcactcacccagtcatccagtgggcccaaagcctcatctggacaacatggtgccgaacgctctaaatgtgggtctgcccgacctgcagacgaaaggcccaattcctggatatgggtccggcttcagtagcggcggtatggattacggcatggtgggcggaaaggaggctggtaccgaatctcgctttaaacagtggacatcaatgatggaggggctcccaagcgtagcaacccaggaggcgaatatgcacaagaatggcgctatagtcgcgccaggcaagacccgcggaggcagcccttacaaccagtttgacatcatacccggtgacaccttggggggtcacacaggacctgcgggagacagctggttacctgcaaaatctcctccgacaaacaaaatcggttcaaagtctagcaatgcatcttggccccctgagttccagcccggagtaccctggaagggcattcaaaacatagatccagagagcgacccctatgttaccccaggatccgtactggggggaaccgcaactagcccgatcgtcgacacagatcaccagctgctcagagataatacgaccggcagcaatagttccttgaatacttctctcccatcacctggcgcatggccttatagcgcttcggataactcttttacaaatgttcactctactagtgccaaattcccagattacaagtccacttggagccccgatccaatcggacacaaccctacccacttgtctaacaagatgtggaagaaccacatctctagtcggaacacgacccctctgcctcgcccacctcccggattgacaaatccaaagccgagttcaccgtggtctagcactgcccctaggagtgtgcgaggctgggggacccaggacagccgcctcgccagtgccagtacatggagtgatggtggttctgttcgccctagctattggctggtgttgcacaacctgaccccccagattgatggcagcaccctgcggacaatatgcatgcagcacgggcctctcctgaccttccatctgaacctcacacaaggcactgccctgatccggtacagtacaaagcaagaagcagccaaagcacaaaccgcccttcatatgtgcgtcctaggtaacacaactatcctcgcagagtttgctacagacgatgaggtatctcgatttctcgcccaggctcagcccccaacccccgcagccaccccatcggccccagctgcaggttggcagtcacttgagaccggccagaaccagtctgaccccgtcgggccagccctcaatctatttgggggatcaaccggactcgggcagtggtctagcagcgcaggaggcagctctggggcagatctggccggagcctcgctctgggggcctcccaactactcaagctctctctggggggtgccaacagtggaagatccacatagaatggggagtcctgcaccactcctgccaggggatctcctgggagggggtagtgattccatcta

SEQ ID NO: 31288 - DNA, 3153 bp, synthetic construct
  misc_feature 1..3153: note = Description of Artificial Sequence: Synthetic coding sequence
  source 1..3153: mol_type = other DNA
atggaggtggctgtggagaaggcggtggccgcagccgctgctgcttccgccgctgctagcgggggtccaagcgccgctccaagtggagagaacgaagcggaatcccggcaaggtcctgacagcgaaagaggcggagaagccgctcggctaaatctcctggatacttgtgcagtttgtcaccagaacattcagtcccgagccccaaagctgctcccttgcctgcattccttttgccagcggtgcctgcccgctccccagaggtaccttatgctaccggctcctatgctaggaagtgctgagactcctccgccagtgccggctccgggttcgcctgtgagcggttccagcccgttcgcaacacaagttggtgtgatccgctgtcccgtttgcagccaggaatgcgcggaaagacacatcattgataacttcttcgtgaaggacacgacggaggtgccttcaagcaccgtggaaaagtcgaaccaagtctgtacctcctgtgaggacaatgctgaggcgaacggcttttgcgtggaatgtgtggagtggctctgcaaaacctgcatacgggctcatcaacgggtgaaattcacaaaggatcatactgtgaggcaaaaggaagaggtttctcccgaggcagtgggcgtgacaagccaacggcctgtcttttgcccatttcataaaaaagaacaactgaagctctactgcgagacatgtgataaactgacctgccgggattgccagcttttagaacataaagaacataggtaccagttcattgaggaagcctttcagaaccagaaggtgattatcgacaccctcatcacaaaactgatggagaagacaaaatatatcaaattcactggtaaccagatccagaatcgcattatagaggtgaatcagaaccagaagcaagtggagcaagatattaaagtcgcaatattcactttgatggtcgagataaataagaaaggtaaggccctcttacatcagctggaatccctcgccaaggaccaccgcatgaagctgatgcagcaacaacaggaggttgccggactttctaagcagctcgagcacgtgatgcatttctctaagtgggctgtaagctcaggtagttccaccgcccttctctactcaaaacgcctgattacctataggctgcgacacctgctacgtgcccgttgcgacgcgtctccagtgacaaataatacaatacagtttcactgtgacccatccttctgggctcaaaatatcattaacctgggcagcctggtgattgaagacaaagaaagccagccacagatgccaaaacagaatccggtcgtagaacagaattctcagcctccttccggcctgtcaagcaaccagctgtcaaagtttcccacccaaatcagcctcgcccaattgaggttgcagcacatgcaacagcaagtcatggctcagaggcagcaggtgcagcgtcggcctgccccagtgggattgccaaaccccagaatgcagggacccatccagcagccatccataagccaccagcagcctccacctaggttaattaattttcagaaccattctcctaagcccaacggcccagttctcccaccccaccctcagcaacttcggtatcctcccaaccagaacatcccaagacaagcaatcaagcctaaccctctgcagatggctttccttgcccagcaggctattaagcaatggcaaatcagttctggccagggaacaccgagtacaactaactctacatctagcacaccttcgagtcctaccattacaagcgcagccggttatgacggcaaggccttcggttctcccatgattgacctgagctccccagtaggaggttcgtataatctgccatctttgccagacatcgattgctcgagcaccattatgctcgataacatagtcagaaaagatacaaatattgatcacgggcagcctaggcccccttcaaacagaacggtgcagtctccaaattccagcgtccctagcccaggcttggcaggacctgttaccatgacatccgttcacccaccaatcagaagtccctccgcatctagcgtgggttcaaggggttcaagcggctccagctcaaaacccgctggtgcagacagcactcacaaggtgccagtcgtgatgcttgagcccataaggatcaaacaagaaaactctggccctccggaaaattatgatttcccagtcgtgatcgtgaagcaggagagcgacgaggagtcccgccctcaaaacgcgaattatcctcggagcattttgaccagcctgctgctcaatagttcccagtcttccactagcgaagagacagtcttgagaagcgacgctcctgacagcacgggggaccagcctggtcttcaccaagacaactcatctaacggcaagtccgagtggctagaccctagccaaaagagccctctccacgtgggggaaacccggaaagaggatgatccaaacgaagattggtgcgcagtctgtcagaacgggggagagctcctgtgctgtgagaaatgccctaaggtcttccacctgagctgccatgtacctacgctcacgaactttccgagcggagagtggatatgcaccttctgcagggacctgtccaaacccgaagtcgaatacgactgcgatgccccttcacataattctgagaagaagaagacagagggcctggtgaaacttactcccatcgataagcgcaaatgcgagcggttgcttctcttcctgtattgtcacgagatgagcctcgccttccaggatcccgttccacttaccgtgccggactattataagataatcaaaaaccccatggacctgtccactatcaaaaagagactgcaggaggactatagtatgtactccaagccagaagatttcgtggcggatttccgattgatctttcagaattgtgccgagttcaatgagccagattccgaggtcgccaacgcaggaataaagttagagaactatttcgaagagctcctgaagaacctttatccagagaagagatttcctaagcctgagtttcgaaatgaatcggaagacaacaagttcagcgacgatagcgacgacgatttcgtacagcccaggaagaaaagactgaaatccatcgaagagcgacaactgctcaagtag

SEQ ID NO: 31289 - DNA, 1650 bp, synthetic construct
  misc_feature 1..1650: note = Description of Artificial Sequence: Synthetic coding sequence
  source 1..1650: mol_type = other DNA
atggaaggccctcgcagcgctgcttgcagagcaagacctgctacaagtccgggagcggtggatctgacggctccccctcctcctcccctcctgcgcatactgaacagccgtgccgctcccgcaaccagaaccttcgcagacctctgtcgctcccttctgcaacccgaatcgagagttctgtgtcgactgcagcccgtaaattgctaccctcccgctgcgtcgacaaaactgtgccccgttggcgtgattagatgtcccgtgtgtagtcaggagtgcgcagaaaggcacataatcgataacttctttgtaaaagacaccacagaagtgccctcgtctacagtggaaaaatctaaccaggtctgcacatcctgtgaggacaatgcggaagctaacggtttctgtgtggagtgtgtagagtggttgtgcaagacatgtattagagctcaccaacgggtgaaattcacgaaggatcatactgtccgccagaaagaagaagtttcacctgaagcagtcggtgtgacttcacaaaggcccgtattttgtccatttcacaagaaggagcagcttaagctgtattgcgaaacatgtgacaagctgacctgccgggattgtcagctacttgagcacaaggagcataggtatcaattcatcgaggaggcctttcagaaccaaaaggtcatcattgacaccctgatcactaagctgatggagaaaaccaaatacatcaagtttacaggcaatcagatacagaatcggatcatcgaggtgaatcagaaccaaaagcaggtggaacaggatatcaaggtcgcgatattcactctgatggtcgagattaacaaaaagggtaaggccctactgcaccagctcgaatctctagcgaaagaccacagaatgaaactcatgcagcagcaacaggaggttgccggactgtcgaagcagctagaacatgtgatgcattttagcaaatgggctgtatcgtcaggatcctccaccgctttactgtatagtaagcgtttaataacatatcgcttacggcatcttctgcgcgcacgctgtgacgcgagtcctgtcaccaataacaccattcagtttcactgcgatcccagcttttgggcccaaaatatcatcaaccttggcagtttggtcatcgaggataaggaaagccagccacaaatgcctaagcaaaatcctgtggtggagcaaaattctcaacctccctccgggctgtcttctaatcagttatctaaattccccacacagatcagtctggcccagttgcgcctgcagcacatgcagcaacaacaaccccctcccaggcttattaatttccagaatcacagccccaaacctaatgggccagtcctgcctccacatcctcagcagttgagatatccccctaaccagaacatacctcgacaggcgattaagccaaacccactgcagatggccttcctggcacagcaagcaataaaacagtggcagattagttctggacagggcactccctcgacgactcagaatatcaacacagccgcatgcaccgtgttcgacgtccgcgtactgcatcacataccatactgggcactcaacatttctagcagtgagcgcgactcatttctgtggttttcaagtgtatacaaccttgaatag

SEQ ID NO: 31290 - DNA, 3051 bp, synthetic construct
  misc_feature 1..3051: note = Description of Artificial Sequence: Synthetic coding sequence
  source 1..3051: mol_type = other DNA
atggaggtagcagtagagaaggcggtagccgctgccgcagctgcctctgccgcagccagcggcggaccttcagccgctcccagtggcgagaatgaagcggagagccgccaaggccctgactccgagcgcggaggtgaagccgctcgactcaacctactggatacatgtgctgtgtgccaccagaatattcagtcccgcgctcccaaactgctgccttgtctccactccttctgccagagatgtctgccagcccctcagcgctatctcatgctaccagccccaatgctggggtccgcagaaaccccaccacccgtgcctgcacctgggtcacctgtctccggatcatcaccctttgccacgcaggtgggagtcattcgctgccctgtttgctcacaggagtgtgccgagcggcatatcatcgacaacttcttcgtgaaggacaccacggaggtaccaagttctaccgtggaaaaatctaatcaggtgtgcacgtcttgtgaggacaacgcagaagccaatgggttctgcgtagagtgtgtggaatggctttgtaaaacatgcatcagggcgcaccagagagttaaattcaccaaagaccatactgtgcgacagaaggaggaggtctctcctgaggcagttggggtgacctcccagaggccagtcttttgtcccttccacaagaaagagcagttgaagctgtactgtgaaacctgtgacaaactgacctgccgtgattgtcagcttttggagcacaaggagcatagataccagtttatcgaagaggcctttcagaaccagaaggtgataattgacacactgataacaaaattaatggaaaagaccaagtacatcaagttcacggggaatcagattcagaaccggatcattgaagtcaaccagaatcaaaagcaggtggagcaggacattaaagtggcaatcttcacgctgatggtggagataaataagaagggcaaagcactgctgcatcagcttgaaagtttagcaaaagaccatagaatgaaactgatgcagcagcagcaggaggttgccggactaagcaagcagcttgagcatgttatgcactttagcaaatgggccgtttcctcgggctcatccaccgcgctgttgtattccaagcggctgattacctaccgccttaggcaccttctgagggctaggtgcgatgcctctccagtgaccaataacacgattcagtttcactgcgacccttcattttgggcccagaacatcatcaacctaggttcccttgtgattgaagataaggaaagtcagcctcagatgcccaagcagaatccagtcgtagagcagaattctcaacccccatccggattgtcatctaatcaactgtcaaagtttccaacacagatcagcctggctcagctgcgactgcagcacatgcaacagcagcagcctcctcctcgcctgattaacttccagaaccattcacccaagccaaacggccctgtgctccccccacacccgcagcagctgcgctacccaccaaaccagaacatccctaggcaggccattaaaccaaatcctttacaaatggcctttcttgcccagcaagctatcaaacagtggcagatctcatccggtcagggtactccatcaaccacaaacagtactagttctacaccatcgagccccaccattacctcagccgcaggctatgatggtaaagcatttggctctccaatgatcgacctttccagcccggtcggcggatcttacaatctgcccagtcttccagatattgactgcagctcaaccatcatgttggataacattgtgcgcaaggatacaaatatcgaccacggacagccccgtcccccatcgaaccggacagtccagtcaccaaactcctcggttccctcccctggtttggccggacccgtgacaatgaccagcgtgcacccacctatcagatctcctagtgcatcgagcgtcggatcaaggggaagtagtgggtcttctagcaagcccgctggtgcagacagcacgcacaaggtccccgtcgtgatgcttgaaccgataagaatcaagcaggaaaacagtggccctcctgaaaattatgatttccctgtggtgattgtgaagcaggagagtgacgaagagtcccggcctcagaacgcgaattatcccagaagcatcctcacttctctgcttctcaatagctcccagagcagcacaagcgaagagaccgtgctgcggtccgacgcacctgatagcaccggagatcaacccggactgcatcaagacaatagttcgaatggcaaaagcgagtggctggatccctcccagaagtctccactccacgtgggtgagactaggaaagaggatgaccccaatgaggactggtgtgcggtttgccaaaacgggggtgaactcctgtgctgcgaaaagtgtccaaaggtgttccacctatcttgtcacgtcccaacattgacaaatttcccctctggagagtggatctgtaccttttgtagggacctttcgaagcctgaggtggagtatgattgcgacgcccctagtcacaacagcgagaagaagaagaccgaagggcttgtcaagctgacacccatagacaaacgcaagtgcgaacgccttcttctgtttctttattgtcatgagatgagcctcgcattccaggaccccgtcccactgaccgtccctgattactataaaatcatcaaaaacccaatggacttatctacgattaaaaaacggttgcaggaggactattccatgtactccaagcccgaagacttcgtcgcagacttccggctaatcttccagaattgcgccgagttcaatgaaccagactctgaagtagctaatgctggcataaagctcgaaaactatttcgaggaactgctgaaaaacctttatcctgagaaaagattcccgaagccagaattccgtaacgagagtgaagataataagttcagcgacgatagcgatgacgacttcgttcagcctcggaaaaaaaggttgaagagcatcgaagagaggcagttattgaagtag

SEQ ID NO: 31291 - DNA, 2886 bp, synthetic construct
  misc_feature 1..2886: note = Description of Artificial Sequence: Synthetic coding sequence
  source 1..2886: mol_type = other DNA
atgctacccgcaccaatgctgggcagtgctgaaaccccaccaccagtacccgctcccggttcccccgtctctggaagtagtcctttcgctactcaggtcggcgttatccgctgtccagtgtgttcccaggagtgcgcagagcggcatatcatcgataatttttttgtgaaagatacaactgaagtgcccagctcaacagtggaaaaaagcaaccaggtctgcacatcctgcgaggataatgccgaagctaatggtttctgtgtggagtgcgtcgaatggctttgtaaaacctgcatcagagctcatcagcgggtcaaatttacaaaggaccacaccgtcaggcaaaaggaggaggtaagccccgaagctgtaggagtgacctcgcagcggccagtgttctgcccgttccacaaaaaagaacaactcaagctctactgcgagacatgcgataagttgacatgccgcgattgtcagttgctggagcacaaggagcatagatatcagttcatagaggaggccttccagaaccagaaggttataatagacaccctgattaccaagctgatggagaagacgaaatatatcaagttcacaggcaatcagatccagaatcgcataattgaggttaatcagaaccaaaaacaggtggaacaggacattaaggttgccatattcactcttatggttgagattaacaaaaaaggcaaggctctgttgcatcagctggagtctctagcgaaagaccatagaatgaagctgatgcagcagcaacaggaagtggctgggctctcgaagcaactcgagcacgtgatgcacttttccaaatgggctgtgagctcaggctcctccacagccttgctgtatagcaagcgcttaataacctatcgcttacggcacctgctgagggcaaggtgtgacgcctcacctgtgactaataacacaattcagttccattgcgatcccagtttttgggcacagaacatcatcaatctcggaagcctggtcatagaggataaagaatctcagccccagatgccaaaacaaaatccagtggtggagcagaattcgcagcctccctcagggctatcatccaatcagttgtcaaagtttcccacccagatttctcttgcccaattaaggctgcaacacatgcagcaacaggtaatggcccaacgccaacaggtgcagcggaggcccgctccagtaggactgcccaaccccaggatgcaaggcccaattcagcagccatcaattagtcaccagcaaccccctccacgcctgatcaacttccagaaccatagcccaaaaccgaacggacctgttcttccaccccacccccaacaactacgctaccctcccaatcagaatatccccagacaggcaattaagcctaaccccctgcaaatggcgttcttggcacaacaggctattaagcagtggcagataagcagtgggcaggggactccaagcacaaccaactcaacttcttccacaccgagctctcctacaattacaagcgcagccggttatgatggcaaagcgtttgggtccccaatgatcgatctgtccagtcccgtagggggaagctataacctccccagcttaccggacatcgattgtagtagcaccatcatgctggacaatatcgttcgtaaggataccaatatcgatcatggccaacctagaccccctagcaacaggacggttcagtccccaaatagcagtgtgccatcccccggactcgcaggcccagtgactatgacgtcggtccacccccctatcaggtccccaagcgcctcatccgtcggcagcagagggtcctcaggctcaagttcgaagccggctggtgccgactccactcataaagttcccgtggtaatgctggaacccattaggatcaagcaggaaaatagcgggcctccagaaaactatgattttccggtggttatcgttaaacaagagagtgacgaagaaagcaggcctcagaacgccaattatcctcgttctattctgactagcctgctgctaaattcaagccagtctagcacgagtgaggaaacagtgctccgctcagatgcgcctgattcgaccggcgatcagcctggcctccaccaggataatagcagcaacgggaaaagtgagtggctcgatccaagccagaaatctcccctccacgtcggagaaactcggaaggaggatgaccctaatgaggattggtgcgccgtgtgccagaacggtggagagctgctatgttgcgagaaatgcccaaaggtttttcacctcagttgccatgtacctacacttacgaatttcccttccggggagtggatttgcacattttgtcgggatttaagtaagcctgaagtggagtacgactgcgatgccccatcacataattccgaaaagaagaagaccgaggggctggtaaagctcactcccatcgacaaaagaaaatgcgaaagacttctgctatttctgtactgtcatgaaatgtcattggccttccaggaccctgtgcccctcactgtgcctgattattataagataataaaaaatccaatggatctgtcgacaattaagaaacgcctccaggaggactattcgatgtatagtaagcctgaggactttgttgcagatttccgcctcatctttcaaaactgcgctgagttcaacgagccagactccgaagtggcaaatgccggaatcaaactggaaaattacttcgaggagttgcttaaaaacctgtatcctgagaagaggttccccaaacctgagttccgtaacgagtccgaggacaacaaatttagtgacgattctgatgatgactttgtgcagcccaggaaaaaaagactcaaaagtattgaggagcgccaattgctcaagtag

SEQ ID NO: 31292 - DNA, 1692 bp, synthetic construct
  misc_feature 1..1692: note = Description of Artificial Sequence: Synthetic coding sequence
  source 1..1692: mol_type = other DNA
atgggacttcaggcttgtttgctcggactttttgcactaattctgtccggaaagtgctcttactctcccgaaccagaccaacggcgtaccctgccacctggctgggtgtcactcggccgagccgaccctgaggaagagctgtctctgacattcgccctacgccaacagaatgttgagaggctcagtgaattggtccaggccgtaagcgacccaagctccccgcagtacggcaagtatcttactctggaaaatgtggccgacctggtgcgaccctccccgctgactctccacactgttcaaaagtggctgctcgccgcaggggcacagaaatgccactccgtcattacccaggattttctgacttgttggcttagcattcggcaggcggaactgttgttacccggtgctgaattccaccattacgtcggcggacctactgaaactcacgtggtccggagtcctcatccctatcagctcccccaggcactcgcaccacacgtcgactttgtggggggactacacaggtttccccctaccagctctctgcgccaaaggcccgagcctcaggtgacaggtactgtcggcctccatttgggcgtaactccatctgtcatccggaagcgatacaaccttactagccaggatgttggcagcggcacttctaacaactcccaggcctgcgcccagttcctggagcagtacttccacgacagcgatctggctcagtttatgcgcctgttcggcggaaactttgcgcaccaagcctctgtagcacgcgtggtcggccaacagggaagaggcagggcaggaatcgaggccagtctggatgtccaatatcttatgagcgccggtgccaacatctcaacatgggtctactccagccctgggaggcacgagggccaggaaccgttcctgcagtggctgatgctgctgtccaatgagagcgccctgccgcacgtgcacacagtgtcttacggggacgacgaagattcactctcttccgcatatatacagagggtcaacactgagctgatgaaagcagccgcacgcggactcactctgctttttgctagcggtgattccggcgctggctgttggagcgttagtggacgccatcagttccgtcccaccttccctgcttcttcgccctatgtgaccaccgtcggaggcacatcatttcaagagccatttctgatcacaaatgaaatcgtggattatatatcaggcggtggattttccaacgtttttccgagaccttcctatcaagaggaggccgtgaccaaattcttatcctcctctccacatcttcctccctcatcttacttcaacgcaagtggacgcgcttaccctgacgtagctgccctgtccgacggctattgggttgtgtcaaatcgggtccctatcccgtgggttagtgggactagtgcctcaacgccagtgttcgggggaatcttatccttaataaacgagcacaggatcctgagtggtcggcctcctctggggtttttgaatccacgtctatatcaacagcacggggctggcctcttcgacgttactcggggttgccacgaatcatgcctcgacgaggaggtagagggccagggattctgttccggcccaggatgggatcctgtcactgggtggggaacccccaatttcccagccctacttaagactctgctgaatccctag

SEQ ID NO: 31293 - DNA, 1041 bp, synthetic construct
  misc_feature 1..1041: note = Description of Artificial Sequence: Synthetic coding sequence
  source 1..1041: mol_type = other DNA
atgggcctccaggcatgcctgctgggccttttcgcactcattctgagcggcaaatgttcatacagccctgaaccagatcagcgcaggaccctgcctccaggatgggtgagcctgggcagggcagatccagaggaggaactgagtttgactttcgctctgcgccagcagaatgtggagcgactgtccgagttggtccaggcagtgtccgatccctcctccccacaatatgggaagtatctcaccctagagaacgttgctgacttagttagaccctctcccctgacactgcacaccgtccaaaaatggctcctggcagcaggcgcacagaagtgtcatagcgtaattacccaggattttctgacctgctggctttcaatccgacaggccgagttactgctgcccggtgctgagttccaccactatgttggtggccctaccgaaacacacgtcgttagaagccctcacccttaccagctcccccatatcctcgaagttccttatgtgaccacggttgggggtacttcattccaagaaccattcctgataaccaatgagatagtggattacatttccggcggaggcttctctaacgtgttcccaagacctagttaccaagaagaggcggtaacaaagttccttagctcttccccgcatcttcctccatcttcttattttaacgcctcaggacgcgcttaccccgatgttgcggcactgagtgacggctattgggtggtgtctaaccgagtgcctattccctgggtttccggcacttctgcctcaacgcctgtgttcgggggtatattaagtttgataaatgagcaccgtatcctgagtggcaggcctcctctggggtttctcaacccgaggctctaccagcagcatggggctgggttattcgatgtgactcgtggatgtcatgagagctgcctcgacgaggaagtggaagggcaaggtttctgtagtgggcctggttgggaccccgtaaccggctggggaacaccaaacttccctgctcttcttaaaacccttctcaatccttag

SEQ ID NO: 31294 - DNA, 3495 bp, synthetic construct
  misc_feature 1..3495: note = Description of Artificial Sequence: Synthetic coding sequence
  source 1..3495: mol_type = other DNA
atggcgcaacaggcaaatgtgggtgagctgctggccatgttggatagccccatgctgggcgtgcgagacgacgtgacggccgtctttaaggaaaatctgaatagcgaccgcggacctatgttggtaaataccctggtcgactactacctggagaccagcagccagcctgcgctccacattctcactacgctgcaagaacctcatgataagcatttactcgatcgcattaatgagtacgtggggaaggcagctactcgcttgtcgatcctgtcactcctgggccacgtcatccggctgcagccttcctggaagcataagttgtcccaggctcccttgcttccgtctctgctgaagtgcctgaaaatggatacggatgtggtcgtcctcactacaggcgtcctggtactaatcaccatgctgcctatgatcccgcagagcggcaagcagcaccttttggacttctttgatatattcggacggttgtcttcctggtgtctgaagaagcctggacatgtcgcagaggtttatcttgtccatctgcatgcaagcgtgtatgccctgttccatagattatacggaatgtatccttgtaatttcgtcagcttcctgagatctcactactcaatgaaagaaaacctggaaaccttcgaggaggtagtgaagccaatgatggaacacgtaaggatccatcctgagttagtgaccggctcaaaagatcatgagctggacccccgacgctggaagcgactggaaactcatgacgttgtgatcgagtgcgctaagatctcactggaccctacggaggcgagctacgaggatggttactccgtaagtcaccagatctctgcccgattcccccacagatcagctgatgtcactactagcccttacgccgacacacagaacagctatgggtgtgcaacttctacaccttatagcacatcccgtctcatgctgttaaatatgccgggacagctgccgcagacgctgtccagcccatctacgaggttgattactgaacccccacaggccaccttatggtcacccagtatggtctgtgggatgaccacacccccaaccagtcccggaaatgtgcccccagatttgagccacccatactccaaggtcttcggaacgaccgctggaggaaaagggaccccactgggcaccccggcaacttcccccccacccgctcccctttgtcattccgacgactatgtgcacattagtctgccacaagccactgtgacacctcccaggaaggaggagcggatggactcagcacgaccctgtctgcaccgccaacaccatctactgaacgaccggggttctgaggagccgccaggcagtaagggatcagtaaccctgtccgaccttccgggttttttgggcgatctcgcatcagaagaagacagcatcgaaaaagataaagaagaggcagctatctcccgcgagctgtctgagattaccaccgccgaggcagagccagtcgtcccacggggtgggtttgatagtcccttctatcgggattcactgccaggatctcaacggaagacccactctgccgcatcaagcagccagggggcatccgtcaatcccgagcctttacattcctctctcgacaaattgggcccagacacgcctaagcaagcatttacgccaatagaccttccctgtggaagcgccgacgaatcccccgctggggacagagagtgtcagacatcactggagacttcaattttcaccccatctccttgtaagattcctccgcctacacgggtgggcttcggatccggtcaacccccaccctacgaccacttgttcgaggtggccctcccgaagacagcacatcattttgtcattcgaaagaccgaagaactattgaagaaggctaagggtaatacagaagaggacggggtgcccagtacaagtcccatggaggttctggaccgtttaattcagcaaggggcagacgcacatagcaaagaattgaataaactgcccctgccttcaaagtccgtggattggactcactttggcggttctcctcccagcgatgaaattcgcacccttagagatcagcttttgctgctgcataaccagctcctgtacgagaggttcaagaggcagcagcatgccctgcggaacaggagattgcttcgaaaagtgatcaaagccgctgctctcgaggaacacaacgccgctatgaaagaccaattaaaactccaagagaaggacatccagatgtggaaggtgagcctccagaaagagcaagccagatacaatcagctgcaggagcagcgggatactatggtaaccaagctacatagccaaattcgccagctccagcacgatagggaggaattctacaaccagagtcaggaactgcagacaaaactcgaggattgtcgaaatatgattgctgaactgcgaattgaattgaaaaaggccaacaataaggtatgccacaccgaactgctgctgtcacaagtatcacagaaactcagtaattcggaaagtgtgcagcagcagatggagtttttgaataggcaactcctagtcctgggcgaagtgaacgagttgtaccttgagcagctccagaataaacacagcgataccactaaggaagtggaaatgatgaaggccgcttaccggaaggagctggaaaagaacaggtctcacgtccttcagcagactcagcgcctagacacttcccaaaagcgcatccttgagcttgagagccacctggccaagaaagatcacctgctgctggagcagaagaagtatctggaagacgtcaagctccaggccagagggcagctgcaggctgctgaatcgagatatgaagcacagaagcggattacgcaggtctttgagctggagattttggatttgtacggcagattagaaaaggacggactgctaaaaaagttagaggaggagaaagctgaagcagcggaggccgctgaggaaaggctcgattgctgcaatgatggctgcagcgattcgatggtgggccataacgaagaagcgagtggccacaacggggagacgaagactccacgcccttccagtgcgcgaggatccagcgggtctaggggaggcggagggagctccagttcaagcagcgagttgtccacaccggagaagccccctcaccagcgggcaggcccattcagcagccgctgggaaactaccatgggtgaagctagtgcatccattcctacgactgttgggtcacttcctagttctaagtcattcctgggtatgaaagctagggagttgtttcgcaacaagagtgagtcccagtgtgacgaagatgggatgacttcttccctcagcgagagcctgaaaaccgagctaggaaaggatctgggggtagaggccaaaatacccctcaacctggacggaccccacccaagccccccaacccccgattccgttggacagctccacataatggactacaatgagactcatcacgagcactcttag

SEQ ID NO: 31295 - DNA, 1101 bp, synthetic construct
  misc_feature 1..1101: note = Description of Artificial Sequence: Synthetic coding sequence
  source 1..1101: mol_type = other DNA
atggctcagcaagcaaatgtcggagagttattagccatgctcgacagccccatgctgggagtgcgagacgatgtgacggccgtattcaaagagaacctgaacagcgacagaggtcccatgctagtgaacactctcgtggattattacctggaaacgagttcccaacccgctctgcatatcctgacaactctccaagagcctcacgacaagcatctgcttgacaggatcaacgaatacgtggggaaggctgccacccgcctgagcattctgagccttctgggtcacgttataagactccaaccttcctggaaacataagctgtctcaggctccccttctgcccagtctcctcaagtgtctcaagatggatacggatgtggtggttctgacaaccggagtgctcgtgctcattacaatgctccccatgatcccacagagtggcaaacagcacctgctggacttcttcgatatcttcgggcgattatcctcctggtgcctcaaaaagcccggacacgtggctgaagtgtacctggttcacctgcatgcttccgtgtatgccctctttcacagactctacggtatgtatccctgcaacttcgtctcattcttgagatcacattactccatgaaggagaacctggagacttttgaagaagtggtcaagccaatgatggaacatgtgcggattcatccggagttagttaccggctctaaggaccacgagctggaccctaggagatggaagcggttagaaacccacgacgttgtgattgaatgtgccaagattagccttgatcccacagaggcgtcttatgaggacggctacagcgtaagccatcagattagtgcgagatttccacatcggagcgctgatgtgactactagcccttatgccgatacacagaactcctacgggtgtgcgacgtctactccatatagcacaagcaggctaatgctcctgaacatgcccggacagttaccccagactctgtctagcccctcaacccggctgattactgagccccctcaggtgtggtgccagttagtgtgtctactttcccccctgttgtctggcgaagctgaccccctaggccaaatttag

SEQ ID NO: 31296 - DNA, 954 bp, synthetic construct
  misc_feature 1..954: note = Description of Artificial Sequence: Synthetic coding sequence
  source 1..954: mol_type = other DNA
atggatacagatgtagttgttttaacaacgggggtgctggtgttgatcaccatgctgccaatgattccgcaatccgggaaacagcatctgctagacttttttgacatctttgggagattgtcctcgtggtgtcttaaaaaacctggccatgttgcggaagtctatctggttcatctgcatgcttccgtatacgctctgttccatcgattatacggcatgtacccatgtaattttgtgagtttccttcgctcgcactacagtatgaaggagaatctagagacatttgaggaggtggtgaagcccatgatggagcacgtgcgaatacatccagaactggttaccggcagcaaagaccacgaactggaccctaggaggtggaaaagactggagacacacgacgtggtgattgagtgcgccaagatctccctggaccccaccgaagcctcctacgaagatgggtatagcgtctctcaccagatatctgctcgcttcccacatcgatcagcagacgttacgacatctccttacgctgacacccaaaatagctatggatgtgctacttccaccccttactctacttcccgactcatgctcctgaatatgcctggtcagcttccccagacactatcctctccgagcactcggctaataacagaacctccccaagcaaccctgtggtccccaagcatggtgtgtggcatgactaccccaccaacaagcccgggaaatgtgccgcctgatctgtcgcacccctattccaaggtgtttgggaccacagctggagggaaaggcacgccattgggcacccccgctacatctcctcccccagccccaagcgtgatacgcatgacaacttgcaccttccactcaccgcgaccccagtcccaccctccaggccgaaaacgcgaatggatattgcaagaccatgtgtataccgacaatacaatattttag

SEQ ID NO: 31297 - DNA, 3495 bp, synthetic construct
  misc_feature 1..3495: note = Description of Artificial Sequence: Synthetic coding sequence
  source 1..3495: mol_type = other DNA
atggcccagcaggccaatgtcggagaactgctggccatgctcgatagtccgatgttgggtgtgcgggacgacgtcactgctgtgtttaaagagaacctgaacagtgatcgagggccaatgctggtgaataccctggtggattactaccttgagacttcatctcagcccgcactccatatcctcacaacgcttcaagagccccacgataaacatctacttgatagaataaacgagtatgttgggaaggctgctacacgcctgtcgatcctctcccttctgggacacgtcataaggctacaaccctcatggaagcataagctgtcacaggcccctctgcttccgagtctgttgaaatgcttaaagatggacactgatgtagtggttctgacaaccggggtgttggtcctgatcaccatgcttccgatgattcctcagagcggaaagcagcatctccttgactttttcgatatttttgggcgtctgtcgtcatggtgtctcaagaagccagggcacgtggctgaagtctatttggtccatctgcacgcctctgtctacgccctgttccataggctttatggaatgtatccctgcaactttgtgtccttcttgagatcgcattactcgatgaaagaaaacctggaaacctttgaggaagtggtgaagccaatgatggaacacgttagaattcaccctgaactcgttactggctccaaagatcacgagctcgatcccaggagatggaaacgcctagagacacatgacgtcgtcattgagtgcgccaagatttctctggatccaacagaggcctcatacgaagacgggtatagcgtgtctcaccagattagcgccaggttcccgcatcgtagcgcggacgtgacaacctcgccgtacgcagacacacagaattcatacgggtgtgcaacctccactccctattcaacgtcaaggctcatgttattaaatatgcccggtcaacttcctcagacacttagctccccaagcacgcgtctcatcaccgagccacctcaagcaacactgtggagcccatcaatggtctgtggcatgactacgcccccaacaagtcccggaaacgtacctccagatctgagccacccatatagcaaggtcttcgggacaaccgccggtggcaagggcacgcctctgggaacccctgcaacctcccccccacctgctccactttgtcattccgatgattacgttcacatcagcctgccacaggccaccgtcaccccaccaagaaaggaagagcggatggattccgctcgtccttgcttgcaccgccagcaccatctgctcaatgatagaggctccgaagaaccgcctgggagtaaaggaagcgtcacgttgagtgacttacctggcttcctcggagatttagcctccgaggaagattccattgagaaggacaaagaagaagcagcaatctcacgggaacttagcgagatcaccacagccgaagcggagcctgttgtgcccagaggcggattcgatagccccttttatcgagactcactgccaggctcacagcggaaaacacactctgctgccagtagttcccaaggagccagcgtaaatccagagccattgcattctagccttgataaactgggcccagacacccccaagcaggcgttcaccccgattgacctcccatgcggcagcgccgacgaaagccccgctggggaccgagaatgtcaaacctccctggagacctctatcttcacaccgtcaccgtgcaagataccgccacccactcgcgtcggcttcgggtcaggccagcccccaccctatgatcatctgttcgaggtggccttaccgaagacggcccaccacttcgtcatacgaaaaacagaggaactgctcaaaaaagccaagggtaacaccgaagaggatggcgtgccttctacttctcccatggaggtactggaccgattgatccaacagggtgccgatgctcattccaaggagctcaataagctccctttgccttccaaatccgttgactggactcatttcggaggttccccccctagtgacgagatcagaactctgcgtgatcagctcctccttttacacaaccagttgttgtatgaacgctttaaaagacagcagcacgccttgcggaaccgccgtctactgcgtaaggttatcaaagcggctgccctggaggagcacaacgccgcaatgaaagaccaacttaagctgcaggaaaaggacatccagatgtggaaagtctcactccaaaaggagcaggcacgttacaatcagttacaagagcagcgcgacacaatggttacaaagctacactcacagattcgccagttgcaacatgaccgcgaggaattctacaatcagagtcaggagctacagaccaagctggaggactgtcgaaacatgatagctgagctcagaatcgaacttaagaaggctaataacaaagtatgtcatacggaactgttactaagtcaggtttcccagaagcttagcaactccgaatccgtgcagcagcaaatggagttcctcaataggcaacttctggtcttaggcgaggtcaatgagctgtacttagagcagctgcagaataaacactctgatactactaaagaagttgaaatgatgaaagcagcctatcggaaggagctcgaaaaaaatagatctcatgtcctgcagcaaactcagcgtctcgacaccagccagaagcggatcctggaacttgagtctcacttagcgaagaaggatcatctactgctcgagcagaaaaaatacctcgaggacgtaaagctgcaggcaagagggcagctgcaggcagcagagtccaggtacgaagcccagaagagaatcactcaggttttcgagctcgagattcttgacctgtatggccgactcgagaaggacgggctcttaaagaagcttgaagaagaaaaggccgaggcagccgaggcagcagaggaacggctcgattgctgcaacgatgggtgttccgattcgatggttggtcataacgaggaggcaagcgggcataacggcgagacaaaaactccaagaccttcttccgcgagggggagttccggctcccgcggtggcggtggcagctcttcttcctcatcagagctgagcacccctgagaagccgcctcaccagagagccggtccctttagtagccgctgggaaacaacaatgggagaggcttcggccagcatcccaaccactgtgggaagtctccccagcagcaaaagctttctcggtatgaaggcaagggaactgttcagaaataaatccgagtctcagtgtgatgaagacgggatgacaagctcattatctgaatcattgaagacagaactaggcaaggatcttggggtcgaggctaaaatcccactgaacctggacggccctcaccccagcccaccgacgcccgactcggtggggcagttacacataatggactacaacgaaacacaccatgagcactcctag

SEQ ID NO: 31298 - DNA, 849 bp, synthetic construct
  misc_feature 1..849: note = Description of Artificial Sequence: Synthetic coding sequence
  source 1..849: mol_type = other DNA
atggacaccgacgtcgtggtcctcacaacaggtgttcttgtattaattactatgctgcctatgattcctcagagcggcaaacagcatctcctggacttttttgatatctttgggcgtctgagcagctggtgtctgaaaaagccagggcacgtagccgaggtctacctggttcatttacatgctagcgtgtacgccttattccatcgcctgtacgggatgtatccatgcaatttcgtgtccttcctccgcagtcattacagtatgaaagaaaacctggaaacattcgaggaagtggttaagcctatgatggaacacgtccggatacatccagagctcgtgacaggctctaaagatcacgagcttgacccacggcgttggaagaggctggagacacacgatgtcgtcatagagtgcgctaagatctctttagatcccacggaggcgtcctatgaggacggctattccgtgagccaccagatctctgcgagattcccccaccggtcagcagatgtgacaacgtctccatacgctgacacgcagaactcctacggttgtgccacctcaacaccgtactcaacgagtcgactgatgctgttaaatatgcccggtcacctcgcgacgaccgtccgaccacgcccaccagggcctgccgctcctggtgccgtggttgaagcggaagtggtggaggcggcagctgccgctgcagcgagctttctgccacaaaggaatccccacaccagggggcaggcacactcagccgtgggcggtaggcgactctgggagaagcgtctgcctgctagcccgccactgtgggcccattttcccgtccaaaaggctagctgggtgtag

SEQ ID NO: 31299 - DNA, 3342 bp, synthetic construct
  misc_feature 1..3342: note = Description of Artificial Sequence: Synthetic coding sequence
  source 1..3342: mol_type = other DNA
atggctcaacaggctaatgttggggagctgctcgcaatgctcgattcgcctatgctaggcgtgagggacgacgtgacggctgtgttcaaggagaacctcaattctgaccggggacctatgctcgtcaataccttagttgactattacttggagacatcaagtcagccagctctgcacattctgaccacacttcaggaaccccacgacaaaatggacacagacgtcgtagttcttactaccggggtgctcgtgctaattaccatgctgcctatgatcccacagtctggcaaacagcacctcttggactttttcgatatcttcggacggttgtcgtcttggtgcctaaagaagccaggccacgttgcagaggtttatttagttcatctgcacgcttccgtttacgccctgttccaccggctgtacggcatgtatccatgtaattttgtgtcgtttttaagaagtcactactcaatgaaagaaaatctggaaacattcgaggaggtggttaaaccaatgatggagcatgtccggatccacccggaattggtcacagggtctaaagaccatgaattggacccaaggaggtggaagcgtctcgaaacccacgacgtggtgatcgaatgtgccaaaatcagtttggatcccacggaagcaagttatgaggacgggtactccgtgtcccaccagattagcgccaggttcccccatcgcagcgccgatgtgaccaccagcccgtacgcagatacccaaaacagctacgggtgcgccacatcgactccctatagtactagccggctgatgctgctgaatatgcccggtcagctcccccaaaccctcagctccccatcaactaggctcatcacagaaccccctcaggccaccctttggagtccaagcatggtgtgtggaatgaccacaccccctacctcacctgggaacgtccctcccgatctgtcacacccttatagcaaggtcttcgggaccactgcaggcggaaaggggacacccctcggaacccccgcaacctccccgcctccagccccactgtgccacagcgacgactatgtgcatatctccctcccccaggccaccgtgacacctcccagaaaagaggaaagaatggattccgcgcgaccctgcctacatagacagcaccacttactaaacgatcggggaagcgaggaacctcctggcagcaaaggctcagttaccttatcggaccttccgggttttctcggtgatctggcctcagaggaagattctatcgagaaagataaggaagaggctgctatctcgcgcgaactgagtgagattacaacagcagaagccgaacccgtagtcccaaggggaggattcgactccccattctaccgcgattccctgccaggcagccagagaaaaacgcattccgctgcatcctccagtcagggggcatccgtgaatccggagccgctgcattcttcccttgacaaattgggccctgatacacctaagcaagcctttacccccatcgacctgccttgtggcagcgcagatgagagccccgctggggatcgggaatgccagacttccttagaaacttcgatttttacgccgagcccctgtaagattcctcctccaacacgggtcggatttggatccgggcagcccccaccttacgatcacctttttgaagtggctttgcccaaaactgctcatcattttgttattcggaaaaccgaagaactgctgaagaaggctaaaggaaataccgaagaggatggcgtgccaagcacatctccaatggaggttctggaccggttaatacagcagggcgctgacgcccactccaaagaactaaataaactgccattacccagcaagtctgtggactggacccacttcggcggaagtcccccatcagatgagattcgcacacttcgagaccagttgctgctgttacacaaccagctgctctacgaaagatttaaacgtcagcagcacgctttaaggaatcgcaggctactccgcaaggtcataaaggccgctgcgttagaggaacacaatgctgccatgaaagatcagcttaaacttcaggaaaaggacatccaaatgtggaaagtctcgcttcagaaagagcaagctcggtacaatcagcttcaagagcagcgagatacaatggtcaccaaacttcatagccaaattcgccagctacaacatgatcgagaagagttttacaatcagtctcaggagctgcagaccaagctcgaggactgtagaaatatgattgccgagctgcggatagaactcaaaaaggccaacaacaaagtctgccacaccgagctgctgcttagtcaagtcagccaaaagctgagtaattcagagtccgtacagcaacagatggagtttctgaaccggcagctactcgtgctgggagaagtgaatgaactgtatctggagcaactgcagaacaagcacagcgatactacaaaggaggtggagatgatgaaggccgcttatagaaaggagttggaaaaaaacaggtctcatgttctgcagcaaacccagagactcgatacttcccagaaaagaattctagaactcgagtcacatctagctaagaaggatcacctcctattggaacaaaagaagtatcttgaggatgtcaagttgcaagctcggggtcaacttcaagctgctgaatcgaggtatgaggctcagaaacgtataacccaagtctttgaactggaaatactcgatctttacggtcgtcttgaaaaggatggcctgctgaaaaaattagaggaagagaaagcagaggccgcagaggccgcagaggagcgacttgactgttgtaacgacggttgctctgacagtatggtaggccataatgaagaagcaagtgggcacaacggcgagacaaagactccacgaccatccagcgccagaggcagttctggttctaggggtggaggcggtagttcgtctagcagcagtgaactgagcacccctgagaagcctccgcatcagcgggctggacccttctcgagccgctgggaaaccacgatgggcgaagcctcagcttctatccccaccacggtgggctcactcccttcctctaagtccttcctgggtatgaaggccagagagctattccgcaacaagagcgaaagtcagtgcgatgaggatggcatgacaagctcactgagcgagagcctaaagacagagctcggaaaggatctcggcgtggaagcgaaaatccctcttaacctagacggaccacatccgtcgccacctacgccagactcggtcggccagctgcacatcatggactacaacgaaacgcaccatgagcactcatag

SEQ ID NO: 31300 - DNA, 2397 bp, synthetic construct
  misc_feature 1..2397: note = Description of Artificial Sequence: Synthetic coding sequence
  source 1..2397: mol_type = other DNA
atggctctgcattctcctcagtatatctttggagatttctcccccgatgagttcaaccaattttttgtcactccccgaagctcggtggagcttccaccctattccggtacagtcctgtgcgggactcaggcagtcgacaagctgcccgacggacaagagtatcagagaatagagtttggagtggacgaggtgatcgaaccttcagacaccctgcccaggactccttcctattccatcagctccacacttaatccacaggctccggagtttattctgggctgcacagcttctaagatcacaccagacggtatcacaaaggaagcatcatacggcagcatcgattgccagtatcctgggagcgccctggccctcgacggctcctcaaacgtggaggccgaggttttggagaatgacggcgttagtggcggtctcggccagcgagaaagaaagaagaagaagaagcgaccgcctggttattactcatacttgaaagacggcggtgatgattccatatccacggaagccttggtaaacggtcatgctaactctgctgtgccgaactctgtctccgcagaagacgcggagttcatgggcgacatgcctccatctgtgactcctaggacttgcaatagccctcaaaacagcaccgatagcgtcagtgacatcgtaccggacagccctttcccaggtgcattggggtctgatacccgtactgcaggccaacccgaaggcggtcccggagccgatttcggacagtcctgtttccctgccgaggcgggacgcgacacattgagccgtaccgctggggcacagccttgtgtagggacagatacgaccgaaaaccttggtgtcgcgaacggacaaattctggagtcttccggcgaagggactgctactaatggtgtggaactgcacaccaccgagtcaatcgaccttgatccaacaaaaccggaatcggctagccctccagccgacggcaccgggtcagcttctgggacactgccagtgtcgcagcccaagagttgggctagtctgttccatgatagtaagccaagctccagttctcctgttgcctacgtggaaactaagtatagccctccggcaataagcccactggtcagcgaaaagcaggtggaagtcaaggaaggactggtgccagtgagcgaagatcctgtggcaatcaagatcgccgagctgctggagaatgtcaccttgatccataagccggtgagcttgcagcctcggggactgattaacaagggaaattggtgttatatcaacgcgacattgcaagcgttggttgcttgtccacccatgtatcacttaatgaaatttatcccactgtactccaaggtgcagcgcccatgcacgtcgacaccgatgatcgactcctttgttcgtttaatgaatgagttcacaaatatgcccgtccctcctaagccccgacaggccctcggggataagatagtgcgggatattcgtccaggggcagccttcgaacctacgtatatttacaggctactgacggtgaacaaatcaagtctcagtgagaaaggaaggcaagaggatgcggaagaatacttgggattcatccttaacgggctgcacgaggaaatgctcaacctcaagaaactgctgagtccatccaacgaaaaactgaccatctccaacggtcctaagaatcactccgtgaatgaagaggaacaggaggaacaaggagaaggaagcgaagacgagtgggagcaggttggtccaaggaacaagacctcggtcaccaggcaggctgactttgtgcagacccctatcacgggtatttttgggggtcacattcggagtgtggtctaccagcagtcttcaaaggagagcgcgacgctgcaaccattcttcactctgcagcttgacattcaaagtgataaaattcggacagtgcaggatgctctggaatctctggtggctcgcgaaagcgttcaaggctacaccacgaagacgaaacaagaagtggaaatttccagacgagtgaccctggagaagcttcccccagtcttagtgcttcacctgaagagatttgtgtacgaaaagacaggtggttgccagaaactaattaagaacatcgaataccccgtggacctggagatcagcaaggagctgctaagccctggagtgaaaaataagaatttcaagtgtcacagaacatacagactgtttgctgtcgtgtaccatcatggcaactccgcaaccgggggtcactacactactgatgtcttccagattggattgaatggttggttgaggattgacgaccaaaccgtgaaggtcattaatcagtatcaggtcgtcaagcctaccgccgaaagaaccgcctaccttctctattaccggcgagttgatctgctgtag

SEQ ID NO: 31301 - DNA, 5354 bp, synthetic construct
  misc_feature 1..5354: note = Description of Artificial Sequence: Synthetic coding sequence
  source 1..5354: mol_type = other DNA
atggcaaagcctacctccaaagactccggactgaaagagaagttcaaaatactgctgggcttaggaacccccaggccaaaccccaggagcgccgaggggaaacaaacagaatttatcattactgcggagatcctgcgagagctgagcatggagtgcggactcaataatcgcatccggatgatagggcaaatttgcgaggtggccaagactaaaaaatttgaagagcacgccgtcgaggccttgtggaaggccgttgctgacctgcttcagcccgaacgaccccttgaggctcggcatgccgttttggctcttttaaaggcaatcgtgcagggccagggagagagattgggtgtgttgcgcgctctgttcttcaaggtgatcaaagactaccctagcaacgaggacttgcacgagcgattggaggttttcaaagcactgacagacaatggaagacatattacctacctcgaggaggaacttgcggactttgtgctccagtggatggatgtgggcctttctagcgagtttcttctggtcctagtgaacctggttaagtttaactcctgctacctcgacgaatacatcgccagaatggtccaaatgatatgcctgctgtgtgtgcggaccgctagtagcgtggatatcgaagtttcactgcaagtcctggatgcagttgtttgttataactgtctgcccgctgaaagtttgccactgtttatagttactctgtgccgtacaatcaatgtcaaggaactgtgcgagccttgttggaaactgatgcggaacctcctcggcacccacctcgggcactctgccatctacaacatgtgtcacctgatggaggatagggcgtacatggaagacgccccactgctcaggggggctgtcttcttcgtgggcatggccctttggggtgctcaccgcctctattctctccgcaatagcccaaccagtgtgctcccaagcttctaccaagccatggcatgtcccaatgaggtggtgtcatacgagatagtgctaagcattactagattaattaagaagtaccgaaaagagctgcaggtagttgcatgggatatcctgctgaacataattgaaagacttctccagcagctgcaaacattggattcaccagagcttcgcacgatcgtgcatgacctgttaacgacagtagaggaattatgtgaccaaaacgagtttcacgggtcacaggagcggtattttgaactggtagagcgctgcgctgaccagcggcctgagagcagccttctgaacctgatcagctatcgtgcccaatccattcacccggcaaaggacgggtggatccagaatcttcaggctttaatggagcgcttctttagatccgaaagccggggtgctgtaagaattaaggttctcgacgtgttgtcatttgtgcttctgattaataggcagttctatgaagaggagctgataaatagtgtcgtaatatcccagcttagccacatacctgaggacaaggaccatcaggttcgtaaattggctacacagctactcgtggacctcgccgaagggtgtcatacccatcacttcaattctctactcgatatcattgaaaaggtgatggcacgctctctctcaccgccacccgaacttgaggagagagacgtcgccgcttactcagcatccctggaggacgtcaaaaccgcagtgctgggactgcttgtcatcttacagacaaaattgtacacactgcctgcttcacacgccacaagggtgtacgaaatgctcgtgagccacattcagctgcactacaagcactcatacacattgcctattgctagcagcatccgcctacaagcattcgactttttgttgctgctgcgcgcagacagcctccataggctgggtttaccaaacaaagacggagtagtgcggtttagcccatactgtgtgtgtgattatatggagcccgagcgtgggtctgagaaaaaaacttccgggccactgagcccccctacaggacctcctggacccgcacctgccggacctgcggttaggctcggcagcgtgccttacagtcttctgttcagggtgttactacagtgcctgaagcaggaaagcgattggaaagtgctgaaacttgtactaggtcggctgccggaatccctgcggtataaggtcctcatcttcacatccccctgttccgtggaccagctttgctccgctttatgttcaatgttaagcggtccgaagacgctggagcgcctacgcggagctcccgagggcttctcccggaccgacttgcacctcgcagtcgtccccgtgctgacagctctgatctcataccataactatttggataagacaaagcagcgggaaatggtttattgtctggagcagggattgatacacaggtgcgcctcccagtgtgtcgttgccttgtcaatttgtagcgtggaaatgccagacatcattatcaaagccctgccggtgttagttgttaagctgacgcacatttctgctaccgctagcatggccgtacctctgcttgagtttctctcaaccttagcccgtctgccccacctgtaccgtaatttcgccgctgagcaatacgcatccgtcttcgccatttccctgccctatactaatccttccaaatttaaccagtatattgtctgcctcgcccaccatgtcattgcgatgtggttcattaggtgccgcctcccctttcgaaaggactttgtaccatttataacaaagggcctgcggtccaacgtcttgttgtctttcgacgatactccagagaaagatagttttagggcacgcagcacttccctcaatgagcgtccaaagtcactgaggatagctcggcctcctaagcaaggtctgaacaattcaccacctgtcaaggaattcaaggagtcaagcgccgctgaggcattcaggtgtcgctctatcagcgtgtctgaacacgttgttaggtcccgcatccaaacatctctgacaagcgctagtttaggatccgctgatgaaaattcggtggcccaagcagacgattcacttaagaacctgcaccttgaactcacagagacatgcctggatatgatggctcgctatgttttttcaaactttactgcagtgccaaaacggagcccagtgggagaattcctcttggccggaggcagaaccaagacctggttggttggtaataaactggtcaccgtcacaactagcgttggtactggcacccgctctctacttggcctggactcgggtgagcttcagtccggcccagagagcagctcgagccctggggttcatgttaggcagacaaaggaggccccagccaaattggagtcacaggccggtcaacaggtttcacgtggagcccgagaccgggttcgcagtatgtctggcggtcatggccttcgggtcggcgcactagatgttcccgcatcacagtttttggggagcgcaacaagtcccggtcctcgtacagcacctgccgctaaacctgagaaggccagcgcgggaacaagagtgcccgtccaagaaaagaccaacctggctgcctacgtgccactactcacccagggatgggccgaaatactggtgcgtaggcccaccggcaacacctcctggctaatgtctctcgagaatcctctttcacccttcagttcggacattaataatatgccccttcaggagctgagtaacgctctgatggccgcagagaggtttaaagaacacagggatactgcactgtacaaaagtctgtctgtccccgctgcgagtactgccaagccgcctcctttgccgaggtcgaacactgacagtgctgtagttatggaagaaggttccccgggtgaggtacccgtccttgtggagccaccgggactggaagatgtagaggctgccctcgggatggatcggaggactgatgcttatagccgttcttcctcggtgtccagccaggaggagaaaagcctgcatgctgaggagctggtgggacgcggtattcctatcgaacgagttgtatccagcgaaggcggtcggccttccgtagaccttagctttcaaccatctcagccactgtcaaagagctcgtctagccctgaactgcaaactctccaggacatcctgggcgatccgggagataaggctgacgtggggaggctgtcccccgaggtcaaagccaggagtcagtcaggcacactggacggagagtctgccgcatggagtgcctccggggaagacagtaggggacagccagaaggcccacttccatcttccagccccagatcaccaagcgggctgaggcctaggggctataccatttcggacagtgcacctagcaggcgaggcaagagagtagagcgggacgccctgaagtccagagcaactgcatctaacgctgagaaagtgcccggaataaatccatctttcgtgtttttacaactttatcattccccgtttttcggtgacgagtccaacaagcccatcttgctgcctaacgaatctcagagcttcgaaaggagcgtacagctcctggaccagataccgagctacgacacccataagattgcagtgctgtatgttggagaaggtcagtcaaacagtgagctggcaatattgtcgaatgagcacggctcataccgatacacagaattcctcacaggcctagggagacttattgaactgaaagactgtcagcctgataaagtgtacttgggcggactcgacgtgtgcggcgaggacggccagttcacgtattgttggcatgacgacattatgcaggccgtgtttcacatcgcaacactcatgcccaccaaagatgtcgacaagcaccgatgtgacaagaaacgacacctcggaaatgactttgtatctatcgtgtacaacgattcgggcgaagacttcaagttggggaccattaaggggcagtttaacttcgtgcatgttatcgtcacacctttggattacgaatgcaatttggtcagcctgcagtgcagaaaggatatggaagggcttgtggacacatcggtggcaaagatcgttagcgatagaaacctgcctttcgtcgcgaggcagatggctcttcacgcaaatatggccagtcaggtacaccactctagatccaatccgactgacatttacccgagcaaatggattgctcggttacgacacattaagcggcttaggcagagaatttgcgaggaagcagcttattccaatccctctctacctctcgtccacccccctagtcatagcaaggcgccagcccagacaccggctgagccaactccgggttacgaagtggggcagagaaaaaggcttatctcgtcagtggaggatttcacagagttcgtgta

SEQ ID NO: 31302 - DNA, 5294 bp, synthetic construct
  misc_feature 1..5294: note = Description of Artificial Sequence: Synthetic coding sequence
  source 1..5294: mol_type = other DNA
atggctaagcccacctccaaggacagcggacttaaggagaaattcaaaattctcctgggactggggacacccaggcccaaccccagaagtgccgagggcaaacagacagagttcatcattaccgctgagatcctgagggagctgtcaatggaatgcggactcaataatagaattcgcatgattgggcagatctgtgaagtggcaaaaacgaaaaaatttgaggagcatgccgtagaggctctgtggaaagcagtggcagacctgctgcagcccgagaggcctctggaagctaggcatgcggtcctggcactcctcaaggcaattgtacaggggcagggggagcggctcggcgtgctacgtgcactatttttcaaggtcatcaaggactatccaagtaacgaagaccttcatgagagactggaagtttttaaggcgctcacagataacggtagacacataacttatctcgaagaagagctggctgactttgtgctccagtggatggatgtcggactgtccagcgaatttttactcgtattggtcaacttggtgaagtttaacagctgctacctggacgaatacatagcccgtatggtgcaaatgatttgtctgctctgtgttcggacagcctcctcggtggatatcgaagtgtctcttcaagttctggatgcggtagtttgctacaattgtctccctgcagaatccctccctctattcatcgtcaccttgtgccgtaccatcaacgttaaagaattgtgcgagccctgctggaagctgatgcgcaatctcctagggacccatttaggtcactcagccatatataacatgtgtcacctcatggaagaccgagcctatatggaggatgctccgctgctacgaggagcagtgtttttcgtagggatggcattgtggggggctcaccgcctgtattctcttcgtaatagccccacctccgtgcttcctagtttctaccaagccatggcgtgcccaaatgaagtcgttagctatgaaattgtcctgagtattaccagattgatcaaaaagtacagaaaggaactacaggtcgtggcttgggacatcctcttaaatatcatcgaacgcttgctgcagcagctccagaccctagactcacctgaacttaggacgattgtgcatgatctcctaacaactgttgaagagctgtgcgaccaaaacgagttccacgggtctcaagagcggtattttgagttagtcgaacgatgcgccgaccagcggcctgagtcttccctgttgaaccttatttcctatcgcgctcagtctatccaccctgcaaaggatgggtggatccagaacctgcaagcgttgatggagcgcttcttccggtcagaatcaaggggagcggtaaggattaaagttctcgacgttctttctttcgtcctgctcatcaacaggcagttttatgaagaggaattaattaattccgtagtcattagtcaactgtcccacattcccgaggataaagaccaccaggtgagaaaactggccacacagctgctggtcgatttggcagagggttgtcacacccaccacttcaacagtctgctcgatatcatcgaaaaagtgatggccagatcgctgagtccaccacccgagctcgaagagcgggatgtcgcggcttactccgcttcacttgaggatgttaaaactgcggtgcttgggttgttggtcattctccaaacaaaactttatactctgcccgcatcccacgccacacgcgtgtacgaaatgctggtgagccatatccagctacattataaacatagctacactctgccgattgccagctcgatacggctacaggccttcgactttctgctcctgctgagggccgacagcctgcacaggttgggactgcctaataaggacggtgttgtgaggttctccccatattgtgtgtgcgattacatggagcctgagagaggatctgagaaaaaaacgagcggccctctctcccccccaactggccctcccggaccagcacctgccggaccagctgtccgactgggaagtgttccctactccctgctgtttagagtgttattgcagtgtctcaagcaagagtccgattggaaggtgcttaagcttgtgctgggaaggcttcccgaaagtctacgttataaggtccttatcttcaccagtccctgctctgtggaccagctgtgcagcgctctatgtagcatgttatctggcccaaaaaccctggaacgcttgcgcggtgccccagaggggtttagtcgaaccgatcttcacttggccgtcgtgcccgtgctcaccgccctcatttcttaccacaattatttagataagacaaaacaaagagagatggtgtattgcctggagcaaggattaattcatcggtgtgccagccaatgtgtggtcgctttgagcatctgtagcgttgaaatgccagatatcatcataaaggcactccccgtcctggtggtgaagctgactcatatctccgccactgcatccatggccgttccactgctggagttcttgtcaaccctggcgagactcccacatttgtacagaaattttgccgctgagcagtatgcttccgttttcgctattagcctgccgtacaccaatccttccaaattcaatcagtatatcgtctgcctcgcccaccacgtcatagcgatgtggtttattagatgccgactgccatttaggaaggatttcgttcccttcatcaccaaaggcctgaggagcaatgtactgctctcattcgacgatactcctgagaaggattctttccgcgctcgatccacttctctgaacgagcgccctaaaagccgcatccaaacaagtctgacaagcgcaagcttgggaagtgcggacgagaatagcgtggcacaggctgatgactccctgaaaaacttgcatctagagctgacagaaacctgtctggacatgatggcgagatatgtcttctctaacttcacagcggtacccaagcggtctcccgtgggtgagttcctgctggccggagggcgaaccaagacatggctcgtgggaaacaaacttgtcacagtcaccaccagcgttggaacgggtaccagatcgctgctcgggctggatagtggtgaactccagagcgggccagaatccagtagctctcctggcgtccatgtgcgtcagactaaggaagcacccgctaagttggaaagccaggctggccagcaggtctcccgcggagctcgagatcgggtgaggagtatgagtggaggccacggcctgcgagtgggcgctcttgacgtgcccgcttctcagtttctaggctctgctacttctccaggaccacgtacagccccagcggcaaaaccagagaaggcctcggccggtacccgagtgccagttcaggaaaagactaacctagccgcttacgtgccactcctgacacaggggtgggcggaaatcctggtgcgaaggcccactggcaacacatcttggttgatgagcctcgagaatcctttgtcccccttctcgtcagatatcaataacatgcctctgcaggagctgtccaatgccctgatggccgctgagcgcttcaaggaacacagagatactgctctgtataagagcctcagtgtacccgcagccagtacggcaaagccccctccccttcccagaagtaacacagtcgcttccttcagttcactgtaccagtcaagctgtcagggtcaactgcacagaagcgttagttgggctgacagtgcggtcgtgatggaggaaggcagtccaggggaggtgcctgtcttagtggagcccccaggactggaggatgtagaggctgccctcggaatggataggcggactgatgcttatagccggtcctcctcggtgtcgagccaggaggagaaatctctgcacgcggaagagctggtgggtagagggatccccattgagcgggtcgtgtcctccgaaggagggcgtccttccgtcgatcttagttttcagcccagtcagcctttgagcaaaagtagctctagccctgagctgcaaacgctacaagatatcctgggtgatccaggggacaaagccgatgtgggtcggctgagtcctgaggtcaaagcacgctcgcagagcggcactctagatggcgagagcgcggcttggtctgcctcaggggaagattcgagaggccagcccgagggccctctcccaagtagcagcccccgatctcccagcgggctgaggccacgcggatacaccatttccgactccgccccttcccggagaggcaaacgggtggagcgggatgcacttaagtctcgcgctactgcatcaaatgccgaaaaggtgcctggaataaacccttccttcgtcttcctacagctgtaccattctcctttcttcggggacgagtccaacaaacccattctactcccaaacgaaagccaatcttttgaaaggagcgtgcaactactggatcagatcccctcttacgatactcataagatcgccgtgctgtatgtcggagaggggcaaagcaatagtgaacttgcaatcctctcaaacgagcatggaagttacaggtatactgagttccttactggccttggcaggcttatcgagctgaaagactgtcagcccgataaagtttatctgggaggtctggatgtctgcggcgaagacggacagtttacctattgttggcatgatgatatcatgcaggctgtcttccacatcgccacgttgatgcccacaaaggatgtggacaaacatcgatgtgacaagaaaagacatctggggaatgatttcgtctctatcgtatataacgattcgggcgaggatttcaagctgggcactatcaaagggcagttcaatttcgttcacgtgatcgtgaccccactggattatgaatgcaaccttgtcagtctgcagtgtcggaaagatatggagggcttggtcgatacttcagtggcgaagatagtctccgatcgaaatctgccattcgtcgccagacagatggctctgcatgccaacatggccagccaggtgcaccacagtagaagcaatcctacggatatctacccttctaaatggatcgctaggctccggcatataaaaagactgcggcagaggatttgtgaggaggccgcatatagtaatccttcactccctttggttcatcctccatcacacagtaaggcacccgcacagacccccgctgagcctacgcccggttatgaggtcggacagcgcaaacgacttatatcttctgtcgaggactttacggagttcgtcta

SEQ ID NO: 31303 - DNA, 5079 bp, synthetic construct
  misc_feature 1..5079: note = Description of Artificial Sequence: Synthetic coding sequence
  source 1..5079: mol_type = other DNA
atggagtgtggtctgaataaccggattagaatgattggccagatttgtgaagttgccaaaactaaaaaattcgaagagcatgccgtggaagcactgtggaaggctgttgccgacctcctccagccagagcggccattggaagccagacacgctgtgctagctctgctcaaagccattgtacaaggacaaggagagcggttgggtgtccttcgggctttgttcttcaaagttattaaagactatccaagcaacgaagacctccacgagcgcctggaggtgttcaaagctctcacagacaacgggaggcacataacatatttggaagaggaacttgctgactttgtgcttcagtggatggatgtggggctgtcgtcagagtttctcctggttcttgtgaatttagtgaagtttaacagctgttaccttgacgagtacatcgccaggatggtgcagatgatctgtctgctgtgtgtgcgcactgcaagttccgttgatattgaagtctcactacaagtcctggacgcagtcgtgtgctacaactgccttcccgctgagtcgctgccactttttatcgtcacattatgtcgaaccataaatgttaaggagctgtgcgagccgtgctggaagttgatgcgaaacctcctcggtactcatcttggacatagcgccatctacaatatgtgccatttgatggaagacagggcctacatggaagacgctcccctcctgagaggcgctgttttctttgtgggtatggctctgtggggagcccatcgcctctacagtctcagaaattcccccacgagcgtgctcccctcattttaccaggccatggcttgcccaaatgaggtggtatcatatgagatcgtactctccattaccagattaataaagaagtaccggaaggagctccaagtcgtcgcctgggacatcctgctgaatatcattgaacgcttgttacaacagttgcaaactttggattcacctgagctgagaaccatagtacacgatttgttaactaccgtggaagaactttgcgaccaaaacgagtttcatggttcgcaggagagatatttcgaactggtagagcgatgtgccgaccaaagacccgaatcctctctcttgaacttgatttcctacagagctcaaagcattcacccagctaaagacgggtggatccaaaatctgcaggcgcttatggaacgtttctttaggtccgaaagcaggggcgctgttaggattaaggtgttggacgtcttaagctttgttctgctgattaaccggcaattttacgaggaagagttaattaatagcgtggtcatatcacagctttctcacattccagaagataaagatcaccaggtcagaaagctggctacccagctgcttgttgacctcgccgaaggatgccacactcatcattttaacagcttgctggatatcatcgagaaggtcatggcacggagcctaagcccacctcctgaactggaagaaagggatgtggccgcttactcagcatcgctggaggacgtcaaaaccgcagtactggggctcctggtcatcctccagaccaaactttatacactgcccgcatcgcacgccacacgggtgtacgagatgctggtttcccacattcaacttcactataaacactcgtacacactgccaatcgcaagttccattcgtctacaggccttcgattttctgctgctgctgcgcgctgactcacttcaccgtctgggtttacctaacaaagatggcgttgtaaggttcagcccctactgcgtgtgtgattacatggaacccgagcggggatctgagaagaaaacatctgggccattatcgccacccacgggcccaccgggaccagcacctgctggcccagctgttcggctgggttccgtgccatatagcctgttgtttagagtactattgcagtgcctgaagcaggagagcgattggaaggtgctcaagctggtcctaggtaggctgccggagtctttgagatacaaagttttgattttcaccagcccatgctctgtcgaccagctatgttcggccttgtgtagcatgctttccggccctaagacactggaaaggcttcggggagctcctgagggtttctctcggaccgaccttcacctcgcggttgtcccagtcctgaccgccttaattagctaccataattacctggataaaaccaaacaaagggagatggtttactgcctggagcagggcctgatccatcggtgcgcgtctcaatgtgtggtcgccctttccatctgtagcgtggagatgccagacattattatcaaggcgctaccagtgcttgttgtgaagctaacccacatcagtgccacggctagtatggcagtccccctgctagagttcctctcaacactggcccgtctaccacacttgtaccggaactttgccgcagagcagtatgcttctgtctttgccatctctctcccatacactaatccatccaagttcaaccagtacatagtgtgtttagcgcatcatgttattgctatgtggtttatacggtgcaggttgccattccgcaaagactttgttcccttcatcaccaaaggattgaggagcaacgttctgttgtccttcgacgatacaccggagaaggattcctttcgggctagatcgaccagcttgaatgaacgacctaaaagccggatccagaccagtcttacctccgcttcactcgggtccgctgatgagaacagtgtagcccaggccgacgactccttaaaaaacttacaccttgagctgactgagacatgcctagatatgatggccaggtatgtcttcagcaacttcacggccgtccctaagagaagtcctgtcggagagttcctgctggcaggcggaaggacgaaaacttggttggtgggcaacaaattagtgactgtcaccaccagcgtgggtactggcacgcggtcactccttggtttggattctggtgagttacagagtgggccagaatcatcgtcttccccaggcgtgcacgtgagacaaacaaaggaagcgccagccaaactggaaagtcaggctggccagcaagtgagcaggggcgcacgggatcgcgtgcggtccatgtctggcggacacgggctgcgcgtgggagctttagatgtgccagccagccagttcctgggctcagccacctctccgggacccaggactgcacccgctgccaagcccgaaaaagcaagtgcagggacgagagtgcccgtgcaggaaaagaccaacctggccgcttatgtcccactgctgactcagggctgggcggaaatcctcgtacgcaggcctacaggcaatacctcttggttgatgtctctcgaaaacccactaagcccctttagcagcgatatcaacaatatgccgctccaggaactgtcaaatgctctgatggctgccgaacggtttaaagagcatcgcgacacagcactgtataaaagcctgagcgtgccggcagccagtacggctaagcccccacccttacctcggtccaacacagactccgccgtggtgatggaggagggcagtcccggtgaagtgccagtcttggtcgagcccccaggtctagaggacgtagaagctgcactaggcatggatcgaaggacagatgcatacagtcggtcatcatccgtatcgtctcaggaagaaaagtcgttgcatgccgaggaactggttggccgaggaatccccattgaaagggtggtgtcttcagaggggggtcgcccaagcgtcgacctgagcttccagccttcccagcccttgagcaagtcttcctcatcgcccgaacttcaaaccctccaagatatcctgggcgaccccggtgataaggccgatgtagggaggctgagtccggaagtgaaagccaggagccagtctggcactctggatggagagagtgctgcctggtccgcgagtggagaggactctagaggacaacctgaggggccactgccaagctccagtccaaggtcaccatccggactgcgccctagaggctatactatttcggacagtgctcctagccgaagaggaaaacgggttgaaagggatgcactgaagtctcgcgcaaccgcgtccaatgctgaaaaagtgcccggtatcaacccctccttcgttttcctgcagctgtaccacagccctttctttggggacgaaagcaacaaacccatccttctgccaaatgaatcccaatcattcgagcggtcagttcaattgctcgaccagatcccaagttatgacacccataagatcgctgtgctttatgttggggagggacagtctaactccgagctggccatcttgtccaacgaacatggatcctacagatatacagagtttctcactggtctgggccgattaatagagctgaaggactgtcagccggataaggtgtaccttggtggactggacgtgtgtggggaagatggtcagttcacctattgctggcacgacgacataatgcaggctgtattccatattgccaccctgatgcctacaaaggatgtagacaagcaccgctgcgacaaaaaacgccatctggggaatgactttgtgtccattgtctacaatgactcaggcgaggatttcaagctgggaactatcaaggggcagttcaattttgtgcacgtgattgttacccccctggattacgaatgcaaccttgtgtcacttcagtgccgcaaggatatggaaggtttagtggacacgagcgtagccaagattgtgtccgataggaaccttccctttgtcgcgcgacaaatggccttgcacgctaacatggcgtctcaggtgcatcactctaggtcgaaccctaccgacatttacccctccaagtggattgccaggctgagacatatcaagagattacggcagcgaatttgcgaggaggctgcgtattccaatccttcgctgcccttggtccatcccccttctcattccaaggccccagcacagacacccgctgaacccacccccggatacgaggtgggtcagcgaaagaggctgatctcttctgtggaagatttcaccgagttcgtctag

SEQ ID NO: 31304 - DNA, 5225 bp, synthetic construct
  misc_feature 1..5225: note = Description of Artificial Sequence: Synthetic coding sequence
  source 1..5225: mol_type = other DNA
atggcaaaacccaccagtaaagacagtgggctcaaggagaagtttaagatactgctcggcttaggtactccaaggcctaaccctcgctccgcagagggaaagcagacggaatttatcattacagcagaaatccttagagagcttagtatggagtgcggccttaataaccgcatacgcatgataggacagatctgtgaagtcgccaagacaaaaaagtttgaggagcatgcagtcgaggctttgtggaaggcagtggccgatctgctccagccagaaagaccacttgaggctcgccatgccgtgttagctctgctgaaggccattgttcaaggtcaaggcgaacgcctgggggtgctgagagccctcttttttaaagtcatcaaggactacccctctaatgaggacctgcacgagagattggaggtgtttaaagcattgaccgataacggcagacacataacttatctggaggaggagctagctgatttcgtacttcaatggatggacgtcggcctttcatccgagttccttctagtcctcgttaaccttgtgaagttcaactcgtgttatctcgatgaatatattgcacggatggtccaaatgatctgcctgctttgcgttagaactgccagctcagtagatatcgaggtgagtctacaggtactggacgccgtggtgtgctacaactgtctgcctgcagagtcactgcccttgttcattgtcactctgtgtagaaccattaatgtcaaggagctgtgtgagccatgctggaagcttatgcgtaatctgttgggcacacatcttggacactctgctatttacaatatgtgccatctgatggaggacagagcctacatggaggacgccccactgctgcgcggtgccgtattcttcgttgggatggccctctggggcgctcataggttgtattccctacgcaatagtccaactagtgtcctgcctagtttctatcaagctatggcctgccctaacgaagtcgtaagttacgagatcgtgcttagtataactaggcttataaagaaataccgaaaggagctccaggtcgtggcctgggacatactgcttaatattatcgaacgactcctacagcagctgcaaaccttggatagtcccgagttgcgcaccatcgtacacgacctgctgaccacagtcgaagagctgtgtgatcagaacgaatttcacggcagtcaggaaaggtacttcgaactcgtggaaaggtgtgctgatcagcgacccgagtcatcgctcctgaaccttatcagctacagggcccagagcatccacccggcaaaggacggttggatccaaaatctccaagcactgatggagcgatttttcagaagcgagtcaagaggcgcagtgaggatcaaggtgttagatgtcttgtccttcgtgctcttgatcaatcgacaattttacgaagaggaactgattaactccgtagtgatcagccaactgagtcatattccagaagacaaagaccaccaagtgcgtaagttagctacacaactcctcgtggatctggcagaaggctgtcatacacaccacttcaacagcctccttgatatcattgagaaggtgatggccagaagccttagtccccctccagagttggaggaaagagacgttgccgcttattccgcctcgctggaggatgtgaagaccgccgttctgggtctgctggtgatcctgcagacaaagctgtatacactccccgctagccatgccacacgagtttacgagatgcttgtatctcatatacagctccactataaacatagttatacattgccaatagcatccagtatccgactgcaggcatttgacttcctgctcttgctcagggcagattccctgcataggctcggcttgccaaataaagacggcgtcgtgcgattttctccttactgcgtatgtgattatatggaacccgaaagaggatctgaaaagaagaccagcggacctttatccccgccaaccggtccccctggtcccgcacctgccggaccagctgttcggctgggatctgttccctactcactgctatttagagtgctcttacagtgtctaaaacaggagagcgactggaaagtgctcaagctcgtgctgggacgcctgcccgaaagtctgcgctataaagttctcatttttacttccccgtgcagcgtggatcaattgtgtagtgccctgtgtagcatgctttcaggcccaaagacgctggaaagactgaggggagccccagaagggttctcacggacggatcttcacttggccgtggttcctgtgctgacggccctaatctcttaccataactatctcgataaaacaaaacaacgcgagatggtgtactgtcttgaacagggacttatccacagatgcgcttcgcagtgtgtcgtggcgctatctatctgcagcgtggaaatgcctgatattattatcaaagcactaccagtgctcgttgtcaagcttactcacatctctgcaacagcctccatggccgtgccactgctagagttcctaagcaccctggcacggctgccccacctgtataggaacttcgccgcagaacaatatgcatccgtttttgcaatctctttaccttacactaacccatcgaaatttaaccagtacattgtatgtttggctcatcatgtgatcgcaatgtggttcatacgctgccgcctgccttttcgcaaagactttgtcccctttatcaccaaaggccttcggtcaaacgttctgctctccttcgacgatactccagagaaagactcttttagggcccgttcaaccagcctgaacgagcgaccgaagtcccggatccagacgagtctcacctctgcatctctggggtccgcagacgaaaatagtgtcgcgcaagcagacgattcactgaagaacctgcaccttgaacttacagaaacctgtctggacatgatggcaagatacgtattcagcaattttacggccgtccctaaacggtcaccagtgggggagttcctcctggcgggaggtcgcaccaagacctggcttgttgggaataagctcgtgaccgtgaccacttccgtgggaacaggaacaaggtcactgctgggattggattccggggagctccagtcaggacctgaatctagctcatcacctggcgtgcacgttcgacagactaaggaggctcccgcaaagctggaatcccaggccggtcaacaggtctctcgtggagcaagggacagggtgagatctatgtccggagggcatgggctgagagtgggggctctggacgtccccgctagccaatttcttgggtctgctacatcccctggcccaaggaccgcacccgcagcaaaacccgaaaaagcctctgccggaaccagggtgcccgtgcaggaaaaaactaatcttgccgcatacgtgccactgctcactcagggctgggccgaaatacttgtgcggcgacctacaggtaataccagttggttgatgagtctcgagaatccgctatctccattcagcagtgatattaacaacatgcccctccaggagctgtccaatgcactaatggccgctgagaggttcaaagagcacagggataccgcgctgtacaagtcactctccgtgccagccgcttcaaccgcaaagcctccgcctcttcctagaagtaacactgatagcgccgtagtgatggaggagggcagtcctggggaggtgccagttctggttgaaccgcctggcctggaagacgttgaggccgctcttggcatggacagacggaccgacgcttactctagaagttcctcagtgtcgtcgcaggaggagaagagtctgcatgcagaggagctcgtcgggaggggcatcccaatcgaacgggtcgtttcgtcggagggaggcagaccgagcgtagacctctcgtttcagccatctcagcctctttcaaagtcttctagcagtcctgagctgcagacactccaggatattttaggagatcccggtgacaaggccgatgtgggcagacttagccctgaagtgaaagcacgcagccagagcggcactctagatggagagtcggccgcttggagcgccagcggcgaggactccagagggcaaccagaggggccactccccagctcaagtccccgttccccctcagggctgaggccacgtggatacacaatcagtgatagcgccccttcacgacgcggaaaacgcgtcgagagagacgcgttgaagagcagagcgactgccagcaacgcagagaaagtcccaggaattaacccatcctttgtcttcctgcagctgtaccattcaccctttttcggtgacgaatctaacaagcccatccttctaccgaatgaaagccagtctttcgagaggtctgtacagctgctggatcagatcccctcctatgatacacacaaaatcgccgtactctatgtgggtgaagggcagagtaacagcgaactggctattcttagtaatgagcacggaagctaccgctataccgagtttctgacaggcctgggacgactcatagagctgaaagactgtcaaccagacaaggtttacctcggcggactcgacgtgtgtggggaagacggccagtttacctattgctggcacgacgacatcatgcaggccgtctttcacattgcaacgttaatgcctaccaaggatgttgataagcaccgctgcgataagaagcggcacctaggtaatgacttcgtatccatcgtgtacaacgatagtggagaggacttcaagcttggtactataaaaggccagttcaattttgttcacgtgatcgtgacaccactggactatgagtgtaatctggtgtcactgcaatgtcgaaaagatatggaaggactggttgacactagcgtagctaagatcgtgtccgacaggaatctgccctttgtagccagacagatggctctccacgcaaacatggcttcccaggtgcaccatagcagaagcaaccccaccgacatatacccaagtaaatggatcgctaggctccggcacattaagagactgcgacaaaggatatgcgaggaggcggcttacagtaacccttcgctacctctggtgcaccccccatcccactctaaggcccctgcacagacccctgccgaacctactcccggttatgaagtggggcagcgcaagagactgatctccagtgtggaggattttaccgaatttgttta

SEQ ID NO: 31305 - DNA, 5115 bp, synthetic construct
  misc_feature 1..5115: note = Description of Artificial Sequence: Synthetic coding sequence
  source 1..5115: mol_type = other DNA
atggccaaacccacgtcaaaagactccgggctaaaagagaagttcaaaatcctgctgggcctcggcaccccaaggcccaaccctagatctgctgagggcaaacagactgaattcattattaccgccgagatcctcagagaactgtcgatggagtgtggtttaaacaatcgcataagaatgatcggacagatctgtgaggtggccaagactaagaaatttgaggagggtgaacggctgggagtcctgcgagcactgtttttcaaagtcatcaaagactatccttcgaatgaagacctgcacgaacgacttgaggtgttcaaggcactgaccgataacgggcgacacattacttatttggaggaagagttggctgactttgtgctgcagtggatggacgttgggctgtcaagcgaattcttgttagtactggttaacttggtcaaattcaatagctgttatcttgacgaatatattgcccgaatggtgcagatgatctgtctactgtgcgtgcgaaccgcttcttctgtggacatcgaagtctctctccaggttcttgatgctgtcgtatgttataactgtctgcccgcagagtccctccctttgttcatcgtcaccctctgccgtacaatcaatgtcaaagagttgtgtgagccatgttggaaattgatgcgaaacttactgggaacccacctgggacacagcgcgatctacaatatgtgccatctgatggaagacagggcctacatggaggacgctcctcttctgcgcggagccgtcttctttgtcgggatggctctgtggggggctcaccgtctctattctcttcgtaactcccctactagcgtgctcccttctttctatcaggcgatggcttgtccgaacgaagtcgtgtcttacgaaatcgtgttgtccatcactcgattgatcaagaagtaccgcaaagaactgcaggttgtggcctgggacatcctgttgaacattatcgagagactgctgcagcaactgcagacgctcgactctcccgagttgaggactattgtacacgatctgctgacaactgtggaggagctgtgtgatcagaatgaatttcatgggagccaagagaggtacttcgaactggtggagagatgtgcagatcagagacccgaatcttcgctgctgaacctcatttcgtaccgggctcagtctatacatcccgctaaagatggttggattcagaatctgcaggccctgatggagagatttttcagaagcgaatctagaggcgctgtgaggataaaggtgctggacgtattgtcgtttgtcttgctaatcaaccgccagttctacgaggaggagctaattaactcagtggtgatctcccagctgtcccacatcccagaggataaagaccaccaggtccgaaagctggccactcagctgctcgtggaccttgcggaaggatgccatacccatcactttaacagtttgttggatatcattgagaaagtcatggccaggagtctgtctccacctccggaacttgaggagagggacgtggccgcatattctgccagtttagaggatgtgaagacagcagtgctgggactgctggtgatcttgcagactaaactttacaccctgccagccagtcacgctaccagagtgtacgagatgctggtgtcacacatccaactgcactataaacacagttacactctgcctatcgcctcttctatcagactgcaggcttttgatttcctgctcttactgcgggctgattccctgcatcgcctcgggctgcccaataaagacggggtcgtgagattttctccttattgtgtgtgtgactacatggagccggagcggggatcagaaaagaaaacaagtgggccactgtcccccccaacaggcccacctgggccagcccctgccggacccgcagtcagacttggatccgttccttactcactgttgttccgcgtcctcttgcagtgcctaaagcaggaatcagattggaaggttcttaaactggtgctgggcagactgccagaaagtctgcgatacaaagttctgatttttacaagcccttgctctgtcgaccaactttgcagcgctctgtgctctatgctttcaggccctaaaacactggaaaggcttcgaggagcacctgagggcttctctaggactgacctgcaccttgctgtagtacctgtgttgactgccctgatttcataccacaactacctggataaaacgaaacagcgggagatggtttattgtcttgagcagggcctcatccataggtgtgcatctcagtgtgtggttgccctatccatttgcagcgtggagatgcctgacataatcatcaaagctttgcctgtgctcgtggtcaaattgacgcacattagtgccaccgctagtatggctgtaccactcttagagttcttatctaccctcgctcgattgccacatttatatcgcaattttgctgctgaacagtacgcgagcgtattcgctatttcccttccttataccaacccgtctaagttcaaccagtatatcgtgtgcctggcccaccatgtgatagcaatgtggttcatacggtgccgactcccctttagaaaggacttcgtgccttttattactaaaggccttaggagcaacgtgctgctgtcctttgatgacactcccgaaaaggactcttttagggccagatccacatccttgaacgaacggcctaagtcccgcattcagacttcgctgacctctgcctcacttggttcggctgacgagaattctgtagctcaagccgacgattctctgaagaacctgcacctggaattgactgaaacatgcctcgatatgatggcaaggtacgtgttctctaattttacggccgtgcccaagagatcccccgtcggcgaattcttactggctggcggacgcactaagacttggctcgtgggaaataaattggtgactgtaaccacgagtgtgggtacaggaacgagatcattgcttgggctcgacagcggagagctccagtctggaccagagagctccagcagtcccggagtacacgttcgtcagactaaggaagctcccgcaaagctggaatcacaggccggacagcaggtctcccggggtgcccgagatagagtgcggtcaatgtccgggggtcatggcctgagagtgggagcattagatgttcccgctagtcagttccttggcagtgcaacttctcctggcccacgaaccgccccagcagcaaagccagaaaaggccagtgctgggactagggtgcccgtgcaagagaagacgaaccttgcagcctatgtgcccttgttgactcagggctgggccgagattttggttcgcaggccgaccggtaacacctcgtggctgatgtcactggaaaatcctctgagccccttcagcagtgatataaataacatgccactgcaagaactatctaatgcccttatggctgctgagcgattcaaggaacaccgtgacaccgcactgtacaagtctttaagcgtacctgcggcatcaaccgccaagccaccacctctccctcggtccaacacagattctgctgttgttatggaggaaggctcacctggtgaggttcccgtcttagttgagccacctgggctggaagacgtagaggctgcacttggcatggacaggaggactgatgcttacagccgttctagctcggtatcttcccaggaggaaaaatcacttcacgctgaagaacttgttggtaggggcattcccattgagagggtggttagctctgaaggcggacggccaagtgttgacttgagcttccagcccagccagcccctgtctaagtcttccagctcccctgaattgcagactctgcaggacattctgggcgaccctggtgacaaggcagatgtaggaaggctctctcccgaagtgaaggccagaagtcaatcaggaacgttagacggagaatctgctgcttggagtgcatctggggaagactctagaggacaacccgagggaccgctcccatcgtcgagtcctcgaagtcccagcgggctgaggcctcgcggttacactatttcagacagtgccccaagccgaagggggaagcgggtggaaagggacgcactaaagtcccgggctactgccagtaacgcagaaaaagttccagggatcaacccctccttcgttttcctgcagttgtatcatagccccttcttcggggatgagtctaataagcctattctgctccctaatgaaagtcagtcttttgagcgctccgtgcagctgctagatcagatcccttcctatgacacgcataaaatcgccgtgctgtatgttggtgaaggacaatctaactctgagctggcgatcctcagcaacgaacatggctcctatcgctatacagaatttctgactgggcttgggagactgatagagctgaaagactgccagcccgacaaggtgtatctgggaggcctcgatgtgtgcggtgaggacgggcagtttacttactgctggcatgatgatatcatgcaggctgtctttcatatcgctacccttatgcccactaaagacgtggataagcatcggtgtgataaaaaacgccacctgggtaatgacttcgtgtccatagtctacaacgattcaggagaagattttaagctgggaactattaagggccagtttaacttcgtgcatgtcatcgtgacccctttagattacgagtgcaatctggtttccctccaatgcagaaaggatatggaaggtcttgttgacaccagcgttgccaagatcgtctctgatagaaacttaccctttgtggccagacagatggccttacacgcaaacatggcgagccaagttcaccacagccgctccaaccctaccgacatttatccttccaaatggatagctcgccttcggcacattaaacgcctcaggcaacggatatgcgaagaagccgcttatagtaacccctcgctgccactcgtgcaccccccaagccacagcaaggcacctgcgcaaacacccgcagaacccacccccggatacgaggtggggcagagaaagaggctcatatcaagcgtggaggattttacggaattcgtgtag

SEQ ID NO: 31306 - DNA, 516 bp, synthetic construct
  misc_feature 1..516: note = Description of Artificial Sequence: Synthetic coding sequence
  source 1..516: mol_type = other DNA
ttcccaagggatctcagccttatcagtcccttggcccaggccgtcaggtcctctagtcgcacaccctcagataaaccagttgcccatgtggtggccaatccccaggccgaggggcaactgcagtggctcaataggcgggcaaatgccctgctcgctaacggggttgaattgcgggataatcaactcgttgtgcctagcgaaggtctctacctgatatactctcaagtgctgtttaaaggtcaagggtgtccatctacacacgtgctcctcacccacactatttctcgaatcgccgtgagctatcaaactaaggtcaaccttctgagtgccattaaaagtccatgtcagcgggaaacccccgaaggtgcagaggcgaaaccgtggtatgagccaatttacctgggcggtgtgtttcagttggagaaaggagaccgactatccgccgagataaacaggcccgattacctagactttgccgaatctggccaggtgtacttcggtattatcgccctgtag

SEQ ID NO: 31307 - DNA, 306 bp, synthetic construct
  misc_feature 1..306: note = Description of Artificial Sequence: Synthetic coding sequence
  source 1..306: mol_type = other DNA
atggcaatgatggaggtgcagggtgggccaagtcttggccaaacctgcgtgcttatcgtcatttttactgtcctgttacagagcctgtgtgtggctgtgacatacgtttactttacgaatgagctgaagcagatgcaggacaagtactctaagagtgggattgcatgcttcctgaaggaagacgacagctactgggatcctaatgacgaggagagtatgaattctccctgctggcaggtgaagtggcaactgcgccagttagtgcgcaaaaccccccgaatgaagcgcctctgggcagccaagtag

SEQ ID NO: 31308 - DNA, 846 bp, synthetic construct
  misc_feature 1..846: note = Description of Artificial Sequence: Synthetic coding sequence
  source 1..846: mol_type = other DNA
atggccatgatggaggtacagggcggaccctcactggggcagacctgtgtactcattgtgatctttacggtgctgctccagagcctgtgcgttgcagttacttacgtgtatttcactaacgaattgaagcagatgcaagacaagtattccaaaagtggaatcgcctgcttccttaaagaggatgattcttactgggaccccaatgatgaagagtccatgaacagcccttgctggcaagtgaagtggcagttgcggcaactggtgcgaaagatgattttacgaacctccgaagagacgataagcaccgtccaggagaaacagcagaatattagtccactggtaagggaacgaggcccacagcgggtggctgctcatatcaccggaacaagaggaagaagcaacacactgtctagtcccaattctaagaacgagaaggcgctaggtaggaaaataaacagttgggagtcttcgagaagcggccactccttcctgagcaatttgcatctcaggaacggagagttagttatccatgagaaaggattttactacatttattcacaaacatattttcgcttccaggaggaaatcaaggaaaatacaaaaaatgacaagcaaatggtgcaatatatttacaaatatacctcctatcccgatcccatccttcttatgaagagcgcacgcaacagctgctggtccaaggatgctgagtacggcctctatagcatttatcagggtggaatctttgagctcaaagaaaatgatagaatctttgtgtccgtgacgaatgagcacctaattgatatggatcacgaggcatctttcttcggagctttcctggtcggctag

SEQ ID NO: 31309 - DNA, 858 bp, synthetic construct
  misc_feature 1..858: note = Description of Artificial Sequence: Synthetic coding sequence
  source 1..858: mol_type = other DNA
atggatgatagcactgaaagagagcagtctcggttgacatcttgcctgaagaagagagaagaaatgaagcttaaagagtgtgtgagtattctgccccgtaaggaatcaccatctgtcaggtctagtaaagatggcaaactccttgcagctactctgctgctcgctctgctgtcatgctgcctgaccgtcgtgagtttctatcaggtcgcagcactgcaaggcgatctggcatcattacgagccgaactgcaggggcatcacgcagaaaagcttccggcaggagccggagctccgaaagccggattggaagaagcccctgcagtcactgccggtctcaagatctttgagcctccggcaccgggtgaggggaatagctcccaaaactccaggaacaaacgtgccgtacagggtccggaagagaccgtaacccaagattgtttacagctaatcgcggactccgagacccccactattcagaaaggctcttatacgtttgtaccgtggctcctcagctttaagcgcggttctgcattagaagagaaagaaaacaagattctcgttaaagagacaggctatttctttatatacggtcaggtactgtatacagacaaaacctacgcaatggggcacctaatacagagaaagaaagtgcacgtcttcggggatgaactaagcctcgtgaccttattcaggtgtattcaaaacatgccagagacactacctaataacagctgctactccgctggcatcgccaagcttgaagaaggggacgaactccagcttgccataccgcgtgaaaatgcacaaatttccctggacggcgacgtcacatttttcggagcgctgaaactgctatag

SEQ ID NO: 31310 - DNA, 801 bp, synthetic construct
  misc_feature 1..801: note = Description of Artificial Sequence: Synthetic coding sequence
  source 1..801: mol_type = other DNA
atggatgactccacggaacgggaacaatctcgcctaaccagctgcctcaaaaagagagaggagatgaaactgaaagagtgcgtcagtatcctgccacggaaggagtcacctagtgtgcggagtagtaaggacggcaagcttctcgcagccacgctattgcttgcactcctgtcttgctgcttaactgtggtctcattctatcaagttgctgcgcttcagggtgacctagcctcgctgcgcgcagagctacaaggccaccatgcagaaaagctgcccgcaggcgcaggggcacccaaggcaggactggaggaggctcccgctgtcactgccggattaaagatctttgaaccacccgctcctggtgaagggaactcaagccaaaactcacgcaacaagcgcgctgtacagggccctgaagagaccgggtcatacaccttcgtgccttggcttttgagtttcaagagagggtccgccctggaggagaaggaaaacaagatcctcgtgaaagagaccggctactttttcatttatgggcaggtgctgtataccgacaaaacatatgcgatgggacatctgatacaacgcaaaaaagtacatgtgtttggcgacgagctatctctggtgacccttttccggtgtatacagaacatgccagagaccctgccgaataatagctgctacagtgccggtattgccaaattggaggagggggacgagctgcagcttgctattcctcgcgagaacgcgcaaatcagtctcgatggggatgtgaccttttttggtgccctcaaactcctctag

SEQ ID NO: 31311 - DNA, 495 bp, synthetic construct
  misc_feature 1..495: note = Description of Artificial Sequence: Synthetic coding sequence
  source 1..495: mol_type = other DNA
atggatgactctaccgagagggaacagagtaggctgactagctgcctcaaaaagcgagaagaaatgaagcttaaagagtgtgtgtctatcttacctagaaaggagtctccttcggtgcggtccagtaaagatggaaaattgctggctgctacactcctgttggctctgctttcatgttgtctgacagtggtgagtttttaccaggtggccgcactgcagggggatctcgccagcctgagagcagagttacagggacaccacgccgagaaactcccagctggggctggcgcacccaaggccggtttagaagaggccccagctgtcactgcaggcttgaagatatttgagccccctgcccctggagagggcaactccagccagaacagcaggaataaaagagcagtccaagggccagaggaaacggtgacacaggactgcttacaactgattgccgattctgagactcctaccatccagaaagggttcatttattag

SEQ ID NO: 31312 - DNA, 2700 bp, synthetic construct
  misc_feature 1..2700: note = Description of Artificial Sequence: Synthetic coding sequence
  source 1..2700: mol_type = other DNA
atgcctacgctaggttggctccccgagaaccgtgatatctcagaggatcaaagcagtgctgagcagacccaggctctggcatcccaggccagccagtttctagctaaagtggagagctttgagcgtcttattcaagctggacgtctgatgccgcaggaccaggttaaggggtttcagcgtctgaaggcagcccacgccgctttggaggaagagtatttaaaagcgtgccgcgagcagcaccccgcacaacctctggccggttctaagggaacacctggcagatttgacccccgacgagaacttgaggctgaaatctacagattaggctcctgcttggaggaactcaaggagcacatagatcagactcagcaggaacccgagcctccaggttccgattccgctctggactcaacgcccgctctaccttgtctccaccagcctacacatctgccagcacccagcgggcaagcccctatgcctgcaataaaaactagctgtcctgaacctgccactacaacagccgcagcttctacaggtccctgccctctccacgtgaatgtggaggtatcctcagggaacagtgaggttgaggatcggccacaggatcccctcgccaggctgcgacacaaagaactgcaaatggagcaggtgtaccacgggctgatggaacggtacctgagcgtaaagtctctgccagaggctatgagaatggaggaggaggaagagggcgaagaggaggaggaagaagaggggggaggagacagcctagaggtggatggagttgctgcaacgcctggcaaggctgaggctacccgtgtcctgcccagacagtgccccgtccaggcggaaaagtcacacggcgctcctctagaagaggccacagagaaaatggtaagcatgaaaccaccagggttccaggcctctttggcgcgagacggacatatgagcggcctcgggaaagctgaagctgccccaccaggccctggtgtcccccctcacccccctgggaccaaaagtgccgcttcccatcagtcttcaatgacctctctcgaaggtagcgggatatcggagcgtttgccccaaaaaccattgcatcgtggtggcggaccacacctggaggagacctggatggcttctcctgagactgactcaggattcgtgggaagtgaaaccagccgcgtctccccactgacccagacccctgagcaccgtctatcccatatttccacagccggtacccttgcccagccgtttgccgcatctgtccccagggacggcgctagttatcctaaagccagaggcagcctcataccacgtagggccactgaaccatctactcccaggtctcaggctcagaggtatctcagttctccatccggtccgttacggcagcgcgctccaaacttctcccttgaacgcacattagccgcagaaatggctgtgcccggttcagaatttgagggtcataagaggatttccgagcaacctctccctaacaagaccatctcccccccacctgcacctgcccctgctgccgctcctcttccctgtggaccaaccgagaccataccctcattcctccttactcgcgctggacgagatcaggccatttgcgagctacaagaagaagtgtcgcgactccgacttaggctggaagactcactccaccaacccttacaaggcagccctactcggcctgctagcgcttttgatcggcctgctcgaacaagaggccgtcccgcagacagccccgctacctgggggtctcactatgggagcaaaagcacagagcgacttccgggagaaccacggggagaggaacaaatcgtgccacccggacgtcagcgcgctagatcatctagcgtgcctcgggaggtgttgcggttatctctgtcctcagaatcagaactccccagcctccccttgttctcagaaaagtccaagactaccaaggattctccacaggccgctcgggatggaaaacgcggagttgggtcggccggttggcctgacagagtgaccttcaggggccagtatacggggcacgagtaccacgtcctgagccctaaagctgtgccaaaaggcaatggaactgtgagctgtcctcattgtcgcccaatcagaacccaagatgccggaggtgccgtgacaggtgacccactgggtcctcctccggctgacaccctgcagtgtccactttgcggccaagtggggtcccccccagaggctgatggacctggcagcgcaaccagcggcgcagagaaggcgaccactcgccgtaaggcttcaagcacaccctcaccaaaacagcggagcaaacaggctggctccagcccacgccctccccctgggctttggtatctagccacagcccctcctgcacctgctccacccgcttttgcctatatcagttctgttcctatcatgccttatccccctgctgccgtctattacgcccctgccggtccaacctctgctcagccagcagccaagtggcccccaactgcttctccacctccggcacgaaggcaccgccacagtatccagttggacctaggtgatctggaggaactgaataaggctctttcaagagccgtgcaggccgctgagtcggtgcggtccaccacacgacagatgcgatcaagtctttccgcagacctgcgccaggcccattccttgcggggaagctgtttgttttag

SEQ ID NO: 31313 - DNA, 1569 bp, synthetic construct
  misc_feature 1..1569: note = Description of Artificial Sequence: Synthetic coding sequence
  source 1..1569: mol_type = other DNA
atggcgcttctgccacgtgcgctgtcagcaggggctgggccatcctggagacgcgcagcacgcgctttccggggattcctcttactcctacctgaacccgctgccctcaccagggctctgtccagggctatggcgtgcagacaggagccccagccacagggaccccctccagccgcaggggcagtcgccagctatgactatctggtgataggaggcggttcgggagggctggccagtgccagacgggcagctgaattgggagccagggccgctgtcgtggagagtcataaactaggaggtacgtgtgtgaatgtaggatgtgtgccaaaaaaagttatgtggaacactgctgtgcattctgaattcatgcacgaccatgcagattacggctttcccagctgcgagggtaagtttaactggcgcgtgatcaaggagaagcgagacgcttacgtgtctaggctgaatgcaatctatcagaataaccttaccaagtcacatatcgaaataatccgcggacacgcagcctttacctctgaccccaaacctaccattgaagtgtccggcaaaaagtacacggctccccacattctgatcgctacagggggaatgccttctactccccatgaatcacagatacccggtgcctcgctcggcatcacctccgatgggttctttcagctggaggagctccctgggaggtccgttatagtgggcgcaggctatatcgccgttgaaatggcagggatactgtctgccttaggcagcaaaacctctctgatgatccgacatgataaagtgctaagatctttcgatagcatgatctccaccaattgtacagaagagctggagaacgcaggcgttgaggttttgaagttcagccaggtcaaagaggtgaaaaaaacattgtctggcttggaggtgtcaatggtcaccgcggtccctggccgactgccagttatgacaatgattccagacgttgattgcctgctgtgggccatcggacgagttcctaacaccaaagatctgtcgctaaataagctcgggattcagactgacgataagggacacatcatcgtggacgaatttcagaacacaaacgtgaaaggaatctatgcagttggagacgtgtgcggcaaggcactccttacaccagtcgccattgctgcagggcgtaagttggctcaccgcttgttcgaatacaaagaagactctaaactcgattacaataacatccctactgtcgtgttctcccatcctcctatcggaactgtcggtctcactgaggacgaggcgatacacaaatacgggatcgagaacgtgaagacttactctacgagcttcacccccatgtatcacgcggtgacaaagagaaagacgaagtgtgtcatgaagatggtgtgcgccaataaggaggagaaggttgtcgggatccacatgcaggggttgggctgtgatgagatgctccaggggtttgcggttgcggtcaagatgggagccaccaaggcagattttgataacactgtcgcgatccatcccacaagttctgaagagctggtgactcttcggtag

SEQ ID NO: 31314 - DNA, 1323 bp, synthetic construct
  misc_feature 1..1323: note = Description of Artificial Sequence: Synthetic coding sequence
  source 1..1323: mol_type = other DNA
atggagcagcgagggcagaatgctcctgccgcttccggtgccaggaaaagacatgggccagggcctagagaagctaggggtgccaggccgggtccccgagtgccgaaaaccctggtgctcgtcgtggcggcagtgctcctgctggttagcgccgagtcagctttaattacacaacaggacctggcccctcagcagagagctgcccctcagcagaaacggtctagtccctctgaaggtctttgcccgcctgggcaccacatcagcgaagatggtcgggactgcatctcttgtaaatatggacaggactactctacccattggaacgacctccttttttgtctgcgttgtacccggtgtgactcgggtgaggtcgaactgtccccttgtacgacgacccggaatacagtctgccagtgtgaggaaggaacatttagagaagaggacagcccagaaatgtgtcgcaagtgcagaactgggtgcccaagaggaatggttaaggtcggggactgcacaccgtggagcgatattgaatgcgtgcataaagagtcaggaaccaaacatagcggagaggtccccgctgtagaggaaactgtaacttcctccccaggtactcctgcatcaccgtgttccctgtcaggaattatcatcggcgttacggtggccgctgtggtccttattgtggccgtttttgtgtgcaaatccctcctttggaagaaggtgctaccctaccttaaggggatctgtagtggtgggggtggagatcccgagcgggtggataggtctagccagcgccctggggctgaagataacgtgctaaatgagattgtgtccatcttgcagccaacccaggtgccagagcaagaaatggaggtgcaggagccggcagagcctactggcgtcaatatgctgagtcccggtgagtccgaacacttactagaaccagccgaagccgaaaggagccagcgtagaagattgcttgtgcccgcaaacgaaggcgaccctacagagaccctccggcaatgttttgacgatttcgcggacctggtgccattcgactcgtgggagcctctgatgcggaaactgggattaatggataacgaaataaaggtagcgaaagcagaggccgctggtcaccgtgatacactgtacacaatgttgatcaaatgggtcaataagactgggagggacgcctccgtacataccctgcttgatgctcttgaaactctgggagaaagactggcaaaacagaaaattgaagaccacctcctcagctccgggaaattcatgtacctagagggcaatgcggatagtgctatgagctag

SEQ ID NO: 31315 - DNA, 1236 bp, synthetic construct
  misc_feature 1..1236: note = Description of Artificial Sequence: Synthetic coding sequence
  source 1..1236: mol_type = other DNA
atggagcagagggggcagaatgcccctgcggcttcaggcgcacgcaagagacacggcccaggcccacgagaagccagaggggcacgccctggccctcgggtgcccaagacactagtgctagtcgtcgccgctgtactgctgttggtgtcagcggagagtgcactcattactcaacaagatctggcacctcagcagagggcagcccctcagcagaagaggtcatcaccaagcgagggactctgcccacccggacaccacatttccgaagacggtcgcgattgtataagctgtaagtacggccaggattattctactcattggaacgatctgttgttctgtctccgatgtacaagatgtgactccggcgaggtcgaactgtcgccttgtaccaccaccagaaacactgtatgtcagtgcgaggagggcactttcagggaagaagactcccctgaaatgtgtcggaagtgtagaaccggatgccctcggggaatggtgaaggtgggggactgcacgccatggtcagacatcgagtgtgtgcataaggagagcggaatcatcatcggagtgacagtcgcagccgttgtgctgatcgtcgcggtcttcgtctgcaaaagcctgttatggaaaaaggtattaccctatctaaaaggcatttgctccggagggggaggcgatccagaaagggtcgaccgaagcagccagcgcccaggcgctgaggacaatgtcttgaacgaaatcgtatcgatactccaacctacacaggtgcccgagcaagagatggaggtacaggaacccgcagaacctacaggggtgaatatgctttcccctggcgaaagcgaacatcttctggaaccggctgaagctgagcgtagccagcgacggcgacttctggtgcccgctaacgagggagatcccacagaaactctccgacagtgttttgacgatttcgctgatctggtgccgtttgatagctgggagcccctgatgcggaaactcgggctgatggataatgaaataaaggtggccaaggctgaggccgcaggacatagggatacgctatataccatgcttatcaagtgggtcaataaaacagggcgtgacgccagtgttcacacactcctggacgcactggagactttgggcgagcgcctggccaagcagaagatagaggatcacctcctctcatcagggaaatttatgtaccttgaaggtaatgccgatagcgctatgagttag

SEQ ID NO: 31316 - DNA, 783 bp, synthetic construct
  misc_feature 1..783: note = Description of Artificial Sequence: Synthetic coding sequence
  source 1..783: mol_type = other DNA
atgtgcaggaaatgcagaactggatgccctagggggatggttaaggtgggcgactgcacgccatggagcgacattgaatgcgtgcacaaggaaagcggcatcattatcggtgtgaccgttgcagccgtggtgctcatcgtggccgttttcgtgtgtaaatctctgctttggaaaaaggtcctgccttatctgaagggaatttgcagcggcggtggcggagatccggagcgagttgatcggtcatcccagcgccctggcgctgaggacaacgtgttaaatgaaattgtctccatcctgcaaccgactcaggtgcccgaacaggagatggaggtccaggaacccgcagagcctaccggggtaaacatgctcagtcctggagaaagtgaacacttgttggagcctgccgaagccgaacgctcccagagaagacgcctattggtgccggcaaatgaaggcgaccccaccgagaccctccggcagtgctttgacgacttcgctgacctggtgccctttgactcatgggaaccactaatgaggaagttgggcctgatggataacgaaattaaggttgcaaaagccgaagcagctggtcacagggatacgttgtacaccatgctcataaagtgggtgaataaaaccggaagagacgcgtccgtccacacactcctggacgcgctggagaccctcggtgagagactggccaaacaaaagatcgaggaccatctgctatcaagcgggaaattcatgtatctggaaggcaatgcagatagtgctatgagctag

SEQ ID NO: 31317 - DNA, 1161 bp, synthetic construct
  misc_feature 1..1161: note = Description of Artificial Sequence: Synthetic coding sequence
  source 1..1161: mol_type = other DNA
atgggcctctggggacagagcgtaccaaccgcctctagtgccagagcagggagataccctggtgccagaacagcatccggaactaggccctggctgctggatcctaagattcttaaatttgtggtattcatagtcgcagtgctgctccctgtccgggtagattctgcaacaatccctcgccaagacgaggtgccccagcagactgttgccccacagcaacagagacgatccctcaaggaggaggagtgtcctgctggctcgcaccggagcgaatacaccggagcctgcaacccatgcacagagggcgtggattacaccatagcatccaacaacttaccctcctgcctgctgtgcaccgtgtgcaagtcgggacaaacaaacaaatcctcttgcacaaccactagggacacggtgtgtcagtgcgagaagggctcttttcaggacaagaactctccggagatgtgtcggacctgcaggactggatgcccaaggggaatggtgaaggtctctaattgcacgccacggtccgacatcaaatgtaagaatgaatccgcggctagctcaaccggcaagacgccagcagctgaggaaaccgttaccacaatcctgggtatgttagcaagtccgtaccattacttaattattatagtcgtcctggtgataatcttggccgtcgtagtcgtggggttttcatgcagaaaaaagttcatttcctacctcaagggtatctgctccggaggcggtggtggcccagagagggttcacagggtgttgtttcgcagacggagttgcccttcccgtgtgccaggggcagaggacaatgctcggaacgagacactgtccaacaggtatctccagcccacccaagtctcagaacaggaaatccagggacaggagctggccgagctgactggagtgaccgtcgaactgccagaagagccccagagattgcttgagcaagccgaggccgaggggtgccaacgcagacggctgctcgttcctgtgaatgacgccgatagcgccgacataagcacccttttggatgcgtccgccactcttgaggaggggcatgccaaggaaaccatccaggatcagcttgtgggttcggagaagcttttctacgaagaagacgaagccggttccgccacatcctgcctctag

SEQ ID NO: 31318 - DNA, 1368 bp, synthetic construct
  misc_feature 1..1368: note = Description of Artificial Sequence: Synthetic coding sequence
  source 1..1368: mol_type = other DNA
atgggcctgagtaccgtccctgatttgttgctgccccttgtgcttctagaactgctcgtgggtatttacccttcgggagtgataggcctcgtgccccacttaggagacagagagaagcgcgactctgtgtgtccacagggaaagtatattcaccctcagaataactccatttgttgtactaagtgtcataagggaacgtatttatataacgattgccctggtcctgggcaagatacagactgtagagaatgtgaatctggatcattcactgcttctgagaaccatctgcgacactgtctgtcctgcagcaaatgccggaaagagatggggcaagtggaaatctcgtcctgcactgtcgacagggacacagtgtgtggttgccgcaagaaccagtatcgtcattattggagcgaaaatctgtttcagtgcttcaattgctcactctgtctgaacggcaccgtccatctctcttgtcaggagaaacaaaatacagtctgtacatgtcacgctggtttcttccttcgcgagaacgagtgtgtgtcttgtagcaattgcaagaagagccttgaatgcaccaaattgtgccttccgcagattgagaacgttaaaggcactgaggatagcggtaccaccgtactcctgccccttgtcatcttcttcggcctgtgcctactgagtctcctattcataggcctgatgtatagataccagcgctggaagtcaaagctttattctattgtctgcgggaagtccacccccgaaaaggaaggggaacttgagggcaccacaaccaagccactcgctcctaacccgtcattctcgccaacacccggattcacaccgacgctaggtttcagccctgtgcctagttccacatttacgtccagcagtacgtatacgcccggtgactgccctaacttcgcagcccctagacgggaggtcgcacccccatatcagggagcagatcctattcttgccaccgccctggcatctgatccaatacccaatcctctgcaaaaatgggaggactctgctcataaacctcagtctctggacactgatgatccagcgaccttgtacgccgtggtggagaacgtgcctcccctccggtggaaagaattcgtcaggaggcttggactcagcgatcatgagatagacagactggagctgcagaacggtaggtgtttgagggaagctcagtatagcatgttggctacgtggaggcggcgtacccctcgccgagaagcaacactcgagctcctcggcagggtcttgagagacatggatctcctgggttgtctggaagatatcgaagaggcactgtgcggccctgctgcgctccccccagcgccttccctcctgagatag

SEQ ID NO: 31319 - DNA, 657 bp, synthetic construct
  misc_feature 1..657: note = Description of Artificial Sequence: Synthetic coding sequence
  source 1..657: mol_type = other DNA
atgggactttccaccgtccccgaccttttgttgccccttgttctgctggaactgctagttgggatctatccctctggcgtcattgggctagtgccccacctgggagaccgcgaaaagagggacagcgtgtgccctcaagggaagtatattcacccccagaacaactccatttgctgcacaaagtgtcacaaaggtacatatctatacaatgactgcccaggcccaggacaggacaccgactgtcgggagtgcgagtccgggagtttcactgctagcgaaaaccatctgagacactgcctcagctgcagtaaatgccggaaagagatgggccaggtggagatctcgtcctgtacagtggaccgggacacagtctgtggctgtagaaagaaccagtaccgtcattattggtcagagaacctgtttcaatgttttaattgttccctgtgtctcaacgggacggtgcacctctcatgtcaggaaaaacaaaacaccgtctgcacgtgtcatgcaggattcttcctgagggagaatgaatgtgtcagttgttcaaaggtactgctgtgcagaccaggctggaacgccgtggcccgaagcagattgactgccacttctgcctcccaaatccaggctattctgttgctgcaacctcccaagtag

SEQ ID NO: 31320 - DNA, 1386 bp, synthetic construct
  misc_feature 1..1386: note = Description of Artificial Sequence: Synthetic coding sequence
  source 1..1386: mol_type = other DNA
atggcccctgttgcagtttgggctgccttggctgtgggtctagagctgtgggctgctgcccatgccctgccagcacaggtggctttcaccccctatgcgccagaacccggaagcacctgtcgcctgagagagtactacgaccagaccgctcaaatgtgctgctctaaatgttcaccagggcagcacgcaaaggtcttttgtactaagacgagtgatactgtgtgcgactcttgcgaggatagtacctacacccagctctggaactgggtgcccgagtgcctttcatgcgggagccggtgctcaagcgatcaggtggagacacaggcatgcactagagagcagaaccgaatctgtacatgtcggccaggctggtattgcgcactcagtaaacaggagggatgtaggttatgtgcaccgctgcgcaagtgcaggcccggattcggagtcgcaagaccaggaactgaaacatcagacgtggtctgcaagccttgcgcccctgggaccttcagcaatactactagcagcacagacatctgtcgtcctcatcagatttgcaacgtggtagccatccctggaaatgctagcatggacgccgtgtgtactagcacatcacccactcggagcatggcccctggggcagttcatctcccacagcctgtctccacacgatcccagcatacccagcctactcccgaacccagcaccgctccctccacgagttttctgctccccatggggccatccccgcctgccgagggttcaacaggcgactttgctctgcccgtgggcctcatcgtgggggtgaccgctctgggtctgcttattatcggtgtagtgaattgcgtcattatgacacaggttaagaaaaagcctctgtgcctccagcgggaagccaaggtgccacatctgcccgctgacaaagcgaggggaacccagggcccagagcagcaacacctgctaatcacggcgcctagctccagctcttcgtccttagagtctagcgcgtccgcccttgacagaagagcgccaaccagaaatcaaccacaagcgcctggcgttgaagcttccggtgcgggagaggcgagagcctccaccggctcttccgattctagccccggtggccacggaactcaggttaacgtgacctgtattgtgaatgtttgttcttcatccgaccatagctcccagtgcagctcccaggcatcatccactatgggagacacggattccagtccatctgaatcaccgaaagatgagcaggtgcccttctcaaaggaggagtgcgcgtttcgctcccagctggagactccggagaccttattagggagtaccgaggagaagccattgcctcttggtgtaccagacgctggcatgaagccttcctag

SEQ ID NO: 31321 - DNA, 807 bp, synthetic construct
  misc_feature 1..807: note = Description of Artificial Sequence: Synthetic coding sequence
  source 1..807: mol_type = other DNA
atggctccagtggctgtctgggcggctctcgctgttgggctcgaattgtgggctgcagctcatgcgctccctgcccaagtggcctttaccccctacgcgcctgaacccggtagcacatgtaggctacgcgaatactatgaccaaacagcacaaatgtgctgcagtaaatgtagccctggtcagcatgccaaggtgttttgcaccaagacctcagataccgtctgcgactcctgcgaggattccacatatacacagctgtggaattgggtgccagaatgtttgagttgtggctcacggtgttcttctgatcaggtagagacccaggcctgcacccgcgaacaaaaccggatctgcacctgccggcctgggtggtattgtgctctgagcaagcaggagggttgcaggctttgtgcccctctccggaaatgccgcccaggctttggagtggccagacccggaacagagacgtccgatgttgtgtgtaagccctgcgcacctggaactttcagtaatactacttccagcaccgacatttgtcgaccccatcagatttgcaatgtggtcgcaatcccagggaatgcctcgatggatgcagtgtgtaccagcacttcgcccacccgaagcatggccccaggagctgtacatctgccccagccggttagtactagaagtcagcatacccagcccactcccgagccttcgactgccccatccactagctttcttctacccatgggaccctcccctcctgcagaggggagtacaggagatttcgccctccccgtggtgtcactgtcttcgagttag

SEQ ID NO: 31322 - DNA, 468 bp, synthetic construct
  misc_feature 1..468: note = Description of Artificial Sequence: Synthetic coding sequence
  source 1..468: mol_type = other DNA
atggcccctgtcgctgtgtgggctgcgctggctgtggggctcgaactgtgggcagcagcccatgctctgccagctcaggtggccttcacaccttacgcacccgagcccggtagcacatgtcggctccgagaatactacgatcagacggcacaaatgtgttgctcaaagtgtagccccggtcaacatgctaaggtgttctgtaccaagacgtcagacaccgtctgcgatagttgcgaggattcaacctacacccagctgtggaattgggtgccggagtgcctgagctgcggcagccgttgctcgtccgatcaggttgagacccaggcctgtacacgcgagcagaacagaatatgcacgtgtaggccgggatggtattgtgccctctctaagcaggaaggatgcaggctttgtgcaccattgcgaaagtgccgccctggctttggagtggctcgccctgacctgagctag

SEQ ID NO: 31323 - DNA, 114 bp, synthetic construct
  misc_feature 1..114: note = Description of Artificial Sequence: Synthetic coding sequence
  source 1..114: mol_type = other DNA
atggctcctgtggccgtctgggcggctctggccgtgggtctggagttatgggctgccgctcacgcactaccagcacaggtcgatcccggtccattatttccccatccaggctag

SEQ ID NO: 31324 - DNA, 1968 bp, synthetic construct
  misc_feature 1..1968: note = Description of Artificial Sequence: Synthetic coding sequence
  source 1..1968: mol_type = other DNA
atggggacgtcaccttcaagcagcaccgccctagcctcctgttccagaatcgcccgaagagccacagccactatgattgccggttctctgctgctgcttggattcctatcaacaactacagctcaacccgagcaaaaggctagtaacctcataggcacgtaccggcacgtcgatagagctaccggccaggtcctgacctgcgacaaatgtccagctggcacctacgtatctgagcactgcacgaatacgtccctgagagtctgctcatcctgccccgtgggaacttttactagacatgagaatggaatagagaagtgccatgactgctctcaaccatgtccctggcccatgatagaaaagctcccttgcgctgcgcttacagaccgcgaatgcacctgcccaccaggaatgttccagtctaacgctacttgcgcccctcatacagtatgtcctgtgggatggggcgtgcgaaagaaaggcactgaaactgaggacgtgcgttgtaaacagtgtgctcgcggtacatttagtgatgtcccatcaagcgtaatgaagtgcaaggcatacacggattgtctctcccagaatcttgtggtgatcaagcccggtacaaaggaaaccgacaatgtttgcgggacactgccatccttctcttcttcaacctccccatccccagggaccgcaatcttcccacggcctgagcacatggaaacacacgaggtgcccagctccacctatgtacccaagggcatgaacagcacggaaagcaatagctctgcatcggtgcggcctaaggtgttatcatccatccaagaggggaccgtgcccgataatacttcctcggctcggggtaaggaagacgttaataagacattgcccaatctgcaggtcgtaaatcaccagcaaggtccgcatcacaggcacatcctgaaactgctcccatctatggaagccacaggtggggaaaagtcttcaaccccgatcaagggccctaagcgaggacaccccagacagaacctgcacaagcactttgacatcaacgagcaccttccttggatgatcgtgctcttcctgctgctggtcctggtggtaattgtcgtatgtagtatccgcaaatccagccgcaccctgaagaaggggccaagacaggatccatctgctatcgttgaaaaagctgggctcaagaaatccatgacccctacccaaaaccgggaaaagtggatatattattgcaatggccatggtattgacattctgaagctcgtagccgctcaagtgggcagccaatggaaagacatctaccagtttctttgcaatgcttccgaacgcgaggtggctgccttttctaacgggtacacagctgatcacgagagagcctatgcagccctgcagcattggacaattcgcggacctgaggcaagtctggcgcagttgatctcagctctaagacaacaccggagaaacgacgtggtagaaaaaatcaggggtttgatggaggacactacccagttggagacagataagctggcactgcccatgtccccatctccgctgagtccatcgccaatacctagccctaacgccaagctcgagaatagtgccttgttgacggtggaaccctccccccaagataaaaacaaagggttttttgtggatgagagcgaacccttgcttcgatgtgattcaactagcagcggtagctctgccctcagtcgcaacggttcatttatcacaaaagaaaaaaaagacaccgtccttcgtcaagtcagactggacccatgcgatcttcaacccatctttgacgacatgctgcattttctgaatcccgaagagttgcgtgtgatcgaggaaatccctcaagcagaggacaaactggacagactgttcgaaattattggcgttaaatctcaagaggcttcccagactttgctggacagcgtttactcccacttacctgatctgctctag

SEQ ID NO: 31325 - DNA, 1035 bp, synthetic construct
  misc_feature 1..1035: note = Description of Artificial Sequence: Synthetic coding sequence
  source 1..1035: mol_type = other DNA
tcttgctgtcgcccttggagacctctgggtgcacgatctcctgcccgtcctagtcgccctaagcgcggtcatccgaggcagaacctccacaagcatttcgacatcaatgagcacctcccctggatgattgtgttattcctgctgctcgtccttgtggttattgtcgtgtgctctataagaaaatcatctaggacactcaaaaagggtccaaggcaggacccgtcagccatcgtagaaaaggccggactgaaaaagagcatgactccaacccagaatagggaaaagtggatctattactgtaatggtcacggaatagatatcttgaaactggtggccgctcaggtcggctctcagtggaaggatatatatcagttcctctgcaatgcttctgagagggaagtcgcagcgtttagcaatggctatactgcggatcacgagcgggcatacgcggcactgcagcactggactattcgtgggccagaggcttcccttgcgcagctgatcagtgctctgcgccagcaccggcgtaacgacgtagttgaaaaaatccggggtctgatggaggacacgacacagctggaaactgataagctggccctgccaatgtcacccagccctctgtctccaagcccgatccccagcccgaatgctaagctagaaaacagtgcactcctcactgtggagcctagccctcaggacaagaataaagggttcttcgtggacgagtccgagccactactcaggtgcgattcgaccagcagcggttctagcgccctgtctcggaatggctccttcatcactaaggaaaagaaagacaccgtgctgcgccaggtgcggctggacccttgtgatcttcaacccatcttcgacgacatgttgcactttttgaatccagaggagctccgcgtgatagaggagataccgcaggctgaagacaagctcgatcgcctgttcgagatcattggggttaagtcccaagaggcttcccaaactcttctcgatagcgtttattcacacctgcccgacttgctatag

SEQ ID NO: 31326 - DNA, 1119 bp, synthetic construct
  misc_feature 1..1119: note = Description of Artificial Sequence: Synthetic coding sequence
  source 1..1119: mol_type = other DNA
atggaacagaggcctaggggctgtgctgctgtggcggctgccctgttgttggtcttacttggcgctagagctcaaggcggaacccggtccccacggtgcgattgtgcaggtgacttccacaagaaaatcggcttattctgttgtcggggttgccctgccgcttcccaagtcgctctggagaattgcagcgccgtggctgacacccgatgcgggtgtaaacccggttggttcgtagaatgtcaggtgtctcagtgcgtttcctcctctccattctattgccagccgtgccttgactgcggtgcgctccatcggcacaccaggttgttgtgctcaaggcgggacactgactgcggcacttgtttaccagggttctacgagcatggcgacggctgcgtgagttgtccaacgagtacactggggtcttgcccagaaaggtgtgccgctgtgtgcgggtggcggcagatgttttgggtccaggtgctgcttgcgggactggtggtgcccctcctgctcggggctacacttacctacacatataggcactgttggccacacaagcctcttgtcaccgcggacgaggctggaatggaggccttgacaccgcctccggcaactcacttaagcccattggacagcgctcacaccctgctagccccaccggattcctcggaaaaaatttgtaccgtgcaattggtcgggaacagctggactcctggctatccggaaacccaagaagctttatgtccccaggtaacatggtcctgggatcaactgccaagcagagcactggggccagcagcggctcctaccctctccccagagagccccgctgggagtcccgcaatgatgctgcagcccggaccacagctgtacgatgtgatggacgccgttcccgcaaggcggtggaaggaatttgtcagaacgctgggacttcgcgaagccgagattgaagccgttgaggtcgagattgggaggttcagagatcaacagtatgaaatgctgaagcgatggcgacagcaacagcccgcagggctcggggcagtgtatgccgctctggagcgcatgggcttggatggttgcgtcgaagacctgcgctctagactacagagaggcccatag

SEQ ID NO: 31327 - DNA, 705 bp, synthetic construct
  misc_feature 1..705: note = Description of Artificial Sequence: Synthetic coding sequence
  source 1..705: mol_type = other DNA
atggaacagcggcctagaggctgtgccgcagttgcagccgctctgctccttgtgctgctgggcgcacgcgcacaaggcggaacgaggtcaccacggtgtgattgtgcaggagacttccacaagaaaatcgggctcttctgttgcagggggtgtcccgctgatgaggctggcatggaggcgcttacacccccaccggctacccacttatccccattggattcggcccataccctcttagctccacccgatagttctgaaaagatctgcaccgtgcagctcgtgggcaactcgtggacacctggataccctgagactcaagaggctctctgtccacaggtaacatggagttgggaccagctaccgtcaagagctctgggcccagctgctgcaccaacattaagtcctgaaagtcccgcaggcagccccgctatgatgttgcagccaggcccacaactgtatgacgtgatggatgcggtgcccgctcggcgatggaaagagtttgtaagaacacttggtctcagagaagcagagatcgaggcagttgaggtggagattggtcgctttcgcgaccagcagtacgagatgctgaaaagatggaggcagcaacagcctgccggattgggtgccgtatatgccgctcttgagcggatgggcctggacggttgcgtagaggatttgaggtctcgcctacagagaggcccttag

SEQ ID NO: 31328 - DNA, 1143 bp, synthetic construct
  misc_feature 1..1143: note = Description of Artificial Sequence: Synthetic coding sequence
  source 1..1143: mol_type = other DNA
atggaacagaggccgagaggatgcgctgccgtggctgcagctctcctcctggtgctcttaggcgcacgggctcaagggggaaccaggtctccacgctgcgactgtgccggtgattttcacaaaaaaatcgggctgttttgctgtagggggtgtcctgcagggcattatctcaaagctccctgtacagaaccgtgtggaaatagcacatgcctggtttgcccacaagacacattccttgcatgggagaatcatcataactctgagtgtgcgagatgccaggcctgcgatgagcaggcaagccaggtcgcactggagaattgctccgccgtggctgacacacggtgtgggtgcaagccagggtggtttgtggagtgccaggtgtctcagtgcgtgtcctcctctcctttctattgccagccatgcctcgattgtggagccctgcaccgacacacaagactgctctgttctagaagagataccgattgcggaacttgcctgcccggattttacgagcatggagacggctgcgttagctgcccgacgagtaccctgggaagttgcccagagagatgcgcagccgtgtgtggctggcgacagaatgaggcaggcatggaggccctaacccccccacccgcaacacacttgagtcctctggacagcgcccatacactcctggcacccccagacagctcagaaaagatctgcacagtgcaactggtgggcaattcttggacgccaggttatcccgaaactcaggaggcgctctgccctcaggtgacttggagttgggatcagctcccttccagagcactggggcctgcggctgcccctaccctttcaccagaaagccccgcaggctctcctgctatgatgctccagccagggcctcaactctacgatgtcatggatgccgtaccagccagacgatggaaggagtttgttcggactctcggactgcgcgaagctgagattgaggctgtggaggtggaaatagggaggttccgggaccaacagtatgagatgctgaagcgctggaggcaacagcagcccgcaggcctaggcgcagtgtacgccgctctcgagcggatgggcctggatggctgtgtcgaggacctgagatctcggctgcaacggggtccctag

SEQ ID NO: 31329 - DNA, 1254 bp, synthetic construct
  misc_feature 1..1254: note = Description of Artificial Sequence: Synthetic coding sequence
  source 1..1254: mol_type = other DNA
atggagcagcggccacgcggatgcgctgctgttgccgctgctctcctgctcgttctgctgggagccagggctcaaggcggaactaggtcacctcgctgcgattgcgctggagactttcataagaaaatcggcttattctgttgcagaggctgtccggcaggtcactatctgaaggctccttgcactgaaccatgtggtaatagcacgtgcctagtctgcccacaggatacttttctcgcctgggaaaatcatcataactccgagtgtgcacgttgtcaggcatgcgacgagcaggctagtcaagtcgccttggagaattgctcagccgtcgcagacactaggtgcgggtgcaagcccggatggttcgttgaatgtcaagtctctcagtgtgtgtctagttccccattctactgtcagccatgcctggattgcggcgctttgcacagacacaccagattgctgtgctcaagaagggacactgactgtggcacctgtctgcccggattttacgaacatggagatggttgtgtaagttgtcccactagtactctggggtcatgtcccgaacgctgcgctgccgtgtgcggttggcgacagatgttctgggtgcaagtgctgcttgcagggttggtagtgccactgctcctgggtgcaacacttacatacacatacaggcactgttggcctcataaacctctcgtgacagcggacgaggcgggaatggaggccctgactcctcccccagccacccatctgtcgccgctggatagtgcccatacattgctggcaccgccagattcatcggagaaaatatgtactgtgcagcttgtgggcaattcctggaccccaggctaccctgagactcaggaagccctgtgtcctcaggtcacatggtcttgggaccagttaccatcacgcgcacttggccctgcggcagcaccaacactctccccagaaagcccagccggtagcccggcaatgatgctgcagccaggccctcagctctatgacgttatggatgcagtgcctgccagacggtggaaggaatttgtacgcacattgggactcagagaggcagaaatagaagcggttgaggtggagattggacggtttcgtgaccagcagtatgaaatgctgaagcggtggcggcagcaacaacccgcaggattaggggctgtctacgctgccctggagcgtatggggctcgacggttgcgtggaagacctgaggagtagactacaaaggggaccctag

SEQ ID NO: 31330 - DNA, 1281 bp, synthetic construct
  misc_feature 1..1281: note = Description of Artificial Sequence: Synthetic coding sequence
  source 1..1281: mol_type = other DNA
atggaacagcgccctcgcggatgcgccgctgttgcagcggctctgctcctggtgctgcttggagcacgggctcaggggggaactcggtcacctcgctgtgattgcgctggcgattttcacaaaaaaatcggtctgttttgttgcagggggtgccccgctgggcattacttaaaggccccatgcacagagccctgcggcaattccacgtgccttgtttgcccccaggatactttcctggcatgggagaatcatcacaacagtgagtgtgcacgctgtcaggcttgcgatgaacaggcctcccaagtcgccttagaaaactgtagcgctgtcgcagacactaggtgtggttgtaaaccgggatggtttgtggagtgccaggttagccagtgtgttagctctagcccgttttactgccagccctgcctagattgcggggcactacatcgacacacacggctgctgtgttcccgcagggacacagattgtggaacctgtctgcctggtttttacgagcacggcgacggttgtgtcagctgtccaactcctcccccttctcttgcgggtgcaccatggggggcagtgcagagcgctgtccccctgtctgtagcgggtggccgtgtcggggtgttttgggtccaggtgctgctcgcagggttggtcgtgcccttgctgctgggcgcaaccctcacctatacttacagacactgttggcctcataaaccactcgtaactgcagacgaggcgggaatggaagctcttacccccccacccgcaacccacctgtccccgctcgattccgctcacacgctgctggcaccccctgacagtagtgaaaaaatttgtacagtacagctggtaggcaactcgtggactcctgggtaccctgagacacaggaagcattatgccctcaggtgacatggtcttgggatcagctgccttcccgcgcacttggacccgctgccgcacccaccctgtccccggagtccccagccggttcccccgctatgatgctgcagccagggcctcaattgtacgatgtcatggacgccgtgcctgcacgccgttggaaggaatttgtccgtactctcggactgagggaggcagagatcgaggctgttgaggtggaaatcggacgttttcgggaccagcagtatgagatgttgaagaggtggagacagcagcaaccagccggtctgggggcagtgtacgcagccctcgaaaggatggggctggacggctgtgtagaggatctgcgctctcgccttcaacggggaccttag

SEQ ID NO: 31331 - DNA, 768 bp, synthetic construct
  misc_feature 1..768: note = Description of Artificial Sequence: Synthetic coding sequence
  source 1..768: mol_type = other DNA
atggggaatagttgctacaacattgtagcaacactgcttttggtcctcaactttgagaggacccgatctctgcaagatccgtgcagcaactgtccggcagggactttctgtgataataacaggaatcagatctgctccccgtgtcctccaaactcttttagctctgctggcggacagagaacatgcgacatatgcaggcagtgtaaaggggtgttcaggactcggaaggagtgttcaagtacgagcaatgcagagtgtgattgcacccccggattccactgtctgggggcaggatgttcaatgtgcgaacaggattgtaagcaaggacaagagctgaccaaaaagggttgcaaggactgctgctttggcaccttcaatgatcagaaaagaggaatctgtaggccatggacaaactgttctctggacggaaagagcgtcttagtgaatgggaccaaagagcgtgatgttgtgtgcggcccaagtccagcagatctttccccaggggcatcctcagtcaccccgcctgccccagctcgggagccaggccactccccccaaatcatctccttctttcttgctctgacaagcaccgctttgctttttttgttgttcttcctaacgttaaggttttcggtcgtgaaacgcggtcgtaaaaagctcttgtatatctttaagcagccctttatgcgaccagtgcaaacgacgcaggaagaggatggctgttcatgtaggttccccgaggaagaagaagggggatgcgaactgtag

SEQ ID NO: 31332 - DNA, 5919 bp, synthetic construct
  misc_feature 1..5919: note = Description of Artificial Sequence: Synthetic coding sequence
  source 1..5919: mol_type = other DNA
atggatccaactggatctcagctggattctgacttctcacaacaagacaccccatgccttattattgaggattctcaaccagagagccaggtcctggaagacgactccgggagtcatttttccatgttatcccgtcacctgcctaacctacagacacacaaagagaacccagtgctcgacgtggtgagcaatccagagcagactgccggagaagaaaggggagacgggaactctggatttaatgaacacctgaaagaaaacaaggtcgccgaccccgttgacagctcaaatctggatacttgtggctctatctctcaggtcatcgagcagctgcctcagcccaataggaccagttctgttttgggcatgtctgtggagagcgcaccagccgtcgaggaagagaaaggcgaggagcttgagcaaaaagagaaagaaaaggaagaagacacatccggcaacaccacccactccctcggcgcagaagacaccgcttcatcccaattgggatttggggtgctggaattgagtcaaagccaagatgtggaggaaaacaccgtgccgtacgaagtcgataaggaacagttgcagtccgttacaacaaattcagggtacactcggttgtctgatgtggacgcgaacacagccatcaaacatgaggagcaaagcaacgaagacatccctatcgcagagcagtccagtaaagatatccccgtgacagcccagccttctaaggacgtgcacgtagtcaaggagcagaacccccctcccgcaaggagcgaagatatgcctttctcgccaaaggcatctgtagcggctatggaagccaaagagcaactctccgcgcaagagctgatggagtccggtctgcagattcagaagagtcccgagccagaggttttgtccacccaggaggacctgttcgatcagtctaacaaaactgtgtccagtgacggctgcagcacccctagccgggaagagggtggatgttcactcgcctcaacacctgctacaacccttcacctgctgcagctgagtggtcaaaggtctctcgtgcaggactctctgagcaccaacagctccgatctggtcgccccaagcccagatgcgttccgaagcacacccttcattgtgccaagttccccaacagaacaggaaggcaggcaggacaagccgatggacaccagtgtgctgtccgaagaaggcggtgaaccgtttcagaagaagttacaaagcggagagcccgtggagctcgagaatccaccgttgctcccagagtctacagtttcaccacaagccagcaccccaatctctcagagcaccccagtgtttcccccaggtagtctacccatcccctctcagccccagttttctcatgatatctttatccctagcccgagtttagaagaacagagcaacgatggtaaaaaggacggtgatatgcatagcagctcactaaccgtggaatgttctaaaacaagcgagatcgagcctaagaattccccagaagatctgggactctctttaacgggcgattcctgcaagctgatgctctccaccagcgaatatagccagtcaccgaagatggagtcccttagctctcacagaatcgacgaggatggcgagaatacccagatcgaggatacggaacctatgtcacccgtcctcaatagtaagtttgtccctgctgagaacgattctatcctcatgaatccagctcaggacggagaggtccagcttagtcagaacgatgataaaacaaagggtgacgacacggacactcgtgatgatatttccattctggcaacaggctgcaaaggcagggaggagaccgtagctgaagacgtctgtatagacttgacttgcgacagcggtagccaggcggtgccatcccccgctactcggtctgaggctctgagctctgtgctggaccaggaggaggctatggaaatcaaggagcatcaccctgaggagggaagttccggctcagaagtggaagaaattcccgagaccccctgcgaaagccagggggaggaactgaaggaggagaatatggagtcagtgcccctgcatctatcactaacagaaactcagtcacaggggctgtgcctccaaaaagagatgccaaagaaggagtgctcagaggctatggaagttgagacctcagttattagtatagattctccccagaaattagctattctggaccaggagctggagcataaagagcaggaggcttgggaggaagctacttctgaggactctagcgtggtcattgttgatgtgaaggagccctccccacgcgttgacgtgtcatgcgagccacttgagggagtggagaagtgctccgatagtcagtcgtgggaagacatagcaccggagattgagccgtgtgcagagaatagactggacaccaaagaagaaaagtcagtggaatacgagggcgatctgaagtccggcactgccgagacagagccagtggaacaagactcctcccagccatcgttgcctcttgtccgggctgacgacccgctgaggcttgatcaggagttgcagcagccccaaacccaagaaaaaaccagcaattctcttaccgaggatagtaaaatggctaacgcaaagcagctgtcttccgacgcagaggcacagaagctaggcaagcccagcgcccatgcctcccagtcgttttgtgaatcatccagcgaaaccccctttcattttacactgcccaaagagggcgacatcattccccctctcaccggcgctactccacccctgatcggccacctgaaattagagccaaagcggcattcaacaccgatcggcattagtaactatcctgagtcaaccattgcgacttccgatgtgatgagcgagtccatggtggagacccatgaccctatccttgggagcggcaagggtgactcaggcgctgccccagatgtagacgacaagctctgccttagaatgaagcttgtgagccccgaaaccgaagcctccgaggagtctctccagttcaacctggagaaacctgctacaggcgagcggaaaaacggttccacagctgtagctgaatctgtggcgtctccgcagaaaaccatgtctgtcttaagttgcatttgtgaggcccgtcaggaaaacgaagccaggtcggaggatccgccaaccacccccatccggggtaaccttcttcattttccgtcctcccagggggaggaggagaaagagaagctcgagggtgatcacacgattcgacagtcccagcaacctatgaagcctatctccccagttaaggaccctgtttcgcccgctagccagaagatggtgatccaggggccatcctcccctcagggcgaggcaatggtgacggatgtcctggaggaccagaaggaaggcaggtctaccaataaagaaaacccatcgaaagcattgattgaaagaccctcccagaacaatattggcatccagaccatggaatgcagcctgcgggttcctgagacagtgtccgccgcaactcagaccatcaagaatgtatgcgaacaggggacatctaccgttgatcagaattttggaaagcaggacgctactgtgcagactgaacggggaagcggcgaaaagcctgtgtctgcccctggggatgatactgagagcctgcacagccagggcgaagaggagttcgacatgccgcagccccctcacggccacgtcctccaccgtcatatgcggacaattcgcgaagtgcgtacactggtgacccgcgtaataacagatgtgtactatgtggatggcactgaggtagaaaggaaggtgacagaggagaccgaggaacctatcgtggagtgtcaagagtgcgaaaccgaagtaagccccagccagacaggtgggagttccggggatctgggcgacattagctcttttagctccaaagccagttcccttcatcggacaagttcaggaaccagcctttcggccatgcattctagcggttcaagtggtaagggggctgggccactcagggggaagaccagtgggacggaacctgccgatttcgctctgcctagttcacgcggaggaccaggcaagctgagcccaagaaagggcgtgagccagaccgggactcctgtgtgtgaggaagacggagatgccggtctggggattaggcagggcggaaaggcacccgttactccacgaggacgcggaagaagaggtcgtccccctagcaggaccaccggaactagggaaaccgctgtgcctggaccactcggaattgaggatatttcccccaatctgagcccagatgacaagtccttctcgagggtcgtgccaagggtgccagacagtactaggaggactgacgtgggagctggcgcactccggagaagcgactccccggaaatacccttccaggccgctgctggacctagcgacgggctcgacgcaagttctccaggcaattcctttgtgggactcagggtcgttgctaagtggtcatctaatggctatttctacagcggcaaaattaccagagacgtaggcgctggaaaatataaactgctgttcgatgacggttacgaatgtgacgttctcgggaaagatattctgctctgtgatcctatccccctggatacagaggtgacagcactgtcagaggacgaatacttttccgctggcgtcgttaaaggccaccgtaaggagagcggggagctatattacagtattgagaaagagggccagagaaaatggtacaagagaatggcagtaatcctatccctggaacagggcaatcgcctgcgcgagcagtacggcctcggaccctatgaagccgtcactcctctcacaaaagctgcggatatctcattagacaacctggtcgagggaaagaggaagaggaggagtaatgtttccagccctgcaactccgaccgcctcctcaagtagttccactactccgacccgtaagattacagaaagccctcgcgcttctatgggcgtcctgagcgggaagcgcaagctcattacatcggaggaagagagatcgccagccaagcggggtcgtaaatcggccacagttaaacccggagctgttggtgccggagagttcgtttccccatgtgagtcgggtgacaataccggtgaacctagtgctctggaggaacagcgcggtcccctgccgctgaataaaaccctgttcttaggctacgcctttcttctgactatggccacgacctccgataaactggcaagccgttcaaagctgcctgatggcccaacgggcagttccgaggaggaggaggagttcctggaaattcctcctttcaataaacagtacacggagtcccagcttagagcaggcgctggatacatcctggaagattttaatgaggcacaatgtaataccgcctaccagtgcctgctgatagccgatcagcattgcagaacccggaagtactttttatgcctggccagcgggattccttgcgtgtctcatgtctgggtacatgacagttgtcatgccaaccagctccaaaactaccgcaactacttgttgcccgctggatactccctggaagagcaacgcatcctggattggcagccacgggagaaccccttccagaatttgaaggtcttgctggtttctgatcaacagcaaaacttccttgaattgtggtccgaaattctgatgaccggaggtgctgccagcgtgaaacagcaccactcaagcgcccataataaggacatagccctcggagttttcgatgtcgtggtcacagatcccagctgccccgctagtgtcctcaagtgcgcagaggcccttcagctgcccgtcgtcagtcaggagtgggtcattcagtgcttgattgtcggggagcgcatcggcttcaagcagcacccgaaatacaagcatgattatgtgagccactaa

SEQ ID NO: 31333 - DNA, 5784 bp, synthetic construct
  misc_feature 1..5784: note = Description of Artificial Sequence: Synthetic coding sequence
  source 1..5784: mol_type = other DNA
atgccgggtgagcagatggaccccaccggcagccaattggactccgacttcagtcagcaggacacaccatgcttgatcattgaagacagccagcccgagtcccaggtgctcgaggacgattccggtagtcatttcagtatgctctctcggcatctgccaaatctgcagacacataaggagaaccccgttcttgatgtggtctccaacccagaacagactgctggcgaggagaggggagacggaaacagcgggtttaacgaacacttaaaagaaaataaggtggcagatcccgtcgacagtagcaaccttgacacttgtgggtccatttcgcaggtgattgagcagttaccacaacctaataggacttcctcagtgctgggaatgtccgtggagagtgcccctgctgtggaggaagagaaaggcgaggaactcgaacagaaggaaaaagagaaagaagaggacactagcggcaacacaacacatagcttgggcgcagaagacacagcaagcagtcagctggggttcggggttctggaactatctcagtctcaggacgtggaagaaaataccgtgccatatgaagttgataaggagcagctgcagtctgtcaccacaaactcagggtacactcgcctgtccgacgtcgatgccaacaccgcgattaagcatgaagaacagtctaatgaggatatccccatcgccgagcagtcttcaaaagatataccagtgactgcacagccttccaaagatgtacatgtggtgaaggaacaaaatccgcctcctgctcggagtgaggatatgccattttctccgaaagctagtgtagcggctatggaagccaaagagcagttgtctgcacaagagctgatggaatcagggctgcagatccagaagagccccgagccagaggtgctatcaactcaggaagatctgttcgaccaaagcaacaaaactgtgtcttccgacgggtgctccacaccgagccgggaagaaggcggatgctcgctcgcgagcacaccagccactacactccacctgctgcagctgtccggtcaacggtccctcgtgcaagactccctaagcaccaattcatctgatttggtagccccttctccagacgctttcaggtcaactccattcattgtgcctagttcccctactgaacaagaaggacgccaggacaaacctatggatacttcagtgctgtcagaggagggaggcgagccttttcagaagaaattacagagcggcgagccggtcgagctggaaaacccaccacttctgccagagtccactgtgtccccccaggcaagcacaccaatctcacagagcacaccggtttttcctcctgggagtcttcccatcccatcacagccccagttttcgcatgatatcttcatccccagtccaagcctggaggagcaatcgaatgacggaaaaaaagacggggacatgcattccagctcattgaccgtggaatgctccaagactagcgagattgaacctaagaactctccagaagacctcgggctttccctcactggcgatagctgcaaactgatgctgagtactagcgagtattcacaatccccaaagatggaaagcctttcctctcacaggatagacgaagacggtgagaatacacagatcgaagatacagagcctatgtcaccagtgctcaacagtaagttcgtcccagccgagaacgactctatcctgatgaatcctgctcaggatggcgaggttcagttgagccagaatgatgacaagaccaagggcgatgacactgacaccagagacgacatatcaattctggccacgggttgcaagggcagagaagagacagtggccgaagatgtgtgcatcgatctcacgtgcgattctgggtctcaggcagtgccaagccctgctactcgcagcgaggccctgtctagcgtgctggaccaggaagaggcaatggaaatcaaagagcaccatcccgaggaagggtcttcagggagtgaggttgaggaaataccagagaccccctgcgagagtcagggagaggagttgaaggaagagaacatggagtcggtacctctgcatctcagcctgaccgaaactcagtcccagggcctgtgtctgcagaaggagatgcccaagaaagaatgtagcgaggcgatggaggtggagacctccgtgatttccatcgattccccccagaaactggctattctcgatcaggagctggagcacaaggagcaagaagcttgggaggaggctacctctgaagacagcagcgtggtgatcgtcgatgttaaagaacctagccctagggtggacgtttcctgcgagcccttagagggcgtagagaagtgttccgactcccagagctgggaagacattgccccagagatagaaccatgcgcagaaaaccggttggataccaaggaggaaaaaagcgtggagtatgaaggagatcttaaatctggcactgccgagaccgagcctgtggagcaagactctagtcaacctagtctgcctctcgtccgagccgacgatcctctccggctggaccaggagctgcagcagccgcaaacacaagagaagacctccaattctctgaccgaggattcgaaaatggctaatgctaaacagctgagttccgacgcagaagcccaaaaattgggaaaaccctcagctcatgcgtctcagagtttttgcgagagctcaagtgagacccctttccatttcactctgcccaaggagggagatattatccctccccttacaggtgcaactcctccgctcatcggtcatctcaagctggagcctaagcgccattccactcctatcggaatctctaattatccagagtcaacaattgccacctccgatgttatgtctgaatcaatggtggagacgcatgacccgatactggggtctgggaagggcgacagcggtgcagcacccgatgtggatgacaagctctgtctgcggatgaagctggtgtccccggagacggaagcctcagaggagagcctgcagtttaatctggagaaaccggctaccggcgagcgcaagaacggctctaccgctgtcgctgaaagcgtagcatctccccagaaaacgatgtccgtattgtcttgtatctgtgaggctcgacaggaaaacgaggccagatcggaggaccctcctactacacctatccgaggaaacctcttacatttccccagctctcaaggggaggaagagaaagagaaacttgagggtgatcatacaatccggcagtcccagcaaccaatgaaaccaatcagtccggtcaaggaccccgtttcacctgccagtcagaaaatggtgattcaggggcctagcagcccccagggagaagccatggtgacagacgttcttgaggatcagaaggagggccgttcaacaaacaaagagaatccaagtaaggcgctgatcgagaggccaagccagaacaatatcggcattcagactatggagtgtagtctgcgcgtaccagaaacagtttctgccgctactcaaaccatcaagaatgtgtgcgagcagggcacctctactgttgaccagaacttcggcaagcaggacgctaccgtccaaacggaacgtggctctggggagaaacccgtcagcgccccaggagacgacacagagtcgttgcattctcagggggaggaggaattcgatatgcctcaacctccccatggccatgtgctgcatagacatatgaggaccatcagagaagtgcgaactttggtgacaagagtcataacggatgtttactatgtcgatggaactgaagtggagcgaaaggtcacagaggagacggaggagccaattgttgagtgccaggaatgtgagactgaagtgagcccatcccaaaccggcggatcaagcggggacctgggcgacatttcttcgttctcttctaaagcctcctcactccaccggacatctagtggcacgtcactgtcagcaatgcacagcagcggctccagcggtaaaggggcaggaccactgagaggtaagacctctggaaccgagcccgctgatttcgccttaccttcttctcgcggagggcctggcaaactcagggaaacagcggtgccgggtccactcggcatcgaggatatctccccaaatttaagcccagatgataaaagcttcagtagagtggtcccacgggtgcccgactctacgcgcaggacagacgtgggagcaggggcactacgaagatccgacagtcctgaaatccccttccaagcagccgctggtccctccgacggcctcgacgccagctcgcctgggaattcattcgtgggattaagagtggtcgccaaatggtctagtaatggatatttttatagtggaaagatcacccgcgacgtgggtgcaggtaagtacaagctgctgtttgatgacggctacgagtgcgatgtccttgggaaggacatcctcctgtgtgaccccattccattagacactgaagttaccgccttatccgaggatgaatattttagcgcgggagtcgtgaaaggacatagaaaggaatcaggcgaactctactattctatcgagaaggaaggacagagaaagtggtacaaacgaatggcggtaattctctctctggagcagggcaatcgcctgcgggagcagtacggtctgggtccctatgaagccgtgacaccccttactaaggcagctgatatctccttggataatctggtggaaggcaagcggaagcgcagatcaaacgtgtcatcaccagctactcccaccgcttcctctagctcatctacgacaccaactaggaaaattaccgaatccccccgagcatccatgggggtgctgagtgggaaacgcaagctaataaccagcgaagaggagagatcacccgctaagcggggtcgcaaatccgcaaccgtcaaaccaggagctgtgggcgcaggtgagtttgtaagtccttgcgaatccggggataataccggagagccatcggccctggaagaacagagaggcccattgcccctcaataagactttatttttgggctacgcctttcttctgacaatggccaccacatccgataagttagcaagcaggtctaagctaccggatggccctacgggtagtagtgaggaggaagaggaatttctggaaattccacctttcaacaaacagtataccgagtcacagctgcgggcaggagccggatacatcctcgaggacttcaacgaggcacagtgcaataccgcgtatcagtgcctgctgatcgccgaccagcactgcagaacgcgaaagtacttcctgtgcctcgcaagcggtattccatgcgtatcacatgtttgggtccatgatagttgtcacgcaaaccagctacaaaactaccgtaactacctgctacccgcaggctactcgctcgaagaacaacgtatcctcgactggcagccgagggagaatcccttccaaaacctgaaagttcttctggttagcgaccagcaacagaactttctagaactttggtccgaaatcctaatgactggaggcgcagccagtgtaaaacaacatcactcttcagcccataacaaggatattgctttaggagtctttgacgtggtggtgaccgatccaagctgtccagccagcgtactgaagtgtgcagaggccttgcagttgccggtggtgtcccaggaatgggtgatccaatgcctgattgtcggcgaacggatcgggtttaagcagcaccccaaatacaagcacgattacgtgtctcactag

SEQ ID NO: 31334 - DNA, 5933 bp, synthetic construct
  misc_feature 1..5933: note = Description of Artificial Sequence: Synthetic coding sequence
  source 1..5933: mol_type = other DNA
atgccgggtgagcaaatggatccaacaggatcacagctagatagcgatttcagccagcaggacacaccatgcctgatcattgaagacagtcaacctgaatcccaggtattagaggacgatagtggctcccacttctctatgttgtcccggcatctgcccaacctgcagacacacaaggagaacccggtactcgatgtcgtctccaatccagagcagaccgcaggcgaagagcgaggagacggtaactccggcttcaatgagcaccttaaggagaacaaggtggcagatcccgtggattcctcaaacctggatacctgcggcagtatcagtcaagtgattgagcagctccctcagcccaaccgcacaagctccgtgcttggcatgtcagttgagtctgccccagctgtggaagaggaaaaaggcgaagagctcgaacagaaagagaaggagaaggaagaggatacctccgggaacaccacccactctttaggagccgaagacacagcatcaagtcaactcggattcggagtgctagaactttcccagagccaggacgtcgaggaaaataccgttccttacgaagttgacaaggaacagctgcagagtgttaccaccaacagtggctatacgaggctgtccgatgtagatgccaataccgcaattaaacacgaagaacagagcaacgaagatatccctattgccgaacagagctccaaagacattccggtcactgcgcaaccatctaaggacgtgcacgtggtcaaagaacagaacccgccaccggcacggagtgaggacatgccattttctcctaaggcaagcgtggccgcaatggaagccaaggaacaactgtccgctcaagaactgatggaatccggtctgcaaatacagaagtcacctgaaccagaggtgctgtccacccaggaagacctctttgaccagtccaacaagacagtgagttccgatggttgtagcacaccttccagagaggaggggggttgtagcttagcttcaacccccgcaacaacactacacctgctgcagctatctggccagagaagcctcgtccaggatagccttagcacgaatagtagcgaccttgttgctccgagtcctgatgcgtttagatcaacacctttcattgtgccatcttcccccaccgagcaggagggccgacaggataagccaatggacacgtcagttctgtctgaggagggcggagaaccttttcaaaaaaaactgcagtcgggagagccagtggagctggagaatcctcccctgttgcctgaaagcaccgtgagtccacaggctagtacaccaatttcgcagtcaacaccagtgtttccacctggtagtctccctatcccctctcaaccacagttttcccatgatatttttatcccctcccctagcttggaggagcaaagcaatgacggcaagaaggacggcgacatgcactcctcaagcctgactgttgagtgttctaagacctctgaaattgagccaaagaactctcctgaggatttagggctcagcctcacaggggattcctgcaagttgatgctaagcacatcggagtattctcagagtcccaaaatggaaagtcttagctcacatcgcattgacgaagatggcgagaatacccagattgaagatacagagccaatgtccccggtcctcaatagcaaatttgtgccggcagagaatgatagtatcttaatgaatccagcacaggacggcgaagtgcagctgtcccagaacgacgacaagaccaaaggagacgacactgatactcgcgacgatatctcaatcctggctacaggatgtaaagggagagaggagaccgtagccgaggatgtgtgcattgacctgacttgtgacagtggttcacaggccgtcccatcacctgccacccggagcgaagccctcagctccgttttagatcaggaggaagccatggaaatcaaggagcaccaccctgaggaagggagttcgggttcagaagtagaagaaatccccgagacaccttgtgagtctcaaggcgaagaacttaaggaggagaatatggaaagcgtcccgctacacctgtccctcaccgagactcagtcacaggggctgtgcctgcaaaaagaaatgcccaagaaggagtgcagcgaagcaatggaggtggaaacatctgtgatctctatagattcccctcagaaactcgcaattcttgatcaagagctggaacacaaggagcaagaggcatgggaggaggcaactagcgaggacagctcagttgtgattgtggatgtcaaggagccttctccacgagtggatgtgagctgcgaacctctcgaaggcgtggagaagtgctcagatagccagagttgggaggatatagctccggaaatcgagccttgcgccgaaaatcgactcgacactaaagaagagaaatctgtggaatatgagggtgatctcaagtctggtacggctgagaccgagcccgtcgagcaggatagcagccagccaagcctccctttggttagagccgatgaccccctgaggttggatcaggaactccagcagccacagacccaagaaaaaacttccaattccctgacagaagactctaaaatggctaacgccaagcagctgtcttctgatgccgaagcacaaaaattggggaagccctcggcacatgcaagccaatccttctgtgaaagcagcagcgagacaccattccactttactctgccaaaggagggtgacattatccctcctctcactggcgcaacacctcctctcattgggcacctaaagttagaacctaagcgccatagtactccgattggcattagcaattacccggagtctaccattgcaaccagcgatgttatgagcgagtccatggtggagactcacgaccctatccttggctccgggaagggcgattccggggctgctcctgacgtggacgataagctgtgtctccggatgaaactggtctctcctgagacggaggcgagtgaagaatcgctgcagttcaatttggagaaaccggctaccggggaacgaaagaacggttctaccgccgtggccgagtcagtggccagtcctcagaagaccatgtcggtgctcagctgcatatgtgaagcaaggcaggagaatgaggcgagaagtgaagacccgcctaccacccccattcgcggtaaccttttacacttcccttcctcccagggcgaggaggagaaagagaagttggagggggaccatactatcagacaaagccagcagcctatgaaacctatctcccctgtcaaagaccctgtaagccccgctagtcaaaagatggtaatacagggcccaagctcacctcagggcgaagccatggtcactgatgtactggaagaccagaaagaagggagatccaccaacaaagaaaacccaagcaaggcattgatagagcgcccttcacagaacaacattggcattcagacaatggagtgcagcctccgcgtgcccgaaactgtatcggctgccacacagaccattaaaaacgtgtgcgaacagggcacttccactgtagatcagaacttcggcaagcaggatgcaacggtccagaccgagagagggagcggcgaaaagcctgtctcagcccctggagacgacacagaaagccttcactcgcaaggggaagaggaattcgatatgccgcaacccccacacggccacgtactgcaccggcacatgcgaactatacgcgaggtgcgcactctggttactagagtaattactgacgtgtattatgtggacggcacagaggtcgagaggaaggtgacagaagagacagaggagccaatcgtcgaatgtcaggagtgcgaaaccgaggtctcaccctcacaaacgggcggatccagcggggacctaggggatatcagctctttcagcagcaaagcgtccagccttcacagaacatccagcgggacctccctttccgccatgcatagctctgggtcatcggggaagggggctggccctctaaggggtaagacaagcggaaccgagcccgctgattttgcgctgcccagcagtaggggaggtccaggaaagttgtctccacgcaaaggcgtttctcagactggtacaccagtctgcgaagaggacggcgacgctggcctgggaattcgtcaggggggaaaggctccagtaaccccacggggtcggggacgtcgcggacgaccaccaagtagaacaaccggtacacgagaaacagctgtgcccggacccttgggcatcgaggatattagccccaacctttcacctgatgataagagtttcagccgggtggtccctcgtgtaccagactctacaagaaggacagatgttggtgctggagccttgcgcaggtcagatagccccgaaatcccatttcaggcggctgcagggccttcggatggtctcgatgcctccagccccggaaactcattcgtcggcctaagagtagtcgcgaaatggtccagtaatggctatttctacagcggcaagatcactcgcgacgtgggcgctggcaagtacaagctgctgttcgacgacggttacgagtgtgatgtgctgggtaaagacattcttctctgtgaccccatcccgcttgatactgaggtgaccgctctaagcgaagatgagtattttagcgcaggggttgtgaagggccacagaaaggagtccggcgagctatattactctatagagaaagaggggcagcgaaagtggtacaagcgaatggcggtaattttatctctggagcaaggtaaccgcttgagagagcagtatggcctcggaccctacgaagctgtcactccactaactaaggccgcagatatctccctggacaacctcgttgaggggaaaagaaaaaggagatctaatgtgtcctctcctgctacccctacagcgtccagttccagttctacaactcctacaaggaagattaccgagtctcctcgagcatccatgggagtcctaagcggaaaacggaaactcatcaccagtgaggaggagaggagtccagcaaagcgcggacgcaaaagtgctacagtcaagcccggagcggttggtgcaggcgaatttgtatccccatgcgaaagcggcgataacactggggaaccatccgccctggaggagcaaagaggacctctcccactgaacaagacattattcctgggctacgcctttttattgactatggcgacgacttctgataaactggccagcagatcaaaactgcccgacggacccactggatcttccgaggaggaggaggagtttcttgaaattcccccatttaacaagcaatacaccgagagccaattgagggccggtgctggatacatcctcgaagatttcaatgaggctcagtgtaatacggcctatcagtgtctgcttattgcggaccaacactgcagaacccgtaagtactttttatgtttggccagtggcataccttgtgtgtcacacgtctgggttcacgacagctgtcatgccaaccagctgcagaactacaggaactacttacttccagccggttactccctggaggaacagaggatcctagactggcaaccacgcgaaaaccccttccaaaacctcaaagttctccttgtgtctgatcaacagcagaactttctcgaactgtggtccgagatcctaatgacagggggagccgcttccgtgaagcaacaccatagctccgcgcataataaagatatcgccctaggcgtgtttgacgtggtggtgacggatccaagctgccccgcaagtgtcttgaaatgcgctgaggcccttcaactgcccgtggtgtctcaggaatgggtgatccagtgtctcatcgtaggcgagcggattggctttaagcagcacccgaagtacaagcatgattacgtgagccacta

SEQ ID NO: 31335 - DNA, 5927 bp, synthetic construct
  misc_feature 1..5927: note = Description of Artificial Sequence: Synthetic coding sequence
  source 1..5927: mol_type = other DNA
atgccgggagaacagatggatccaactggtagccagctcgatagcgacttcagtcagcaagatactccctgcctgattatagaggatagtcagcctgaaagccaagtccttgaggatgactcgggctcccatttctcaatgctgtctcgacatttaccaaatctgcaaacacacaaggagaatcctgtgctggatgtggtgtcgaaccccgaacagaccgccggtgaagagcggggtgacggaaacagcggcttcaacgaacatctcaaagagaataaagttgccgaccctgtcgattcaagcaatctggacacatgcggatctatctcacaggtgattgagcagttaccccagccaaatagaacctccagtgtgttggggatgtccgtcgagagtgctcctgccgtagaagaagaaaagggcgaagaattggagcagaaggagaaagaaaaggaggaggacacttccggtaacaccacacactctctaggcgctgaggacaccgcctcatcacagctgggcttcggcgttttagaacttagccagtcacaggatgtggaggagaatacagtgccttacgaagtggataaggaacagctgcaatccgtgactacaaatagcggatacactcgcctgtctgacgtggatgcgaacacagccattaagcatgaggagcagagcaacgaggatattccaatcgctgaacagtcttcaaaagacatccccgtgacagcccagccatctaaggacgtccatgtggttaaagaacagaatcccccacccgctagaagtgaggacatgccttttagtcctaaggccagcgtagcagcaatggaagcaaaggagcaactgagcgcacaggagttaatggagtccggattgcaaatacagaagtctccggaacctgaagtgttgtccacacaggaagatctttttgaccagtctaataagaccgtctcaagcgacggctgttcaaccccttcccgggaggaaggaggttgttccctcgccagcactccagccaccaccctccacctgctacagctgtccggtcagcggtccttagttcaggacagtctcagcaccaactccagtgacctcgtggcccctagccccgatgccttccgctccacaccatttatcgtgccctcctctccgactgagcaggagggaagacaggataagcccatggacacctccgtactcagcgaggaagggggagaaccctttcagaagaaattgcagtcaggcgagccagtggaactggaaaatccacccttactaccagagagcaccgtgtcaccccaggcgagcacccccatatcgcagagtactcctgtcttccctcccggatccctcccaatacctagccaaccccagttttcgcacgatatattcatcccgagccccagtctcgaggagcaatcaaatgatggcaagaaagacggggacatgcactcttccagtttaacagtcgagtgttcaaagacctcagaaatcgagccaaaaaattctcccgaggacctggggctgagccttactggcgactcttgcaagcttatgctctccaccagcgagtactctcaatctccgaaaatggagtctctgagctcacatagaattgatgaagacggcgaaaatacccagatcgaggacaccgaaccaatgtctccagtgctgaactcgaaattcgttcccgcagagaatgattccatcctcatgaaccccgctcaggatggggaagtgcagttgtctcaaaacgacgacaaaacaaagggagacgataccgacacaagagatgatatctccatcctcgcaaccgggtgcaagggcagagaggagactgtggccgaggacgtgtgcatcgatcttacatgtgacagcggatcacaggcagtgcctagtccagcaacccggagcgaggctttgtcttcggtattagatcaggaggaggcaatggaaatcaaggagcatcaccccgaggaagggtccagcgggagcgaagtagaggagattcccgagactccctgtgaaagccaaggggaagagctcaaggaggagaacatggagtcagtgccactgcatctctctttgaccgaaacccagagccaaggactgtgcctccagaaggaaatgcctaagaaggagtgctcagaggccatggaagtagagactagtgtgatctctatagactcgcctcaaaagctggcaattctcgatcaggaactggagcataaagagcaggaggcatgggaagaagctacaagcgaagacagtagtgttgttatcgtggacgtcaaagaaccatcccccagggtcgatgtaagctgtgaaccccttgaaggagtcgaaaagtgctccgacagccagagctgggaggacatcgccccagaaattgagccgtgcgcagaaaatcgcctggacacaaaagaggagaagtctgttgaatacgaaggggatctgaagtctggcaccgccgaaacagaaccagtggagcaggactcatcccagccttccttgccacttgtgagagcagatgatccacttcgtctagaccaggaactccagcagccccagactcaggagaagacaagtaattctttaaccgaggactccaagatggcaaacgcaaaacagttaagctcagacgcagaggctcagaaactcgggaaaccctccgcacacgcctcccagagtttctgtgaatcctcctcagagaccccctttcattttactctgcctaaggaaggggacattatccctccgctcactggagcaacgccgccacttattggtcaccttaaactggagccaaaacgccatagcaccccaattggcatctcaaattatccagaatctaccatagctacctcagatgtcatgagcgagtccatggttgagacacacgatcctattctgggatcaggcaaaggagattccggcgctgcccctgatgtcgatgacaagttgtgcttgcgaatgaagttggtgagtcccgaaacggaggcatcagaagagtccctgcagtttaatttggagaagccagcaactggagaaagaaaaaatgggagcaccgcagtggcggagagtgtggcatccccccagaaaacgatgagcgttctctcgtgtatttgtgaggccaggcaggagaatgaggccaggtccgaggatcccccaactacgccgatcagaggaaacctgctgcacttcccttcaagccagggcgaggaagagaaagaaaagctggaaggggatcacacgattcgacagagtcagcagcctatgaaaccaatcagtcctgtcaaagacccggtgagccccgctagccagaagatggtaattcaaggcccttcttccccccagggcgaggccatggttactgacgtgctagaggaccagaaggagggcagatccactaacaaagagaacccctccaaagccttgatcgaacgcccatcacagaacaatattggaatacagacaatggagtgttctttacgagttcctgaaacggtgtcagccgcaacccagaccatcaaaaacgtgtgcgaacaggggacctctacagttgaccaaaacttcggcaagcaggatgccacagtgcagaccgaaagagggagcggagaaaaacccgtgagcgcccctggcgacgataccgagtccttacactctcagggggaggaagaatttgacatgcctcaacccccacacggtcatgttctgcacagacacatgcggactatcagagaggtccgcacactcgtgacacgtgttatcaccgacgtctactacgtcgacggtaccgaagtcgaaagaaaggtcaccgaagaaacagaggagcccatcgtggagtgtcaggaatgcgagacagaagtgtcccctagccagactggcggtagctccggggacctaggggatatctcgtccttcagtagcaaagcttccagtctccatcgtacttctagcggtacctcactcagcgcgatgcatagctccgggagctcaggaaaaggcgcaggccctttgagaggtaagacatccgggaccgagccggctgatttcgctctgccaagtagtcgagggggaccgggtaagctcagcccacgcaagggtgtgtcccaaactgggacgcctgtgtgcgaagaagatggtgacgctggactggggattcgccagggcggaaaggccccagtgaccccccgagggcgtggccgaagaggcagacccccaagccgaaccactggcactcgagaaactgctgtgccaggtcctttaggcatagaagacatctcccctaacctctcccccgatgacaagtctttctctcgggtcgttcccagagtgcccgattcaactagacgaacagatgtgggagctggggctctccgccgttccgattcaccagagattccgttccaggctgctgctggccctagcgatgggctggacgcgagcagccccggaaattcttttgttggcctgcgcgtcgtggcaaagtggagcagcaatggctacttctattccggcaagatcacacgcgacgtcggcgctggcaagtacaaattactcttcgacgatggttacgagtgcgacgtcctcggtaaagacatcttactgtgtgatcctatccccctggacactgaagttacagcactttccgaggatgagtatttttccgccggtgtggtaaagggacaccggaaggaaagcggggagctttactactcgattgaaaaggaggggcaacgtaaatggtacaagagaatggccgtgatcctctccctcgagcagggcaataggcttagggagcagtatggcctcggcccatatgaggcagtgacacccctgacaaaggccgctgatatttctcttgataacctggtcgagggtaagaggaagaggcgttctaacgtgtcatctcctgctaccccaactgcgtcctcctcatccagcaccacccctacccgaaaaataaccgagagcccgcgagcgagtatgggtgtgctttctggcaagagaaagctgatcacatcagaggaagagcgcagcccagctaagcgcggtcgaaagtctgctacagtcaagcctgtcggcgctggggaatttgtatcgccctgcgagagtggtgacaatactggcgagccgagcgcattggaagaacaacggggacctctgccgctgaacaagacactatttctgggttacgctttccttcttacaatggcgaccacaagtgataagctagcctctcggagtaaattgcctgacgggcctactggctcctctgaggaggaagaagagtttctggagattccaccctttaacaagcagtacaccgagagccagttgcgggctggagccggttacattctggaagactttaatgaggcgcagtgcaacaccgcttatcagtgcttgcttattgctgaccagcattgccgcactcgcaaatacttcctgtgtctggcgtcgggcattccttgcgtgtcccacgtgtgggtgcacgactcctgccatgctaaccagctgcaaaactatcggaactatcttttgccagctgggtacagtctggaggagcagcggatcctggactggcagcccagggaaaacccctttcagaacctgaaggtgctcctggttagcgaccaacaacagaatttccttgaactgtggtctgagatcctcatgactggcggagccgcatcagtcaagcaacaccactcgagcgctcacaacaaggatatcgccttaggtgtgtttgatgtggtcgtcaccgatccctcttgcccagcaagtgtgctgaaatgtgccgaagcactccaactcccggtcgtctcgcaggagtgggtgatccagtgcctgatcgtgggagaacgcatcggctttaaacagcatccaaagtataagcacgattacgtctcccacta

SEQ ID NO: 31336 - DNA, 1623 bp, synthetic construct
  misc_feature 1..1623: note = Description of Artificial Sequence: Synthetic coding sequence
  source 1..1623: mol_type = other DNA
atggctcagagtactgctaccagtcccgatggagggaccacattcgagcacttatggtcctccctcgaaccagatagcacgtactttgacctgccgcagtctagccgtggcaataatgaagtagtcggtggcaccgactcttccatggacgtgttccaccttgaaggtatgacaacatcggtgatggcccagttcaacctgttgagcagcaccatggatcagatgtctagtcgggctgcctctgcaagcccttacacgcctgagcatgcggcttccgtgccaacacattccccatacgcccagccgagctcaaccttcgacaccatgagccccgcacccgtgatcccctcaaatactgattacccaggccctcatcattttgaggttacatttcagcagagtagtaccgccaaatccgctacctggacatattcgcccctattgaagaaactgtactgccagatcgctaaaacatgtccaatccagatcaaagttagtactcctccaccacctggcaccgctattcgagccatgcccgtgtataagaaagcagagcacgtcactgatgttgtaaagcggtgtccgaaccatgaactgggtcgagacttcaatgagggtcagtccgctcccgcttcccatcttattcgggtagaggggaacaatctgagccagtatgtggacgaccctgtgactggaagacagagcgtggtggtcccttatgagccgcctcaggtcggcactgagtttacaactatactgtataatttcatgtgtaactctagctgcgtcgggggtatgaatcggcgacccatcctgataattatcaccttggagatgagagacggtcaggtcctgggaagacgaagttttgagggtcgcatctgcgcctgcccaggccgagatcgaaaggccgacgaggatcactaccgggagcaacaagccctcaatgagagcagtgctaaaaatggcgcagcctccaagcgagcattcaagcagtcacctcccgctgtgcctgctctgggggctggggtaaaaaagcggagacatggggacgaagatacatattacctgcaggtgcggggacgtgaaaacttcgaaatcttgatgaaattgaaagaaagtctggagcttatggaactggtacctcagccactcgtggactcatatagacaacagcagcagctgctgcagaggccattcttgaccgggcttgggtgccctaattgcatagaatacttcaccagccagggcctgcagagcatctaccatctccagaatctgaccattgaagatttgggcgcacttaaaattcccgagcagtaccggatgacgatatggcgtggccttcaggacctaaagcaaggccacgattactcgacagcccagcagctgttgagatcaagtaatgccgctaccatctctatcggcggtagcggagaactgcaacggcagagagtgatggaggcggtacacttccgggtacgccacaccattaccatccctaacaggggcggtccgggaggtggccctgacgagtgggccgactttggtttcgacctccccgactgcaaggctcggaagcagccgattaaggaggagtttacagaggccgagatccactag

SEQ ID NO: 31337 - DNA, 1500 bp, synthetic construct
  misc_feature 1..1500: note = Description of Artificial Sequence: Synthetic coding sequence
  source 1..1500: mol_type = other DNA
atggctcaaagcaccgccacgtcaccagacggcggtacaacttttgagcacttatggagctcacttgagcctgactcgacctacttcgacttgccacagagttcccggggtaacaatgaagtcgttggcggaacggacagtagtatggatgtgtttcacttggagggcatgaccacatctgtaatggcccagtttaacctgctgtcgtctaccatggaccagatgagctcacgtgcagcctccgcatcgccatatactccagagcacgctgcgtctgtcccaacccacagcccctacgctcagccatcgtcaacattcgataccatgtctccagcccctgtgattccatccaacacggactatcccggacctcaccatttcgaagtcactttccagcaaagctccactgccaagagcgccacatggacctacagcccacttctgaaaaagctgtactgccagatagccaagacatgccccattcaaatcaaagttagtacacccccacccccaggcaccgccattcgcgctatgcctgtttataaaaaagctgaacatgtgacagacgtggtgaaaagatgccctaatcacgagttgggtagagattttaacgaagggcaaagtgcacctgcatcgcatctgatacgcgtggaagggaataacctctcccagtatgtggatgatccggtgacaggccgacaatccgtagtagtaccatatgaaccgccacaagtcggaaccgagtttaccactatactgtacaactttatgtgtaacagctcttgcgttgggggtatgaacagacggccaatccttatcatcattactcttgagatgcgagatggccaggtgctgggccgaagatcctttgaaggacgcatctgcgcctgccctggtcgcgatcgcaaggctgatgaggaccactacagagaacagcaggccttgaacgaatccagtgcaaaaaacggcgcagccagcaagcgtgcctttaagcagtctccacctgccgtgccagctctgggtgcgggtgtcaagaaacgcaggcacggcgatgaggacacatactacctccaggtgcgtggacgcgaaaattttgaaattcttatgaagctcaaggagtccttggagctgatggagctggtccctcagcccttggtcgattcatatcggcagcagcagcagttgctgcaacgtccatcccacctacagccaccctcctatggaccagtactatcccccatgaataaagtccacggaggaatgaataaacttccctccgtcaaccagctggtcgggcagccacctcctcactcctctgctgccacccctaacctcggaccagtgggtccaggcatgcttaacaaccacggacacgctgtacccgctaacggagaaatgagcagcagccatagcgcccaatccatggtttcgggtagccactgcactccaccccctccataccacgcagacccatcccttgtccgaacttggggaccctag

SEQ ID NO: 31338 - DNA, 1668 bp, synthetic construct
  misc_feature 1..1668: note = Description of Artificial Sequence: Synthetic coding sequence
  source 1..1668: mol_type = other DNA
atggcccaatccacagccacatcacccgatggcggaactactttcgagcacttgtggagttctctggagcccgatagtacctatttcgacctgccccaatcttccaggggcaataacgaagtcgtcgggggaacggattccagcatggacgtgttccacctggaaggtatgacaacctctgtgatggcccaattcaatctcctgtccagtactatggaccaaatgtccagcagggccgcaagcgcctcaccttacactcccgaacatgcagcgtcagtgccaacccattctccttacgcccagccatctagcacttttgatacaatgtcaccagctcccgtcataccatcaaatacggattaccctggtccccatcacttcgaggtcactttccagcaatcttctaccgccaagagcgccacctggacctactctcctctgctgaagaagttatattgccagattgctaaaacctgtcctatccaaattaaggtatccacccctcccccaccagggacggctattcgcgcaatgccagtctacaagaaggctgagcacgtgaccgatgtagtgaaaagatgccctaaccacgaactgggcagggactttaacgagggccagagtgccccagccagtcatctgatcagggtggaagggaataacttgagccagtatgtggacgaccccgtgaccggcaggcagtcagtggtcgtcccatacgagcctcctcaggtcgggactgagtttacaaccatcctgtataatttcatgtgcaattcttcttgtgtcggcggaatgaacagacgtccaattctcattattattacactcgagatgagggatgggcaggtactgggaaggcgttcatttgagggtagaatctgcgcgtgccccggtcgagacagaaaggctgatgaagaccattatagggagcagcaggcactgaacgagtcctcggcaaaaaatggggcagcctcgaagagggcttttaagcaaagcccccctgccgtgccagccctgggggctggcgtcaagaagagaagacacggagacgaggatacctactacctccaggtgcgcggaagggaaaatttcgagatccttatgaagttaaaggagtcactggagttgatggagctcgtcccccaaccgctggtggacagctacaggcagcagcagcagctactccaacggccaccaagagatgctcagcagccctggccacgctccgcatctcagcgacgggacgagcagcaacctcagcgcccagtacacggacttggcgtgccccttcacagtgccactcctcttccacggagaccacagccccgtcaggatctgggcgcactgaaaatccctgagcagtacaggatgactatctggagaggacttcaggatctcaagcaggggcatgactattcaacagcccagcagctgttgaggtcttctaatgcagctactatttccattgggggaagcggtgaacttcagcgccagcgcgttatggaagctgtacactttagagttagacacaccattaccattcctaatcgcggtggccctgggggtggtccagatgaatgggccgactttggatttgatttacctgattgcaaagcaagaaagcaacctattaaagaggagttcacagaagccgaaatccattag

SEQ ID NO: 31339 - DNA, 1281 bp, synthetic construct
  misc_feature 1..1281: note = Description of Artificial Sequence: Synthetic coding sequence
  source 1..1281: mol_type = other DNA
atgctttacgtgggcgaccctgcaaggcacctagccacggcacagttcaatttgctctcctcgactatggatcagatgtcatctagagccgcaagtgcatccccatacaccccagagcacgcagcctctgtcccaactcatagcccctatgcccagccgagctccacgtttgataccatgtctccagcaccagtgattccttcaaatactgactatccgggtccccaccactttgaggtgactttccagcagtcttctacggccaagagtgccacatggacatactccccattgctcaagaaactgtactgtcagatcgcaaaaacctgccctattcagattaaggttagcactccaccaccccctgggactgctatccgggcaatgcccgtttataaaaaggccgagcatgttacagacgtggtcaaacgctgtcctaatcacgaattaggacgcgacttcaacgaagggcagtctgcacctgcatctcaccttattagggtcgagggtaataacctgtcccagtacgtggacgatcccgtaaccggtaggcagtcagtggttgtcccttatgagcctcctcaggtcggcacggaatttactacaatcttgtacaatttcatgtgcaacagctcctgtgtgggagggatgaaccgtaggccaatcttgattatcatcaccctggagatgcgggatggccaggtactcggcaggcggagctttgagggccgaatatgtgcttgcccgggaagagacaggaaggccgatgaggaccactatcgcgagcagcaagctctcaacgagtcttcggcaaagaacggggctgcttcaaaacgtgccttcaagcagtctcctcccgctgttcccgctctgggagctggagttaagaaacgtcgtcatggtgacgaagacacatattacctacaggtccgcggtagagagaatttcgagattctgatgaagctgaaagaatcactggaattgatggaactggtgccgcaaccactagttgatagctatcgtcagcagcaacagctccttcaaagaccaccgcgtgatgctcaacagccatggcccaggagcgcgtcacagcggagggatgaacagcagccacagcgcccagtacatgggctgggggtcccactgcactcagcgaccccactgccgagacgccctcagccacgccagtttttcaacaggattggagtttcgaaactgcatcgggtctttcatctgccacgggtcacagaacacctccctcctgctgaaccagaccattag

SEQ ID NO: 31340 - DNA, 1353 bp, synthetic construct
  misc_feature 1..1353: note = Description of Artificial Sequence: Synthetic coding sequence
  source 1..1353: mol_type = other DNA
atgctgtacgtaggagacccagctcgtcatttagcaaccgcccaatttaatctcctgtcttctacaatggatcagatgtcttcaagggccgcttcagccagcccgtatacgcctgagcacgcagcctctgtgcccacacattccccatacgcgcagcctagctccacctttgacaccatgagccccgcacctgtgatcccttcaaatactgactacccaggccctcatcattttgaggttacctttcagcaatctagcaccgcaaaaagcgctacatggacttattctccacttcttaaaaagttgtactgccagatagccaaaacctgccctattcaaataaaggtgtctacccctccaccacccggaaccgctataagagcgatgcctgtttacaaaaaggcagaacacgtgaccgacgtggtgaaacgctgccctaaccatgaactgggcagggatttcaacgagggccagtcagcaccagcaagtcatctgattcgcgtcgagggtaacaacctgtctcagtacgtcgacgaccccgtgacaggacgccagtcagtagttgtgccctatgagccccctcaggtcggcaccgagttcaccacgatactatataacttcatgtgtaacagttcatgcgtgggcggaatgaatcggcgtcctattctgattatcatcactctggagatgcgggatgggcaggtgctcggaaggaggagttttgaagggagaatctgtgcatgtcctgggagagacagaaaggctgacgaggatcactaccgagagcagcaagctcttaatgaaagctccgccaagaatggcgcagcatccaaacgcgcattcaagcaaagtcctcctgccgtaccagccctgggagctggcgtgaaaaaaagaagacacggggacgaagacacctattacctccaggtgagaggtcgagagaacttcgagatcctcatgaaactgaaagagtccttggagctgatggagctggtgccccagccactcgtggatagctacagacagcagcaacaacttttacagcgaccaagccatttacagccacccagttacggtcctgtcctatccccaatgaacaaagtgcacggtggtatgaacaagctgccgtccgtgaaccagctagtgggccagcccccaccacactcctctgcagcaacacccaatcttggccctgtggggccaggaatgctaaataaccatggccacgccgtgccagctaatggtgaaatgtcgagttctcattccgctcagtctatggtgtctggctctcattgcactccaccccctccttatcacgctgatccaagtttggtccgaacatgggggccttag

SEQ ID NO: 31341 - DNA, 1764 bp, synthetic construct
  misc_feature 1..1764: note = Description of Artificial Sequence: Synthetic coding sequence
  source 1..1764: mol_type = other DNA
atgctctacgtcggtgaccccgcacgtcacctggcaacagcgcaattcaacctgttgagctccacaatggaccagatgagctctcgtgcagcatcggcatccccgtacactcctgaacacgcagctagtgtgccaacccactccccctacgctcagccaagttctactttcgacacaatgtcccctgctcctgtgatcccttctaatacagactatcctggacctcatcacttcgaggtgacgttccaacaatctagtaccgccaaatcagcaacctggacttattctcccttactgaaaaaactttactgccagatcgccaagacatgcccaattcagattaaagtctccacaccaccacccccagggactgcaatccgagccatgccagtttacaaaaaagctgaacatgtcactgacgttgttaaacgctgccctaatcacgagctcgggagggactttaatgagggacagagtgcccctgcctcccacctgattagggtggaggggaacaatctctcccagtacgtggatgacccagtgacaggcaggcagagcgttgtagtgccttatgaacccccacaggtcggtaccgagtttaccaccatcctctacaacttcatgtgtaactctagttgcgtggggggaatgaacaggagacccatccttatcattattacacttgaaatgagagatggacaggtgcttggacgcaggtcctttgagggaagaatctgtgcatgtccaggtagagataggaaagctgatgaagaccactaccgggagcaacaagctctgaacgagtccagtgcgaaaaacggtgctgcttccaagagggcctttaaacagtcgccacccgcagttccggctctgggagcaggcgtgaaaaaaagacgacacggtgacgaagacacatattacctgcaggtgagaggcagggagaacttcgagatcctaatgaagctgaaggagagcctggaactgatggaactggtgccgcagccccttgtagattcgtacagacaacagcagcaactgttacaacgcccaagccatctgcaacccccatcttacggtccagtgctatctcctatgaacaaggtccatggaggcatgaataagcttccctcagtgaatcagcttgttggacagccaccccctcattcgtctgccgctaccccaaatctcggcccagtggggccaggtatgctcaacaaccacgggcatgcagtgcctgcaaacggagaaatgtctagtagccactccgcccagtctatggtgtccggttctcattgtacccccccacctccataccatgctgatccatccttagtctcctttctcacaggcctaggctgccccaattgcatcgagtattttacaagccaaggtctacaatcaatttatcacctccagaatttaactattgaggacctgggggcactgaaaatacctgagcagtatcgcatgaccatctggcgtggtttgcaggacctgaaacagggccatgactattccaccgcacagcagcttttgaggtcaagcaatgcagccaccatttccattgggggaagtggtgagctgcagcgacaaagagtcatggaggccgttcactttcgtgtccggcatactatcacaattccaaaccgcggtggccctgggggagggccagatgagtgggccgattttgggtttgatctgccagattgtaaagctcggaaacagcccatcaaggaagagtttaccgaagcagagattcactag

SEQ ID NO: 31342 - DNA, 1698 bp, synthetic construct
  misc_feature 1..1698: note = Description of Artificial Sequence: Synthetic coding sequence
  source 1..1698: mol_type = other DNA
atggaccagatgagcagccgagccgcttcagcatctccttacaccccagagcacgccgcttctgttccgactcatagcccttacgcccaaccgtcttccacctttgataccatgtctccagccccagtgatcccatctaataccgattacccaggtcctcatcacttcgaagttacattccagcagtccagtaccgccaaatcagccacctggacttacagccctttgctcaagaagttatactgtcagattgcgaagacttgtcctatccagatcaaggtctcaacaccaccgccacctgggaccgccatccgggcaatgccagtgtacaagaaagcagagcacgtcactgatgtggtcaaaaggtgccctaaccacgagctgggcagggacttcaacgagggtcagtccgctcccgcatcacaccttatcagggttgagggaaacaatctttcgcaatacgtggacgacccagtcacaggccgacaatctgttgtcgtcccctacgaacccccacaggtgggcactgaattcactaccattttgtacaatttcatgtgtaactcctcctgcgtggggggtatgaatcgccgtcccatccttattattatcacattggaaatgcgggatggccaggttcttggaaggcgtagctttgagggacgcatctgcgcgtgtcctggacgcgatcgcaaagctgatgaggatcactaccgggaacaacaagctctgaacgagtcctcagccaaaaatggtgccgcatctaagagggcttttaaacaatctcccccagcagtgcccgctctaggagcgggagtgaagaagcgacggcacggggatgaggacacttattatctgcaggtcagaggtagagaaaattttgagatactcatgaagctgaaagaaagtctggagctgatggagcttgtcccacagccattggttgactcctacagacagcagcagcagctgcttcagcgtcctagtcatttgcaaccgcctagctatggacccgttttatccccaatgaacaaagtgcacggtggcatgaacaagctgccatctgtgaaccaactggtgggccagccgcctcctcattctagtgctgcaactcccaatttgggacctgtgggtcctggcatgctgaataatcatggacatgccgttccagctaatggagagatgtcctcatcacactccgctcagtctatggtttcaggttcgcactgcacacccccacctccctaccacgccgacccctcgctcgtgtcatttcttaccggcctaggctgtcctaattgtatcgagtacttcacaagtcagggcctccagtcaatttatcatctccagaatctgacaatagaggacttgggagctttaaagataccagagcagtaccgcatgaccatttggcggggactccaagatttgaaacaggggcatgattactcaacagcccagcagctcctccgctcgagtaatgctgctactattagcataggcggttcaggcgaactccagaggcagcgcgtcatggaagcggttcatttccgagtgcgccatacgataaccatcccgaatcgcggaggtcccggtggcggacctgacgagtgggcggattttggctttgatctgcccgattgtaaggcccgtaaacaaccaatcaaagaggagttcaccgaagctgaaatccactag

SEQ ID NO: 31343 - DNA, 1911 bp, synthetic construct
  misc_feature 1..1911: note = Description of Artificial Sequence: Synthetic coding sequence
  source 1..1911: mol_type = other DNA
atggcccaaagcactgcaaccagccccgacggcggaacaacttttgaacacctgtggagctcactcgaaccagactctacctatttcgatctgcctcagagttctaggggaaacaacgaggttgtcggcggaaccgattcatccatggatgtgtttcacctggaaggtatgacaacaagcgttatggcacaattcaatttactcagcagcactatggatcagatgtcttcacgggcagctagtgcctctccatacacaccagaacacgctgcaagtgtccctacccattccccttacgctcagccgtctagcaccttcgacacaatgtcccccgctcctgttattcccagcaacaccgattaccctggaccccatcattttgaagtgacatttcagcagtcgtccaccgccaagtcagcgacctggacgtacagccctctactgaagaagctctattgtcagatcgcgaagacctgccctatccaaattaaagtaagcacacctcccccaccaggcactgccatccgcgcaatgcccgtgtataaaaaagcagagcacgtcaccgacgtggtcaagcggtgtcctaatcatgaactgggcagagattttaatgaggggcagagtgcacctgccagccatctgatcagagtggagggaaacaatttgagtcagtatgtggatgatcccgtgaccgggaggcagtcagtcgtggtcccctacgaaccaccgcaggtgggaaccgagtttactacaatattgtacaacttcatgtgtaatagctcatgtgtgggcggaatgaaccggaggccgatcctgataattattactttggagatgcgggacggacaggtcctggggagaaggtctttcgaaggtcggatttgtgcctgtcctggcagagaccgtaaggcagacgaggaccactatcgcgagcaacaagcactcaacgaatccagtgccaagaacggagcagcctccaaacgggcattcaagcagtccccacccgcagtgcccgctttaggtgccggagtaaagaagcgacgccatggcgacgaggatacatattacctacaggtgcggggacgtgagaattttgagatactcatgaagctgaaggagtctctggaactgatggagttggtgccccaacctctggtggactcttaccgccagcaacagcaattgttacagcgcccttcccatctgcagccaccatcctatggcccagtgctatcaccaatgaacaaagttcatggcggaatgaacaagctgccttcagtgaatcagctcgtgggacaacctcccccacactcttcagctgccactccaaatcttggcccagtcggcccaggcatgttgaacaatcatggacacgcggttcccgctaacggtgagatgagttccagccattctgcgcaaagtatggtgagtggttcccattgcacaccccctcctccgtatcatgcagatccttccctggtgtcatttctcacgggattgggatgtcccaattgcattgagtattttactagccagggcctccaatccatttaccacctgcagaacttgaccatagaggacttgggagctctgaaaataccagaacagtatcgcatgactatatggagggggttacaggacctaaagcagggccacgactatagcacagcccaacagctgctccggtctagtaacgccgcaaccatatcaattggcggatccggggagctgcagaggcagcgggtcatggaagccgtccactttcgcgtccggcacaccatcaccattccaaatagaggcggacccggtggtggcccagacgagtgggccgatttcgggttcgacttgccagattgtaaagccaggaaacagcccattaaagaggaattcacagaggccgagatacattag

SEQ ID NO: 31344 - DNA, 1053 bp, synthetic construct
  misc_feature 1..1053: note = Description of Artificial Sequence: Synthetic coding sequence
  source 1..1053: mol_type = other DNA
atgggggctggtgcttcggctgaggaaaaacattctcgtgagcttgagaagaagctcaaagaggatgcagaaaaggacgctcggaccgtgaagctgctgctgcttggcgcaggcgaaagtggcaaatcaacaatcgtgaagcagatgaagattattcaccaggacggctacagcttggaggaatgtttggaatttatagcaataatctacgggaatactctccaaagcatcctggctatcgtgagggccatgactaccctaaatatccagtacggggactccgctagacaggatgacgcaagaaaattaatgcatatggcagatacgattgaggagggtactatgcctaaggagatgagcgacattattcagaggctgtggaaggattctgggattcaagcatgctttgagcgcgcaagtgaataccaactgaatgatagcgccggttactatctgtccgaccttgaaagactcgtcacaccgggatatgtgcccactgagcaagacgtcttgaggtcccgggtgaagaccaccggtatcattgaaacccagttttcctttaaagacctcaacttcagaatgtttgacgtgggcggtcagcgcagcgagaggaaaaagtggatccactgcttcgagggcgtgacatgcatcatcttcattgccgcactgagtgcctacgatatggttcttgtggaggacgatgaggtaaatcgcatgcatgaatctctgcacctgttcaattcaatttgtaatcacagatatttcgctacaacttcaatagtacttttcttaaacaaaaaagatgttttttttgagaagataaagaaagcacacctgagcatctgcttccctgactacgacgggcctaatacatacgaagatgccggaaactacatcaaggtgcaatttctagagcttaatatgcgccgagacgtaaaagaaatttactcacatatgacctgtgccacagacacgcagaatgtcaagtttgtgttcgacgctgtgacggacatcatcatcaaagagaatctcaaagactgcgggcttttctag

SEQ ID NO: 31345 - DNA, 609 bp, synthetic construct
  misc_feature 1..609: note = Description of Artificial Sequence: Synthetic coding sequence
  source 1..609: mol_type = other DNA
atgatgcaggacgtgtcctcatcaccagtatctcccgcagatgatagtttgagcaatagcgaggaggaaccagatagacagcagccaccctccgggaagcgtgggggtaggaaacgccgttcttcgcgtcgatcagctggcggaggggctggccctggcggagctgcgggtggtggggtgggtggcggagatgaacctggatcccccgctcagggaaagcgcggtaaaaaatccgcgggttgtggcggtggagggggagcgggaggaggcggtggatcttctagtggaggtggcagtcctcagtcctacgaggagttgcaaacccagcgtgttatggccaacgtgagggaacgtcagcgcacacagtctctgaacgaggccttcgcagctttgagaaagattatcccgaccttgcctagtgataagctgtcaaagatccaaaccctgaagctcgccgctaggtatattgattttctgtaccaggtcctccagtccgacgagctggatagcaaaatggcttcttgtagttacgtggcgcacgagcggctgagctatgcattttccgtttggcgcatggagggagcctggtctatgtccgctagccactag

SEQ ID NO: 31346 - DNA, 741 bp, synthetic construct
  misc_feature 1..741: note = Description of Artificial Sequence: Synthetic coding sequence
  source 1..741: mol_type = other DNA
atgggcgatagggaacagttgcttcagagggctcggctcgctgagcaagcggaacgatatgacgacatggccagcgcaatgaaggctgtgacggaactgaacgagcccctatccaacgaggacagaaacttactttccgttgcttataaaaatgtcgtcggtgcacggagaagtagttggagggttatcagcagcatcgagcaaaagaccatggcagatggcaatgaaaagaaactcgagaaagtgaaagcatacagggaaaagatcgaaaaggagctggagaccgtttgcaacgatgtcctgagccttctggataagtttctgatcaagaactgtaatgactttcagtatgaaagcaaagtgttttacctgaaaatgaagggggattattaccgctatcttgcagaggttgctagcggtgaaaagaaaaactcagtggtagaagcctccgaagccgcatacaaagaggcctttgaaattagtaaggagcaaatgcagcctacacatcctatcaggctgggactggcactgaacttttccgtgttttattacgaaatacagaatgcccctgagcaggcctgtttgctggccaagcaggcatttgacgacgcgatcgctgaattagacaccctgaacgaagattcctacaaggattcgacattgatcatgcagctgctaagagacaacttgaccctctggacttctgaccagcaagatgaagaggccggagaagggaattag

SEQ ID NO: 31347 - DNA, 1626 bp, synthetic construct
  misc_feature 1..1626: note = Description of Artificial Sequence: Synthetic coding sequence
  source 1..1626: mol_type = other DNA
atggtctggagggttcctccgttcctcctgccgatcctgtttctaggcacccattatcaactggatgtgcaattgtaccattgcactctactgggtcctgcctcgcccccagcccatgtgctccttcccccatcagggcctccggctccgaggcacctgcacgctcaggccctgtcagactctgagatccagcttacatggaagcacccagaagcactgcctggccctatcagtaagtatgtggtggaggtacaagtggctggcggagcaggggatccattatggattgatgtggatcgtcctgaggaaactagtaccatcataagaggtcttaatgcttctacaaggtatcttttcaggatgagagcctccatacagggcctcggggattggtcaaacaccgttgaagagagcacactgggtaatggcctgcaagccgagggcccagtgcaggagtcccgggctgccgaggaggggctagatcagcagctgattctggccgtcgtaggctcagtgtctgctacatgcctgacaattctcgcggctttgctcaccctcgtatgtattagaagaagttgtttgcacaggaggcgcacctttacataccagtccggttccggcgaagagaccatcctgcaattcagctcggggacccttacccttacgaggagacctaagttacaacccgaaccactttcctacccagtgctggagtgggaagatatcacctttgaagatctgatcggcgaaggcaacttcggacaagtaatcagagctatgattaaaaaggacggccttaagatgaacgctgctataaagatgctgaaggaatacgcctcagaaaacgaccatcgggatttcgctggtgagctcgaagtgctctgcaaactcgggcatcaccctaacatcataaatctcctaggtgcttgtaagaaccggggttatctatatatagccatagagtatgccccttatggaaaccttctagatttcctcaggaagtctcgcgtgctggaaacagatcctgccttcgcgagagagcatggcactgcttccacgttgtcaagcaggcagctcctgcggttcgccagcgatgccgctaatggcatgcaatacctgagcgaaaagcaattcatccacagggacttggccgcacggaatgttctcgtgggcgaaaatctggcctctaagatcgctgatttcggattgtcccggggtgaggaggtgtacgtcaaaaagaccatgggccgattaccagtcagatggatggcaatcgagtccttgaattattctgtgtacacaactaaaagcgacgtgtggtcctttggtgttcttctatgggaaatcgtcagtctggggggaacaccctactgcggaatgacttgcgccgagctgtatgagaaattacctcaaggataccgcatggagcaacccaggaattgtgatgacgaggtgtatgaactgatgcgacagtgttggcgcgacaggccatatgagaggcccccatttgcccagattgcccttcagttaggacggatgttggaggctcgtaaagcctatgtgaacatgtctttgttcgagaatttcacctatgccggaattgatgccaccgctgaggaggcatag

SEQ ID NO: 31348 - DNA, 3417 bp, synthetic construct
  misc_feature 1..3417: note = Description of Artificial Sequence: Synthetic coding sequence
  source 1..3417: mol_type = other DNA
atggtgtggcgagtccctccattccttttaccaatccttttcttggcaagtcacgtcggcgctgccgtggacttgactttgctggccaatctgcggttgaccgatccccagcgcttcttccttacttgtgtttccggtgaggctggcgcaggaagaggatctgacgcatggggcccacccctcctgctggagaaggatgaccgcatcgtgcgaactcccccaggacctccgctgcgactggccaggaacgggagtcaccaggtcaccttgcgcggtttcagtaagcctagtgacctcgttggagtattctcttgcgttggtggagcgggagctagaaggacccgggtgatctatgttcataacagcccaggcgctcacctgctccccgacaaggtcactcatactgtcaacaagggagataccgcagtgctgtcggcccgagttcacaaagaaaagcagacagatgtaatttggaagtccaacgggtcttacttctacactctggactggcacgaagcccaggacgggcgattccttctgcaactgccaaatgtacagcccccatcctcagggatctattcagcaacttacttagaggccagcccactgggctccgcattcttccgtttgattgttcgcggttgcggagcagggaggtggggccctggttgtacaaaggaatgccctggctgtctgcatggcggagtatgccatgaccacgatggcgagtgcgtctgcccgcctgggttcactgggactagatgtgaacaagcatgccgagagggacggttcggccagtcctgtcaggaacagtgccctggaatatctgggtgcagaggactgaccttctgcctgccagatccctatggttgctcatgtggatcaggctggcgtggatcccagtgtcaggaggcttgcgctccaggacacttcggagccgattgtagactgcagtgccagtgccagaacgggggaacctgtgatcgattttctggctgcgtgtgtcctagcggctggcatggtgtccactgcgagaagtccgaccggatcccccagatcttgaatatggcctctgagctggagtttaatctagaaaccatgcctcgcattaactgtgccgcagcaggaaacccctttcccgtacgcggttcaatcgaattgagaaaacctgatggtacagtactcctgtcaacaaaggcaattgtcgagcccgagaagacaaccgcggagtttgaggtccctcgtctcgtgttggcagactccggtttctgggagtgtagagtgagtacctcgggaggacaggactcccgtaggttcaaggtgaacgtaaaagtccctcccgtccccctggctgcaccccgtctgctcaccaagcaaagcagacagcttgtggtgagccccctggtgtcattttccggagatggccctatctccactgttagactgcattaccggcctcaagactccacaatggattggagcacgattgttgtggacccttctgagaacgtgacgctaatgaatcttagaccaaagaccggttattccgtccgagtccagctgtccaggccaggtgaggggggagaaggggcatggggcccacctacacttatgactactgactgtcctgaaccactgcttcaaccatggctcgaagggtggcatgttgaaggtacggacagacttcgggtctcctggagcttacccttagttcccggacctctggttggtgacggctttttgctgaggctgtgggatggaacacggggacaggaacggagagagaacgtgagctctcctcaggccaggactgctctgctgacaggattgactcctggaacccactatcaattggacgtccagttataccattgtacgcttttgggtcctgcctccccgcctgcccacgtactgcttcctccatctggtccaccagctccaaggcacttgcatgcacaggcactttcagacagcgagatccaactgacttggaagcatcccgaagccttgcctggaccgatctccaagtacgttgtcgaagtccaggttgccggtggggctggagaccccctctggatagacgtggaccgtcccgaagaaacatcaaccatcatcagaggcctgaatgcctctactcgctacttgttccggatgcgtgctagcatccagggactaggtgactggtctaatactgtcgaggaatccaccctagggaacgggctgcaggctgaaggacctgtgcaggagtctagggctgcagaggaagggctcgaccagcagttgatactcgcggttgttggcagcgtgtctgcaacttgcctgaccatccttgcagcacttctgactctggtgtgtataagacggagctgcctccataggcgaaggacctttacatatcaaagtggctctggagaggaaacaatcctgcagttctcctcaggaactttaacactaactagaaggcctaaattgcagcccgaaccacttagttatcccgtactggaatgggaggacataacctttgaggacttgattggagagggaaatttcggacaagtcattagggcaatgatcaaaaaagatggccttaagatgaacgcggcaattaagatgcttaaggaatacgcaagcgagaatgaccatagagacttcgccggtgagcttgaagtgctgtgtaagttggggcatcatcccaatattatcaacctgcttggggcttgcaagaaccggggttatctgtatatcgcaatagaatatgcaccttacgggaaccttcttgatttcttacgtaaatcaagagtgctcgaaacagacccagccttcgcacgtgagcacggcacagcttctactctgtcttcccgacagttgctacgtttcgcttcagatgcggcaaacggtatgcagtacctgagcgagaaacaatttatacaccgtgacctcgccgcaagaaacgtcctggtcggtgaaaacttggcgtcaaaaatcgccgatttcgggctgagccgtggagaggaagtgtatgtgaagaaaacaatgggtcgtcttccagtcagatggatggccatcgagtctctcaattattccgtgtataccacaaagtcagatgtctggagcttcggcgtgctgctctgggagatcgtcagcttgggaggcaccccatactgtggcatgacttgtgcagaactctacgagaagctaccccagggctaccggatggagcagccacgaaattgtgatgatgaggtgtacgaattgatgaggcagtgttggagggacagaccatacgaaagacctccctttgcacagatcgcactgcagctgggcagaatgctggaggctagaaaggcctatgtgaatatgagccttttcgagaattttacctacgcgggtatagacgccaccgcagaggaggcctag

SEQ ID NO: 31349 - DNA, 2352 bp, synthetic construct
  misc_feature 1..2352: note = Description of Artificial Sequence: Synthetic coding sequence
  source 1..2352: mol_type = other DNA
atggccagcgagttagaattcaacctggagaccatgcccagaataaattgcgctgcagctggaaaccccttccctgtcaggggttccatcgagctgcgaaagcccgacggaactgttcttctaagcaccaaggccatcgtcgagccagagaagaccacagcagaattcgaagtgcccagattagttttagccgactcaggcttttgggaatgtcgggtgagcacatctgggggtcaggatagccgcagatttaaagtcaacgtcaaagtcccccctgtgccattggccgctcctcgccttctgacaaagcagtcgcggcagcttgtagtgtcaccactcgtatccttcagtggagacgggcctatttcgacagttcggctccactacagaccccaagacagcaccatggattggtctactatcgtggtggaccccagcgagaacgtcaccctcatgaacctgcggcctaaaactggctacagcgttcgggtccagctgtctcgtcctggcgagggaggtgaaggagcctgggggccacccactctgatgaccactgactgcccggaaccactactacagccttggctggagggctggcacgtagagggcaccgaccgcctgcgcgtgtcatggtctttgcccctggtgccaggtccactggtgggagatggttttttgctgagactctgggacggaactcgcggacaggagcgcagagaaaatgtgtctagtccacaggcaaggaccgctctcctgaccggccttactccgggtacgcattatcagttggacgtgcagctgtatcattgtacattattggggcctgcctcccctcctgcccatgtgctgcttccacctagtggtcccccagcacctaggcacctgcacgctcaagcactcagtgattctgagatccaactgacctggaaacacccagaagccctgccgggtcccatctctaaatacgtagtcgaagtgcaagtggccggtggcgctggcgaccccctgtggatcgatgtagacagacccgaagagacgtcaaccatcatccggggactaaacgcgtcaacgagatacctttttcgcatgcgggctagcatccagggcctcggagactggtcaaatacggtagaagaaagcactctgggtaacggtctccaggctgagggccctgtacaggagtcccgcgcagcggaagaaggtctcgaccaacagctgattcttgctgtggttggctccgtgtccgcaacctgtctcacgattctggctgctctactaaccttagtttgcatccgcagaagttgtctgcatcgcagaaggacattcacataccagagcggatcaggtgaggagaccatccttcaattttcctccggcacacttactctaactcggaggccgaaactgcaaccggagcccctcagctaccctgtcttggaatgggaagatatcacatttgaagatctgataggagagggcaattttggccaggtgatcagagcaatgattaaaaaagacggcttgaagatgaacgccgcaattaaaatgttgaaggaatatgcctctgaaaacgaccaccgggactttgcaggagaattggaggtgttatgtaagctcggccatcaccctaatataattaacttgctgggtgcctgtaagaacaggggttacttgtacatcgctattgagtatgccccatacgggaacctgctggatttcttgcgcaagagccgtgtgctcgagaccgacccagcttttgccagagagcatggaacggccagcaccctctcctctcgtcagcttctgagattcgcttctgatgccgctaacggtatgcagtacctttcagagaaacagtttattcatagagatcttgctgctcgtaacgtgctggtgggcgagaatctagcaagcaaaatagccgacttcggtttgagtcgcggagaggaggtctacgtcaagaaaacgatgggccgacttccagttagatggatggccatcgagtcacttaactattcagtgtacactaccaagtccgatgtgtggagctttggcgtcttactttgggaaatcgtctcactgggcggaacgccctactgcgggatgacctgcgccgagctgtatgaaaagctgccccaggggtaccgcatggagcagcccagaaattgcgacgatgaggtctatgaactgatgcggcagtgttggcgggacagaccttatgagcggccaccctttgcacagattgccctgcagcttggcagaatgcttgaggctaggaaagcatacgtgaatatgagcttgtttgagaactttacctacgccggaatcgacgcgaccgctgaagaagcctag

SEQ ID NO: 31350 - DNA, 954 bp, synthetic construct
  misc_feature 1..954: note = Description of Artificial Sequence: Synthetic coding sequence
  source 1..954: mol_type = other DNA
atggtgtggcgggtgcccccatttttgctgccgatcttgtttcttgcgagccatgtcggggcagccgtggatctgaccttattggccaatctgaggctcacagacccccaacgcttctttttaacttgtgtgtcaggcgaggcaggtgctggccgtggaagcgatgcctgggggccaccactgctcctggaaaaggacgaccggatagtgaggaccccccctggtcctcccctccgtctggctaggaacggtagtcaccaggtgaccctgagggggttctccaagccttctgatttggttggcgtgtttagttgcgttggaggggctggtgctcgccgtacccgtgtgatatatgttcataactcccctggcgctcatctcctccctgataaggtcacccacaccgtcaacaagggagacactgcagttctgagcgctagggtgcataaagaaaagcagaccgatgtgatttggaagtccaacggctcatatttctatacactagattggcatgaggctcaggatgggcgattccttctacaactgcctaatgttcagccacctagttccggtatatatagcgctacctacctggaggcctcgcccctggggtcagcctttttcaggctgatagtgcggggatgcggggctggccgatggggacctggctgtaccaaggagtgtcctgggtgcctgcatggcggagtttgtcacgatcacgatggagagtgcgtctgtcctcccggatttaccggaacacgctgcgagcaagcttgtcgtgagggacggttcggccagtcttgtcaggaacaatgtccaggcatttccggctgccgaggacttaccttctgcctaccagatccttacggatgcagctgcggctccggttggcgtggaagtcagtgccaagaggtgcaccaagggcactgtggcgcacgagaagatcactcatag

SEQ ID NO: 31351 - DNA, 1266 bp, synthetic construct
  misc_feature 1..1266: note = Description of Artificial Sequence: Synthetic coding sequence
  source 1..1266: mol_type = other DNA
atgagagctagcattcagggcctcggcgactggagtaatacagtcgaagagagtactctgggaaacggactgcaggcggaaggccctgtacaggaaagccgcgctgccgaggagggactggatcagcagctaattttggctgtggttggcagcgtgtccgccacctgcttgaccattttggcggcattgttgactttggtatgtatacggagaagttgcctacacaggcgccgaacatttacttaccagtccgggtccggcgaagagacaatccttcagttttccagcggtaccctgacccttacaagacgtccaaaactgcagccagagcctttgtcataccctgtcctggagtgggaagatatcacctttgaagacttgatcggcgagggcaactttggccaggtaataagggctatgatcaagaaagatggcctgaagatgaatgctgcaattaaaatgttaaaagaatatgccagtgagaatgatcacagagattttgcgggagagctagaggtcctgtgcaaactcggccaccaccctaacatcattaacctcctgggtgcatgtaaaaaccggggatacctatacatcgcaatcgagtacgcaccttacggaaacctcttggacttcctcagaaagtcaagggtgctggagaccgatcccgctttcgcccgagaacacgggactgccagtaccctgtccagcaggcagttactgagattcgcatctgatgccgcaaacggaatgcagtacctgtcagagaagcaattcatccatcgcgatttagcggctcgtaatgtcttagtgggtgaaaatttagcttccaaaattgcagattttggcctttcccgcggtgaggaagtctatgtcaaaaaaactatgggccgtctgccagtccgatggatggcaattgaaagcctaaattatagtgtctacacaacgaaatccgacgtttggtcattcggcgtcttactctgggaaatcgtgtccctggggggaaccccttactgcggcatgacatgcgctgagctttatgagaaactgccacagggctataggatggagcagccacggaattgcgacgatgaagtgtatgagttgatgagacaatgttggcgggacaggccatacgagcgacctccctttgcccagatagcactccagctcggccgaatgctggaggctcggaaggcatacgttaatatgtctctgtttgaaaatttcacatacgcaggtatagatgccacagcagaggaagcctag

SEQ ID NO: 31352 - DNA, 1140 bp, synthetic construct
  misc_feature 1..1140: note = Description of Artificial Sequence: Synthetic coding sequence
  source 1..1140: mol_type = other DNA
atggtgtggcgagtgcctccatttctcctcccaatcctgtttttggccagccacgtcggtgccgcagtggaccttactctcctcgccaacctacgcctaactgatcctcagaggttttttctgacgtgtgtgagcggcgaggccggtgcgggacggggaagcgacgcttggggtcccccacttctgctggaaaaagacgaccgcatcgtccggacacctcccggaccacccctgaggctggcccgtaacggctcgcatcaagtgacgctgagagggtttagcaagccatcggatctggtgggcgttttctcctgcgtgggaggcgcaggggctcgtcgaactagggtgatctatgtacacaatagtcctggcgctcacctgcttcctgacaaagtcacacacaccgtgaacaaaggtgacaccgccgtcctgtccgccagggtccacaaagaaaaacagacagatgtcatctggaaaagcaacgggtcttacttctatacgctagactggcacgaagcccaagatgggcgatttctgctgcagctgcctaatgtccagcctccatctagcggcatttattcagccacgtatctagaagcaagtccattaggatcagcttttttccggcttatcgttcgcggatgcggagcaggcagatggggccctggctgtacaaaggagtgcccaggctgcctccatgggggtgtatgccatgatcacgatggcgaatgcgtgtgtcctccaggattcaccggcactcgctgcgagcaggcctgtagagaaggacgctttggccagagttgtcaggagcaatgcccgggaatttcaggttgcagaggcctcactttttgcctcccagacccttatgggtgctcatgtggcagtgggtggcgcggaagtcagtgccaggaagcatgtgcaccaggccactttggggctgattgcagacttcagtgccagtgccagaacggaggaacttgtgatcgctttagtggatgcgtctgcccttcaggctggcacggggtgcactgcgagaagtctgggtggagagattgggtggatacctctacggagaagcagaacacagatgaaggacgattcggcggacacgtgtcagcacccgtgggtgcaccaggctag

SEQ ID NO: 31353 - DNA, 819 bp, synthetic construct
  misc_feature 1..819: note = Description of Artificial Sequence: Synthetic coding sequence
  source 1..819: mol_type = other DNA
atggctttgctggtccgcgtgcttcgaaatcagacttctatcagtcagtgggtccctgtgtgctccagactgatccccgtgagccccactcagggccagggcgaccgcgctctgtcccggacttcccagtggccacaaatgagccaaagtcgcgcatgcggaggcagtgaacaaatcccaggcatcgatattcagttgaaccgcaagtaccatactactaggaaactgtctacgactaaagattccccccagccggtggaggagaaagtgggagcctttactaagatcatagaggctatgggctttaccgggccattgaagtacagatgccagatgcctgatacgtttaactcatggttcctcataaccctcctccatgtgtggatgtgcctcgttaggatgaagcaggagggtagaagtggtaaatatatgtgccgaatcattgtacattttatgtgggaagacgtgcagcaaagaggacgagtgatgggcgtcaacccttatatcctaaagaagaatatgattctgatgaccaaccatttctatgccgcaattctcggctatgacgaaggcatcctctcggacgatcacgggctcgccgctgccctgtggagaactttttttaacagaaaatgtgaagaccccagacacctagaactgctggttgagtatgtccgaaaacagatccaatatttggacagcatgaatggggaggacctcctgctaactggcgaggtgagttggagacctctcgtggagaaaaacccgcagtccattctgaaaccccatagcccaacctacaacgacgaagggctctag

SEQ ID NO: 31354 - DNA, 564 bp, synthetic construct
  misc_feature 1..564: note = Description of Artificial Sequence: Synthetic coding sequence
  source 1..564: mol_type = other DNA
atgcagcctatcgatacctgcgtcagttaccctagaacgggaggtcaagggtctgtcagtcatttccctggctgccaaatgcccgacacctttaattcatggtttctgattaccctgctccacgtgtggatgtgcctggtaagaatgaaacaggagggaaggtccggtaagtatatgtgtcgcattatcgtgcacttcatgtgggaagatgtgcaacaacgaggacgggtcatgggggtcaacccctacattctaaagaaaaatatgatcctaatgacaaaccacttctatgcagctattcttggttatgatgaaggcatcttatcggatgaccacgggttggctgctgctctgtggcgcaccttctttaaccgaaaatgtgaagaccctagacacctcgaactgctagtggaatatgttagaaaacagatacagtacctcgactcaatgaacggcgaggatctcttgttaaccggggaggtctcatggcgccctctcgtagagaaaaaccctcagagtattctaaagcctcactctccaacttacaacgacgaaggtctgtag

SEQ ID NO: 31355 - DNA, 696 bp, synthetic construct
  misc_feature 1..696: note = Description of Artificial Sequence: Synthetic coding sequence
  source 1..696: mol_type = other DNA
atggctcttctcgtccgggtgctccgcaatcagacatccattagtcagtgggtacccgtgtgcagccgtctcattccagtgagtcctacacaagggcaaggggatcgcgctctgtcccggacctcccagaaaatcaaaatagccgctttacgaatgtacacttcttgcgtggaaaaaacagatttcgaggaattttttctacggtgtcaaatgccagacactttcaattcctggttcctgatcacactgctccatgtctggatgtgcctggtccgcatgaaacaggaaggcagatccggcaagtacatgtgccggattatagtgcatttcatgtgggaggacgtgcagcagcgaggcagggtcatgggggtgaatccctatatcttgaaaaaaaacatgatactgatgaccaatcacttttatgcagccatactgggttatgatgaaggcatcctgtcagacgaccacgggctggcagccgcactctggcggactttttttaataggaaatgcgaagaccctcgacatcttgagctgcttgttgaatatgtgaggaagcagatccagtatctggattctatgaacggggaggatttattgctcaccggcgaggtgtcatggcggccactggtcgaaaagaatccccagagcattcttaaaccacactcccccacctacaatgacgaggggctctag

SEQ ID NO: 31356 - DNA, 822 bp, synthetic construct
  misc_feature 1..822: note = Description of Artificial Sequence: Synthetic coding sequence
  source 1..822: mol_type = other DNA
atggctttgttggtgagggtacttcgtaatcagaccagtatcagccagtgggttcctgtgtgcagcagactgattccagtgagtcccacacagggtcagggtgacagggccctgtcacggaccagccagtggccccagatgagccaatctcgcgcatgcggcggtagcgagcaaatccccggaatagacattcagctgaatcggaaataccacacaacccggaagctcagcactactaaggactctccacagcctgtggaagaaaaggtgggggcattcaccaaaatcatcgaagctatgggttttaccggccctctgaaatattcgaaatggaagatcaagatcgccgcattaagaatgtacacatcctgcgtggagaaaacggacttcgaggagttcttcctgagatgccaaatgccagatacctttaattcctggttcctcattacgcttcttcatgtctggatgtgcctcgtaaggatgaagcaggagggccgatctggaaagtacatgtgccggatcattgtacatttcatgtgggaggatgtgcaacaacgcggtagggtgatgggaggaattctctcggacgaccacggactggcggcagcgctttggaggacattcttcaaccggaaatgtgaggaccccagacatctcgagctcctcgtggaatacgttaggaagcaaattcagtatttggatagcatgaatggggaagatttactactcacgggagaagtcagttggaggcccttagtggagaagaatccccagtctatcctaaagcctcactcgccaacgtataatgacgaaggtctctag

SEQ ID NO: 31357 - DNA, 900 bp, synthetic construct
  misc_feature 1..900: note = Description of Artificial Sequence: Synthetic coding sequence
  source 1..900: mol_type = other DNA
atggcactgttggtcagggtccttcgcaaccagacatccatctctcaatgggtcccggtctgcagtaggctcattcccgtgagtcctacccaggggcagggggatcgcgcactctctcgcacaagccagtggcctcaaatgtcacagtccagagcctgtgggggttcagagcagatacctggcattgatattcagttgaaccgcaagtaccacacaaccaggaagctatccaccactaaggacagccctcagcctgtggaggagaaggtgggggcattcaccaagataatagaagccatgggtttcaccggtcctcttaaatactcaaagtggaaaattaagattgctgcactgcgaatgtacaccagctgcgttgagaagaccgattttgaggagtttttcctccgatgtcagatgccagacacatttaatagctggtttttaatcacccttctgcatgtttggatgtgtctggttcgaatgaaacaggaaggaagaagtggaaaatacatgtgcaggatcattgtgcactttatgtgggaggatgtgcaacaacggggacgcgtgatgggggtgaacccttacatcctgaagaaaaatatgattcttatgactaatcatttctacgccgcaatcttgggctacgatgagggaatcttgagcgatgaccatgggctcgctgccgctctttggagaacttttttcaatcgcaaatgcgaggacccgcgtcaccttgaactcctggtggagtatgtacgcaaacagatacagtatcttgactccatgaatggggaggacctgcttctgaccggtgaggtcagctggcgccctctcgtggagaaaaacccacagagcattctaaaaccccactctcctacctataatgatgagggactctag

SEQ ID NO: 31358 - DNA, 603 bp, synthetic construct
  misc_feature 1..603: note = Description of Artificial Sequence: Synthetic coding sequence
  source 1..603: mol_type = other DNA
atgggctttactggccctctgaagtacagcaagtggaagattaagatcgcggcactgcgaatgtacacttcatgcgtcgagaagaccgattttgaggagttcttcttacggtgccagatgcccgatacattcaatagttggtttctgattacactgcttcatgtctggatgtgtctggtcagaatgaagcaggaaggtaggtcgggcaaatatatgtgccggattattgtacacttcatgtgggaagacgtgcagcagcgtggacgcgtgatgggagtgaacccctacattcttaagaaaaacatgattctgatgactaatcatttctatgccgcaatcttgggatacgatgagggaatactgagtgatgatcacggacttgccgctgctctgtggcgcacattcttcaaccggaagtgcgaagaccccagacaccttgagttgctggtggaatacgtgaggaagcaaattcagtacctcgactccatgaatggagaagatctgcttcttactggagaagtatcttggaggcccctagtggagaagaatccccagagcatccttaagcctcattctcctacctataacgacgaaggtctttag

SEQ ID NO: 31359 - DNA, 489 bp, synthetic construct
  misc_feature 1..489: note = Description of Artificial Sequence: Synthetic coding sequence
  source 1..489: mol_type = other DNA
atggcactgctcgtgcgagtgctccgcaatcagaccagtatcagtcaatgggtgcctgtctgttcaaggttgatcccggtatcccctacgcagggtcaaggggaccgggctttatccagaaccagccaatggcctcagatgagccagtcgcgggcttgcggcggatcggaacaaattcctggcatcgacatacagctcaacaggaagtatcacacaacgcccatactcgggtatgacgaaggaatcttgtctgacgaccatgggctggctgccgctttgtggcgcactttttttaacaggaaatgcgaagatcctcgtcacctggaactgctggtggaatatgtgcggaagcagatccagtatctggatagcatgaacggggaagatctgctattgaccggagaggtctcttggcgaccactggtggaaaaaaatccccaatcaattctaaaaccacattcccctacctataatgatgaggggctttag

SEQ ID NO: 31360 - DNA, 435 bp, synthetic construct
  misc_feature 1..435: note = Description of Artificial Sequence: Synthetic coding sequence
  source 1..435: mol_type = other DNA
atgtgcttagtgagaatgaaacaagagggacggagcggtaagtacatgtgccggatcatcgtgcatttcatgtgggaagacgtccagcagagaggcagggtcatgggcgttaacccatacatactgaagaagaatatgatcctaatgaccaatcatttttacgctgccatcctgggctacgatgaggggatcctgagcgacgatcacgggctcgccgctgccttatggcgaacattctttaacaggaaatgtgaggaccctcggcacctggagctcctcgttgagtacgtaagaaagcagatccagtacttagattccatgaacggcgaagatcttctgctcaccggcgaggtgtcctggagacctttagtggagaagaacccacaatctatcttaaagccccactcacccacatataacgacgagggactctag

SEQ ID NO: 31361 - DNA, 447 bp, synthetic construct
  misc_feature 1..447: note = Description of Artificial Sequence: Synthetic coding sequence
  source 1..447: mol_type = other DNA
atggccctgctcgtcagagtgctccgaaatcagaccagcatcagccagtgggtgcccgtgtgcagtcgtttaattcccgttagtccaacacaggggcagggtgatcgggctctgagccggacaagtcaatggcctcagatgtcgcagtctcgcgcttgtgggggttccgagcagatcccaggcattgacatccagctgaaccgaaaataccacacaacaagaaagctctcgactactaaggacagtcctcagcccgttgaggagaaggtgggtgccttcactaaaatcatagaggccatgggctttaccggacccctaaagtatagtaagtgggacgtgagtagtcctaacgaggcaggtagacccgagtgggaagtgcacgtgagttaccacagtagtttctacgtcgggggttgttccgctgccagacagagccatggaggctag

SEQ ID NO: 31362 - DNA, 825 bp, synthetic construct
  misc_feature 1..825: note = Description of Artificial Sequence: Synthetic coding sequence
  source 1..825: mol_type = other DNA
atgttgagcgtcgcttcaagatctgggccattcgccccagtgctgagcgcaacgagccggggtgtggccggagcccttagacctttagtacaagccacagtgcctgcaactcccgagcaaccagtcctggacctgaagcggcctttcttgagccgcgagtccttgtctggtcaagcggtacgtagacccttagtcgcatctgtgggtttgaacgtacccgcaagcgtgtgctatagtcataccgacatcaaggttcccgatttctccgagtacaggcggctggaggtccttgactccaccaagagttctcgagagtcaagtgaagcccgtaagggattcagttacttggtgactggagtgaccactgtcggagttgcctacgccgcaaaaaacgccgtgactcagttcgtgtccagcatgtcagctagcgccgatgtcttggcgttggccaaaatcgagattaagttgtctgatatccctgaaggcaagaacatggcattcaaatggcgaggcaaacctctgttcgtccggcacagaactcagaaggaaatcgaacaggaggccgctgtggagttgagtcagttaagagacccgcagcatgatctcgacagagtgaagaagcccgaatgggttatactcattggtgtctgtacccatttaggctgcgtccccatagctaatgccggagatttcgggggttattactgcccttgccacggctctcactatgacgcaagtggcaggatccggttggggcctgcacctctgaacctggaggtaccaacctacgaatttacctctgacgatatggtaatcgtgggctag

SEQ ID NO: 31363 - DNA, 1221 bp, synthetic construct
  misc_feature 1..1221: note = Description of Artificial Sequence: Synthetic coding sequence
  source 1..1221: mol_type = other DNA
atggccgctggggctggtgcaggcagcgcacccaggtggctgcgggcactgagcgaacccctctctgctgcccagctgcggaggctggaggaacatagatactccgccgctggtgtctcgctattggagcctcctctgcagctgtactggacatggctgctccagtggatccctctttggatggccccaaactctattaccctgttgggcctcgccgtgaacgttgtcacaactctggtcctcatcagctactgcccaaccgccactgaggaggctccctactggacctaccttctctgcgccctcggactgtttatttaccaaagcctggatgcaatcgatggcaaacaggctaggcggaccaactcttgttccccacttggcgagcttttcgatcacggctgcgatagtctctctaccgtgttcatggccgtcggtgcctccattgctgcccgtctgggcacataccccgattggttctttttttgctcatttattggaatgtttgttttttactgcgcccactggcagacctacgtgagtggtatgctaagattcggaaaagttgatgtaactgaaatacagattgccttggtcatagtgttcgtgttgtcagcttttgggggagcaacaatgtgggactacactatacccatcttggagattaaactcaaaatcctgccagtgcttgggtttctggggggagtgattttcagttgcagcaattactttcacgtgatactccacggaggcgtgggtaaaaacggatcgaccatagctggtacctcagtgctcagtcctgggctacatataggattgattatcatcctggctatcatgatatataagaaaagcgccactgacgtcttcgagaagcatccatgtttgtatattctgatgtttggatgtgtgtttgcaaaggtaagccaaaagttggtggtcgcacacatgactaagtcagagctgtacctgcaggacacagttttcctcggccctggcttactgtttctcgatcagtactttaacaactttatcgatgaatacgtggtgctgtggatggcaatggttatatcctcgttcgatatggtcatttactttagcgctttgtgcctccagatatccagacacttgcatctaaatatttttaagaccgcctgtcaccaggcccctgagcaagttcaggtactttccagcaagtcacatcagaacaatatggactag

SEQ ID NO: 31364 - DNA, 2508 bp, synthetic construct
  misc_feature 1..2508: note = Description of Artificial Sequence: Synthetic coding sequence
  source 1..2508: mol_type = other DNA
atggcagaactgtccgaggaggccctcctgagtgttctgcccacgattcgagtccctaaagccggtgaccgggtgcataaggatgaatgtgcattttcatttgacactcccgagtccgagggcggtctgtacatctgtatgaacacattcctgggatttgggaaacagtacgtggaaaggcacttcaacaagactggccaacgcgtttacctccacctgcgcagaacccggcgacccaaagaggaggacccagctactgggaccggggatccccctagaaaaaagccaacaaggctggccattggggtggagggcggttttgatctcagcgaagagaaattcgagctcgatgaggacgtgaagatagtgatcctccctgattatctcgagattgccagagacggcctggggggtctgcctgatattgtaagagatcgggttacttccgctgtggaagcactactctccgccgattccgcatcacgcaagcaagaggtgcaggcatgggacggtgaggtacgccaagtctctaagcatgctttttccctcaagcagctggataatcctgctagaatccccccatgcgggtggaaatgttctaaatgcgacatgagagagaacctatggctgaacttgactgacggctctattttgtgtgggaggcgctatttcgacggttcgggtggaaataaccacgccgtcgagcactacagggagacgggttatcccttggcagtgaagctgggcacgattacacctgatggcgctgacgtttattcatacgacgaagacgacatggtcctggatccctctttagcagaacacttgtcacatttcggaatcgacatgctgaagatgcaaaagacagataagacgatgacagaactggagatagacatgaaccagcgtatcggcgagtgggagctgatccaggaaagtggtgtgcccctcaagcccctcttcggacccggatataccggaataaggaacctggggaattcttgctacctaaacagtgtggtgcaagtgctgttttcaatacccgattttcagcgaaaatatgtagacaagctggagaagatttttcagaatgcccctacagatcctacccaggatttctccacacaggtcgccaaactgggccatggactacttagcggcgaatattccaaacccgtgccagaaagtggggacggggaaagggtcccggaacagaaagaggttcaggacgggatagctcccaggatgtttaaggcattgataggcaaggggcaccccgagttctccacgaaccggcagcaggacgctcaggagtttttcctgcacttgataaatatggtcgaaagaaattgcagaagctctgaaaaccctaacgaagtgttccggtttttagtcgaggagaagatcaaatgtttagccaccgagaaggtcaagtacacgcagagggtcgactacatcatgcagctcccggtgcctatggacgctgctctcaacaaagaggagctcctggagtacgaagagaagaagaggcaagcagaagaggaaaaaatggccttaccagaactggtgcgagcacaagtgccattcagctcatgccttgaagcgtatggagcacccgagcaggtggatgacttctggtccacagctctgcaagcaaaaagcgtggccgttaagacaacccgttttgccagttttcccgactatttggtaattcaaattaagaaattcactttcggactcgactgggtgcctaagaaactggatgtcagcatcgagatgcccgaggaactcgacatctcccagctccgcggaaccggcctgcaacctggggaagaggaattgcccgatatagcacctccattggtcacacctgacgaaccaaaagcgccaatgctcgatgagtccgttatcatacagctggtggaaatgggcttccccatggacgcctgtcggaaggctgtgtattataccgggaattcaggcgcagaagccgctatgaattgggttatgagtcacatggatgatccagacttcgccaatccgttgattctacctggcagttcaggccctggcagtaccagtgccgctgctgaccctccgccagaagactgtgtaactaccatcgtctctatgggtttttccagagatcaggctctcaaggccctgcgcgctaccaacaacagccttgaacgtgctgtggattggatcttctcgcacatcgacgacctggacgccgaagctgcaatggacatctcagagggacgatcagcagccgactctatttccgaatctgtgccagtgggacctaaggttcgggacggccctggtaaatatcagcttttcgcctttatcagccacatgggcactagtacgatgtgtggccattacgtgtgtcatattaagaaagagggcagatgggttatatacaatgatcagaaagtgtgcgccagtgagaagccgcctaaagacctaggatacatctatttctaccagcgcgtggcaagctag

SEQ ID NO: 31365 - DNA, 2385 bp, synthetic construct
  misc_feature 1..2385: note = Description of Artificial Sequence: Synthetic coding sequence
  source 1..2385: mol_type = other DNA
atggctgacgcctgggaagagatcaggcgtctcgccgctgattttcagagagcccagttcgctgaggccacacagcggctaagcgaaaggaactgtattgagatcgtcaacaaattgatcgctcagaagcagctggaggtcgtccatacactggacggaaaggaatacattacccctgctcagatcagtaaggaaatgagagacgaactgcacgttcgcggaggcagagtgaatatcgtggacctgcaacaggtgatcaatgtagacttaatccatattgagaatcgcattggtgatataattaagagcgagaagcatgtacaactcgtgctgggacaattaattgacgagaattatctggatcgtcttgcagaggaagttaacgacaaactccaggagtccggacaggtgaccatttcagagctgtgtaaaacttacgatctgcctggaaatttcttgacccaggcccttacccagagactagggaggatcatcagcggacacattgacctggacaaccgcggagttatattcactgaagccttcgtagcgaggcacaaagcacgtatccgtggactgttttccgcaatcactagaccaaccgcagttaatagcttgatttccaaatacgggttccaggaacagttgctgtatagtgttttagaggaactggtgaactccgggagactccgtggtactgtggtggggggacggcaagataaagcagtctttgtgccagatatatattctcggacccagtccacctgggtggactcctttttcagacagaacggctacctggaatttgatgcgctgagccgcctcggtattccagacgctgtgagttatatcaagaagagatacaagacaacccagctgctatttcttaaggccgcatgcgtcggccaagggcttgtggaccaggtcgaggcgtccgtggaagaagctatttcttcagggacatgggttgacatcgccccactgctccccaccagcctgtccgtcgaggatgccgcaatacttttgcagcaggtgatgagggccttttccaaacaggcttcaactgttgtgttctcagatactgttgttgtgtcggagaagtttatcaacgactgcacggagctctttcgtgagctgatgcaccagaaggccgagaaggagatgaaaaacaaccccgtgcatctgataacggaggaggatctgaagcagattagcacactggagagcgtcagcactagtaaaaaggataagaaagacgagaggagaaggaaggccactgagggctccgggagcatgcgcggaggagggggaggtaatgccagagagtacaaaattaaaaaggtgaaaaaaaagggtcgaaaggatgacgattcagacgacgagtcacagagctcacacacaggcaaaaaaaagccagaaatttcatttatgttccaagatgaaatcgaggacttcttgcggaaacatatacaagatgctccggaggaattcatctcagagctagcagaatacctgatcaaaccgctgaacaagacgtacctggaagtcgtgcggtctgtgttcatgagcagtacaacctctgccagcgggaccgggagaaagaggacaattaaagacctgcaggaagaagtgtcaaacctttataataatatccgcctcttcgagaaaggcatgaagtttttcgccgatgacacacaggccgctctgacgaagcaccttctgaaatccgtgtgcacagacatcaccaacttgattttcaatttccttgccagtgatctgatgatggccgtcgatgatccagccgctattacatcagagattcgcaaaaagatattgtctaaactttccgaagagaccaaggtggccctgactaaactgcacaactctctcaacgagaagtctattgaggactttataagctgcctggattccgccgcagaggcatgcgatatcatggtgaagcgcggagacaaaaagagggaaaggcagattttgtttcaacacagacaggctctagctgaacagcttaaggtgactgaagacccggcactgattttacatcttacgtccgtgttgctatttcagttcagtacgcattctatgctccatgcccctgggaggtgtgtcccacagatcatcgcattcctgaactccaagataccagaagaccaacacgccctgctggtgaaataccagggcctcgtggttaaacagctagtgagccagtccaagaaaacgggccagggagactaccccttgaacaatgagctggataaggagcaggaggacgtagcttccaccaccagaaaagagctgcaggagttatcatcaagcatcaaagaccttgtcttaaagtcccggaagtcaagcgtcaccgaggagtag

SEQ ID NO: 31366 - DNA, 942 bp, synthetic construct
  misc_feature 1..942: note = Description of Artificial Sequence: Synthetic coding sequence
  source 1..942: mol_type = other DNA
atgatcgggcagaagactttgtatagctttttcagtccaagcccggcaagaaaaagacacgccccatcacccgagccggcagtgcaggggactggtgtagcaggagtgcccgaggagtccggagatgccgcagcaatcccagcgaagaaagcgccagcgggtcaggaagagcctggaactcctccctcctcacctttatccgccgaacaattggataggatccaacggaacaaggcagccgctctgctgaggctggctgcgaggaacgtccctgtgggttttggcgaatcttggaaaaaacacctgagcggtgagtttggaaagccgtattttattaaacttatgggttttgttgccgaggagcgtaagcattacacagtgtacccaccgcctcatcaggtgttcacgtggacacaaatgtgtgatattaaagacgtcaaagtggtgattctcggccaagacccatatcatgggccaaatcaggctcacggactgtgcttctcggtccagcgaccggtgcctcctcctcccagcctggagaacatatacaaggaactgtcaacagatatcgaagacttcgtacatcctggtcatggagacctgagcgggtgggcgaaacaaggtgtccttctgttaaacgccgtacttacagtgcgagcccatcaggccaactcacacaaagagcgcggatgggaacagttcaccgatgcggtggttagctggctgaaccagaacagcaatggccttgtgtttctgttatggggctcctacgcacagaagaagggatccgctattgatagaaagcgacaccacgtgttgcagaccgcccacccttccccgctgtctgtttataggggcttctttggatgccggcacttcagcaagactaatgaattgctgcaaaagagcggcaaaaagcctattgactggaaggaactctag

SEQ ID NO: 31367 - DNA, 915 bp, synthetic construct
  misc_feature 1..915: note = Description of Artificial Sequence: Synthetic coding sequence
  source 1..915: mol_type = other DNA
atgggggtcttttgtctgggtccatgggggctcggcagaaagctcaggacaccaggaaagggcccactgcaactactgagcaggctctgcggggaccacctccaagcgatcccagccaaaaaagcccctgccggacaggaggagccaggcactccgccatcctctcctctgtcagcagaacagcttgacagaatccagcggaacaaggctgctgctcttctgcgactggccgctcgcaatgtacccgtaggtttcggagagtcctggaaaaaacatttgtcgggagaattcgggaagccctattttattaaattgatgggttttgtggctgaagaaagaaagcactataccgtttatcctcccccacatcaagtattcacgtggacccagatgtgtgatatcaaagatgtgaaagttgtaatcttggggcaagacccctaccacgggcctaaccaggcccacggcctatgcttttccgtccaaagacccgttccaccccctccctccctggagaacatctataaggaactgtctactgacatagaagattttgtccatcccggacatggcgatctatccgggtgggcgaaacagggcgttttgcttctcaatgcagtgctgacagttcgggctcatcaagccaactctcacaaggagcgaggctgggagcagttcaccgatgcggtggtcagttggctgaatcagaactctaatggcctggtctttctgctgtggggctcctacgcgcaaaagaaaggctctgcaattgacagaaaaaggcatcatgtgctccaaaccgcacacccctctcctctgagcgtatacaggggcttcttcggctgccgccacttttccaagaccaatgaattgctccagaaaagcggaaaaaaacccattgattggaaggagctctag

SEQ ID NO: 31368 - DNA, 813 bp, synthetic construct
  misc_feature 1..813: note = Description of Artificial Sequence: Synthetic coding sequence
  source 1..813: mol_type = other DNA
atgggggtgttctgtctgggtccctggggccttggcagaaagcttagaacacccggaaaaggaccactcagcgccgagcagctggacaggatacagaggaacaaggctgcggcactactgaggcttgcagccagaaatgttcccgtggggtttggggaaagttggaaaaaacatctgtccggagagtttggcaagccttattttataaaactgatggggttcgtcgccgaagaaaggaaacattataccgtgtacccaccacctcatcaagtgttcacctggacgcagatgtgcgacatcaaagatgtcaaggtcgtcatcttaggccaagatccctatcacggcccaaaccaggctcacggactttgcttctccgtgcagaggccagtgcccccaccacccagccttgaaaacatctacaaggagctcagcactgacatcgaagatttcgttcacccaggtcacggagatctttcaggctgggccaaacagggggtccttctgctcaacgccgtccttacagtgcgtgcccaccaagctaactcacataaggagaggggttgggaacagttcacggatgctgtggtgtcttggcttaaccagaactccaatgggctagtgttccttctctgggggagttacgctcaaaagaagggcagtgctattgacaggaaaaggcatcacgtgttgcaaaccgcccatccatctcccctctctgtgtacaggggattcttcggctgcagacacttcagtaaaacaaacgaactcttacagaagagcggaaagaagcccattgattggaaggaactatag

SEQ ID NO: 31369 - DNA, 9287 bp, synthetic construct
  misc_feature 1..9287: note = Description of Artificial Sequence: Synthetic coding sequence
  source 1..9287: mol_type = other DNA
atggttttcgagtctgtggtggtagacgtgctgaacagattcctgggggattacgtggtcgatctggacacctctcagttaagcctcggcatctggaaaggggctgttgcccttaagaatctgcagatcaaagaaaatgcgttaagtcagctggatgtccccttcaaggtgaaagtgggacacatcggtaatcttaagctcatcatcccctggaagaatctctacactcagcccgtggaagctgtgctggaggaaatatacctgctgatcgtcccatcctcccgcatcaaatacgatccactaaaggaggagaaacaactcatggaagcaaagcagcaggaactcaagcggatagaggaagccaagcaaaaggtagtggaccaagagcagcacctccccgaaaagcaggatacgttcgccgaaaagttagtcactcagatcatcaagaatctccaggtgaaaatcagctctatccacatcagatatgaggacgatatcacgaatcgcgataaacctctcagcttcggcatttctctccagaatctttccatgcagacgactgatcagtactgggtgccttgcctccacgatgaaacggaaaaattggtgcggaaacttattcgacttgataatctgtttgcatactggaacgtcaagagccagatgttttacctttcagactacgataactcgctggacgacttgaagaatggcatcgtgaatgagaatatcgtgccagagggatatgattttgtgttccgacccatttccgcaaatgccaagctcgtcatgaatagacgatccgattttgatttctcggcacccaagatcaacctggaaatcgagctccataacatcgcgatcgaatttaataagccgcagtactttagcattatggaacttctggagtccgtggatatgatggcacagaatctgccatataggaaattcaagcctgatgtacccttacatcatcatgcgagggagtggtgggcctacgcaattcatggggttctggaggttaatgtgtgtcctagactctggatgtggtcctggaagcatatccgtaagcatcgccagaaggttaaacagtacaaggagctctacaagaaaaaactcacctccaagaaaccgccaggggaacttctcgtcagcttagaggagctcgagaagacattagatgttttcaatatcacgatcgccaggcagaccgccgaagtggaggtgaagaaagctggatacaaaatctacaaagagggtgtaaaagacccagaggacaacaagggatggttctcctggttgtggtcttggagcgaacagaatactaatgagcagcagcctgatgtccaacccgagaccctcgaggagatgctcacaccagaagagaaggctcttctgtacgaggccatcggatactcggaaaccgccgtggatcctactctcctaaagactttcgaggctttaaaattctttgttcacctcaaatctatgagcattgtgctccgcgagaaccaccagaaacccgagctggtagacatagtaatcgaggagttttcaactctcatcgtgcagcggccaggagcccaggcgatcaagttcgagacaaaaatcgactcatttcacatcacagggctgcctgacaacagcgagaaaccgagactcttatcgtcattggatgatgcgatgtccctattccaaattacctttgaaataaatccactggatgagacggtgtcgcagcgttgcattatcgaagcggagccccttgagattatttatgatgcacgaactgtaaactccattgtcgagttctttaggccgccaaaggaggtgcaccttgcgcagcttacggcggctactctcactaagctggaggaatttcgtagtaagacagccaccgggctcctttatataatcgaaacacagaaggtgctggatcttaaaatcaatctgaaagcgagctacatcatagtcccacaggacggaattttttcgcccacaagcaatcttttactccttgacttaggacacttaaaggttacgtccaaaagtaggtcagagctcccagacgtaaaacagggagaagccaacttgaaagaaattatggacagagcctatgatagttttgatatccagctcacaagcgtgcaactgctctacagccgtgtgggcgataattggagagaagccagaaaactgtcggtgtcgacccaacatatcttggttccaatgcattttaacctagaactctcaaaggctatggtctttatggatgtcaggatgcccaaatttaagatttacggaaaactgccattgatctctctgcggattagcgataagaaactgcaggggattatggaactgatcgagagtattcccaagccggaacctgtgacagaagtctccgcccctgtcaaaagcttccaaatacagacctctacttctttaggcacctcacaaatctcccaaaagatcatacctctgctggagctgcctagcgttagtgaggatgacagcgaggaggagttcttcgatgcaccttgtagcccgctggaggaacctctccagtttcctactggtgtcaaatccattcggactagaaaactccagaagcaggactgctctgtcaacatgactacttttaaaattcgattcgaggttcccaaggtgttaatagaattttaccaccttgttggcgattgtgagctgtcagttgtcgaaatcctggtcctcgggttaggcgcagagattgaaatccgcacctatgatctgaaggccaacgcattcttaaaagaattttgcctgaaatgccctgagtaccttgatgagaacaagaaacctgtttacttagttaccacgctggacaacaccatggaagatctgctgacccttgagtatgtcaaagctgaaaaaaatgtccccgacctcaaatcaacatataacaacgtgctgcagctaattaaagttaacttcagttctctagatattcacttacataccgaggccctcttaaatactatcaattacctacataacatcttgccacagagcgaggagaaatcggcacctgtcagtaccaccgagaccgaggataaaggtgacgtgattaagaaacttgccttgaaacttagtacgaatgaggatatcatcacgctgcagatccttgccgaactgtcctgcctacaaatattcatacaagaccaaaagtgcaatatttctgagatcaaaatcgaaggtcttgacagcgaaatgatcatgaggccgtccgaaaccgagattaatgcaaagctcagaaatattatagtactggactctgatataaccgccatctataagaaggccgtgtatatcaccggcaaggaagtcttttcgttcaagatggtctcgtatatggacgctactgcgggtagtgcatatactgatatgaacgttgtcgacatccaggttaatttgatcgtgggatgcatcgaggtggtatttgtgacaaagttcctgtattccattctggcctttattgataactttcaggctgccaagcaggcgttagccgaggccaccgtgcaggctgcaggaatggcagccactggagttaaagagctggctcaacgctcatccagaatggccctcgacatcaatattaaagctccggttgtggtcattccccagtctcctgtaagtgaaaacgttttcgttgcagacttcgggctcatcacgatgacaaacacatttcacatgatcactgagtcccagagcagccctccacccgtcatcgacctgattaccataaaactctctgaaatgcgactgtaccgcagtcgatttattaacgacgcgtaccaggaggttctggacctgttgttgcccctcaacctggaggtggtcgtggagaggaacctgtgctgggagtggtatcaggaggtgccttgttttaacgtgaacgcacaactgaagcctatggagtttatactctcacaggaggatattactaccatatttaaaacactgcatggtaatatctggtacgagaaagacggtagcgcctcacccgcagtgactaaggatcagtactctgccaccagcggggtgacaacgaatgccagtcatcacagcggaggtgcaactgttgtgacagccgctgtcgtcgaggtccattcacgagccctactagtgaaaaccacgctgaatatttccttcaaaactgacgacctcacaatggtgctatacagcccaggcccaaagcaagccagttttacagacgttagggatccttcactgaaactcgccgaatttaaactcgaaaacattatctctacgctcaaaatgtacactgacggcagtaccttctcatcattctccctgaagaattgcatcttggacgataagagaccacacgtgaaaaaagccacacccagaatgattggtttgaccgtggggttcgataagaaggatatgatggacataaagtaccgcaaggtgcgcgatggctgtgtcactgatgccgtctttcaagagatgtacatctgtgcatccgtggaatttctccaaacagtggctaatgtctttttggaggcatacactaccggcaccgccgtggagaccagtgttcaaacctggactgccaaagaggaggtccctacccaggagtctgttaagtgggagatcaacgtcatcatcaagaacccagaaattgtcttcgtggcagatatgactaagaatgacgctccggcactcgtgatcacaacacagtgcgagatttgctataaaggaaacctagagaactctactatgacagcagccatcaaggacctgcaagtgagagcctgcccctttctcccagtgaaacgtaaaggcaagatcaccaccgttctccaaccctgtgatctgttttaccaaaccacacagaagggtacagacccccaggtgatagacatgtctgtgaaatcgctcactttaaaggtgagccccgtcataataaatacaatgattacaatcacttccgccttgtatacaaccaaagagacaatccctgaggaaacagcctcttccacagcacacctatgggagaagaaggacaccaagacactgaagatgtggtttctggaagaatcgaatgagacagagaaaattgctcctacgaccgaactggttcctaaaggcgaaatgatcaagatgaacatcgacagtatctttatcgtccttgaagcaggtatcggacatcggacagtgcccatgctactggcgaaatcccgtttttccggagagggaaagaactggagttcactgatcaatcttcactgccagctggagctagaggttcactactataacgaaatgttcggcgtttgggagcccttgctggagccactcgagatcgatcaaacagaggatttccgcccttggaacttgggcattaaaatgaagaagaaagctaagatggccatagtggagagcgatcctgaggaggaaaattataaggtacctgagtataaaacagttatatccttccactccaaggatcagttaaatattaccctttcaaagtgcggtcttgtgatgctgaataacctggtgaaggcttttacggaggccgcaacgggaagctccgccgatttcgtgaaggacctcgctcctttcatgatcctcaattccctcggcttgactatatccgtgtcgccctcagacagcttctctgtcctcaatataccaatggctaagagctacgttctcaagaacggggagtcactgtccatggactatatcagaacaaaggataatgatcactttaatgccatgaccagtcttagcagcaagctgtttttcatcctgcttacaccggttaatcactcaacagcggacaagattccactgacgaaagtgggcaggcgactatatacagtcaggcatagggagagcggcgtggagagaagtatcgtttgccagatcgatacagtcgaaggctctaaaaaagtcaccatacggagccccgttcagatcagaaatcatttctctgtgccgctctccgtttatgagggagataccctccttggtacggcttcccctgagaacgaattcaatatccctctgggtagctaccgaagcttcattttcctgaagccagaggacgaaaattaccaaatgtgtgaaggtatcgactttgaagaaattatcaagaacgatggcgctctcctgaagaagaaatgccgctcaaaaaatccaagcaaagagagctttctgatcaacatcgtgcctgagaaagacaatctgacgtccctttccgtttactccgaagatggatgggatctgccctacatcatgcatctgtggccgccaattctgctgcggaaccttcttccctacaaaatcgcctactatattgaaggcatcgagaatagcgtatttacattatcggagggccacagcgcacaaatctgcaccgctcagcttggaaaggcgagactgcacctgaaactgctggattatctcaatcatgactggaaatcagaataccacatcaaacctaaccaacaggatatctccttcgtttcatttacttgcgtgaccgagatggagaaaactgatttggacattgccgttcacatgacttacaataccggacaaactgtcgtcgcctttcattctccatactggatggtcaacaaaaccgggaggatgctgcagtataaagccgacgggatccaccgcaagcacccccctaactataagaaaccagttctgtttagttttcaacccaatcattttttcaataacaataaggtgcaactgatggtgactgactccgagctgtcaaatcagtttagcatcgacaccgtgggctcacatggtgcggttaagtgcaagggcctgaagatggattatcaggtcggggtcaccatcgatctctcatctttcaacattaccagaatcgttactttcaccccattttatatgatcaagaacaagtctaaataccatatcagcgtcgctgaggagggaaacgataagtggctgtccctggacctggagcagtgtatcccgttctggcctgagtacgcatcgtctaagctgttgattcaagtagaacgcagcgaagacccccctaagcggatttatttcaataaacaggaaaactgtattcttctgcgcctcgataacgagcttgggggtatcatcgctgaggtaaatctggctgagcattcaaccgtcataacctttttggattaccatgatggcgctgccaccttcctgcttatcaaccacacgaagaatgagctggtgcaatataaccagagtagcctctccgaaatcgaagactcactgccaccgggtaaagcagtgttttatacttgggccgacccagtgggatcacgtcgcctgaaatggagatgccgaaaaagccacggagaggtaactcagaaagacgacatgatgatgccgatcgatctgggcgaaaaaaccatttatctggtatccttcttcgaaggcctgcaacgcattattctgttcacagaggaccccagagtctttaaggtaacgtacgagtctgagaaggctgaactggccgaacaggagatcgcggtggctctccaggacgtgggaatcagccttgtcaacaattacacaaagcaagaggtggcatatatcgggatcactagcagcgatgtcgtttgggagactaagcccaaaaaaaaggccagatggaaacctatgtccgtaaagcatacggaaaaattagagcgtgagtttaaggaatataccgagagttcaccatccgaagacaaagtcatccaacttgacaccaatgtgcctgtgagactgacccccactgggcacaacatgaaaatattgcagccccacgtaattgccttgcgcagaaactatctgcctgctctaaaagtagagtacaacacctcggcacatcagtcaagctttagaattcagatttaccggattcagatacagaaccagatccacggcgctgtgtttccgttcgtcttttacccagtgaaaccacccaaatccgtgaccatggactccgcacctaagccctttaccgacgtgtcaattgtcatgcggtccgctgggcactcgcaaatctctaggatcaaatattttaaagttttgatccaggaaatggacctgcgacttgacctgggctttatttacgctcttaccgatttgatgactgaagctgaggttacggagaacaccgaggtagagctgtttcataaagatatcgaggctttcaaggaggagtataaaaccgcctctttggttgatcaatcccaggtgtcactttatgagtactttcacatatctccaatcaagctccacttgtccgtgtctctcagctctggacgggaggaagccaaagactccaagcagaatggagggctgataccagtgcactcactgaatcttctgctgaagagcataggtgccacactgacagacgtacaggacgttgttttcaagttggctttttttgaattgaattatcagtttcatacaaccagcgatctgcagtccgaagttatcaggcactactcaaagcaagccatcaaacagatgtatgtgctcatactcgggctcgacgtgctgggaaaccctttcggcctgatcagagagttttctgaaggcgtggaggctttcttttatgaaccttaccaaggggctatccaggggccagaggagtttgtcgaggggatggccctggggctcaaagcattggtgggcggtgcagtgggcggtttggccggagcagcatcaaaaatcacaggcgctatggcaaagggtgtggcagccatgaccatggatgaggattatcaacagaagcgcagggaagctatgaataaacagcccgctggtttcagagaagggattacccgaggcggaaagggattggtttccggctttgtcagtgggattaccggcattgtcactaagccaattaagggagcacagaagggcggagctgccggattttttaagggcgtcggcaaaggcttggttggagccgtcgctaggccaaccggaggaattattgatatggccagctccaccttccaaggtattaagagggcaacagaaacctcagaagtggaatctctacgcccacccagattttttaatgaagacggagtaatacgcccataccgcctgagggacggcaccggcaaccagatgctacagaagattcagttttacagagaatggataatgacccactccagtagtagtgatgacgacgatgacgacgatgacgacgatgaatcagacctcaatcacta

SEQ ID NO: 31370 - DNA, 9525 bp, synthetic construct
  misc_feature 1..9525: note = Description of Artificial Sequence: Synthetic coding sequence
  source 1..9525: mol_type = other DNA
atggtctttgaatccgtggtggtggacgtgctcaatcgatttcttggtgactacgtagtagatctcgacactagccagctatctctggggatttggaagggagcagtcgccttgaagaacttgcagattaaggagaatgcgctctcccagctcgacgtcccatttaaggtgaaggtgggacatattgggaacctaaagttgattatcccttggaagaatttatacactcaaccggtcgaagctgtgctggaggaaatctaccttctgattgttccaagctcacggatcaagtacgaccctctcaaggaagagaagcagctaatggaggcaaaacaacaggaactgaaacgcatcgaggaggctaagcagaaggtggttgatcaagaacagcacttgcccgagaagcaagacaccttcgcggagaaactagtcacccaaatcattaagaacttacaggttaaaatctctagtatccacatcaggtacgaagatgatatcaccaaccgggacaaaccactctccttcggcatttctctccagaacctgtcgatgcagacaaccgatcaatattgggtaccttgtctgcatgatgagacagagaagctagtacggaaattaatccgcttagacaatcttttcgcctattggaatgtgaaaagccagatgttttacctgtctgactatgacaattcactggacgacctgaaaaatggcatagtcaatgaaaatattgtgccggaagggtatgacttcgtcttcaggcctattagtgctaacgctaaactggtcatgaaccgtagatcggactttgacttctctgccccaaaaattaaccttgagatcgagctccacaacatcgccatagagtttaataagcctcagtatttctccatcatggagctgctggaatcagtcgacatgatggctcaaaatctaccttaccgaaagtttaagcccgacgtgcccctgcaccaccacgctcgagagtggtgggcatacgcaattcacggggtgttggaagtaaatgtgtgccccagattgtggatgtggagctggaagcacatcaggaagcaccgccagaaagtcaaacagtataaggagttgtacaaaaaaaaactgacttccaaaaaacctccaggcgaactcttggtgagtctagaggaattggaaaagactctggacgtattcaacattaccatagctagacaaaccgccgaggtggaggtgaagaaggcaggctataaaatttacaaggagggcgtgaaggatcccgaagacaacaagggttggttttcctggctttggtcttggtccgaacaaaataccaatgaacagcagcccgacgtgcaacctgaaaccctggaagaaatgctgacaccggaggaaaaagctttactctatgaggccattggctactctgaaacagcagtggatcccacactgctgaaaaccttcgaggccttgaaattcttcgtgcatctaaagagcatgtccattgtcctgcgggaaaaccaccaaaaaccagagctcgtcgacattgtcatcgaagagttctctactctcatcgtgcaaagaccaggcgcacaggccattaaattcgagacaaagatcgacagcttccacatcaccggtcttcctgataacagcgagaagcccaggctactgtccagcttggacgatgcaatgtcactgttccagatcacttttgagataaaccctcttgacgaaaccgtttcccagaggtgtatcatcgaggccgaacccttggagattatttacgatgctagaaccgtgaatagcatcgtcgagttcttccgaccaccaaaagaggtgcacctcgcacagctgactgcagcaacattgactaagcttgaggaatttcggtccaagaccgcaaccggattactgtatatcatcgaaacccagaaagtgttagacctcaaaatcaatttgaaggccagctacattattgtcccacaggacggcattttctcacctaccagcaatctgctgctcctggatctggggcacttaaaggtgacttctaaatcaaggagcgagttgcctgatgtaaaacaaggagaggctaacctcaaggagattatggacagagcctacgactcattcgatattcaactcaccagtgtgcagctactttactcgcgggtaggggacaactggagagaagcgcgaaagcttagcgtatcgacacagcacattttggttcccatgcattttaatttggagttgagcaaggctatggtgtttatggacgtcaggatgccaaaatttaaaatctacggaaaactgcccttgatttcactgaggatcagcgacaagaaattgcagggaattatggagctcattgaatctattccaaaacctgaacctgtgactgaagtgtcagctcctgtgaaatctttccagatccagacttccacttccctgggtactagccaaattagccagaaaattataccacttctggagctcccctctgtcagtgaggacgatagcgaagaggagttttttgacgccccatgttcaccattggaagagcccttgcaattcccgactggtgtcaagtctatcaggacaagaaaattgcagaaacaggactgctctgtgaacatgaccacttttaagattcgcttcgaggttcctaaagtgctgattgaattttaccacttagtcggtgactgcgagttatcggtagtggaaatcctggtgcttggccttggcgctgagattgagatccgaacctacgatctcaaggcaaatgctttcctcaaggagttctgtctcaagtgtcctgagtacctggacgaaaacaagaaacccgtttatttagtcactacacttgataacacgatggaggatctcctcaccttagaatacgtcaaagctgaaaaaaatgtgcccgatctgaagagcacctacaataacgtgttacagctgatcaaggtcaactttagcagcctggacatccacctccataccgaagccctcctaaacacgatcaattacctccacaacatcctcccacagagcgaagagaagtctgcacccgtctccaccaccgagacagaggacaagggcgacgtcatcaagaagctggcactcaaactcagcactaatgaagacatcatcaccctgcaaattctcgccgagctctcctgcctccaaatattcattcaggatcagaaatgtaatattagcgaaattaagattgagggcctggactcagagatgatcatgagaccttccgagacagagatcaacgccaaactgcgaaacatcatcgtactcgactctgatatcacagccatctacaagaaggcagtgtacataaccggaaaggaagtattttcctttaagatggtgagctacatggatgcgaccgccggaagtgcctacactgacatgaatgtggtggacatccaagtgaacttgatcgtgggatgcattgaagtagtgttcgtgaccaaattcttgtactccattttagcgtttatagataacttccaggctgctaagcaggccctggcagaagccaccgtgcaggcagctggaatggcagctacaggtgtgaaagagcttgcacaacgaagttcacgtatggccctggacattaacattaaggccccagttgtagtaatccctcagtcacccgtctccgagaacgtgtttgtggcagacttcggactcataaccatgactaatactttccacatgatcacagagagtcaatcttcccctccgcctgttattgatctaattacaatcaagttatctgaaatgcgactctacaggtccaggttcattaacgacgcataccaggaggtgttggatttgctcctcccgctgaacctggaggttgtggtggaacgcaatttgtgttgggagtggtatcaggaagtaccctgcttcaatgttaacgcacaactcaagccaatggaatttatcctgtcccaggaggatatcactactatatttaagaccctgcatggtaacatctggtatgaaaaagatggaagtgcaagcccagccgtgactaaagaccagtatagcgctacctctggggtgacaacaaatgcgtctcatcacagcggtggcgcaactgtggtcaccgccgcagtggtggaagtccactcccgcgctcttctggtgaagactactttaaacatctccttcaagaccgatgacctgactatggtattgtactccccagggcctaaacaggcgtcgttcacagatgtccgagacccgtcccttaaactggccgagttcaaactggagaatatcatttcaactttgaagatgtacaccgatggaagcactttctcaagcttctcactgaagaattgtatcctggacgacaagcgacctcatgtcaagaaagccacacctcgtatgattgggttgacagttggcttcgataagaaagatatgatggatatcaagtacaggaaggttcgggatggatgcgtgactgatgctgtttttcaagagatgtatatatgcgcaagtgtggagtttctccagacagtggcaaatgtttttttggaggcatacacaaccgggaccgccgttgaaacatccgtacaaacatggacagcaaaggaggaggttccgacacaggaaagcgtaaagtgggagattaatgttatcataaagaatccagaaattgtgttcgtcgctgatatgaccaaaaacgacgcgccagccttggttatcaccacccagtgcgagatttgctacaaggggaacctggagaactcgactatgacggcagccattaaggatttgcaagttagagcctgcccttttctgcccgtcaagagaaagggtaaaattaccaccgtgttgcagccctgcgacttgttttatcagactacacagaagggtacagacccacaggtgatagacatgtccgtgaagtccctcacactgaaagttagcccggtcatcatcaacactatgatcacaattacctcggcgctgtacacaaccaaagagaccatccctgaagagaccgcgagctccactgcgcatctgtgggaaaagaaggacactaaaactttgaaaatgtggtttctggaggagtctaacgagacagaaaagatcgcccctactactgagctggtgccaaagggtgagatgattaagatgaatatcgatagtatctttattgtactggaggccggtatcggacacagaacagtcccaatgttactcgctaagagccggttttcaggagaggggaagaattggtcaagcctgattaatttgcactgccagctggagctcgaggtgcattactacaacgagatgtttggcgtttgggagccccttttggagcccttagaaattgaccagaccgaagacttcagaccatggaacctcgggattaagatgaagaaaaaagctaagatggcaatcgtggaaagcgatcctgaggaggagaattataaagtacccgagtataaaaccgtgattagcttccattctaaggaccagttgaatataactctgtcaaagtgcgggctggtcatgctgaacaatttagtgaaggcctttacggaggcagccactggcagctccgctgattttgtcaaggatctggccccttttatgatcctgaatagcctggggctcaccatatccgtttctccaagtgatagttttagtgtcctaaatatacccatggcaaagagttacgtgcttaagaacggggaatcactgagcatggattacatccgcactaaagacaacgaccatttcaatgccatgacgtccctctcctctaaactcttcttcattttactgacaccagttaaccactccacagccgataagataccactgaccaaggtcggcaggagattatacaccgtgcgccaccgcgagtctggcgtcgaaaggtctattgtctgtcagatcgacaccgtcgagggaagtaagaaggtcacaatccgctcacctgttcagatacggaatcatttctcggtgcctttgagcgtatatgaaggagacacgctgctgggcacggctagccccgagaatgagttcaacataccattgggctcctacagatcctttatcttcctgaagcccgaggacgaaaactatcaaatgtgcgagggcatcgattttgaggagataattaaaaatgatggagccctcctgaagaagaaatgtcgttctaaaaatccatccaaagagtcattcctcattaacatcgttcccgagaaggataatctgacctcgctatcagtgtactctgaggacggttgggacctgccctacatcatgcatctgtggccccctattctgcttagaaatctgctgccctacaagatagcctattatatagaggggatagagaactcagtgtttactttgtccgaggggcattcggcacagatatgcaccgcacaactaggaaaagccaggctccatctcaagctgctagattaccttaatcatgactggaaaagtgagtaccacataaagcctaaccaacaggatatcagcttcgtgagcttcacctgcgtgacagaaatggaaaagactgaccttgatatagcagtgcatatgacatacaacacgggtcagacagtggtagctttccattccccttactggatggttaataagaccggtcgcatgctccagtacaaagccgatgggattcacaggaagcatcctcctaattacaaaaaaccagtgctctttagcttccagccaaatcacttcttcaacaacaacaaagtccaactaatggtgactgacagcgagctctctaaccagttttcaatagatacagtcggctcgcatggcgcagtaaaatgtaaggggctcaagatggattaccaggtgggagtgaccatcgatttgtcatcgtttaacataacacgaatagtcactttcaccccattctatatgatcaagaataaaagtaagtaccacatttcagtcgcagaggaaggcaatgataaatggctgtcgttagacttggaacagtgtatccccttttggcccgagtacgcttcaagcaagctactgattcaagtcgaaagaagcgaagacccaccgaaacgcatctattttaataaacaggagaattgcattctgttgaggctggacaacgaactcggaggtattatcgctgaagtcaatctcgctgagcattctacagtcattactttcttagactaccacgatggcgctgcgactttccttcttattaaccatactaaaaatgagctggtccaatataaccagtcatctctgtctgagattgaagactccctcccgccaggcaaagccgtgttctacacttgggccgaccccgttgggagcaggcggctcaagtggcgctgtagaaagtcacacggggaggtgacacagaaagacgacatgatgatgccaatagatctgggggaaaaaacaatttacctggtctctttcttcgaagggcttcaaagaattatccttttcaccgaggatcctagagtcttcaaggtaacttatgaatcggagaaagcggagttggccgagcaggagatcgccgtcgcgctccaagatgtaggtatctctctggtgaacaattatacgaagcaagaggtggcctacataggaattacttccagcgacgtcgtgtgggagacaaagccaaaaaaaaaagcacggtggaagcccatgtccgtaaagcacacggagaaactggaaagggagttcaaagaatatactgagagctctccatccgaggacaaggtgatccagttggatacaaacgtgcccgtgaggctcacccctacagggcacaacatgaaaattctacagccacatgtgatcgctttacgcagaaattaccttccggctctaaaggttgagtataatacctcagcgcatcaatcttcatttcgaatccagatctacagaatccaaattcagaaccagatccacggagccgtgttcccttttgtcttttaccccgtgaagccccctaaatctgtgacgatggacagtgcacctaagccctttactgacgtctctattgttatgcgatccgccggacactcccagatcagcaggattaaatattttaaagtgctgatacaggaaatggacctgcgcctagatctgggatttatatatgctttgaccgaccttatgactgaggcagaggtcacggaaaacaccgaggtggagttgtttcacaaggatatcgaggctttcaaagaggagtataagacagcttctcttgtggatcagagccaagtctccctgtatgagtacttccacatatctcccattaagcttcaccttagcgtcagcctctcttcaggtcgcgaagaagccaaagattccaagcaaaatgggggattaatccccgtccattccctgaatctactactgaagtcgattggtgcaactttaaccgacgtccaggacgtcgttttcaaactcgccttctttgaactaaattaccaatttcatacaacttcagacctgcaatccgaggttatccggcactactcaaagcaggccattaaacagatgtatgtgttgattcttggtctcgacgttctcgggaatcccttcgggttgattcgcgagttctccgaaggggtcgaggcgttcttttacgagccataccaaggtgccatccagggcccagaggaatttgtagaaggaatggctctggggctcaaagccctcgtgggcggagccgtggggggattggccggagctgcaagcaagataactggcgcaatggcaaaaggggttgctgccatgacaatggatgaggactatcagcagaaacggagagaggcaatgaacaagcagccggctggctttcgggaaggaatcactcgaggtggcaagggactcgtgtctggctttgttagtgggatcacgggcatagtcacgaaaccaattaaaggagcccaaaagggaggggctgcgggattcttcaagggcgtcgggaagggcttggtcggggcagtagcacggccaaccggtggaatcatcgatatggctagctctacattccagggcataaagcgggcaaccgagaccagtgaggtggagagtttacgcccacctaggttctttaatgaagacggagtcatccgcccttacagactgcgcgatggtaccgggaaccagatgctgcaggtgatggaaaatgggaggttcgccaagtacaagtattttacccacgtgatgatcaacaaaacggacatgctgatgatcacacgcaggggagtcctcttcgttaccaagggaacgtttggacagctgacatgtgagtggcagtactcattcgacgagtttacaaaggagccattcattgtccacgggcgaaggttgcggatcgaagccaaagaacgggtgaaatctgtgttccacgctagagaattcggcaaaatcattaatttcaaaactcccgaggatgcaagatggatacttaccaagctgcaggaggcacgtgaaccatctccttcactgtat

SEQ ID NO: 31371 - DNA, 9209 bp, synthetic construct
  misc_feature 1..9209: note = Description of Artificial Sequence: Synthetic coding sequence
  source 1..9209: mol_type = other DNA
atggtttttgagtctgtggtggttgatgtgttgaacaggttcctgggagactacgtggtggacctggacacgagtcagctttccttgggcatatggaagggcgctgttgctctgaagaacctgcagatcaaggagaatgctctgtctcagcttgatgtgccattcaaggtgaaggtgggccacatcggcaacctgaagctgattatcccttggaaaaatctgtacacccagcccgttgaagctgtcctcgaggagatatatctgctaatcgtgccatcaagccgcatcaagtatgatcctctcaaagaggagaagcagttgatggaagccaaacagcaggagctgaaaagaatagaggaggctaagcagaaggtagtggatcaggagcagcatctgcccgaaaagcaagatactttcgccgagaagctggtgacgcaaatcatcaagaacctacaggttaaaatatcctcaattcacatacgctacgaggacgacattaccaatcgagacaaaccgttgagctttggtattagcctgcagaaccttagcatgcagactaccgatcagtactgggtcccctgccttcatgacgagactgaaaagctcgtcagaaaactcataaggctagataacttgttcgcatactggaacgtgaagtcacagatgttctacctctctgattacgataattccctcgacgatctcaaaaatggcatcgtgaacgagaatatcgtccccgagggttatgactttgtgtttaggcctatctcggccaatgctaagctggtcatgaaccgtcgtagcgacttcgatttctcggcccctaaaatcaatttagagattgaactgcataacattgccatcgaattcaataagcctcagtacttttccattatggaattgctggagagcgttgacatgatggcccagaatctcccctacagaaagttcaaaccggatgtgcctttacatcaccatgccagagagtggtgggcttacgcgattcatggggtcttggaggtcaatgtgtgcccacggctctggatgtggagctggaagcatattaggaagcatcggcagaaggtgaaacagtataaggaactatataagaagaagctaaccagtaaaaaaccacccggtgaattattggtttcactggaagaattagagaaaacccttgacgtatttaacattaccatcgccaggcagactgccgaggtcgaggtgaagaaagcaggttataaaatctacaaagaaggggtcaaggatcccgaggacaacaaggggtggttctcttggctgtggagctggtcagagcaaaatactaacgagcagcagccggacgtgcagcccgaaactctcgaggaaatgctaacaccagaggaaaaggcgctactgtatgaggccattgggtattcagagacagccgtggaccctacactgctcaaaaccttcgaagcactaaaattctttgtgcacctcaagagtatgtcgatcgtgctgagagaaaatcatcagaaacccgaattagtggacatcgtaatcgaagagttcagcacactgatcgtgcagaggccaggcgcacaagcaattaagttcgagacgaagattgattcctttcatatcactggcctgccagataactccgagaagccccgactgttgagttccctggacgacgccatgagtctgttccagatcacatttgaaatcaatcccctggacgagacagtaagccagcgctgtattatcgaagccgagccattagagattatctacgacgcgcgaacagttaactcgatcgtagaattctttagaccaccaaaagaagtgcatttagcacaactaaccgcggctaccttgacaaagctcgaagagttccgcagcaagactgctacaggcctactgtacatcatcgagactcaaaaagtactcgatctgaaaatcaacttgaaagcctcatatatcattgtgcctcaagatggcatcttctcgcccacgagcaatctgttgctgctggacttgggccacctcaaggttacttctaaaagcaggagcgaactgcccgatgtcaagcaaggggaggcgaatttgaaggaaatcatggacagggcatacgattccttcgacatccagctgacctctgtacagttgttatatagtagggtcggggataactggagggaggctcgcaaactctccgtcagtacacagcatatcctggtccccatgcactttaacttggagctgtccaaagccatggtgtttatggacgtgcgcatgcctaagtttaaaatctacggaaaattgcctctgatcagtttacgcatctctgacaagaaactccaaggtataatggagctgatcgagtccattccgaagccggagcccgtcactgaggtctccgcccctgtcaagagcttccaaatccagacctccactagcttgggaacatcgcaaatctcacagaagatcatccccctgctggaactgccatccgtgtcagaagacgactctgaagaagaatttttcgacgccccatgctcaccattagaggagccgcttcagtttcccaccggcgtgaagtctatcagaacaagaaaactgcagaagcaagactgctcagtgaacatgactacttttaagattaggttcgaggtccccaaagttcttatcgaattctatcatctggtgggtgattgtgagctcagtgtggtcgagattctcgtgctgggcctgggcgcagagatagaaattcggacctacgatctcaaggctaatgccttcctgaaggagttctgtctgaagtgcccggagtacctggacgagaacaagaaacccgtctaccttgtcaccacattagataacacaatggaggacctgcttacacttgagtatgtaaaggccgaaaaaaatgtacccgatctcaagtcgacatacaataacgtactgcagttgatcaaagttaacttcagttccctggacatacacctccataccgaagcgctgctgaatactatcaattacttgcacaacattttaccccagtccgaagaaaagtcagccccagtgagtactaccgagacagaggacaaaggggatgtgataaagaagctggccttaaagctgtcgacaaatgaggatatcatcacactgcagatcctcgccgaactctcgtgtttacagatttttatccaggatcagaaatgcaatatctcggaaatcaagatagagggcttagattcggagatgatcatgaggcctagcgagaccgagatcaacgcgaagctgaggaacattattgttctggatagcgacattacggccatctataaaaaagcagtgtacatcaccgggaaggaggtctttagctttaaaatggtttcttatatggacgcaaccgctgggagcgcatacaccgacatgaacgtcgtggacatccaagtcaacctgattgtggggtgcattgaggtagttttcgtgaccaagttcctctattccatcctggcctttattgataacttccaagctgcaaagcaagccctcgcagaagccaccgttcaggctgctggtatggctgctaccggagtaaaagaactggcacagaggtcctctaggatggccctggatatcaacataaaggcaccagtcgtcgtaatcccacaatctccggtgtcagagaacgtgttcgtggccgattttggcttaataactatgacgaatacctttcatatgatcacggagtctcagtcaagcccacctccagtgattgatctcatcacaataaagctttctgagatgcgtctttatcgaagccgcttcattaacgacgcgtaccaggaggtcttagacctgctcctgcccctgaaccttgaggtggtggtggagcgaaacctgtgctgggaatggtaccaagaggtgccttgcttcaatgttaatgcgcaactcaaacccatggaatttatcctgtctcaagaggatatcactaccatattcaagacactgcatggaaacatttggtatgagaaggatggaagcgccagccccgctgtgactaaggaccagtacagcgccacttccggcgtaaccacgaatgctagtcatcacagcggtggtgccacagtagtgaccgcagccgtggttgaggttcattctagggcactgcttgttaagactacactgaatatttcctttaagaccgacgacctcacaatggtgctttactctccagggcctaaacaggcctcctttaccgatgtgagagacccctctctgaagttagctgaatttaaactggaaaacatcatcagcacattgaaaatgtacacagacggctccacattttcctcttttagcctcaagaattgcatcctggatgataagaggccacacgttaaaaaagccacccccagaatgatcgggctgaccgtgggttttgacaaaaaagatatgatggacatcaaataccgcaaagttcgagatgggtgcgtcaccgatgcagtctttcaggaaatgtatatttgcgcgagcgtggagtttcttcagaccgtcgcgaacgtgttcctggaggcttatacaacaggaactgcagtggaaacaagcgtgcagacctggacagcaaaagaggaggttcctactcaagagtccgtgaaatgggaaatcaatgtaattattaagaaccccgagatcgtttttgtcgccgatatgactaagaatgacgctcccgctctggtgattactacacagtgcgagatctgctacaaggggaaccttgaaaacagcacaatgactgccgcaattaaggacctgcaggtgcgtgcctgtccattcctgccagtaaagaggaagggcaagataactactgttttgcagccttgtgacctgttttatcagacaacccagaaggggaccgatccgcaggtgattgatatgagtgtgaagtcactgacactgaaggtctcaccagtcatcattaacacaatgataaccataacctcagccctttacacaacaaaagaaacaatccctgaggagacagcgagctcaaccgcccacctctgggagaagaaagacacgaaaaccctgaagatgtggttcctcgaggagagcaacgaaacagagaaaatagccccaactaccgagctcgtaccgaaaggagagatgatcaagatgaacattgattccatcttcatcgttctggaagccggaattggtcatcggaccgtgccgatgttactcgcgaagagcaggttttcaggtgaaggcaagaactggagctcgctcatcaatctccactgtcagctggaactggaagtccactattataacgagatgtttggtgtgtgggagcctctcctggaacctcttgaaatagatcaaaccgaggattttaggccctggaatctaggtattaaaatgaagaaaaaagctaagatggccatcgtagaaagcgacccagaagaggagaactataaggtgcctgaatacaagaccgtaatttccttccattcaaaggaccaactgaatatcacactcagtaagtgtgggctggtaatgctgaataatcttgttaaggcgttcaccgaggccgctactgggagctccgcagatttcgttaaggacctcgcaccttttatgattcttaactctttgggactcaccatctctgtcagtccctcggattcattctcggtgctcaacatcccaatggccaagtcttatgtattaaaaaacggcgagagcctgagtatggactatataagaactaaagacaacgaccacttcaacgcgatgacctcactcagttcaaaactttttttcatactcctcactcccgttaatcactcaactgctgataaaatccccctgacgaaggttgggagacgcctctacacagtccggcaccgcgaatcaggtgtggaacggagcatcgtgtgtcagattgatacagtggagggcagtaagaaggtgaccatccgctccccggtgcagataagaaaccacttttcagtgcccctttcagtgtacgagggggacacactacttggcacagcctctccagagaacgagtttaacatcccgttagggtcctaccgctcatttattttccttaaacctgaagatgaaaactatcagatgtgcgaaggaatcgacttcgaggagatcatcaagaatgacggcgcactgttgaagaagaaatgtcgctctaagaacccctctaaggaaagcttcttgatcaatattgtgccagagaaggacaacctgaccagcctgtcagtatattcagaagacgggtgggacttaccatacattatgcatctgtggcccccaatcttgctacgcaacctactcccctacaagatcgcatactatatcgagggaattgagaatagtgtttttaccttatcagagggacactccgcccagatatgtacggcacagttgggaaaggccagactgcacctcaagcttctggattatctgaaccatgactggaaatcagaatatcacattaagcccaatcagcaagatattagcttcgtgagttttacatgcgtgacagagatggagaagaccgacctcgatattgccgtgcacatgacatacaataccggccaaaccgtagtggcattccattccccatattggatggtgaataaaaccggcaggatgctgcagtataaggccgacggcattcaccgcaaacacccaccaaactacaaaaaaccagttctgtttagttttcaaccaaatcatttctttaataataacaaggtacagctaatggtcacagattcagaactttccaatcagttcagcatcgacaccgtggggtcacacggggcagtcaagtgcaaaggattgaaaatggactaccaagtgggtgtgacaattgacctcagctcattcaacatcacgcgcatcgttacttttactccattctacatgatcaagaataagtccaagtatcatatctccgtcgccgaggagggtaacgataagtggctgagtctagacctggaacaatgtatccccttttggcctgagtatgcctcaagtaagctactaattcaggttgaaaggtctgaggatccccctaaacggatttattttaacaaacaagagaactgtattttgctccgcctggataatgagctaggaggcataattgctgaggtgaacttggcagagcactctacggtgattactttcctggattatcatgatggagcagccacgttcttactgatcaaccacacaaagaacgaactcgtacaatacaaccaatcatctctgtctgagatcgaagattcactcccccctggtaaggcggtgttctacacatgggccgaccccgttggctctagaaggctgaagtggaggtgtagaaagagccacggcgaagtgactcagaaagatgacatgatgatgcccattgatctcggcgagaagactatctatctggtttctttttttgaagggctccagaggattatcctgtttacagaagatcctagagtgttcaaggttacttacgaaagcgagaaggctgagttggctgagcaagaaattgctgtagccctccaagatgtcgggatttccctcgtgaataattatactaaacaagaggttgcctacattgggatcacttcatccgatgttgtgtgggaaacaaaacccaaaaagaaggcaaggtggaagcctatgagcgtcaagcacacggagaagttggagagggagttcaaggaatacacagaatccagcccatcagaagacaaggtgatacagctggataccaacgtgccggtgaggctgacgcctactgggcacaacatgaaaatactccagccacacgtgatagcactgaggcggaactacctcccagccctcaaagtcgagtacaatacctcagcacatcagtccagctttcggatccagatctatcggattcagattcaaaaccaaattcatggagccgttttccccttcgtgttttacccagtgaagcctcctaagagcgtgacaatggactcggcaccaaaaccatttaccgacgtatctatagtgatgcggagtgccggacatagccaaataagccgcatcaagtactttaaggtgctcatacaggagatggatctgaggctggaccttggattcatctacgcccttacagatttgatgacagaagcagaagtgactgaaaacacagaggtagagctgtttcataaggacattgaagcttttaaggaggagtacaagactgcgtccttggtggaccagagccaggtgtctctctacgagtatttccacatcagtcccattaagttgcacctatccgtgtctcttagcagtggcagagaagaggctaaggactccaaacagaacggtggactcattccagttcatagcttaaatttgcttctgaagtcaatcggagctaccctcaccgatgttcaggatgtcgtcttcaaactggcattctttgaattgaattatcagttccacaccacgtccgatctccaatctgaagtgattcggcactatagtaagcaggcaattaagcagatgtatgtcctcattttgggtctggatgtactggggaatccttttgggctgatcagggaattctccgagggggttgaggcattcttttacgagccataccagggggctatccagggtccagaagaattcgtggagggcatggcactgggcttgaaggctcttgttggaggcgcagtcgggggactggcaggcgcagctagtaagattaccggggctatggccaagggagttgctgcgatgaccatggatgaagactatcagcagaagcgcagagaagccatgaataagcagcctgccggatttagggaggggatcacgcgaggtgggaagggcctggtatctggcttcgtctctggaatcaccggcattgtcacgaagccaataaagggtgcccagaagggaggagccgcaggttttttcaagggtgtgggcaaaggtctggttggggctgttgctagacctacaggcggaatcattgacatggcctcctcaacatttcaggggatcaagagggccaccgagacctcagaggtcgagagcctccgcccacctagattcttcaacgaggatggagttattagaccatacaggctcagagacggaactggaaaccaaatgctgcaggccagcaaatccttgatata

SEQ ID NO: 31372 - DNA, 9407 bp, synthetic construct
  misc_feature 1..9407: note = Description of Artificial Sequence: Synthetic coding sequence
  source 1..9407: mol_type = other DNA
atggtattcgagtccgtggtggtggatgtcctaaataggttcctgggtgactacgtcgttgacttagacacatcacagctttccctggggatttggaagggggcagtcgccctgaagaatctgcagattaaagagaacgccctgagtcagctcgatgtcccatttaaggtgaaggtggggcacattggaaacctcaaactgataataccatggaagaatctttacacccaacccgttgaggctgttcttgaagaaatatacctgctgatagtgccgtcgtcgaggatcaagtacgatccactgaaagaagagaagcagctgatggaagccaagcagcaggaactgaagcgaatcgaggaggccaaacaaaaggtggtggaccaggagcaacatcttccggaaaagcaagatacttttgccgaaaaactggtgacccagatcatcaagaatctccaggtcaaaatctcaagtatccacatcagatatgaggacgatattacaaaccgcgataaacctctttccttcggaatcagcttacaaaacctttcaatgcagacgacagatcagtactgggtgccatgtctgcacgacgaaacagaaaagttggtccggaagctgatccggctggataacttgtttgcatactggaacgtcaagtctcaaatgttctacctgtccgactatgacaactcactcgacgacctgaagaatgggatcgtaaatgagaacatagtcccagagggatatgactttgtgtttaggccaatatccgctaatgccaagttggttatgaatcggcgtagtgacttcgatttctcggccccaaagattaaccttgagatcgaactgcataacatcgccattgaattcaataagccccagtacttttctatcatggaattgctggaatccgtagatatgatggctcagaatcttccatatagaaagtttaaaccagacgtgccactgcaccatcatgcaagagagtggtgggcctatgctattcacggcgtgctggaagtgaatgtgtgcccgagactgtggatgtggagttggaaacacattagaaagcacaggcaaaaagtaaagcagtataaagagctttacaagaaaaaattaacctccaaaaaacctcctggcgagttactggtttccctggaggagttagagaaaacattggatgtcttcaatatcaccattgccaggcagacagccgaagtcgaggttaaaaaagccggatacaagatatacaaggagggagttaaggaccccgaggacaataagggatggttttcatggctgtggtcttggagcgaacaaaacaccaatgaacagcagccagatgttcagcccgagaccctggaggagatgctaacgccggaggaaaaagccttattgtatgaggccatcggttatagcgaaacggcggttgacccaacactgctgaagacattcgaggctctgaaattttttgttcacttgaagagcatgagcatcgtgttgcgggagaaccatcagaaacccgaactggtcgacatcgtgattgaagagttcagcaccttgatcgttcaaaggcctggggcacaggccattaagtttgaaactaagatcgatagcttccacataacaggcctgccggataactctgaaaagccccgacttttgagctcactggatgacgcgatgtcgcttttccagataaccttcgagattaaccctctggatgagaccgtgtcccagcgctgcattatcgaggccgagccattggagataatttacgatgcacgtaccgtaaacagcattgttgaattcttcagaccacccaaggaggtccacttggcgcagcttacagcggcaacactgacgaaacttgaagagttcaggagcaagaccgcaactggccttctgtatatcatagagacacagaaggtgctggacctgaagatcaatctcaaagcatcttacattatcgtgccacaggatggcattttttcccctacaagcaatctactgctgctcgatctgggccacttaaaagtcacaagcaagagtcgcagcgagctccccgatgtgaagcagggcgaggctaatttgaaggaaattatggatagagcctacgattcattcgacatccagctaacgtccgtgcagctgctttactcccgggtcggggacaattggagggaggcacggaaacttagcgtgtcaacccagcatatactcgttcctatgcattttaacctcgagctgagtaaagctatggtgtttatggatgtccggatgcccaagtttaaaatctacggtaaactaccacttatctctcttaggatctccgacaaaaaacttcagggtattatggaattgatagagagtattccgaaacctgaacctgttactgaagttagtgccccagtgaagagttttcagatccaaactagcacgtctttggggacctctcagatcagccagaagatcataccactgttggaactgccctcggtttctgaagatgacagcgaggaggagttctttgatgctccctgctcccccttggaggaacccctgcagttcccaacaggtgtcaaatcaattaggacccgaaagctgcaaaaacaagactgctctgttaacatgaccacttttaaaatccggttcgaggtgcctaaggtcctcatcgaattttatcacctcgttggcgactgcgaactctcagtggttgaaatcctcgtcctggggctgggggctgagattgaaatacgcacctatgacctcaaggccaatgccttcttgaaggagttttgcctgaagtgtcccgaatatcttgatgaaaataaaaaacccgtatacctcgtgacaacattagataacaccatggaagacctgctgactctggagtatgtgaaggccgaaaaaaatgtacccgacttgaaaagcacttacaataatgtgctgcagttgatcaaagtaaacttttcatctttggacatccaccttcatacagaagcactgctgaacacgataaactacctacataacatccttccccagtctgaagagaagtcggcccctgtaagcaccaccgagaccgaagacaaaggcgatgtgattaaaaagctcggcctagatagcgaaatgattatgagaccttcagaaactgagataaacgccaaattacgcaatattatcgtacttgattccgatatcaccgctatctataaaaaagcagtctacatcactgggaaggaggtgttttcatttaagatggttagctacatggatgctacagctgggtcagcatatacggacatgaacgtagtggacatccaggtcaatctcattgtaggctgcatcgaggtggtcttcgtaacaaaattcctatattcaatactggcgtttattgataatttccaggccgctaagcaggcattagcagaggcaacggtgcaagccgctggcatggccgctaccggggtcaaggaacttgctcagagatcttcccgtatggcccttgacatcaacattaaggcaccagttgtggtgatcccccagagccccgtgtcagaaaacgtattcgtggccgatttcggccttattaccatgaccaatacattccacatgataacagaaagtcagtctagcccccctcctgtgatcgatttgatcacaatcaagctttcagaaatgagactctatcgatccagattcattaacgatgcatatcaagaagtactcgacctgctactccccctaaacctggaagtggttgtcgagcgcaacctgtgctgggagtggtatcaggaagttccttgtttcaatgtgaatgcccagcttaagccgatggaattcattctgtcacaggaagacatcaccaccatatttaagactctccatggaaatatatggtacgaaaaagatggtagcgcatccccagccgtgactaaggaccagtacagcgcgaccagcggcgtaaccaccaacgcgtctcaccactccggaggagctactgtggttaccgcagctgtagtggaggttcactctagggccttattagttaagactacccttaacatcagcttcaaaacggatgacttaaccatggttctgtactccccaggcccaaagcaggcgtcctttacagatgttcgtgatccatctctgaagctggccgaatttaaattggaaaacattatctcaacattgaaaatgtacacggatggatccactttctccagtttttctttaaagaattgcattctggacgacaagcgacctcatgtgaaaaaagccaccccaaggatgataggattgaccgttggctttgataagaaggatatgatggatattaagtatagaaaagtgcgcgacggttgtgtcacggacgcggtattccaggagatgtatatctgcgcttctgtagagttccttcagacagtggccaatgtctttctggaagcctataccacaggaacagcagtcgaaacttccgtccaaacctggacagccaaggaagaagtgccaacccaggagagcgttaagtgggagattaatgtgatcattaagaaccctgagatagtgttcgtggcagatatgaccaaaaacgacgcaccggctttggtgatcacaactcaatgcgaaatatgttataaagggaatttagagaatagtactatgaccgccgctataaaggacctgcaggtgagggcgtgtccctttcttcccgtcaagcggaaaggcaagatcacgaccgttctgcagccatgtgacctgttctatcagaccacgcagaagggaactgatccgcaagtgatcgacatgagcgtcaaaagcctaacactcaaagttagcccagtaattattaacacgatgatcacaattacctcggccttgtacacaaccaaggaaacaatcccagaggaaaccgcaagcagcactgcccacttgtgggagaagaaagacacgaaaaccctgaaaatgtggtttcttgaggaaagtaatgagacagagaaaattgcgccaaccacagaactggttcccaagggcgaaatgatcaaaatgaatatagactccatcttcattgttctggaggccggtattggtcataggaccgtccccatgttgctggccaagagccggttcagcggggagggaaagaactggagtagcctgatcaacctgcattgtcagttagagctggaggtgcactactacaacgaaatgttcggagtctgggaaccgctgctggagccacttgaaatcgatcagactgaggattttagaccttggaacctaggcattaaaatgaaaaaaaaggccaaaatggccatcgtggaaagtgacccagaggaagagaactataaagttcccgagtacaaaacagtcattagtttccactctaaggaccaactcaatatcactctctctaaatgcggactagtgatgctgaataatttggttaaagccttcacagaagccgctaccggctcctctgcagatttcgtgaaggatctagcccctttcatgatcctgaatagtctcgggctaaccatcagcgtgtcgccatcagattcattttcggtcttgaacatccccatggctaagtcatatgtcctgaaaaatggggaaagtctgtccatggactatattaggaccaaggataacgatcactttaacgcgatgacctccctttcgagcaaattattcttcatactccttacccctgttaatcattcaaccgctgataaaatccctttgacaaaggtgggtaggagattatataccgtcaggcatagagaatctggcgtcgagagaagcattgtgtgtcagatagacactgtggagggttcaaaaaaagtgacgattcggagtccagttcagataagaaatcacttctcagtgcctttaagcgtatacgagggggataccctgctgggaacggccagccccgaaaatgaattcaacattccactcggctcgtatcgtagttttatcttcctgaaacctgaggatgaaaattaccagatgtgcgagggtatagactttgaggagattataaagaacgatggggcactgttgaagaaaaaatgccgcagtaaaaatccttctaaagagtcctttctcatcaatatagtcccagaaaaggacaacttgacaagcctatcagtgtactccgaggacggatgggatttaccatatatcatgcatctgtggccaccaatcttgctccgaaacctcctgccctataagatcgcttactacatcgaagggatcgagaattccgtatttactctttctgagggacatagcgcacaaatttgcactgcccagctggggaaggctcgccttcacctgaagcttctggactatctgaatcacgattggaagtctgagtaccacattaagcctaatcagcaggatatcagcttcgttagcttcacctgtgtgacagaaatggagaagaccgacctagatattgcagtgcatatgacctataacaccggccaaaccgtagtggcgtttcatagtccctattggatggttaataaaacaggcaggatgctgcagtacaaggccgacggtattcataggaaacacccccctaattataaaaagcccgtgctcttctccttccaaccgaatcatttttttaacaataacaaagtccagcttatggtgacagactcggagctgtccaatcagttttctatcgatacagtcggcagccatggggctgtgaagtgcaagggcctcaaaatggactaccaggtgggggtgacaatcgatctgagctcgtttaacattacaagaatagtcacattcaccccattttatatgatcaagaataagagtaagtatcatataagtgtggcggaggaggggaacgataagtggttgagtctggatctggagcagtgcatccccttctggcctgagtacgcttccagcaagctgctgatacaggttgaacgctctgaggatccaccaaaacgcatttacttcaacaagcaggagaattgcatcttactgaggctagacaatgagctgggcggtatcatagctgaagttaacctggcagagcattctaccgtgattacatttctggactaccacgacggtgctgccacctttcttctgatcaatcatacaaaaaatgagttggttcagtacaatcagagcagcttatcagaaatcgaagacagcctgcccccaggaaaggccgtcttctatacctgggccgacccagtgggcagtagacggctaaagtggaggtgtcgtaagtcccacggcgaagttacgcagaaggatgacatgatgatgcctattgaccttggcgagaagactatttacctggtcagttttttcgagggattacagcggatcatactgtttacagaggatccgagagtttttaaggtgacttatgaaagcgaaaaggctgagctggctgagcaggaaattgctgtcgctctgcaagacgtcggaatctctctggtgaataattatactaagcaggaggtagcctacatcggtatcacgtcttccgatgtcgtctgggaaaccaaacctaaaaaaaaagcccgatggaaaccgatgtccgttaaacacactgagaagctggagcgcgaattcaaagagtacacagagtcatcccctagtgaggataaggtgattcaactcgacaccaatgtccccgtgagactaacgcccaccgggcacaacatgaaaattctgcagccccacgtgattgcactgcgaagaaactatttacccgcactaaaggtagagtacaacacgagcgcacaccaatcgagttttagaatccagatctataggattcagattcagaaccagatccacggcgctgtctttcccttcgtcttttaccccgtgaagcccccaaaatccgtgaccatggactctgcccctaaaccatttaccgacgtcagtatcgtgatgcgatcggctggacactcacagatttctcgcatcaaatattttaaggtcttgatccaggaaatggacttgagactggatctcggattcatctatgccttaactgatctgatgactgaagcagaggtcacagaaaacactgaagtggaactttttcacaaagatattgaagctttcaaagaagagtacaaaactgcttctcttgtcgatcagagccaagtgtctctttacgagtactttcacatttccccaattaaactgcacctgagcgtgtccttgtcgtctggacgcgaggaggccaaagactctaaacagaatgggggattaatccccgtccacagtcttaacctgcttcttaaatccattggagctaccttgacagacgtgcaggatgtggtctttaaactggccttcttcgaactgaattatcagtttcacaccacaagcgatctgcaaagtgaggtaatccggcattatagtaaacaggcaattaaacaaatgtacgtcctgatcctgggcctagacgtcttaggcaacccattcgggctgattagagagtttagcgaaggggtggaggcttttttttatgagccgtatcagggggctatccagggcccagaagaattcgtggagggtatggcgctgggcctcaaggcactcgtgggaggcgctgtaggcggacttgcaggggctgccagtaaaatcacaggcgcaatggccaagggcgtggccgctatgacaatggacgaggattaccaacaaaagcgaagagaggccatgaataagcaacccgcaggcttcagagagggcattaccaggggaggtaagggactcgtgagcggttttgtctcaggaatcacaggtatcgttactaaaccgataaagggggcacagaaagggggagctgctggctttttcaagggcgtgggaaaagggttggtcggggctgtcgcaagaccgacgggcggtataatagacatggccagcagcaccttccaggggatcaagagagccaccgagaccagcgaagtcgagtccttacgcccacctaggttctttaacgaggacggcgttatacgaccgtacaggctccgcgatggtaccggcaatcaaatgcttcaggtgatggagaacgggaggtttgccaagtataaatacttcacacacgttatgatcaataagactgatatgctcatgatcacgaggaggggcgtgctttttgttaccaaaggaacattcggccagttaacgtgtgaatggcagtactctttcgacgagttcacaaaagagccttttatcgttcacggcagaagactgagaatagaagccaaagagagagttaagtcagtctttcacgccagagagttcgggaaaattattaacttcaagacccccgaagatgccagatggattttgacaaagctgcaggaagcccgagagccatcgccctccctgta

SEQ ID NO: 31373 - DNA, 1317 bp, synthetic construct
  misc_feature 1..1317: note = Description of Artificial Sequence: Synthetic coding sequence
  source 1..1317: mol_type = other DNA
atgaacgaggtatcagttattaaagaaggctggttgcataaacgcggagaatatataaagacctggaggcctaggtacttcctattgaagtcagatggcagctttatcggttacaaagagcggcctgaggccccagaccaaaccctgccccctctcaacaacttttcagtggctgagtgccagctcatgaaaactgagcgacccagacctaatacattcgtgattcggtgcctgcaatggactacagtgatcgaacgcacttttcacgtggactcccctgacgagcgggaggaatggatgcgggcaatccagatggtcgctaactctctaaaacagagggcccctggagaggaccccatggattacaagtgcggcagtccttctgactccagcactactgaagaaatggaggttgcagtttccaaagcccgtgctaaggtgactatgaatgatttcgattatctgaaattgctcggcaaaggcacgttcggcaaggtaatcctcgtgcgcgagaaggccaccggacgctactatgcgatgaagattctgagaaaagaggtcattattgcgaaggatgaggtggcccacaccgtcaccgagtctagagtcctgcagaacacgcgacaccccttcctcacggcactgaagtatgccttccaaacacacgacagattatgtttcgttatggaatacgctaatggtggggagctcttttttcatcttagtagagagcgcgtgttcacagaggaaagagcgaggttttacggggctgaaatagtgagtgctttagagtatttacactcgagggatgtggtctacagggatataaaggttctagaagataatgactacggcagggccgttgactggtggggcttgggagtcgtgatgtacgagatgatgtgcggacggctacctttctataaccaagaccatgagcgcctgttcgagcttatcctgatggaagagatacgttttcctcgcacgctatcccctgaggctaaaagtctgctcgcaggactcctgaagaaggatcccaaacagcggctgggaggagggccatccgacgcgaaggaggtaatggagcacagattttttttgagcataaactggcaggatgtggtccaaaagaaactgctgccacctttcaagccgcaagttacatcagaggtggatactagatacttcgacgacgaattcactgcgcagagcattaccatcactccccctgatcgctatgactcactgggtttgctggaattagatcagaggacacatttcccccaattctcgtattccgcaagcatccgcgaatag

SEQ ID NO: 31374 - DNA, 444 bp, synthetic construct
  misc_feature 1..444: note = Description of Artificial Sequence: Synthetic coding sequence
  source 1..444: mol_type = other DNA
atgcgttgcctatcctccaaaaaagccggatctacttctgttgttaagtatattaagacgtggcgaccgagatactttttactgaagtcagatgggtcgttcatcggatacaaagagcggcctgaggcgcctgaccagactctgccacctctcaacaacttctccgtggctgagtgccagcttatgaagactgaaagaccaagaccgaatacctttgtgattaggtgtttacagtggaccaccgtgatagaacgaaccttccatgtggactcgcccgacgagagagaggaatggatgagggctatacagatggtggcaaactccttacagccccatttgtgtgcccaaacaagaatctggaaaaccccgcctcccgctcaagcttgggctgttggacgcctggagatacaggtgcttatccacaccagtccatcagagggctag

SEQ ID NO: 31375 - DNA, 1149 bp, synthetic construct
  misc_feature 1..1149: note = Description of Artificial Sequence: Synthetic coding sequence
  source 1..1149: mol_type = other DNA
atgagggcgatccagatggtggccaacagcctaaagcagagggctcccggtgaggatccaatggattataaatgcggatcaccttcggactccagcacaacggaggaaatggaagtggccgtgtcaaaggccagagcaaaggtgaccatgaacgactttgactacctgaagctgctgggtaaaggaacatttggcaaagtgatactcgtgcgcgagaaggcgacagggcgatactatgctatgaaaattctgagaaaggaggttatcattgccaaggatgaggtggcgcacacagtgacagagagtcgtgtcctgcaaaatacacgccaccctttcctgacagccctgaagtacgcattccaaacgcacgatcgcctgtgtttcgtcatggaatacgccaacgggggagaactgttcttccacctgagccgcgagcgggtctttaccgaggagagagctagattttatggggctgagatcgtttctgccctagagtacttgcacagccgcgatgtcgtgtaccgtgatattaagctcgagaaccttatgctcgataaagacggtcatattaagataaccgactttggtctctgcaaggagggcatttcagacggcgcaacgatgaagaccttctgcggtacccccgaatacttggcccctgaagtgttagaggataatgactacgggagagccgtggattggtgggggctgggagtcgtcatgtacgagatgatgtgcgggaggctgccattctacaatcaagatcacgagcggctcttcgagctgatcctgatggaggagatcagattcccaaggactctgagtcctgaggccaaatctctcctggccggactgctgaagaaggatcccaaacagaggctggggggaggtccttccgacgctaaggaggtgatggaacacaggttctttctcagtatcaattggcaggatgtagtacagaaaaaactgctgccaccattcaaacctcaggttacctcagaggtggacaccagatactttgatgacgagttcaccgctcagtcaattacgataacccctcccgaccgttatgacagtctgggcctgctcgagctggatcagaggacacattttccacagttctcctatagtgcttccatcagggagtag

SEQ ID NO: 31376 - DNA, 402 bp, synthetic construct
  misc_feature 1..402: note = Description of Artificial Sequence: Synthetic coding sequence
  source 1..402: mol_type = other DNA
atgaatgaagtgagcgtgattaaggagggctggttgcacaaaagaggcgagtacattaaaacgtggcggcctcgctacttcctgctgaagtcagacggctctttcatcgggtacaaggaacgccctgaggccccagatcaaacgctgcccccactgaataacttttctgtagcagaatgccagctgatgaaaactgaacgtcccagaccaaacacattcgttatccgttgcctgcagtggactaccgttatagaacgcacgttccatgtggattcaccagacgagcgggaagagtggatgcgggcaattcagatggtagcaaattccttaaaacaaagagcacctggagaagatccaatggactataagtgtggctcaccgtcggactcgagcactacctag

SEQ ID NO: 31377 - DNA, 1446 bp, synthetic construct
  misc_feature 1..1446: note = Description of Artificial Sequence: Synthetic coding sequence
  source 1..1446: mol_type = other DNA
atgaacgaggtttccgtgatcaaagagggatggttgcataagaggggggagtacattaagacctggagacctcggtactttctcctgaagtccgacgggtcttttattggatacaaggaaaggccagaagctccagatcagactctacctccgctgaataacttttccgttgctgagtgtcaactgatgaagacagaacgtcccaggccaaacacctttgtaattcgatgcctccaatggaccactgtcatcgagcgcaccttccacgttgatagtcccgatgagcgggaggagtggatgcgggcaatccaaatggtggctaactccttgaaacagagagccccaggcgaggacccaatggactacaagtgtggtagcccttccgacagcagcactacggaggagatggaagtggctgtttccaaggcccgagcaaaagttacaatgaacgatttcgactatctgaaacttctgggaaagggcaccttcggcaaagtgatcttagttcgcgaaaaagctacggggaggtattacgctatgaaaatattgcgaaaggaagtcatcattgcaaaagatgaggtggcacataccgtgacagagtcgagggtgctgcagaataccagacacccatttctgaccgcattgaaatatgcctttcagacccacgatcgcttgtgctttgtgatggaatatgccaatggaggcgagttgttttttcatttgtctcgtgagcgggtttttaccgaagaacgcgctaggttctacggtgctgagatcgtctcagctcttgaatatcttcattccagagacgtcgtttacagggatatcaagctggaaaacttgatgctcgacaaggacggtcatatcaagatcactgactttgggttgtgcaaggaagggatcagtgacggcgctactatgaagacattttgtggaactcccgagtacctggctcctgaagttcttgaagataatgactatggcagagcagtggattggtggggccttggcgttgttatgtacgagatgatgtgcggcagactgcccttttataatcaggaccacgagagactttttgaactgattctcatggaggagatcagatttccacgaacactcagtccagaagccaagtccctgttagctggcctgctgaagaaagaccccaagcagcgtttgggcggagggccaagcgacgcgaaagaagtgatggagcaccgcttcttcttgtcaattaattggcaggacgtggttcagaaaaagttgctaccaccatttaaaccacaggtgacatctgaagtggacaccagatattttgatgatgagtttaccgctcaatcaatcaccatcactccccctgatagatatgattccctggggctgctggagctggatcagagaacccactttccccagttttcatattccgcttctatccgggagtag

SEQ ID NO: 31378 - DNA, 402 bp, synthetic construct
  misc_feature 1..402: note = Description of Artificial Sequence: Synthetic coding sequence
  source 1..402: mol_type = other DNA
atgaacgaagtgtctgttatcaaggaagggtggctgcacaagcgtggagagtatataaagacctggcgcccaagatatttcctgctcaagtcagacgggagtttcatcggctacaaggagcgaccagaagcccctgaccagaccctgcctccacttaataacttttccgtcgcagaatgccagttaatgaagacggagagacctaggccaaacaccttcgtgattagatgcttgcaatggactacagtgattgagcgcacgtttcacgtggactcaccagacgagcgcgaggagtggatgagagctatccagatggtcgccaactctctgaagcaaagagcccctggcgaggaccccatggattataagtgcgggagtcccagtgattcttctaccacttag

SEQ ID NO: 31379 - DNA, 291 bp, synthetic construct
  misc_feature 1..291: note = Description of Artificial Sequence: Synthetic coding sequence
  source 1..291: mol_type = other DNA
atgaatgaagtttccgtcattaaagaaggatggttacacaaaaggggagagtacatcaagacttggcgcccacgctattttctcctgaaaagcgacgggtcttttattgggtataaagagcggccagaagcaccggaccagacgctaccgcctcttaacaatttctcagtggccgaatgtcagctgatgaagaccgagcggccacgccctaataccttcgtgataagatgcctgcagtggaccaccgtcattgagagaacttttcatgttgattctcctgatgagcgatag

SEQ ID NO: 31380 - DNA, 360 bp, synthetic construct
  misc_feature 1..360: note = Description of Artificial Sequence: Synthetic coding sequence
  source 1..360: mol_type = other DNA
atgaatgaagtgagtgtgataaaagagggttggctgcataaacggggagagtatataaaaacttggaggccgcgatattttctcctcaagagtgacgggagctttataggctacaaagagagacccgaagccccagaccagactctgcctccgttaaataactttagcgttgccgaatgccagctcatgaaaactgagcggccaaggcccaatacattcgtgattaggtgcctgcagtggaccactgttattgagcgcaccttccacgtggacagccctgacgagagagaggagtggatgcgtgccattcagatggttgctaacagcctcaagcaacgcgctcctggcgaggacccttag

SEQ ID NO: 31381 - DNA, 1446 bp, synthetic construct
  misc_feature 1..1446: note = Description of Artificial Sequence: Synthetic coding sequence
  source 1..1446: mol_type = other DNA
atgaatgaagtgtcagttatcaaagaaggctggctgcacaagcgaggcgagtatatcaagacgtggagaccacgctatttcctgctcaagtccgatggctcattcattgggtataaagagcggccagaggcccctgatcagacactgccacccctgaacaacttcagcgtcgctgagtgtcagctcatgaaaactgagaggcccaggcctaacacgtttgtgatcaggtgcctccaatggaccaccgtcattgaaaggacctttcatgtggatagtccagacgaacgagaagagtggatgcgcgctatacagatggtggctaactccctgaaacagcgtgcgccaggtgaagaccccatggattataagtgcggtagtccatcagatagctcgacaactgaggagatggaggtggcagtgtccaaggcaagagcgaaggtaacaatgaacgacttcgattaccttaagttgttgggaaagggtacgtttggtaaggtgattctggtgcgggaaaaggcaactgggagatactacgcaatgaagattcttcgtaaagaggtgatcatagccaaagacgaggttgcccatactgtcacagagtctagggtgctccagaatacccggcatcccttcctcactgcactcaagtatgcctttcagacgcatgacaggctgtgttttgtgatggagtacgctaacggaggagagctcttctttcacctgtctcgagagcgagtttttaccgaggaaagggccagattttacggtgcagagatcgtctctgcgttggaatacctgcactcccgggatgttgtctatcgcgatatcaagttggagaatttgatgttagataaagatggacatatcaaaattacagatttcgggctttgcaaggaagggatctccgacggtgctaccatgaagacattttgtggcaccccggaatacctcgcccctgaggtccttgaggataatgactatggaagggccgtcgactggtggggccttggtgtcgtcatgtacgagatgatgtgcggaagactacctttctacaaccaggatcacgaaaggctgttcgagctcattctgatggaagaaatccgctttccacggacgctcagccccgaagcaaagagtttgctggcaggactcctgaaaaaagatccaaaacagaggctggggggagggccatcagatgctaaggaggtgatggaacataggttctttctctcgattaattggcaggatgttgtgcagaaaaagctactgccccctttcaagccacaggtgacgtcagaagttgacaccaggtattttgatgacgagttcacggcccaatccattaccattacacctccagacaggtacgatagtctgggtttactggaactcgatcagaggacgcactttccccagttttcctattctgcctccatccgagagtag

SEQ ID NO: 31382 - DNA, 204 bp, synthetic construct
  misc_feature 1..204: note = Description of Artificial Sequence: Synthetic coding sequence
  source 1..204: mol_type = other DNA
atgaacgaggtaagcgtgattaaagaagggtggctgcacaaaaggggagagtacataaaaacctggcggcctcgctatttcctgctgaaatcagacggcagtttcatcggctataaagagaggcccgaggcccctgaccagaccttgccaccactgaacaactttagcgtggcagagtgccagctgatgaaaaccgaaagatag

SEQ ID NO: 31383 - DNA, 144 bp, synthetic construct
  misc_feature 1..144: note = Description of Artificial Sequence: Synthetic coding sequence
  source 1..144: mol_type = other DNA
atgaatgaggtctccgttatcaaggagggctggctccacaagcgcggagaatacatcaaaacatggcgcccacgttattttctcctgaaatctgatggaagtttcatcggatataaagagcgacccgaggccccagatcagtag

SEQ ID NO: 31384 - DNA, 405 bp, synthetic construct
  misc_feature 1..405: note = Description of Artificial Sequence: Synthetic coding sequence
  source 1..405: mol_type = other DNA
atgaacgaagtcagcgtgatcaaggagggttggctgcataagcgaggggaatacatcaagacctggaggcctagatattttctgttaaagtcagacggcagctttatagggtataaagagcgaccagaggctcctgaccagacgctgccaccgctaaataacttttcagtggctgagtgccagctgatgaaaaccgaacgcccacgtcccaacactttcgttatccgatgcttgcagtggaccaccgtgattgagaggacatttcatgtggattccccagacgagcgcgaagaatggatgagagcgattcagatggtggcgaactcccttaagcaaagagcccctggagaggatcccatggattacaagtgcgggtcaccctccgactcctctacaacagaatag

SEQ ID NO: 31385 - DNA, 324 bp, synthetic construct
  misc_feature 1..324: note = Description of Artificial Sequence: Synthetic coding sequence
  source 1..324: mol_type = other DNA
atgaatgaggtctctgtgatcaaggagggctggctgcacaagcgaggcgagtacataaagacgtggagaccacgttactttctgttaaagagcgatggctcattcattggatacaaagagagacctgaagctcctgaccagacgttgcctcctcttaataacttctcagtggccgaatgtcagctgatgaaaaccgagcgcccaaggcccaacacattcgtcattcgatgccttcagtggacaactgtcatcgaacggacatttcacgtggatagccccgatgaaagggaagagtggatgagggcaatccagatggtcgcctag

SEQ ID NO: 31386 - DNA, 867 bp, synthetic construct
  misc_feature 1..867: note = Description of Artificial Sequence: Synthetic coding sequence
  source 1..867: mol_type = other DNA
atgaatgaagtttctgtgatcaaagagggatggctgcataagcgcggtgagtatattaagacgtggcggccacgttatttcctcctgaagagcgatgggtccttcattggctacaaggagcgtcctgaagcccctgaccagacgcttccaccactgaataacttctctgtggccgagtgtcagttgatgaagacagagcgcccacggcctaatacatttgtgataagatgtctgcagtggaccacagttattgagagaacctttcacgtggacagcccagacgagagggaagaatggatgagagcaattcagatggtagctaattcactcaagcagcgggctcccggtgaggacccaatggactataagtgtggaagcccgagcgactctagcacaaccgaggaaatggaagtggctgtttccaaggctcgcgcaaaagtcaccatgaatgattttgactatctaaagcttctgggaaaaggtacctttggcaaggtgatacttgtgcgagaaaaagccacggggaggtactatgccatgaagatcctacgaaaggaggttatcatcgccaaggacgaagtagcccacactgtcacagagagccgggttctgcagaacacgcggcatccttttctgacagtgagttgcccacctttgccaaggcagtgcgaagcctccctgtggacagagcttagggagcgtgcacttatattctggtataaagcccagagttgggggaggcctggagggcaggggaaggtgctgcttagacctgcaaagtcctcagaaccaagacatgtggtgggagtgtcacggttgggcgaatgggaaggggactctttttttattgatgggggtttcatgtag

SEQ ID NO: 31387 - DNA, 1440 bp, synthetic construct
  misc_feature 1..1440: note = Description of Artificial Sequence: Synthetic coding sequence
  source 1..1440: mol_type = other DNA
atgagtgatgtcacaattgtgaaagaaggatgggtccaaaagcggggagagtatatcaaaaactggagaccccgatactttctcctgaaaacagacggatccttcattggatataaagagaaaccacaggatgtggaccttccatatccccttaacaacttcagtgtggcaaagtgtcagctcatgaagaccgagcgacccaaacccaacacattcattatcagatgtttacagtggacaacagtcatcgaacggacatttcatgtcgacacgccggaggaaagagaggaatggactgaagctatacaggccgtcgccgaccggctccagcggcaagaggaggagagaatgaactgtagccccacaagccagatcgacaacatcggtgaagaagaaatggacgcctccaccacacaccacaaaaggaagactatgaacgacttcgactatctgaaactgctcggcaaaggcacattcggtaaggttatccttgttcgagaaaaagccagcggcaaatactatgctatgaagatactcaaaaaagaagtgataatagcaaaggatgaggtggcccataccctcactgaaagcagagttctgaagaacactcggcatcctttcttgacaagtcttaagtactcattccaaacaaaggatcgactctgcttcgttatggaatacgtgaatgggggtgagctattctttcatcttagcagagaaagagtgtttagcgaagacaggacccggttctacggcgctgagattgtcagcgcgctggattatctccattcaggcaagattgtgtaccgcgatttgaagctggagaatttgatgttagacaaggacggacatatcaaaatcactgatttcggactgtgtaaggaaggcatcactgatgccgctactatgaaaactttttgtggaacccctgagtacttggcccctgaggttctggaagataacgattatggcagagcagtagactggtggggcctgggtgtggtcatgtacgagatgatgtgtgggaggctgccattctacaaccaggatcacgaaaagctttttgagttaatcttgatggaggatatcaaatttccacgaacacttagtagcgacgccaaatcgcttctgtctggactgctgattaaggatcccaataagcgcctcgggggaggcccagatgatgcaaaggaaatcatgcgccactccttcttctccggagtaaactggcaggatgtttatgacaaaaaactcgtgcccccatttaagccccaggtcacctctgagaccgataccaggtactttgatgaagagtttaccgctcagacaatcacaattactccacccgagaaatacgatgaggacggcatggattgtatggataatgagcgacggccacacttccctcagttctcctattctgcaagtggaagagagtag

SEQ ID NO: 31388 - DNA, 1398 bp, synthetic construct
  misc_feature 1..1398: note = Description of Artificial Sequence: Synthetic coding sequence
  source 1..1398: mol_type = other DNA
atgtccgacgtgaccatagtgaaagaagggtgggtgcagaaaagaggtgaatacattaaaaactggcggccaagatactttcttttgaagacggacgggtcgtttattggatacaaagagaagccccaggatgtggatttgccttatccgctaaacaatttcagcgtagctaaatgtcagcttatgaaaactgagagaccaaagcccaatactttcattattcgctgtcttcagtggacaacagtcatagagcgtacgttccacgttgatacgcccgaggagagagaggagtggacggaagccatccaggctgttgcagacagactacagcggcaagaggaggaacgaatgaattgtagcccaacctcccaaattgacaacataggcgaggaagaaatggacgcctcaaccactcaccacaaaagaaagacaatgaatgacttcgactacctgaaactgctggggaaaggcactttcggaaaagtcatactggttcgcgagaaggcttctgggaaatattacgccatgaaaatcctgaaaaaggaagtcattatcgccaaggacgaagtggcccatacactgaccgagtccagagtgctcaagaatacccgtcatcccttcttaacttcattgaagtactcctttcaaaccaaggaccgcctctgttttgttatggagtacgtgaatggcggagaactgttttttcacttatctcgggagcgggtgttttctgaagaccggacccgtttctatggcgcagaaatcgtcagtgctttagactacctgcattcaggcaagatcgtttaccgggatctgaagctggaaaacctgatgctggacaaagacggccacatcaagataacagattttggcctttgtaaagaaggtataactgacgcagctactatgaaaacgttctgtggcacccccgaatatcttgccccagaagtgctcgaggacaacgattatggccgagctgtggactggtggggattgggagtggtgatgtatgagatgatgtgtgggaggctccccttttataatcaagaccatgagaaactgtttgagctgatactcatggaggatatcaaattccctaggaccctatccagtgacgccaagtcactcttgagcggtctgctgataaaagatcccaacaaacgtctgggagggggaccagatgatgccaaggagattatgcggcactcctttttctctggcgtgaactggcaagacgtttacgacaaaaaattggtgcctcccttcaaaccgcaggtgacctcagagactgacacgaggtacttcgatgaagaatttacagcgcagaccatcactatcacacccccagagaaatgtcagcagtctgactgtggcatgctgggcaattggaagaagtag

SEQ ID NO: 31389 - DNA, 1440 bp, synthetic construct
  misc_feature 1..1440: note = Description of Artificial Sequence: Synthetic coding sequence
  source 1..1440: mol_type = other DNA
atgagtgatgtgaccattgtgaaggaaggatgggtccagaagaggggtgaatacatcaagaactggcgcccaaggtactttctgctgaagaccgacgggtctttcatcggttacaaagagaaaccccaggacgtggacctgccataccccctgaacaacttctcggtggccaagtgccaactgatgaaaaccgaaagacctaagcctaacacattcatcatccggtgcctacagtggacaaccgtgattgaacggacattccacgtcgatacccccgaggagagggaggaatggacagaagccattcaggctgttgcggaccgcctgcagcggcaggaggaggagcgcatgaactgttcccccacaagccagattgataacattggggaagaggaaatggacgccagcacaacccaccacaagcgcaaaaccatgaatgatttcgattacctgaaactcctgggcaagggtacattcggtaaagtcatccttgtcagagaaaaagcatccggcaagtattacgccatgaaaattctgaagaaagaagtcataatcgccaaggacgaggtggcccacaccctgactgaaagcagggtgctgaaaaacacacggcacccctttctgacctctctaaagtacagcttccagaccaaggaccgcctctgtttcgtgatggaatacgttaacggaggcgagctgttctttcacttgtcaagggagagggtcttttctgaggatagaacacgattctacggggctgaaatcgtgtccgccctggactacctgcacagcggcaaaatcgtgtatcgggacctgaagctcgagaatctgatgctggacaaagatgggcacattaagattactgattttggtctgtgtaaggaggggataactgacgctgctaccatgaaaacattttgcgggacgccagaatacctcgctcccgaggttttggaggacaacgactacggccgtgcggttgattggtggggtctaggcgtggtaatgtacgagatgatgtgcggacgcctccccttttacaaccaagatcacgaaaaactctttgagttaatcctcatggaagacatcaaattcccaagaacgctctctagtgatgccaagtctcttctgtccggtctgctcattaaagaccctaacaagagactgggaggagggccagacgacgccaaagagataatgcggcatagtttcttcagcggcgtgaactggcaggacgtgtacgacaaaaagctcgtaccaccattcaagccacaggtgacttccgagacggatacaagatacttcgacgaggaatttacagcccagacaatcaccatcactcctccggagaaatacgacgaggatggaatggactgtatggacaacgaacgcaggccacactttccacagttttcttatagtgcctccggcagggaatag

SEQ ID NO: 31390 - DNA, 1398 bp, synthetic construct
  misc_feature 1..1398: note = Description of Artificial Sequence: Synthetic coding sequence
  source 1..1398: mol_type = other DNA
atgagtgacgtaacaattgtgaaggaggggtgggtgcagaagcggggtgagtacatcaagaattggcggcctcggtattttctgctgaaaactgatgggagctttatagggtataaggagaagccacaggacgtggacctaccatatccactgaacaactttagcgtggctaagtgccagcttatgaaaaccgaacgcccaaaaccaaatacatttatcataagatgcctgcagtggaccactgtcatcgagcgcacctttcacgtcgacacacctgaagaaagggaagagtggactgaggccatccaggcagtcgcagataggctccagcggcaggaagaagagcgcatgaattgttctccaacttcgcagatagataacattggggaggaggagatggatgccagcaccacccatcacaaaaggaaaaccatgaacgacttcgactacctgaagctgctgggtaagggcacattcggcaaggtgattctggttcgggagaaagcatctgggaaatactatgcaatgaaaatcctgaaaaaggaggtaatcatagctaaggacgaggtggcccacaccctgaccgaaagccgtgttctgaagaacacccgccatccgttcctgacctcattgaaatattcgtttcagactaaggaccggttgtgctttgtgatggagtatgttaacggtggtgaactgttttttcatctgagtcgcgaacgggtgttctccgaggacagaacgcgattctacggcgcagagattgtgtctgcactggactacctgcatagcggcaagattgtctaccgtgacctgaaactcgagaatcttatgctcgacaaggatggacatatcaagattacagacttcggactttgcaaggagggaatcacagacgctgcgacaatgaaaacattctgtgggacaccggaatatctagccccagaggttttagaagacaatgattatggccgagcggtggactggtggggactgggtgtggtcatgtacgagatgatgtgtggacgactccctttctacaaccaggaccatgaaaaactctttgaattaatcctaatggaggacattaaatttcccagaacactgagcagtgatgcaaagagcttactgagcggcctgctgatcaaggacccaaacaagagactgggtggcggacccgacgacgcgaaggaaatcatgcggcactcttttttcagcggcgtcaactggcaggacgtgtatgacaagaagctggttccgccattcaaaccacaagtgacttctgaaacagatacacgctacttcgatgaggaattcaccgcccagaccatcacaattacaccaccggagaagtgtcaacaatccgattgcggaatgctcggcaattggaagaagtag

SEQ ID NO: 31391 - DNA, 420 bp, synthetic construct
  misc_feature 1..420: note = Description of Artificial Sequence: Synthetic coding sequence
  source 1..420: mol_type = other DNA
atgtctgatgtaacaatcgtcaaagaaggctgggtccaaaaacggggagaatatattaagaactggcggccacggtactttctgctgaaaaccgatggttctttcatagggtataaagaaaaacctcaggacgtggatctgccttacccattgaataacttctctgtggctaagtgtcaacttatgaagaccgagaggccaaagccaaatacatttataatccgatgcttgcagtggacaacagttatagagcggacattccatgtggacacaccagaagagagggaagaatggacagaggctattcaggctgtcgccgatagactgcaaaggcaggaggaggagcggatgaattgctcgcctacatctcagatcgataacataggtgaggaagagatggatgcctcgacaacacattag

SEQ ID NO: 31392 - DNA, 624 bp, synthetic construct
  misc_feature 1..624: note = Description of Artificial Sequence: Synthetic coding sequence
  source 1..624: mol_type = other DNA
atgagcccactccttcgtcggcttcttcttgccgctctgctacagttggccccagcacaggcacctgtaagccagcctgacgctccaggccatcagagaaaggtggtcagttggattgacgtgtatacccgggctacctgtcagccgagggaggtggtagttccactaacagtcgagctgatggggacggttgccaaacagttggttccaagctgcgtcacagtgcaacgctgcggagggtgttgcccagatgacggactggaatgtgtgccaacaggccagcaccaggtccggatgcagattctaatgatccgctatccaagctcacaacttggagaaatgagcttggaagagcactcacaatgcgaatgtcgtcctaagaagaaagactctgcggttaagcccgatcgggcagccactcctcaccatcggcctcagccgaggagcgtgccagggtgggactcagcaccgggtgcccctagccctgccgatattacccaccccactccagcgccaggcccttcagctcacgccgctcctagcactacctcagcactcacaccagggcctgctgctgccgcagcagacgctgctgcttcatccgtagccaagggaggcgcttag

SEQ ID NO: 31393 - DNA, 567 bp, synthetic construct
  misc_feature 1..567: note = Description of Artificial Sequence: Synthetic coding sequence
  source 1..567: mol_type = other DNA
atgtcacctctgcttcgcagattgctgctggctgctctgctgcaactggccccagcacaagcccctgtctcccagcccgacgcgccagggcatcaaagaaaggtggtgagctggattgacgtgtataccagggccacttgtcagcccagggaagtggtggttcccctgacagtcgagctcatgggaaccgttgcaaagcagctcgtgccttcttgtgtgacagttcagcgatgcggtggatgctgtcctgacgatggactagagtgcgtccccacaggacaacatcaggtgaggatgcagatcctgatgatccgttatccttcatcccagctcggcgagatgagcctggaagaacactcccaatgcgaatgtcggcctaagaagaaagattcagctgtaaagcctgatagcccaagacctctgtgtcccaggtgtacacagcaccaccagaggcccgatccccgtacctgtcgttgccggtgtagaaggcggtcatttctgaggtgtcaggggagagggctcgaactcaaccccgatacctgcagatgcaggaagcttcggaggtag

SEQ ID NO: 31394 - DNA, 1143 bp, synthetic construct
  misc_feature 1..1143: note = Description of Artificial Sequence: Synthetic coding sequence
  source 1..1143: mol_type = other DNA
atgagcgagactgtgatctgttctagccgcgctacggtcatgctgtacgacgacgggaataagcgctggctgcctgcaggaaccgggccacaggcattcagccgagtccagatatatcataatcccacagccaacagtttcagggtcgtcggccgtaagatgcagcccgaccagcaggtcgtcatcaactgcgccatagtgcgtggggtgaaatataatcaggccactccaaactttcaccagtggagggacgctcggcaggtgtggggactgaatttcggcagcaaggaagatgctgctcaatttgcagctggtatggcgtccgccctcgaagctctagaggggggaggaccccctccaccccctgccctccccacgtggtcagtcccaaacggaccatcgcctgaagaagttgagcagcaaaagagacagcagcccggaccctcggaacatatcgagagacgcgtgtcgaatgctggaggaccccctgcgccacctgcaggcggtccacccccacctccagggccacctccgccacctggccctccgccaccacccggactaccgccatcaggtgtccctgctgccgcacacggggctggcggagggcctccacctgcacctcctctgcctgctgcacagggccctggcggagggggagcaggtgcaccagggctggcagcggctatagctggcgctaaattgaggaaggtcagtaaacaggaagaggcaagcggtggacccactgcgcctaaggccgaaagtgggaggtctgggggaggcggtttgatggaggaaatgaatgccatgctggcccgaaggcggaaggccactcaagtaggtgagaaaactccaaaagacgagtccgccaatcaagaggagcccgaggcaagagtcccagcccaaagtgaatccgttaggcggccttgggagaagaactccaccactctgccgaggatgaaatctagtagctcagtaacaactagtgagacacaaccctgtacacctagcagcagtgactattctgatctccagcgggttaaacaggaactcttagaagaagttaaaaaggaattgcaaaaggtgaaggaggagatcatcgaggccttcgtccaggaactgcggaagcgcggatctccatag

SEQ ID NO: 31395 - DNA, 915 bp, synthetic construct
  misc_feature 1..915: note = Description of Artificial Sequence: Synthetic coding sequence
  source 1..915: mol_type = other DNA
atggctggtaactttgactctgaggagcgttcctcctggtactggggaagactgtctaggcaggaagctgttgctctgctccaagggcaacggcatggagtgttcctggtgagagatagtagtaccagccccggagattatgttctgagcgtctcagaaaacagtcgggtatcccactatataattaattccagcggaccacggccacctgtccctccctccccagcccaacctccgccaggcgtgtctccatctaggctccggattggcgatcaggagttcgattcgctgccagctctgctggagttctataagatccattatctcgacactacgaccttaattgagcccgtctcccgcagtagacaaggctcaggagtcattttacgccaggaggaggctgagtatgttcgggctctgttcgattttaacggaaacgacgaggaagatctgccattcaagaagggtgatattttgcgcatcagggataaaccggaggagcagtggtggaatgccgaagactctgaaggaaagagaggcatgatccctgttccctatgtggagaaatatcgccctgcctccgcttctgtgtcagcgctgatcggcggaaatcaagagggttctcatccccagccactggggggacctgagccgggaccctacgctcagccttccgttaatacccctctacctaatcttcagaacggacctatctatgcaagagtgatccagaaaagagttcccaatgcgtacgataagacagcccttgcactagaggtgggcgaactggtgaaggttaccaaaataaatgtttctggccagtgggaaggtgagtgcaacggcaaaagagggcacttccccttcacccatgtgaggctgttggaccagcagaaccctgatgaagattttagctag

SEQ ID NO: 31396 - DNA, 615 bp, synthetic construct
  misc_feature 1..615: note = Description of Artificial Sequence: Synthetic coding sequence
  source 1..615: mol_type = other DNA
atggcgggaaacttcgacagcgaagagagaagcagttggtattgggggaggctcagccgccaagaggcagtcgcgctgctgcagggccagcgccatggtgtgttcctggtgcgggacagctctacatcccccggagactatgtcctctcagtgtcagagaactcacgggtttcacactacatcatcaatagctccggcccaagacccccagtccctcctagtcccgcacagccaccacccggtgtgtcccccagccgccttaggattggggaccaggagttcgactctttacccgctctgctggagttttataagatccactacctggacaccactacgctgatagaaccagtctcacggtctcggcagggaagcggggtcatcctgcgccaggaggaggcagagtatgtccgtgccttatttgacttcaatggaaatgatgaggaagaccttccatttaaaaagggagacattctgaggattcgtgacaaacctgaagaacagtggtggaacgctgaggactcagagggcaagagaggtatgatacccgttccctatgtggagaaataccggccagcgtctgcctcggtgagcgctttaattgggggtcgctag

SEQ ID NO: 31397 - DNA, 2196 bp, synthetic construct
  misc_feature 1..2196: note = Description of Artificial Sequence: Synthetic coding sequence
  source 1..2196: mol_type = other DNA
tgaaaacctgccaccggcctatgggtgtgggtcagcctactcgtggccgctgggacagtacagccctccgacagccaatccgtatgcgcaggcaccgaaaataagctgagctccctctcagacttggagcagcagtatcgggcactccgcaaatactacgaaaactgtgaggtggtcatgggtaacctcgagattacaagcatagaacacaatagagatttgtctttcctccgctcggtaagagaggtcactggatacgtcctggtggcccttaatcagtttaggtacctgccactggagaacctgcgaatcattagggggactaagttatacgaggacaggtacgccttggcgatctttctgaattaccgaaaagatgggaatttcggcctacaggaactgggcctaaagaaccttacagagattctgaatgggggagtgtacgttgatcaaaacaagtttctttgttacgcggatacgatccactggcaagacatagtgcggaatccatggccttctaatttgacgctagtgagcacgaacggtagttccggctgtgggaggtgtcacaagagctgcaccggacggtgttggggacctactgagaatcattgccagacattaacaagaacggtgtgtgccgaacaatgcgatggtaggtgctacggtccctacgtcagtgactgttgccatcgggagtgcgccggaggttgtagcggtcccaaagatacggactgcttcgcctgcatgaacttcaatgactcaggcgcttgcgtcacgcagtgccctcaaacctttgtctacaacccaaccaccttccagttggagcataactttaacgcaaagtacacctatggagccttctgtgttaagaagtgcccacacaactttgtggtggattcatcatcatgtgtacgcgcatgtccgagcagcaaaatggaagtcgaggagaacggcatcaagatgtgcaagccatgtaccgacatctgtccaaaagcctgcgatggtatagggacaggctccctgatgagtgcccaaacagtggattcaagcaacatagacaaatttataaactgcacgaagatcaacgggaatctgatcttcctggtaaccggtattcacggcgacccatacaatgcgatcgaagctattgaccctgaaaaactgaatgtcttccgcaccgtgagagaaatcacaggctttctcaatatccagagttggcctccaaatatgaccgattttagcgtgttctcaaacctggtcaccataggtggacgtgtcctgtatagtggactgagccttctgatattgaagcaacagggcataacgagcctgcaatttcagtccctgaaagagatcagtgctgggaatatttacatcactgataactccaatttgtgttattaccacactattaactggaccacactcttttcaacaatcaatcagcgcatagtgatacgggacaaccgcaaagctgaaaattgtaccgctgaagggatggtatgcaaccacctgtgttccagcgacggttgctgggggccaggcccagaccagtgcctgtcctgccgtaggttctcacgaggacggatatgtattgaatcgtgcaacctgtatgatggagagtttagagaatttgaaaatggcagcatttgcgtcgaatgcgacccgcaatgcgagaagatggaggacggactgcttacctgccatgggccaggcccagacaattgtacgaagtgtagccattttaaggatgggccaaattgcgttgagaagtgccccgacggtctgcagggcgctaattctttcatttttaagtatgcagatcccgaccgagaatgccacccctgtcacccgaattgtacccaaggctgcatcggtagtagtattgaagattgcatcggcttgatggacagaacgcctcttatcgccgcaggggtcattggcggtctgtttatcctcgttattgtcgggttgaccttcgcagtttacgtgagacgtaagagcattaagaagaagagagccctgcgtcggtttctggaaacagagctggtggaaccactgacccccagcgggacggccccaaaccaagcacagctgaggatcctgaaggagacagaactcaagagagttaaagtgcttgggtccggcgcattcggcactgtgtacaagggtatctgggtccctgaagggtag

SEQ ID NO: 31398 - DNA, 3927 bp, synthetic construct
  misc_feature 1..3927: note = Description of Artificial Sequence: Synthetic coding sequence
  source 1..3927: mol_type = other DNA
atgaagcctgctactggtctctgggtgtgggtctccctgctcgtcgcagccggaactgttcagccgtcagattctcagtcagtatgtgcaggtaccgagaacaaactctccagcctgtcagacctcgagcagcagtacagggctctgcggaaatattacgaaaattgcgaagtggtaatgggcaatcttgagatcacctctatcgagcataaccgcgatctgtccttcttgcgctctgtgcgggaggttaccggctacgtgctcgtggccttaaatcagtttagatacctgcccttggagaacttacggattatccgcggtaccaaactctacgaagaccgttacgccctggccatcttcttgaactacaggaaggacggaaatttcgggctccaggagttaggcctgaagaatctgacagagattctgaatgggggagtgtatgtggatcagaacaagtttctctgttatgctgacacaatccactggcaggacatcgttcgtaacccatggccctctaacctcacgcttgttagtactaatggaagctccggctgcggtaggtgccataaatcatgtacaggacggtgttgggggcctactgaaaatcattgtcagaccctgacccggaccgtatgtgcagaacaatgtgatggccgatgctacggaccatacgtgtcagactgctgccatagagagtgtgcaggaggctgttccggcccaaaggatacagactgtttcgcctgtatgaatttcaacgactccggggcttgcgtgacacagtgcccacaaacttttgtctataatcccactaccttccagctggagcacaatttcaacgctaaatatacttacggggcattttgcgtgaaaaaatgcccgcataacttcgtggtcgatagcagctcttgtgtccgggcttgtccgagcagtaagatggaggttgaagaaaacgggattaaaatgtgcaaaccctgtactgatatctgtccgaaggcatgcgatggcattggcaccgggtcactgatgagcgcacagacggtggacagctcaaacatcgataaatttatcaactgcacaaaaattaatgggaacttgatttttctggtgaccgggatacatggggacccctataacgccattgaagctatcgatccagaaaaacttaatgtgtttagaacagttcgcgagatcaccgggttcttgaacattcagtcttggcccccaaacatgaccgacttttcagtgttttctaatcttgttaccataggcggacgcgtgctctactctggcctgagcctactgatcctgaaacaacagggcataacatcattacaatttcagtcactgaaagagattagcgctgggaacatttacatcacggacaactctaacttgtgctattatcataccataaactggacaacccttttctccaccattaaccagaggatagtgatccgcgataataggaaagccgaaaattgcactgccgagggtatggtctgcaaccacttgtgtagtagcgacggatgctgggggccaggtccagaccagtgtctctcttgccgaaggttctccagaggcaggatctgcatcgagtcttgcaatctctacgacggtgagtttagggaattcgaaaacggatctatttgtgtggaatgtgatccacaatgcgagaaaatggaggacgggttgcttacttgtcatggccctgggcctgataattgcacaaaatgttcccattttaaggatggacctaattgtgtggaaaaatgccccgatgggttacagggggctaatagtttcatcttcaaatacgccgatccagaccgcgagtgtcatccgtgtcatcccaactgtacccaaggatgtaatggccctaccagtcacgattgtatatattatccttggacaggacattccactctaccgcagcacgctcgaactcccctcatcgctgctggtgtgattggtggcctgttcatcctggtgattgtcggtctgacttttgcagtctatgttcgccgaaagtccattaagaaaaaaagagcactgaggcggtttctggaaactgaattggtggaaccgctcaccccctccgggactgccccaaatcaggcccagctgcgcatccttaaggaaaccgagctgaagcgagtgaaggtcctgggctccggagcgtttggtacagtgtataaaggcatctgggtgccggagggcgagactgtcaaaatcccagtggcaatcaaaattctcaatgagacgacaggtcccaaggcgaacgtggaatttatggatgaagcacttatcatggcttcaatggaccacccacatctggtgagactactgggcgtctgtctgtcccctaccatccaactcgtcacacaactcatgcctcatggctgtctgctggagtacgtccacgaacacaaggacaacattgggagccagttacttctaaattggtgcgttcaaatcgctaagggtatgatgtacctggaagagagaaggctcgtacacagagacctcgccgcacgcaatgtcctagtgaaaagccctaaccacgtgaagattactgactttggtctggccagactactggagggagatgaaaaagagtacaatgccgatggcggaaagatgcctattaagtggatggcactcgaatgcatccactatcgcaaattcacacatcagagtgatgtgtggagctacggagtcacaatttgggaactcatgactttcggcggaaagccttacgatggtataccaactagagaaattccagacttgctagagaaaggcgaaaggctgcctcagccccctatctgtactatagacgtttatatggtgatggtgaagtgttggatgattgatgctgattcccgcccaaaattcaaagaattagccgctgagttcagccgcatggccagagaccctcagagatacctggtaattcagggcgatgataggatgaagctgcctagccccaacgatagtaagttttttcagaatcttctggacgaggaggacttggaggacatgatggatgctgaggagtatttggtcccacaagctttcaatattccccctccaatctacacatcaagggccaggattgacagcaatcgatctgaaattggacactctccccctcccgcttacactccaatgagcggcaatcagttcgtatacagagatgggggattcgccgcagagcaaggcgtgtcagtcccctaccgagccccaacctccacaattcctgaagcacctgtggcacaaggcgcaacggcggagatcttcgatgatagttgctgtaatggtacattgcgtaaacctgtggctccccatgtgcaggaagactcttccacacagcgctattctgccgaccccactgtgtttgcacccgaacggagcccaagaggagagcttgacgaggagggatacatgactcccatgcgcgacaagcccaagcaggagtacctgaatcctgtcgaagaaaatccgttcgtgtctcgtaggaagaacggggacttgcaggcacttgataaccctgaatatcacaacgctagtaatggcccacctaaggctgaagacgaatacgtgaatgagcccctgtacctgaatacattcgctaataccttgggcaaagcagaataccttaagaacaacatcctctcaatgccagagaaagccaaaaaagcctttgataatcccgactactggaatcactctctgccgccacggtcaaccttgcagcatccagattatctccaggagtattccacaaaatacttttacaagcagaacggtcgtatcaggccgatcgttgccgagaacccagaatacctgtccgagtttagtctcaaaccaggtacagttcttcccccacccccttaccggcatcgtaatacggtggtctag

SEQ ID NO: 31399 - DNA, 3897 bp, synthetic construct
  misc_feature 1..3897: note = Description of Artificial Sequence: Synthetic coding sequence
  source 1..3897: mol_type = other DNA
atgaagcctgctaccggcctgtgggtttgggtgtccttactggttgctgctggaacggtgcagccatcagattcccagagcgtctgcgcaggcacggagaataagcttagcagtctctccgatctggagcagcagtatcgggcactgcgcaaatactacgaaaactgtgaggtggtgatggggaacctcgaaataacatcaattgaacacaatcgggacttgtctttcctacggagcgtcagagaggtgactggctatgtgctggtagcactgaatcagttccgctatctgccattagaaaatctgcggattatcagggggaccaaactctacgaggaccgctatgcactggctattttcctgaattatcggaaggatggtaactttgggctgcaggagctcggactgaagaatctaacagagattctgaatggcggagtctatgtggaccaaaacaagttcttgtgctacgccgataccatccattggcaggacatcgtgaggaacccttggccaagcaaccttacactcgtgtcgacgaatgggtcttcaggctgcggtcgctgtcacaagagctgcactggacggtgctgggggcctaccgagaatcactgccagacactcacgaggacagtttgtgccgagcagtgcgacgggaggtgttatggaccatatgtctctgactgttgtcaccgtgaatgtgccggaggctgttcaggtcccaaagacacagactgctttgcctgtatgaatttcaacgattccggggcatgcgtgacccaatgcccacagacgtttgtgtacaatcccacgacattccagttggagcacaacttcaatgccaaatatacctacggcgcattctgcgttaagaagtgcccacataatttcgtggtggactccagctcctgcgttagggcgtgcccttccagtaagatggaagtggaggaaaatgggatcaagatgtgcaagccgtgtacagatatctgtcctaaggcatgcgatggcatcggtacgggttctctgatgtccgctcagaccgtcgacagttctaacatcgacaagtttattaactgcactaagatcaatggcaatcttatattcttagtgactggcatccacggggacccatacaatgcaattgaggctattgatcccgagaagttgaacgtattccgcactgttcgagaaattacaggcttccttaacattcaatcatggccccctaacatgaccgacttctccgtgttctctaatcttgtgacaatcggcggtcgggtcctatattcgggcctgtctctgttaatcttgaaacaacagggcatcacatctcttcagtttcagtctttaaaggagatcagcgcaggcaatatttatattaccgacaactcaaatttatgctattatcataccatcaattggactactctattttctaccattaaccagcggattgtgatccgtgataataggaaggccgagaattgcacagccgaaggcatggtctgtaatcatttgtgctcgtcagatggctgttggggacctgggcctgaccagtgtctgtcgtgccgaaggtttagtcgcggaagaatctgcattgagtcatgcaatctgtacgatggagagttccgcgagtttgagaatggcagcatttgtgtggagtgtgatccccagtgtgaaaaaatggaggatggactgctcacttgtcatgggcctggccctgataattgcaccaaatgctcccacttcaaggatggcccaaactgtgtcgaaaaatgtcctgacgggttgcagggcgcaaactccttcatcttcaagtacgctgacccggaccgcgagtgccacccgtgccaccctaactgtacccagggatgtatcggctcttctatcgaggactgtatcgggttaatggatagaacacccctgattgcagccggagtgattggaggtttgtttatccttgtcatcgtggggctgaccttcgccgtctatgtccgcaggaaaagtatcaagaagaaacgagccctgcgaagatttctggaaactgaactagtcgagcccctgacaccatcaggtaccgcccctaatcaggcgcaactccgaatcttgaaagaaacagaactgaagcgcgtgaaagtactgggtagcggagcatttggtactgtgtataagggaatatgggtgcccgagggggaaaccgtgaagattcctgtagcaataaagatccttaacgagaccactggaccgaaggccaacgtcgaattcatggacgaggccctcatcatggcctccatggaccacccacatctggtgcggcttctcggcgtctgtctctcaccgaccattcagctcgtcacgcagctgatgccacatggatgccttttagaatacgtgcatgagcacaaagacaatatcgggtcccagttgctgctgaactggtgcgtccagattgccaaaggaatgatgtatctagaagagaggagattggtccatcgagaccttgcagcacggaacgtcctggtcaagtccccaaaccacgttaaaataacagattttgggctggcacggcttctcgagggcgatgagaaggagtacaacgcagatggaggtaaaatgcctatcaagtggatggcgttggagtgcatacattacagaaaattcactcatcagtcagatgtatggagttacggcgtgaccatctgggaactgatgaccttcggcggtaagccctacgacgggataccaacaagagaaatacccgacctgctggaaaagggcgagagactccctcagccccctatctgcaccatcgacgtctacatggtgatggtgaaatgttggatgatcgacgccgactcacgaccaaagtttaaagagctcgccgctgaattttcgaggatggccagagacccacaaaggtacctggtcattcaaggtgacgatcgcatgaaactgccatcccctaatgactctaaattcttccaaaatctgcttgacgaggaagacctggaggacatgatggacgcagaagaatatctcgtcccccaggcattcaacattccgccacccatctataccagccgcgcaagaatcgattccaacaggagcgagatcggccacagccccccaccagcctatactcctatgtcgggcaaccaattcgtgtacagagacggaggctttgctgctgaacagggggtcagtgtgccgtaccgagcacccaccagcaccattcctgaggccccagtggctcagggcgcaacagccgaaatattcgatgattcttgttgtaacggaaccctccgtaagcctgtcgcgccacatgtgcaagaggactcttctacccagcggtattctgcagatcccactgtgttcgccccagagagaagtcctagaggcgagctggacgaagaaggatatatgacccccatgcgcgacaagcccaaacaagagtacctgaatcccgtcgaagaaaatcctttcgtatcccggagaaagaatggagatctgcaggccctcgacaacccagagtaccacaacgcatccaacgggcctcccaaggccgaagacgaatatgttaacgagcctttatatctgaatacgttcgctaacacactgggcaaagccgaatatttaaagaataacatattaagcatgcccgagaaagccaaaaaagcatttgacaatcctgactattggaaccatagcctcccccctagaagcacgctccagcatcccgactacctgcaggagtatagtactaagtacttctataaacagaatgggaggattcgacccatagtggcggagaacccagagtacctgtctgaatttagccttaagcccggtactgttttgcccccacccccatacaggcataggaacactgtggtctag

SEQ ID NO: 31400 - DNA, 387 bp, synthetic construct
  misc_feature 1..387: note = Description of Artificial Sequence: Synthetic coding sequence
  source 1..387: mol_type = other DNA
atggggaacctagaaataacaagcattgaacataatcgggacttatccttcctgcggagcgtgagagaggtcactgggtatgttctcgtggctctcaaccagtttcggtatcttccactggagaacttacggattattcgcggaacaaagctgtatgaggatcgttacgctctcgccatctttctaaattacagaaaggacggcaatttcggcctccaggaactgggtttgaaaaatttgactgagatcctcaacggaggtgtgtacgtcgaccagaataaatttttgtgctacgccgacaccatacactggcaggatattgtgcgcaacccctggccttccaatctgactcttgtgtctactaatggatcaagtggctgcggttag

SEQ ID NO: 31401 - DNA, 3878 bp, synthetic construct
  misc_feature 1..3878: note = Description of Artificial Sequence: Synthetic coding sequence
  source 1..3878: mol_type = other DNA
atgaagcctgcaacgggattatgggtctgggtgagcttgctggtggccgcaggcacagttcaaccatctgacagccaatccgtatgtgctggcacagaaaataaactcagctcactttcagacctggagcaacagtatagagctctcagaaaatattatgagaactgtgaggtcgtcatgggtaacctcgaaattacgtctattgagcacaatcgtgatctaagtttcctcagaagcgttcgggaggttaccggttacgtgctggtcgccctcaaccagtttcgctacctgcctttggaaaacctccgcattatcaggggcactaagctgtacgaggatcgctacgcactggccattttcctcaactataggaaggacggcaatttcgggctgcaggagttagggctgaagaaccttactgaaatcttgaatggcggagtctatgtcgatcaaaataaattcctgtgctacgccgacaccattcactggcaggacattgtcaggaacccatggccatcaaacctcacactggtctcaactaacggatcctcaggctgtggacggtgccataagtcatgtacgggcagatgctggggccctaccgagaatcactgccagaccctaacgcggaccgtctgtgcggagcagtgtgatggaaggtgctacggcccttacgtctctgattgttgtcaccgggagtgtgctggtggctgctctggtccgaaggatacagactgctttgcttgtatgaattttaacgatagcggtgcctgcgttactcaatgcccacaaacgttcgtgtataaccctacaacatttcaactggagcacaattttaacgccaaatacacatacggagccttttgcgtaaaaaagtgtcctcacaattttgtggtagactctagttcctgcgtacgggcttgcccctcttcaaagatggaggtcgaagaaaatggtatcaagatgtgtaagccttgcaccgacatttgccctaaggcgtgtgatggcatcggtacagggagcctcatgtccgcgcagacggtggacagttctaacattgacaaatttattaattgtaccaagattaatggcaacctcatatttctggtgacaggaatccatggcgatccctataatgcaattgaagctatagatccagagaagctaaacgtgttcaggacagtgcgtgagataaccggattcttaaatattcaatcttggccccctaacatgacggacttttcagtatttagtaacctggtcacaatcggtggccgagtgctatacagcggcctgtctctgctgatcctgaaacagcagggaatcacatccctgcagtttcagtctcttaaggaaatctcggctggcaacatttacatcacagataactctaatctgtgctactaccacacaatcaactggaccaccctgtttagtactattaatcagaggatcgtgattcgagataatcgcaaagcagagaattgtactgcagagggtatggtctgtaaccatttatgcagctctgacggctgttggggcccaggtcccgatcaatgcctctcatgtaggcggtttagtcgcggtaggatctgcatcgagtcttgcaacctgtacgatggggagttccgggaattcgagaacggctctatctgtgtagaatgcgacccgcagtgcgaaaagatggaggacggcttgctgacctgccatggccctggccctgataactgcacgaaatgctcccattttaaggacgggccaaattgcgtcgagaagtgcccagacggactccagggagccaattcctttatctttaagtacgccgatccagaccgggagtgccatccttgtcacccaaactgcacgcaggggtgtaatggcccaacaagtcacgattgtatctattacccctggaccggtcatagcactctcccgcaacatgctaggaccccactgattgctgcgggagtgattgggggtctttttatcctcgtcatagttggactaacctttgcagtgtatgtaaggcgcaagtctatcaagaagaagcgagccttgcgcagatttttagaaactgaactcgtggagccactcaccccgagcggtaccgctcccaaccaggcccagctgcgcatcctgaaggagacggagctcaaacgggtgaaagtgctcgggtccggggcatttggcacggtgtataaaggcatttgggtgcccgaaggagagaccgtcaagatacccgtggcaatcaaaatactcaacgaaacaaccggaccaaaggccaacgttgaattcatggatgaagccctgataatggcatctatggatcatccccacttggtccgcctgctgggagtctgcctctcaccaaccattcagctggtaactcagttgatgccccatggttgtttgctggaatatgttcatgagcataaagacaatatcgggtcacagctgctcctaaactggtgcgtgcagatcgcgaagggcatgatgtacctggaagagaggcggttggtccatcgcgacctcgccgcacggaatgtgctcgtgaagtcccccaaccacgtcaagatcacagactttggcctcgccaggctcttggagggagatgagaaggagtacaacgccgacggtggtaaaatgcctatcaaatggatggctcttgaatgcattcactaccgcaagtttactcatcagagcgacgtgtggtcatacggagtgactatctgggaacttatgacattcggcggaaagccttacgatgggattccaaccagggagatccccgacctgctcgagaaaggcgaaaggctgccacagccgccaatctgtaccattgacgtgtatatggtgatggttaagtgctggatgatcgacgctgacagtcggcctaaatttaaagagcttgctgccgaattctccaggatggcgcgtgacccccagcggtatctcgttatccagggggatgaccgcatgaaacttccctctccgaatgatagcaagttttttcagaatctgctcgacgaagaggacttggaagacatgatggacgcagaggaatacctggttccacaggcctttaatatccctcccccaatttacacctccagggcaagaattgactctaatcgtaaccagttcgtgtaccgtgacggaggattcgctgcagagcagggcgtgagcgtgccttatcgcgctccgacaagcactattcctgaagccccagtggcccagggcgcaactgctgaaatcttcgatgattcctgctgtaatggcacactgcggaaacccgtcgcccctcacgtccaagaggactcttccacgcagagatactcagccgatccaactgtctttgccccagaacgcagccccaggggcgaactcgatgaggaaggatacatgacacccatgcgtgataaacccaaacaggaatacctgaacccagttgaggagaatccattcgtatccaggcggaaaaatggagatctccaggcactagataaccccgagtatcataatgcaagcaatggccctcccaaggccgaggacgagtacgtcaacgagcctttgtatctgaacacctttgctaataccttgggaaaagctgaatatttgaagaacaacatcctatcaatgccagaaaaagctaaaaaggccttcgacaatcctgattactggaatcactccctaccacccagaagcaccctacaacatccagactatctgcaggagtactctaccaagtacttctataaacagaatgggcgaatcaggcccattgtcgctgagaacccagagtatctgtcagagtttagcttgaaaccgggaactgttctaccccctcccccttacaggcacaggaacactgtggtcta

SEQ ID NO: 31402 - DNA, 4029 bp, synthetic construct
  misc_feature 1..4029: note = Description of Artificial Sequence: Synthetic coding sequence
  source 1..4029: mol_type = other DNA
atgcgggctaacgatgctctccaggtgttgggcctcttgtttagtctggccagagggtctgaagtgggaaactcccaggccgtgtgccccggtacgcttaacgggttgagtgtcaccggtgacgccgagaaccagtaccagaccctatacaagctttatgagaggtgcgaggtcgtcatgggcaacttggagatcgtgctcactgggcataacgctgacctgagcttcctgcagtggattcgagaagtcactggttatgttctggtggccatgaacgagttctccaccctgccgctcccaaatctgcgggtggttagaggtactcaagtgtacgatgggaaattcgctattttcgttatgcttaactataacaccaacagtagccacgctcttcgtcagctcagactcacccagctcacagagatcctcagcggaggagtctacattgagaaaaacgataagctatgccacatggatacaatcgattggagagatatcgtgcgcgacagagacgccgaaatcgtggtgaaagacaatggcaggtcctgtccaccttgccatgaagtctgtaagggccgttgttggggtccaggatctgaggactgtcagacgctgaccaagacaatttgtgcaccacagtgtaatgggcattgcttcggaccaaacccaaaccagtgctgtcacgatgagtgcgcaggagggtgcagcggaccccaggatacggactgctttgcctgcagacattttaatgattcaggagcctgtgtgccacgttgtcctcagccattagtttacaacaaacttaccttccagctggagccaaacccccacaccaaataccagtacgggggtgtgtgcgttgctagctgccctcataactttgttgtagaccagacatcatgcgtgagagcttgtcctcctgacaagatggaggttgacaaaaatggattaaagatgtgtgagccttgtggtggtctctgtccaaaggcctgtgaaggaacagggtctggaagtcgctttcagaccgttgactctagcaatatcgacgggttcgtgaattgcacgaagatcctcggaaacctggactttcttataactgggctcaatggggatccttggcacaagatcccagccctagaccccgaaaaactgaatgtgtttagaacggttcgggagatcacaggctacctgaacattcaatcctggccacctcacatgcacaacttcagcgtgttttcaaacttgactaccatcggcggacgctcgttatataataggggattcagcctgctcattatgaagaatcttaacgtgacgagtctgggatttcgcagtctgaaggaaatatctgcaggtagaatttatatcagtgccaatcggcagctttgttaccatcattctctaaactggactaaggtcctgcgcggacccactgaggaacgacttgacattaaacacaatcgcccacgtcgcgattgcgtggcagaaggtaaggtgtgtgatccactgtgctctagcggaggctgctgggggccaggtcccggacagtgcctgagttgtcggaactatagtcgtggcggtgtgtgtgtgacccattgcaatttcctgaacggggagcctcgggagttcgcacatgaagctgagtgtttttcgtgtcaccctgaatgccagccgatggaggggacagctacctgtaacggttcaggcagcgacacatgcgctcagtgcgcccattttcgcgatggccctcactgtgtgtcctcatgtccccacggcgtgctgggggcaaagggcccaatttataagtacccagatgtgcagaacgaatgccgtccttgccacgaaaattgtacccaagggtgcaaaggacctgagcttcaggactgcctcggacagacactggtcttgattggaaagactcacttgacaatggccctcaccgtcatcgctggccttgttgtaattttcatgatgctgggaggaacctttctctattggcggggacgtcgaatccagaataaacgcgcaatgcggagatacctggaacgcggtgaatcaattgagcctttggaccctagcgaaaaagccaataaagtactggcaaggatttttaaggagaccgaactccggaagctgaaggtcctggggtccggcgtgttcggtacggtgcacaagggtgtttggattcctgaaggcgagtcgatcaaaatccccgtttgcataaaagtaattgaggataagtccggacggcaatcctttcaggccgtaacggaccacatgcttgccattggctcactagatcacgctcacatcgtacggttgctgggattgtgtccaggatcatccctccagttagtgacacagtatctgccactgggcagtttgctcgatcacgtgagacagcaccggggagccctggggcctcaactgctccttaactggggagtccagatagccaaaggtatgtactacttagaagaacatggaatggtgcaccgcaacttggcggctaggaacgtcctcctcaagagcccgagccaggtgcaggtggctgacttcggggtcgcagatctgctacctccggatgacaaacagcttctctactccgaggccaagactcccattaagtggatggcactggagtcaatccacttcggcaaatacacacatcagtctgacgtatggagttatggcgtgactgtttgggagctaatgactttcggagctgagccgtatgccggtctcaggctggctgaggtaccggatctgctggaaaagggagagcgtctcgcccagccgcaaatttgtactatcgatgtgtacatggtcatggtgaaatgttggatgatagatgaaaacatcaggccaacctttaaggaactggcaaatgagttcacccgtatggccagagatccgcctcgttatctggtgataaaacgtgagtctggaccaggtatagcgcctggtcctgaaccgcacggactgaccaataaaaaattagaggaggtcgagttagaaccggaattggaccttgatctcgacctggaggccgaggaagataatctcgctaccaccacacttggttcagcactatccctaccagtgggaacgctgaatcgcccacgaggtagccagtccctgctgtcccccagtagcggctatatgccgatgaatcaaggaaacctgggcgagagctgccaggagtcagccgtgagcggatcaagcgaaagatgcccaaggccagtgagtctgcaccctatgccacgcggatgtcttgcgagcgagagctcagagggccatgtgacaggatcagaagccgagttacaagaaaaggtcagtatgtgtcgcagtcggtccagatcccggagcccacggccacgcggtgattctgcctatcactctcagagacattcactgctaacaccagtgactcccctcagcccgcctggcctcgaggaagaggatgtgaatggctacgtgatgccggatacacaccttaaagggaccccgtcctctagggaaggaacactgtcgagcgttggtctcagctccgtgctgggtactgaagaggaggacgaagacgaggagtatgaatacatgaatcgtcgacgcaggcactcccccccacatccacccagaccttcgagcttagaagagctcggatatgaatacatggatgtgggttcagacctgagcgcctcgctggggtctacgcaaagttgccccctgcatcccgtcccgatcatgccaactgcaggcaccactcctgacgaagactatgaatacatgaatcgccaacgggacggagggggtccaggcggagactatgctgcgatgggcgcatgccctgcaagcgaacagggttacgaggagatgcgcgcatttcaaggaccgggtcaccaggccccacacgtgcattatgcaagattaaagaccctcaggagtctggaagcaacagactcggcatttgacaacccagactactggcattcgcgcctgttcccgaaggctaacgcccagcggacttag

SEQ ID NO: 31403 - DNA, 996 bp, synthetic construct
  misc_feature 1..996: note = Description of Artificial Sequence: Synthetic coding sequence
  source 1..996: mol_type = other DNA
atgcgtgcaaacgatgcgctgcaggtattggggttactttttagcttagctaggggcagcgaagtgggcaattcccaggcagtctgtcctggcactctcaatggtctgtcagttactggcgatgccgagaaccaataccaaacactatacaagctatacgagagatgcgaagtcgtgatgggaaatctggagatcgtcctcaccggacataacgcggacctcagctttttgcagtggatcagagaagtaaccggttatgtcctggtggctatgaatgagttttctacattacccctgcccaacctgcgggtggtacggggaactcaggtgtatgatgggaaatttgccatctttgttatgcttaactacaacaccaacagtagccacgcactgcgccagctgcgcctgacacagctgactgaaattctctcggggggagtgtatattgagaaaaatgacaagctttgtcacatggacactattgactggcgggacatagtaagagatagagacgccgaaatcgttgtgaaggacaatggccgttcctgtcccccatgccatgaagtgtgtaaggggaggtgttggggccctggctccgaggattgtcagacactgaccaaaacaatatgtgcccctcagtgtaacggtcactgctttggcccaaatccgaaccagtgttgccatgatgaatgcgcaggcggatgctccggccctcaagacaccgattgcttcgcttgcaggcacttcaacgattcgggggcatgcgttcctcgctgcccacaaccccttgtgtataataagctaacttttcaactcgagcccaacccccatacaaaatatcagtatggtggagtgtgtgtggcctcttgcccacataactttgtagttgaccagaccagttgtgtaagggcctgcccgcctgacaaaatggaagttgacaaaaacgggctaaaaatgtgcgagccctgtggtggcctgtgcccaaaagttttctag

SEQ ID NO: 31404 - DNA, 552 bp, synthetic construct
  misc_feature 1..552: note = Description of Artificial Sequence: Synthetic coding sequence
  source 1..552: mol_type = other DNA
atgagagcaaatgatgccctgcaggtcttgggattgttattcagcctggccagggggagcgaggtcggaaatagccaggctgtatgtcctggaaccctgaacggtctttccgttaccggagacgccgaaaatcagtaccaaactctgtacaaactgtatgaaagatgcgaggtagtcatgggcaacctcgagattgtgctaactggccacaacgcggatctatcgtttctccagtggattagggaggtcactggctatgttcttgtggccatgaacgagttctcaacacttcccctgcccaacctccgcgtcgtcaggggcacccaggtctatgacggcaaattcgcgatcttcgtcatgctcaattataacaccaactcctcccacgccttgcgccagctccgccttacacagttgacgggacagttcccaatggtgcctagtggtctgacacctcagcctgcacaagactggtatctgcttgacgacgacccccgtctgctgacacttagtgccagcagcaaggtgccagtaactcttgctgcagtttag

SEQ ID NO: 31405 - DNA, 3852 bp, synthetic construct
  misc_feature 1..3852: note = Description of Artificial Sequence: Synthetic coding sequence
  source 1..3852: mol_type = other DNA
atgggaaaccttgaaattgttctcactgggcataatgcagatctttcattcttgcagtggatcagggaggtgacggggtacgtgctggtggctatgaacgagtttagtaccctgccattgcccaacctgcgcgtcgtacggggtacccaggtgtatgacgggaagttcgccatctttgtgatgctgaactataacacaaactcctcgcacgctctacggcaactgcgtctgactcagctgactgaaatcctgagcggtggggtgtacattgagaagaatgacaaactgtgtcacatggacacaatcgattggcgcgacatagtgcgagaccgcgatgcagagattgtggtgaaggacaatggacgaagctgccctccatgtcacgaagtctgtaaagggaggtgctggggtcctggctctgaagattgtcaaactctcactaaaacaatttgtgccccacaatgcaatgggcactgttttggccctaaccctaatcagtgttgccatgatgagtgcgccggaggatgttcaggcccacaggacaccgattgtttcgcatgcaggcactttaatgactccggcgcttgcgtcccaaggtgtcctcaaccgctggtctacaacaaactgaccttccagctggaaccaaatccacatacaaagtatcagtacggtggtgtctgcgtggcctcctgcccccacaattttgtcgtggaccaaacctcatgtgttagagcctgtcccccagacaaaatggaagtggacaaaaacgggctgaagatgtgcgaaccttgtggaggcttgtgtcctaaggcctgcgaaggcacaggaagtgggtcacggtttcagactgtggactccagtaacatcgacggattcgttaactgtactaagattctgggcaacctggattttctgatcaccggactgaacggcgacccctggcacaaaatcccagcgctggacccggagaagctgaacgtgttcaggacggtccgcgagatcactgggtatctaaacattcaatcctggcctccgcacatgcataactttagcgttttttcaaacttgactaccataggtggccgtagcttgtataatagggggttcagtctactgattatgaaaaaccttaatgttacgagccttggcttccggagcctgaaggagatcagcgctggcagaatctatatctcagcaaatcgacagctgtgttaccaccactccctcaattggaccaaggttctcaggggacccacggaggaacgcctagacatcaaacataacaggcctcgccgagattgtgtcgctgagggcaaggtctgcgaccccctgtgctctagcggcggatgctggggcccaggaccagggcagtgtctctcatgcagaaactactcccggggtggtgtctgtgtcacgcattgcaatttcctgaacggcgaacccagagaattcgcccacgaagcagagtgcttcagttgccacccagagtgccagccaatggaggggactgcaacttgtaacgggagcggcagtgacacatgcgcacaatgtgcacacttccgcgatggaccacactgtgtctccagctgtcctcatggcgttcttggcgctaaaggtccaatatataaatatccagacgtacagaacgaatgccggccatgccacgagaattgtactcagggctgcaaaggaccggagctccaggactgtctaggtcagacccttgtattgatcggtaagacacacctcacaatggcgttgaccgtgattgcgggtctagtggttattttcatgatgttagggggtactttcctctactggagagggaggcgaatccagaataaaagagcaatgagaaggtatcttgaacgcggtgagtccattgaaccactcgacccctctgaaaaggcaaacaaggtattggcccgaattttcaaggaaactgagctaaggaagctgaaagttctggggtctggtgtttttggcacagttcacaaaggtgtgtggatacccgaaggggaaagtattaagatcccggtgtgtatcaaggttattgaggacaaaagcggcaggcagtctttccaggcagtgacagatcacatgcttgcaattggcagcctagaccacgctcacattgtgagattactgggcttatgcccaggatcttcactgcagcttgttactcagtatctgccactgggaagcctattggatcacgtaagacaacatagaggggctttggggcctcagctcctactgaactggggtgtgcagatagcgaaggggatgtactacttagaggaacacggaatggtccataggaatctggccgctaggaacgtgctgctgaagtcacctagccaagttcaggtggccgacttcggcgtagccgacctgctaccaccagacgacaaacagttgttatactccgaggccaagacccccattaagtggatggccttggagagcatacacttcggcaagtacacccatcagagcgatgtttggtcgtatggtgtgacagtgtgggagctgatgacttttggcgctgagccatatgcaggattaaggcttgcagaagtgccagatctgttagaaaaaggcgaacggctggcgcagccccagatttgtaccattgacgtgtacatggtaatggtgaagtgctggatgatcgacgaaaacatccgccctacatttaaggagctggccaatgaattcactcgcatggccagagaccctccgagatatctagttattaaaagagagtccggtcccggtatcgcccctggccctgaaccccatggattaaccaataagaaactggaggaggtggagcttgaaccagaactcgacttagacctggatctcgaggcggaggaggacaatcttgcaactaccacactgggtagcgctttgtcgctgccagtcggaaccctcaaccgaccaagggggtcccaatcacttttaagccccagctctggctacatgcccatgaatcaaggaaacctgggcgaaagctgtcaggagtcggccgtgtcaggctctagcgagaggtgcccaagacccgttagcttacacccgatgcctcgcggttgccttgcaagcgagtcaagtgagggacatgtgacagggtctgaagccgaattacaggaaaaggtatccatgtgtcgctcccggtcccggtctagatcccccagacctagaggcgactctgcataccactcccaacggcatagcttactcactccagtcactcccctgagccctcccggtctagaggaagaagatgtaaatgggtatgtgatgccagatactcacctgaaaggcacgccctcgtctcgcgagggtacactctcatccgttggcctatcctcggtgctgggaacagaagaagaggatgaggacgaggaatacgaatatatgaacagaagacgcagacatagtccgccacacccacctagaccctctagtctggaggagttggggtatgaatacatggacgtgggatcagacttgagcgcatctctggggtcaacccagagctgtcctctccatccggtccccattatgccaaccgccggaacaactcctgatgaggattacgagtatatgaaccggcaacgggatggagggggaccagggggtgactatgctgctatgggcgcttgtccggctagtgaacagggctacgaggagatgcgcgcttttcagggacccggacaccaggctccacacgtgcattatgccaggctgaagacactgaggagtctggaagccacagacagcgcttttgacaaccccgattattggcacagcagactgtttcctaaagccaacgcgcaacggacctag

SEQ ID NO: 31406 - DNA, 2100 bp, synthetic construct
  misc_feature 1..2100: note = Description of Artificial Sequence: Synthetic coding sequence
  source 1..2100: mol_type = other DNA
atggcactgaccgtgatcgctggcctcgtggttatttttatgatgctgggtggcaccttcctctattggcggggtagacggatccagaacaaacgtgcaatgcgcaggtacctggaaagaggtgagagcattgaacctttggacccatcggagaaggcgaataaagtgttagccagaatctttaaggagactgagctcagaaaacttaaggtgttgggatccggagtattcggaactgtccataagggcgtatggatacctgagggagaatcgattaagatcccggtgtgcataaaagtgatagaggacaagagtggacggcagagctttcaggcagttacagaccacatgctggcaattggaagcctggaccacgcccatatcgtgaggctgttgggactttgcccagggagctcgctgcagttggttacccagtacctcccactcggatcattgttagaccacgtgaggcaacatagaggggctttgggaccgcaattgctgttaaactggggcgttcagatagcaaaggggatgtactacttagaggagcacgggatggttcacagaaaccttgctgcccgaaacgtgttgctcaaatcaccgtcccaagtgcaagtggctgactttggcgtagccgacctgctgcccccagatgataagcaacttctatatagtgaggccaagacccccattaaatggatggcgctggagtcaatacacttcggcaagtatacccaccaaagtgacgtctggtcctatggtgttacggtctgggaactgatgacatttggcgcagaaccctatgcagggcttaggttggcagaggtcccagacctgctggagaagggcgagagactcgctcagcctcagatttgcacaatagacgtttatatggtcatggtgaagtgttggatgattgacgaaaatataagaccaacttttaaagaactggcaaatgaattcacaagaatggctcgcgaccctccacggtacctggtaatcaaacgagagagcgggccaggcatcgcccctggtccggaaccacatggcctgaccaacaagaagctggaagaagttgagctcgagcctgagttagacttggacctggacctggaggcagaagaggataatctggctacgaccaccctgggttccgctctttcccttccagtcgggaccttaaaccggcctagaggctcgcagagcctgctgtctccttcatccggctacatgcccatgaaccagggcaacctgggggaatcgtgtcaggagtctgcggttagcgggtccagtgagcgctgtccaaggccagtatctctccatccaatgcctcgagggtgtctcgctagcgaaagcagcgagggtcacgtgaccggaagcgaagccgagctgcaagagaaggtctctatgtgcagatccagaagcagatccagatcccctaggcccaggggcgattcggcttaccactcccagaggcattctctgctgacgcccgttacccccctttctccacctgggctcgaagaagaagatgtaaacgggtacgtcatgccagatactcaccttaaggggaccccctcgtccagagaagggaccctgagcagtgttgggctaagcagcgttttagggactgaagaggaagacgaagacgaggagtacgagtatatgaaccgacggcgacggcattccccccctcatcccccaagaccttcttccctggaggagctaggctatgaatatatggatgtggggagtgacttgagcgcctccctgggaagcacacagagttgccccctccacccagtacccattatgccaacggctggtactacgccagatgaagattatgaatacatgaacaggcagcgtgacggaggagggcctgggggagattatgctgccatgggcgcttgccccgcttccgagcagggctatgaggagatgagagcctttcaagggcctggccatcaggctccccacgtgcattacgccaggttaaagacacttcgctcacttgaggctacggactcagcttttgataatccggattattggcattctcgcctgttcccaaaggcaaacgctcaaaggacctag

SEQ ID NO: 31407 - DNA, 381 bp, synthetic construct
  misc_feature 1..381: note = Description of Artificial Sequence: Synthetic coding sequence
  source 1..381: mol_type = other DNA
atgcgggctaatgacgctctgcaggtactgggcctgctgttctcattggcaagaggatcagaggtcggtaatagccaggctgtgtgccccggtaccctgaacggactgagcgttactggagacgctgagaatcaataccagactctgtacaagttatacgaaaggtgcgaggtcgtgatgggcaacctagagattgtcttgaccggccataacgccgatctgtcattccttcaatggattcgggaggtgacaggctatgtactcgttgccatgaatgaattctcaacgctcccattaccgaatctgagagtggtgcgaggaacccaggtgtatgacggcaaattcgccatcttcgtgatgcttaactacaataccaattag

SEQ ID NO: 31408 - DNA, 2766 bp, synthetic construct
  misc_feature 1..2766: note = Description of Artificial Sequence: Synthetic coding sequence
  source 1..2766: mol_type = other DNA
atgcgggcaaacgacgcccttcaggtgctaggactgctgttctccctggccagagggtctgaggtcggcaattcccaagccgtttgcccaggtaccttaaacggacttagcgtcaccggggatgctgaaaaccagtatcagacattatataagttgtacgagcggtgcgaagttgttatgggaaaccttgaaatcgtgttgaccggccataatgccgacctctccttcttgcaatggattagggaggtgactggttacgtgctggtagccatgaatgagttcagcactctacccctccccaatttgagagttgtgcggggaacgcaggtgtacgatggtaagttcgccatcttcgtgatgctcaattataatacaaactccagtcatgctttgcgacagctgcgcctgacacaactcacagagatactgagtggtggcgtttacatcgagaaaaatgataagctctgtcacatggacacaatcgattggagggacatagtcagggacagggatgctgagattgttgttaaggataatggacgcagctgccctccttgtcatgaagtctgtaagggtcggtgttgggggccaggaagcgaggactgtcagactttgactaaaaccatttgtgcccctcagtgcaacggacactgctttgggcctaatcctaatcagtgctgccacgatgagtgtgccggagggtgttcaggcccacaagatacagactgcttcgcttgtcgacattttaacgactcaggagcgtgtgtgccccgatgcccacagcccctggtctacaataagctcacattccagctagaaccaaatcctcatacaaaatatcaatacggcggagtgtgcgtagcaagctgcccacataactttgtggtggaccagacatcttgtgttcgggcatgtccacccgataagatggaagtggacaaaaatggactgaaaatgtgcgaaccctgcggaggcctctgtcccaaagcgtgcgagggcacaggatctgggagccggtttcaaacagttgactcctccaacatcgacggctttgttaattgcactaagatattaggcaatctggactttcttatcactggtctcaacggcgacccttggcataagattccagcactggaccctgagaaactcaacgtgtttcggacagtcagggaaattaccggttacctcaatatccagtcttggcctcctcacatgcacaacttctctgtgttcagtaacctgaccacaattggcggacggagcctgtataatagggggttctcactcctgatcatgaaaaacctaaatgtcacatctctcggattcaggtccctgaaagaaattagcgccggaagaatttatataagcgcgaaccggcagctgtgttaccatcatagtctgaattggactaaagtgctaagaggccctaccgaagagcggctagacattaaacataatagacctagacgggattgcgtagcggaggggaaggtgtgcgacccattatgcagcagcggcggatgttggggacccggtcctggacagtgtctttcatgtcggaactattccagagggggtgtgtgtgtgacacattgcaattttttgaacggcgaacctcgagagtttgcacacgaagccgagtgtttttcctgccaccctgagtgccagccaatggaaggtaccgccacatgcaacgggagcggaagtgacacatgcgctcagtgcgcccactttcgtgacggtcctcactgcgttagcagctgcccccatggcgtgctgggcgctaaagggccaatatacaaataccccgacgtgcagaatgagtgtaggccatgccatgagaactgtacccaaggatgcaagggccctgagctgcaggattgcttgggccagaccctagttctgatcggcaagacacatctgacgatggctctcacggttatcgcgggactcgttgtcatcttcatgatgttaggaggcaccttcttatattggaggggtcggagaatccagaacaaacgtgcaatgcgtcggtacctggaacgtggggagtcaatagaacctctggatcccagtgagaaagctaataaggtgctagccaggatattcaaagagactgagttacgaaaactcaaagtcctcggtagcggggtatttggaacagttcataagggggtgtggatccccgagggagagtcaataaagatacccgtgtgtataaaagtcattgaagacaagtccggaaggcagtcatttcaagccgtgaccgaccacatgttagccattgggagtcttgaccacgcgcatatcgtgcgcttactcggtctttgccccggtagcagtcttcagttggtcacacagtatctgcctctcgggtctttgctggatcatgtgcggcagcatagaggcgctctgggacctcagcttctactgaattggggggtgcagatcgcgaagggaatgtattacctggaggagcacggcatggtccaccggaaccttgcagccaggaatgtgctgctcaagagtccttctcaggttcaggttgccgatttcggcgttgccgatttgcttccccctgatgataagcaactcctctactccgaggcaaagacgcccatcaaatggatggcccttgaatcaattcactttggtaagtatacgcaccaatccgatgtctggtcctacggtcaatgtatatggatgccatcgttacctagtcttgccccagtatcaaacctgccatttgagactccttcgtag

SEQ ID NO: 31409 - DNA, 10191 bp, synthetic construct
  misc_feature 1..10191: note = Description of Artificial Sequence: Synthetic coding sequence
  source 1..10191: mol_type = other DNA
atgttcattaatatcaagagcatcttgtggatgtgctccacactgatagtgacccatgcactgcataaagtgaaggtcggaaagtccccaccggtgagaggctcgttgtccggtaaagtgtcattgccctgccatttctcaacaatgccaaccctgccaccatcatacaatacctccgagttcctccgcattaagtggagtaaaatcgaggtggataagaacggcaaagatttgaaggagacaaccgtcctcgtggcgcagaacggtaatattaaaattggtcaggattacaagggtcgtgtcagcgtgcccactcaccctgaagcggtgggagacgcgtcactaaccgtggtgaaactgctggctagcgacgcaggtctttatagatgcgatgtgatgtacggtatagaggatacccaggacacggttagcttgactgtggatggagtcgtctttcactacagagcagcgacaagcaggtacacgctcaactttgaggcagcacagaaggcctgcctagacgtcggtgctgtcatcgcaaccccggagcagctctttgcggcatacgaggacggattcgaacagtgcgatgccggttggctcgccgatcagactgtgcgatatcccattagagcccctcgcgtcggctgttatggggataagatgggtaaagcaggcgtgcgcacatacggctttcggagcccccaggagacttacgatgtgtactgttacgtcgatcacctggatggcgatgtgttccatctgaccgtaccctccaagtttacttttgaagaggccgcaaaggagtgtgaaaatcaggatgctcgcctggccactgtgggggaactgcaggctgcctggagaaatgggttcgaccaatgcgactatgggtggctcagcgacgcctcagttaggcacccagtgactgtagccagggctcagtgcggcggaggcttactgggcgtgcgaaccctctatagattcgaaaaccagaccggctttccacccccagattcccggtttgacgcctactgtttcaaacccaaggaagcgacaactattgatctgagtatattggccgagactgctagcccgagcctaagcaaagaaccccaaatggtgagcgatcgaacaacacccatcattccacttgtcgatgagttgccagtcatccccacagaatttccaccagtgggaaacatcgtttcttttgagcaaaaagccactgtacagccacaggcaatcactgattccctggcaacgaaactgccaacacccaccggcagcactaaaaagccgtgggacatggatgactactcccccagtgcatctggcccactgggcaaactggacatcagcgaaattaaggaggaggtcctgcagtccacgacaggcgtttctcactacgccaccgactcatgggacggggtagtggaagataagcaaacccaggagagcgttacccaaattgagcagatagaggtgggcccactagtgacctccatggaaattcttaagcatattccatctaaggagttccctgtgacagagacccctctggttactgctcggatgatacttgagtctaagacagagaagaaaatggtgagcaccgtatctgaactggtgacaactggacactacggatttacactcggcgaggaagacgacgaggaccggaccctaaccgtcggctctgacgagagcacactgatcttcgatcagataccggaggtgatcacagtgagcaaaaccagcgaggacaccatccacacccaccttgaggatctcgagtctgtgagcgcatctactacagtctcaccactgatcatgcccgacaacaatggctctagcatggacgactgggaagaaaggcaaacatccggacggattactgaagaatttctgggtaagtacctttctaccaccccgtttccaagccagcatcggaccgagattgaattgttcccatacagtggagacaagattctcgtcgagggtatcagcacggtgatctacccctcgcttcagacggaaatgacacatcgtagagaacgcaccgagaccctcattcccgagatgcgaaccgatacctacaccgacgaaatacaggaagagattaccaagagccccttcatggggaagacggaagaagaggtattctccgggatgaagctttccacctctctgtctgagcctatccacgtcacggaatcatcagtcgagatgaccaaaagttttgattttccgacactcataacaaaattgagcgctgaaccaactgaagtcagggatatggaagaagatttcacggcgacaccaggaaccacgaaatatgacgagaacataacaaccgtgctgttagcgcacggaacccttagcgtggaggccgcaactgtgtccaaatggtcttgggacgaggacaatactactagcaaacctcttgagagcaccgagccctcggcctcgtccaagctgccgcctgctttgctgacaacagtgggaatgaacggtaaagataaggacatcccttcatttaccgaggacggggcagatgaatttactctgataccggatagtacacagaaacagctggaggaggtcactgatgaggacatagcagcccacgggaagtttaccatcagattccagcctaccacaagtacaggcattgcggaaaagtcaactttgcgagattctactaccgaggagaaggtgccccctattacaagcacagaggggcaggtgtacgccacaatggagggcagcgccctgggtgaagttgaagatgtggacctgagcaagcccgtaagtactgtcccccagtttgcacatacatcagaagtggaggggctggctttcgtgtcatactcgtctacccaagagcccaccacctatgtcgattcctctcatacgatcccactcagcgtgattcccaagaccgattggggggtgctagtgccctcagtgcccagcgaagacgaagtgcttggcgaacccagccaggacatactggttatcgatcagacaagactggaggccaccatcagccctgagaccatgaggacaaccaaaataaccgaaggtactacccaggaagagtttccgtggaaggagcaaacagccgagaagcctgtgccagccctgtcttctacagcttggacgccaaaggaagcggtcacacctcttgacgagcaggaaggggatggatctgcatacaccgtgagcgaggatgagttactgacaggttctgagagggtccctgtactcgagaccacccctgtgggcaagatagatcacagcgtaagttaccctccaggcgctgtaacagagcacaaagtaaagactgacgaagttgtcacattaacaccgcgaatcggccctaaggtgtctctgtcccccggaccagagcagaaatacgaaacggagggatcctcaaccaccgggtttacctccagcctgtccccttttagcacccacataactcagctgatggaggaaacaaccactgaaaagacgtctctggaggacattgacttgggctctgggctgtttgaaaagcccaaggccaccgaactgatagagttttccaccattaaagtgactgtgccatctgacatcactaccgcattctcttcagtggataggctgcatactacttccgcatttaagcccagttccgcaatcacaaaaaaaccgccactaatcgacagagagcctggcgaggagactacttccgacatggtgattattggtgagagcactagtcacgttcccccaactactttggaggatatagtggcaaaggagactgagacagacattgatcgggaatatttcacaacatcttccccccctgctacccagcccactcggccaccaactgtcgaagataaggaggctttcggccctcaggccctctcaacgcctcagccaccagcctccactaagtttcatccagatatcaacgtgtacattattgaagtcagagagaacaaaaccggtaggatgtctgatctgtctgttattggacacccaatcgattctgagtccaaagaggatgaaccttgcagcgaagaaactgaccccgtccatgatctgatggcagaaatcctgcccgaatttcccgacataatagagatagacctctaccactctgaggagaatgaggaggaagaagaggagtgcgcaaacgccacagacgtgaccaccacaccctccgttcagtacattaatggaaaacacttggtcacaacagtcccgaaagatcctgaagcagccgaggcaagacgcggtcaattcgaaagcgtggctccttctcagaacttcagtgactcatctgaaagcgacactcacccatttgtcatagcaaagaccgagctgtccaccgccgtacagccgaacgaatctaccgagaccaccgagtccctggaggtgacctggaagcccgagacctaccctgaaacctccgaacacttttcagggggtgaacccgatgtcttcccgacagtgcccttccacgaggagtttgagtcggggacagctaagaagggggctgagtcagtaaccgaacgtgacactgaggtgggacatcaggctcacgagcacaccgagcccgtaagcctttttcccgaggagagtagtggagaaatcgcaatagaccaggaatcccagaagattgcattcgctagagccactgaggtgacattcggtgaggaggtggaaaaatctactagtgtcacctatacacctacaatcgtgccctccagcgcgagcgcatacgtgagtgaggaagaagccgtaacactgatcggaaacccctggcccgacgacctgctctccactaaggagagttgggtggaggctacacccaggcaagtagtcgagctgagcggaagcagttccattcccatcaccgaggggtctggagaagctgaggaggacgaggataccatgtttacgatggtgaccgatctgtctcagaggaataccactgacaccctcatcacacttgacacctcaaggattatcacagagtcattcttcgaagtcccagccacgacaatctacccagtatccgagcagccatcagccaaagtggtcccaactaagtttgtgtccgagactgataccagcgagtggatctcatcaaccaccgtggaggaaaaaaaacgtaaggaggaagaaggaactactggtaccgcatccacttttgaggtctattccagtacacaaagatcggaccaattgatcttgccatttgagctggagagccccaatgtggcgacgtcatcagactccggcacccgcaagagtttcatgagcctgactactcctacgcagagcgagagggagatgactgattccacgcctgtgtttaccgagactaacacgctggagaatctgggagctcaaacgactgaacatagctccatacaccagcccggagttcaagaggggctcacgacattgcctcgctctccagcctctgtgtttatggaacaggggtctggtgaggctgctgctgatcctgaaaccactacagtctcatctttctccctcaacgttgagtacgccattcaagccgagaaagaggtggctggaactctgtcacctcatgtggagactacttttagtacagagcccactggcctggtcctcagcactgtcatggacagggtggtcgctgaaaatatcacacagacatcacgcgagatcgttattagtgaaaggctcggagagcccaattacggtgctgagatcagaggcttttccacggggtttccactagaagaagatttctccggtgatttcagagaatattccaccgtgtctcaccccattgccaaagaggaaaccgtcatgatggagggaagtggggacgcagcctttagggacacgcaaacatcaccatctaccgtccctacctccgtgcacatatctcacattagtgacagcgaaggaccaagcagcacaatggtctctacaagtgccttcccctgggaggaatttacgagttccgcagaggggtcaggcgagcagctcgtgacagtctcttcaagcgtagtgcccgtgttgcctagcgctgttcagaagttctctggtacagcatcaagcattatcgacgagggcctgggtgaggtgggaactgtaaatgagatcgatcgacgttctacaattctcccgacagcagaagtggagggtacaaaagcccctgtagaaaaagaggaggtcaaagtgagtggaacagtgagcaccaactttcctcagaccattgagccagctaaattgtggtctaggcaggaggtaaaccctgtgcggcaggagatcgagagtgagaccaccagcgaagaacaaatccaggaagaaaaatctttcgaaagcccacaaaacagcccagcgaccgagcagaccatcttcgatagccagacctttacagagaccgagttaaaaacaactgactattccgttctgacgacaaaaaaaacatatagtgacgacaaggaaatgaaagaggaggatacaagtctcgtgaatatgtctactcccgatcccgacgccaacgggttggagagttacactactctgcccgaggctacagaaaaatcccatttcttcttagccaccgcactcgtcacagaaagtattcctgctgagcacgtggtgaccgacagccccattaagaaagaggaatctactaaacacttccccaaggggatgcgccctaccatccaggagtcagataccgagctcctgtttagcggtctgggcagcggtgaggaagtgctgcccaccctacctactgaatctgtcaatttcacagaggtggaacagataaacaataccctgtaccctcatacctcccaggtcgaatcgacctcctcagataaaatcgaagactttaatcgtatggaaaatgtcgcaaaagaggttgggcctctcgttagccagaccgacatattcgagggctcaggctcagttacttcaacaactttgattgagatactttcggacaccggcgcagaaggccctaccgttgccccactgccattctcaaccgatattgggcatcctcagaaccaaaccgtacgctgggcagaagaaatccagacgtcgcgccctcagactataacagagcaagacagcaacaagaatagctcaacggcagagatcaacgagactaccaccagtagtacagattttctcgcaagggcctacggttttgagatggccaaagaatttgttactagtgcacccaaacctagcgacctctattacgaaccctctggcgaagggtccggtgaggtggacatcgtggacagcttccacacttccgctaccacccaggccacgcgccaagaatctagcactacattcgtgtctgacgggtcactggaaaagcacccagaggtaccatcagcaaaggccgtgaccgcagacggattccctacagtatccgttatgctcccacttcactccgaacagaacaagtcctcacccgaccctaccagcaccttgtccaatacagtgtcctacgagcgcagcactgatggatcctttcaagataggttccgggagtttgaggattctaccctgaagcctaatcgaaaaaaacccaccgagaacataattatagacctggacaaggaagacaaagatctgattctgacaattacggagtccactatcctggagattctccccgaactgaccagtgataaaaatactatcatcgatatagaccataccaagcctgtttacgaggacattctcggaatgcagacagacatcgacaccgaggtccccagtgaaccacacgattctaatgatgagtccaatgacgatagcacccaagtccaggaaatctatgaggcagctgtcaacctcagcctcacagaagagacctttgagggctctgctgatgtactggcaagttacacccaggccacacacgacgagtcaatgacctatgaggatagaagccaactggaccacatgggcttccacttcaccacagggattcctgccccatctacagaaaccgagttggacgttctgctgccaaccgcgactagcttgcctattcctagaaagtccgccaccgtcatccctgaaatcgaaggaattaaagccgaggccaaggcactcgatgatatgtttgaaagctcgactctctctgacgggcaggctatagccgaccaatctgagatcatccctaccttgggccagttcgagcggactcaggaggagtacgaggacaagaagcacgccggaccgtcttttcagcccgaatttagctccggcgctgaggaagctctggtcgatcacaccccttatctcagtatcgccactactcacctgatggatcagagcgtcaccgaggtgcccgacgtgatggaaggctctaaccccccttactacaccgacaccaccctagctgtctctacttttgccaagctttcgagccaaacgccttcctctcctctgactatctattcggggtctgaagcatctggtcacacagagattcctcagccttccgcactgcccggaatcgacgtgggatcgagtgttatgtcacctcaggacagtttcaaagagatccatgttaatatcgaagctacttttaagccatcctccgaggagtatctgcatattacagagcccccatcacttagccctgacacaaagctcgaaccaagcgaggatgacggaaagcctgagctgctcgaggaaatggaggccagtcccaccgaactcatcgccgtggaaggcacagaaatactgcaggatttccagaataaaacagacggccaggtttccggtgaggctataaagatgttccccacaatcaaaacgcccgaagcaggcacggtcattacgacagccgacgaaatcgaactagagggagcaacgcagtggccccactctacatcagcctccgccacctatggagtagaggccggagtggtgccatggctgagccctcagacctctgaacgccctactttatcttcatctcctgagattaatcctgagactcaggccgctctgattcgcggtcaggatagcacgattgctgccagcgagcaacaggtggccgcaaggattctggatagcaatgaccaggccacagtgaatccggtcgagttcaacacagaagtggctacacctccattctcacttctggaaacatctaatgaaacagactttctgatcggaattaacgaggaaagtgtggaagggactgctatttacctccctggccctgatagatgtaagatgaatccctgtctcaacgggggaacatgctatcccacagaaacctcctacgtgtgtacctgcgtgccgggatattcgggtgaccagtgtgagttggacttcgatgaatgtcactcgaacccctgtaggaatggtgccacatgtgtggatggctttaacaccttcaggtgcctttgcctgccttcctacgtaggggcactttgcgaacaggacaccgaaacgtgcgactacggatggcataagttccaaggccagtgctacaagtacttcgcgcaccgacgcacctgggacgcggcagaaagggaatgtcgactacagggggcacacttgacaagcatattgtcccatgaagagcaaatgttcgttaaccgtgtaggacacgactaccagtggatcggacttaacgacaaaatgttcgaacatgatttccgttggactgacggcagcactctccagtacgagaattggcgacctaaccagccggattccttcttctccgctggtgaggactgtgtcgtcataatttggcacgaaaacggtcaatggaacgatgtgccttgcaattaccacttgacctacacatgcaagaaagggacagttgcgtgcgggcagccccctgtggtggagaacgctaaaacctttggcaagatgaaacctagatacgaaataaacagcctcattcgctaccactgcaaggacggttttatccaacggcacttgccaaccattaggtgcctagggaacgggagatgggccatacccaaaattacatgcatgaatccttcagcctatcagcgaacctattctatgaagtatttcaagaattccagctcggccaaggataatagcattaacacatctaaacatgaccacaggtggtcccgccgatggcaagagtccaggcgctaa

SEQ ID NO: 31410 - DNA, 4928 bp, synthetic construct
  misc_feature 1..4928: note = Description of Artificial Sequence: Synthetic coding sequence
  source 1..4928: mol_type = other DNA
atgtttataaacatcaaatctatcctgtggatgtgctcaacccttatagttacgcacgcactacataaagtgaaggtgggtaagtcaccccctgtgagggggagtctctcggggaaagtatccttgccttgccatttctctaccatgccaaccctcccacccagctacaacacgtccgaattcctgcggatcaaatggtccaagatcgaagtagataagaatgggaaagatttgaaggaaacaacagtcttggtggcccagaacggtaacattaagatcggccaggactacaagggacgtgtgtccgtgcctacacaccctgaggcggtgggcgacgcctctttgaccgttgttaagttgctggcctctgatgctggtctttatagatgtgacgtgatgtacgggatcgaagatacacaggataccgtaagcctcactgtagacggcgtggtgtttcactatagggctgctactagcaggtatactctgaacttcgaggccgcacaaaaagcatgcctcgatgtgggagccgtgatcgctactcccgagcaacttttcgccgcttacgaggacgggttcgagcagtgcgacgccggttggctggccgatcaaactgttcggtatccaattcgggctcctagagtgggttgctatggtgacaaaatgggaaaagccggagtgcgcacctacggattcaggagcccacaagaaacctatgacgtttattgttacgtggaccatttagatggcgatgtgtttcacctcaccgtcccctcaaaattcacgttcgaggaggctgccaaggaatgtgagaatcaggatgcccgactggccacagttggggaattgcaggcagcctggcgcaacggcttcgaccagtgcgattatggttggctgagtgatgcaagcgtgagacaccccgtgactgtggcccgtgcccagtgtgggggaggcctcctgggtgttcggactctataccgttttgagaaccagaccggttttcctccgccagattctcgctttgacgcgtattgttttaaaccaaaagaagccacaactattgatctgagcatactcgcggagacagcttcaccttccctcagtaaagagcctcaaatggtgtctgaccggactacccccatcattccactggttgatgaactgcccgtaattcctacagagttccccccagtgggaaacatcgtctcattcgagcagaaagccacggtgcagccccaggcaattaccgattcccttgcgactaagctaccaacgcctaccggatccactaagaagccatgggatatggatgactacagcccatctgcctcaggccctctgggaaagttagatatcagcgagataaaagaggaagtcctgcaaagcaccacaggagtgtcccactatgcaaccgactcttgggatggcgtcgtggaggataaacagacccaggagagtgtcactcagatagagcaaattgaggttggcccactggtcaccagcatggagatcctgaaacatatcccctccaaggaatttcctgttacggagacacctcttgtcaccgccagaatgatcctggaaagtaagacggaaaagaagatggtaagtacggtgtctgaactggtgacgaccggccattacgggtttacccttggagaggaggatgacgaggataggaccctgacagttggttccgacgaatccaccctgatctttgaccagattcccgaggtgatcactgtgtccaagacttccgaggacaccatccatacacaccttgaagatttagaaagtgtttccgcctcaaccactgtcagtcccctcattatgcccgacaacaacgggagctctatggacgattgggaagagcggcaaaccagtggcaggattacagaggagttcctgggtaaatacctgagcacaaccccattcccgagtcaacaccgcacagaaatcgaactcttcccctactccggcgacaagattttggttgagggcatctcaaccgtgatctatccttcgctccagaccgaaatgacacatcgccgtgaacggacagagactctgataccggagatgagaactgatacctacaccgacgaaattcaggaagaaatcacaaagagtcccttcatgggtaaaaccgaagaagaagtgtttagcgggatgaagctctctacttcgctgtctgagccaatccatgtgactgaaagctctgttgaaatgacaaagagttttgatttccccaccctgataaccaaactgtccgcggagccaaccgaggtgcgggatatggaagaagactttacagcaactccaggaacaacaaagtacgatgagaatattacaacagttttactggcacacggcacgttgtccgttgaggctgcgacggtttccaaatggtcatgggacgaagacaacaccacttccaagcccttggagtctacggaaccttccgcctcctcgaagcttcccccagccctactaacaacagtgggaatgaacggtaaggataaagacataccttctttcacagaagacggggcagatgagtttactctaatcccggacagcacgcagaagcagctggaagaggtcacagacgaggacattgccgctcacggcaagttcacaatccgatttcaaccaactacatccactggcatagcggaaaagagtacattgcgagacagtacaactgaggaaaaggtccccccaattacatccacggagggacaagtttacgccacaatggaaggatccgccttgggcgaggtggaagatgttgacctgtctaaacccgtgtccacagtcccccagttcgctcatacgagcgaagtcgaaggccttgcattcgtaagctactcgagtacacaggaacctacaacatatgtcgatagcagccacacgatccccttgagtgttattcctaaaacagactggggagtcctggttccgtcagtcccctctgaagacgaggtccttggcgaaccttcccaggacatcctcgtgatcgaccagacccggttggaagccacaataagccctgagacaatgagaacaactaaaataacagagggtacaacccaggaagagtttccttggaaggaacagaccgcagaaaaacctgtacccgctctgagttctacggcgtggactcctaaggaagcagtgacacctctcgacgagcaggaaggggacggtagcgcttacacggtcagcgaggatgaactgctgaccggatccgagagggttcccgtcctcgagacgacacccgtcggcaaaattgatcacagcgtctcttatccaccgggagcagtaactgaacacaaagtcaagacagacgaagttgtgactttgactccaagaattgggcctaaagtgagcctttcgccaggcccagaacaaaaatatgaaactgaaggctcctcaacaaccggctttacctccagcctttctccattctcgactcatattacccagcttatggaagaaaccaccacagagaaaacttctctggaagacatcgacttgggctccggcctctttgagaaacccaaagcaacagaactgattgaattcagcacgataaaggtcacagtacctagcgatataacaacagcattcagctctgtggataggctccacaccacctccgctttcaaaccttcctccgccattactaaaaaaccccctctaattgaccgtgagccgggagaagaaacaacatcagatatggtgatcattggtgaatctacctcgcacgtccccccaacgactctcgaggatattgttgcaaaagagaccgagactgatatagatcgcgagtatttcacaacaagcagtccacctgccactcagcccacgcggcctcccacggttgaggacaaggaggcgtttggaccacaggccctgtccacgcctcagcctccagcctcaacaaaattccaccctgacatcaacgtatacattattgaagtgcgagagaataagaccggcccagacagatgcaagatgaacccatgtctgaacggtggaacatgctacccgacggagacgagttacgtttgcacctgtgttccaggatactctggagaccagtgcgagctggacttcgacgagtgccattccaatccatgtcgcaatggagctacatgcgtagatggttttaatacttttaggtgcctttgcttgccctcatacgtgggcgcattgtgtgagcaggatacagagacctgtgattatggatggcacaagtttcaaggacagtgctataagtattttgctcataggcgaacgtgggacgctgctgagcgtgagtgccggctgcagggagcccacctgactagcatcctgagccacgaagagcagatgtttgtgaatcgagtagggcacgattatcagtggatcggcctgaatgacaagatgttcgaacacgacttcaggtggacagatggttctaccctccagtacgaaaactggcgtccaaaccagcccgacagcttctttagtgccggagaggactgtgtagtcatcatttggcacgagaacggacagtggaacgacgtcccatgtaactatcacctgacatatacatgtaaaaaggggactgtggcctgtggtcaaccccctgtggtggagaatgcaaaaacctttggcaagatgaagccaagatatgaaatcaattcactgatcagataccattgtaaggacggattcattcagcgtcatctacctaccattaggtgtctggggaacgggaggtgggccattccaaagattacatgcatgaacccctccgcttatcaacgtacctattctatgaaatattttaagaactcaagctcagccaaagataatagcattaacacctccaagcacgatcaccggtggagtcggagatggcaagaaagcagaaggta

SEQ ID NO: 31411 - DNA, 7229 bp, synthetic construct
  misc_feature 1..7229: note = Description of Artificial Sequence: Synthetic coding sequence
  source 1..7229: mol_type = other DNA
atgttcataaacattaaatctattctgtggatgtgcagcacactaatcgtgacccatgctctgcacaaggttaaggtaggtaagtcccctcctgtccgcggatcactgagcgggaaggtgagcttaccctgtcatttttccaccatgccgacgttgcctcccagttacaacacgagcgaattcttgaggatcaaatggtctaagattgaggttgataaaaatgggaaagatcttaaggaaaccacagtgctcgttgcccagaacgggaacattaagataggccaagactacaagggaagagtcagcgtgccgacccaccccgaggcagtaggcgatgcctctctgactgtggtcaagttgctcgctagcgatgctggtctatacaggtgcgacgtcatgtacggcatcgaggacactcaggataccgtgtctctcacagttgacggagtggtattccactatagggcagctacctcacgctataccctgaactttgaggccgctcaaaaggcatgcctggacgtgggggcagttattgcaactcccgagcaactgtttgcggcttatgaggatggcttcgagcagtgcgatgccggttggcttgccgatcagaccgtaagatacccaatccgggcacctcgcgtcggttgttacggagataagatgggtaaggcaggggttagaacttatggtttcagatcccctcaggagacatatgatgtctactgttatgtcgaccatctggacggggatgtgttccacctcacagtcccttctaaattcacctttgaggaagctgccaaagagtgtgagaatcaggatgcgagactggctactgtgggagagttgcaggcggcttggagaaacgggttcgaccagtgcgactacggttggctctctgacgcctctgtgaggcatccggtgactgttgctcgggctcaatgcggcggagggctgttgggtgtccgaaccctctatagattcgagaatcagacaggattcccacctcctgattcaagatttgacgcttactgttttaagcgaaggatgtctgacctgtctgtgattggacaccctatagactcagagtcaaaggaagacgaaccctgcagcgaggaaactgacccagtccatgacctcatggctgagattctgcccgagtttcccgacatcatagaaattgatctctatcactctgaagaaaacgaagaagaggaggaggagtgcgctaacgcaacagacgtgaccacgacaccgagcgttcaatatattaatggcaaacaccttgtgaccaccgtgcccaaagatcctgaagcggcagaggcccgacggggacagttcgagagtgtggcaccaagccagaatttttctgattcctccgagtctgatacgcatccattcgttattgctaaaacagaactctctacagccgtccagcctaatgagagcacggagacgaccgaaagcctggaggtgacatggaagcccgaaacctaccctgagactagcgaacacttctctggcggagagccagacgtgttcccaactgtcccctttcacgaagagttcgagtctggaacagccaagaagggagccgaaagcgtgactgaacgggatacagaagtcggacaccaggcccacgaacatactgagccagtgagcctgttccccgaggagtctagcggggagatcgcaatagaccaggaatcacagaagattgcctttgccagggccacagaggttacgtttggcgaggaagtggagaaatctaccagcgtcacttacacgcccacaatcgtgccctcctccgcctcggcgtatgtttcagaggaagaggctgtgacactaatcgggaacccatggcccgacgacttactctccactaaggagtcgtgggtagaggctaccccgagacaggtcgtggagctttcggggtctagttctatccccataacggagggatcaggcgaggcagaagaagatgaggacacaatgtttaccatggtgaccgacctgtcccaacgcaataccacggatactctgatcacgctagacacttcacgcatcatcacggagtctttctttgaagtacccgctaccacgatttatcccgtgtccgaacagccctcagcgaaggtggtgcctaccaagtttgttagcgagaccgatacaagcgagtggatcagctctactactgtggaggaaaagaaacgaaaagaggaagaaggtacgacagggacagcctcaacctttgaggtctatagtagtactcagcgcagcgaccagttgatacttccatttgaactggagagtccaaatgtcgctacatccagtgattccggaacacggaagagcttcatgagtcttactactcctacacagtcagaacgcgaaatgacggattctactccggtgttcactgagacaaacacactggagaatctgggcgctcaaaccaccgagcacagctccattcaccaacctggggtccaggaaggcctgactacccttcctcgctcccccgcatcggtatttatggagcaggggagcggcgaagcagcagctgaccccgaaacaacaacagtgtcctccttctcccttaatgtcgagtatgccatccaagccgaaaaagaagtagccggtactctgagcccccatgtggaaaccacattttccactgaacccacgggcctagttctttccactgtaatggacagggtggtggctgagaacattacccaaaccagtcgtgaaatcgtgatttccgagcggctgggggagcccaattacggcgctgagatcaggggcttttcaaccggctttccactggaggaggacttttcaggtgacttcagggagtacagtaccgtatcgcaccccatagccaaggaggagacagtgatgatggaaggctcaggggatgccgctttccgggacacccaaacctccccttctacagtcccaaccagtgtccacatctcgcacatttcagattctgagggcccaagtagcaccatggttagtacatctgctttcccatgggaagaattcacttctagtgccgaaggtagcggggagcaactggtgactgtgagcagttccgtagtccccgtgctgccttctgccgtgcagaaattcagtggaactgctagctcgatcatagacgagggactgggcgaagtgggtacggttaacgaaatcgacaggcggtcaaccatactcccgaccgccgaagttgaaggcaccaaagcacccgtcgaaaaggaggaggtgaaggtcagcgggactgtgagcactaactttccgcagaccatcgaacccgctaagctctggtcgcggcaggaggttaacccagtgagacaagagatcgagtctgagacaacatccgaagagcagattcaggaagaaaagtcgttcgagtcacctcaaaactcacctgcaaccgagcagactatcttcgattcccagaccttcactgagactgagctgaaaacaacagattatagcgtgcttacgaccaaaaagacatattcagacgacaaagaaatgaaggaagaggatacaagcctggtgaacatgagtacacccgaccccgacgctaacggactggagtcatatacaactctgcccgaggcgactgaaaaatctcatttctttctggccactgccctggtcaccgaaagcattcctgctgaacacgtggtcaccgattctccaatcaagaaggaagaatcaactaagcacttccctaagggaatgagacccactatacaggaaagcgacacagaacttctgttttccggactgggaagcggcgaagaagtgcttcccactctacccaccgagagcgtcaacttcaccgaagtggagcagattaacaacacactgtacccacatacatctcaggtggagtctacaagttcagacaagatcgaagactttaatcgcatggaaaacgtggccaaagaggtgggacccctagtgagccaaactgatatctttgaaggttcaggctctgtgacgtcaactaccctgattgagatcctgtcggacactggcgctgagggccctactgtggcacccttaccgttttctactgatattggtcatccccaaaaccaaactgtccgctgggctgaagaaatacagacatccagacctcagactatcacagaacaggactcaaacaaaaattctagcaccgcagaaatcaatgaaactacaacctcctcgactgattttctcgccagggcctatggatttgaaatggccaaggaattcgtcacctctgcccctaagccctctgatttatattatgagcctagcggtgaggggtccggcgaggtggatatagtcgactcattccatacttctgccaccacccaagccacccgccaggaaagctctacaacttttgtgtctgacggaagcctggaaaagcatcccgaggtcccttccgctaaggcagttaccgccgacggctttcctactgttagcgtgatgctgcccctgcacagcgagcagaacaagagttctcctgaccctacgagcaccctttcgaatacggtctcctacgaacgctctactgacggttcctttcaggacaggtttagagagttcgaggactctaccttgaagcccaatcgtaagaagccaactgaaaacatcatcatcgacttagacaaggaggacaaggacctgatcctcaccatcacagagtccacaatcctcgagatcttacctgagctgaccagcgacaaaaataccattatcgatattgatcacacaaagcctgtctatgaggatatcctcggtatgcagaccgatattgacacagaagtgccctctgaaccccacgattcgaatgatgagtccaacgatgatagcacccaggtgcaggagatttacgaagccgcagtcaatttatccctgacggaggagaccttcgaggggtctgcagatgttctcgcttcttacacccaggctactcatgatgagtctatgacgtacgaagacagatctcagctggaccacatgggcttccactttaccaccggaattcctgcaccatccacagaaactgaactggatgtcctattaccaacagccacatccttacccatccccagaaaatctgctaccgtgatccccgaaatagaagggatcaaagccgaagccaaggctctggacgacatgttcgaatcctctacactgagtgatggtcaggctatcgccgaccagtcagagatcatccctactctggggcagttcgaacggacccaggaggaatacgaggataagaagcatgccggaccgtccttccagcccgaattttcatccggagccgaggaggctttggtagaccacaccccctatttgtcaatcgctacaactcacctgatggatcagtccgtgacagaggtgccagatgtcatggaggggtccaatcctccatactacactgacaccacgctggctgtcagtacgttcgctaaattgtccagccagacaccttcctctcctctgacgatctactcaggttctgaagccagtggccacacagaaataccacaaccgagtgccctgcccggtattgacgttggcagtagcgtgatgagcccccaggacagttttaaggaaattcatgttaatattgaggctacctttaagccgtcctccgaggagtatcttcacatcaccgaacctcccagtctcagtcccgatacaaaactggagccatctgaagatgatgggaagcccgaactgctcgaagagatggaggcctcccccaccgagctcatcgctgtggagggcaccgagattctgcaagacttccaaaacaagacggacgggcaggtctctggcgaggccatcaaaatgttccccacaatcaaaacaccagaagcagggactgtgatcacaaccgcagatgaaatcgagttagagggcgctacccagtggcctcactcaacatccgcttctgcaacatatggggttgaagctggggttgttccatggctgagtccgcagacatctgaaaggcccaccctcagctcttcacctgagataaacccggagacccaggcagctctgatccgcggacaggatagcactattgccgcaagcgagcagcaagtggcagcacgcatccttgatagcaacgatcaggccacggtcaatcctgtagaatttaacactgaagtggccaccccaccattctctctgctcgagacaagcaacgagacggatttcttaattggcatcaacgaggagagcgttgaaggtacagccatctacttgcctgggccagacagatgtaaaatgaatccgtgcctcaacggcggtacttgctaccctaccgaaaccagctatgtgtgcacctgcgtccccggatattcaggagatcagtgcgagttagacttcgacgagtgccactccaatccttgccgcaacggagcaacttgcgtggatggttttaacacgtttagatgcttatgtttaccctcctacgtgggagcattatgcgagcaggacactgagacttgtgactacggctggcacaagtttcaaggtcagtgctataaatatttcgcgcacagacgcacttgggatgcggctgagagggagtgccggttacagggagcccatctgacaagtatcctgagccatgaggagcagatgtttgtgaacagagtcgggcacgactaccagtggataggactgaacgacaaaatgttcgaacatgattttcggtggaccgacggcagcacattgcagtacgagaactggcggccaaatcagccagattcgttcttttccgctggcgaggactgtgttgtgatcatctggcatgagaatgggcaatggaatgacgttccctgcaattatcacctgacatacacgtgcaaaaaaggcacagtggcttgcggacagccaccagtcgtggagaatgccaaaaccttcggcaagatgaaacctcggtacgagattaattctctcatccgctaccattgtaaggacggattcatacagcgacacctcccgaccattagatgtctaggaaatggcaggtgggcaattccaaagatcacatgtatgaacccatccgcttatcagcggacttatagcatgaaatacttcaaaaattctagctccgctaaagacaatagcatcaatacatccaagcacgaccacagatggtcccggagatggcaagaatctaggcgcta

SEQ ID NO: 31412 - DNA, 4785 bp, synthetic construct
  misc_feature 1..4785: note = Description of Artificial Sequence: Synthetic coding sequence
  source 1..4785: mol_type = other DNA
atgccaaccctccctcccagttacaacaccagcgaattccttaggatcaagtggtctaagattgaagtcgataagaatggcaaagacctgaaggagaccactgtattagtcgctcagaatggtaatatcaagattggtcaagactacaagggcagggtgagcgtaccaacgcatcccgaagctgtgggtgacgccagtctaactgtggtaaaattgttagctagcgatgccggactgtaccggtgtgatgttatgtacggaatcgaggacacacaggatacagtctctctaaccgtcgacggagtggttttccattaccgcgctgcaacgtcccgctatacgcttaatttcgaggcagcacaaaaggcttgtctcgacgtgggagccgtgatcgcaacgccagagcagctcttcgcagcctatgaggatggcttcgagcaatgcgatgcaggatggctagccgaccaaacagtgcgttatcccatcagagctcccagggtcggttgctacggggacaaaatggggaaagccggtgttagaacctacggattccggagccctcaagagacctacgacgtgtattgctacgtagatcaccttgatggagacgtgtttcatttaactgtgccatcaaaattcacattcgaggaggctgccaaagagtgcgaaaatcaagatgcaagattggccaccgtgggtgagctgcaggccgcttggcgcaacggcttcgaccagtgtgactacggttggctgagtgatgcctccgtgcggcatcccgtaaccgtggcgcgtgctcagtgtggcggtggcttgctgggggtcagaaccttgtaccgtttcgaaaatcagaccggtttccctccccctgacagccgattcgacgcttactgtttcaagcccaaagaagctaccacaatcgatttaagcatcctggcagagacagctagtccaagcttgtccaaagaacctcagatggtgtccgatcggaccacacccatcatcccattagtcgatgaattgcccgtgatccctaccgagttccctcctgtagggaatatcgttagttttgaacagaaggcaaccgtgcagccccaagccattacagactccctcgcaactaaattgcctacaccaaccggctctactaagaagccgtgggacatggatgactactccccttctgcctccggaccactaggtaagttggacatcagcgaaattaaagaagaagtcctgcagagcacgacaggggtctcccactacgctacggactcctgggacggtgtcgtggaggataaacagactcaggagtccgtgacccagatcgagcagattgaggtgggccctctggtgacatcgatggagattctgaaacacatcccttccaaagaattccccgtcaccgagaccccactcgttacggccagaatgatcttggaaagcaagacggaaaagaaaatggtttccacggtatccgagctcgtcactacagggcattatggattcaccctaggtgaagaggacgatgaggaccgaacgctgaccgtgggctcagacgagagcacgttgattttcgaccaaattccggaggtgattacagtgtctaaaaccagtgaggatactatccacacgcatctggaggatctcgaatctgtaagcgcaagtactactgtgagcccactcataatgccggataacaatggcagcagcatggacgactgggaggaacgacaaacgtccggacgcatcaccgaagaattcctcggtaagtatctgtccacaactccgtttcccagtcagcatagaacagaaatagagctgtttccctacagcggtgataaaatcctagtggaaggcatctcgaccgtgatctatccttctcttcagaccgagatgacacaccgaagagagaggaccgagaccttaattccagagatgcgcactgatacttacacagacgagatccaggaagagatcactaaaagccctttcatgggcaagactgaagaggaagtgttctctggaatgaagttatccacctctttatccgagccgatacatgtgaccgagtcatcggttgaaatgactaagagttttgacttccccaccctgattactaagctgtcggcagagcccaccgaggtccgggatatggaggaggatttcacagctactcccggtaccacaaagtacgatgaaaacattacgaccgtgctactggctcatgggactctatccgtcgaagcagcaacagtgagtaagtggtcttgggacgaggataatacaacatctaagccattagaatctacggaaccgagcgcttcttctaaactgccacccgctctgttaactactgtaggcatgaatggcaaggacaaggatatcccttccttcactgaagacggagctgatgagttcacgctaatccccgactctactcagaagcagctcgaagaagtcacagacgaagacattgcggcacacggtaagtttacaatcaggtttcagcccactacaagcactgggatcgccgaaaaatctacgcttcgagacagcaccactgaagaaaaagtcccgccaatcacctctaccgagggacaggtctatgccaccatggaagggtccgctttaggtgaagtggaggatgttgatttatccaagcccgtgagcactgtgccccaatttgcccacacctccgaagtggagggtctggctttcgtgagctatagctcaacacaggagcctactacatacgtcgacagctctcacacaatccctttgtctgtcatccccaaaacagattggggcgtcctggtcccctctgtcccatcagaggatgaggtactgggagagccgtcgcaggatatcctagttatcgatcaaaccaggctcgaggccacgatatcccctgagacaatgcgcacaaccaaaatcacagagggcactacccaggaagaattcccctggaaagaacagactgccgaaaagcccgtgccagccctctcatccactgcgtggacacctaaagaagctgtcaccccacttgatgagcaggagggagatggtagtgcatacacggtcagtgaggacgaactgttgaccggatctgagcgggtgccggttcttgaaacaacccctgtcggcaaaatagaccattcagtctcttacccccctggggctgtcacagaacataaggtcaagactgatgaggtggtcaccctgactcctaggataggtcctaaggtctctttatccccaggaccggaacagaaatatgagactgaaggatcaagtaccaccgggtttaccagcagcctcagccctttcagtacccatattacccagctcatggaggagactaccaccgagaagacaagcctcgaagacattgaccttgggtcaggcctgtttgagaagcccaaggctaccgaacttattgagtttagtactatcaaggtgacagtacccagcgacattaccaccgctttttcctcagttgaccggttacacacgacatccgcgttcaagccatcaagcgccatcacaaagaaaccaccgctcatcgacagggagcctggggaggagaccactagcgacatggtgatcataggggagagcacttcccatgttcccccaaccacgctggaggacatcgtggccaaagaaacagaaaccgacattgaccgcgaatatttcacaactagcagcccacccgctacccagcccacccgccctcccactgtggaagataaagaagctttcgggcctcaagctctgtcaactccccaaccgcctgccagcaccaaattccatcccgatataaatgtttatatcatagaagtgagggaaaacaagaccggaccagaccgctgtaagatgaacccgtgtctgaatggagggacatgttatcctacagagacgtcgtatgtctgtacctgcgtgcccggatactcaggggatcagtgcgagttggattttgacgagtgccactcgaacccttgtcgaaatggcgcaacctgcgtggacgggttcaatacctttcggtgtttgtgtctgccatcctacgtgggggcactctgtgagcaggacaccgaaacatgtgactacggttggcacaaatttcaagggcagtgctataagtacttcgctcacaggagaacttgggatgccgcagaaagggagtgtcgcctccagggtgcgcacctgacatcaatcttgtcccacgaagagcaaatgtttgtcaaccgtgtggggcacgactatcagtggattggactcaatgacaaaatgtttgaacacgattttcggtggacggacggatctactctgcaatatgagaactggcggccaaatcagccagatagtttcttttctgccggagaggactgcgtagtcattatctggcacgagaatggccaatggaacgatgtgccatgcaactaccacctgacctacacgtgtaagaaggggacagtggcctgtggccaaccgccagtggtagagaatgccaaaaccttcggcaaaatgaagcctagatacgagattaatagccttatcaggtatcattgcaaggatggctttatccagcggcatctgcctacgatcaggtgtttgggtaatggccgatgggccattcctaagatcacttgtatgaaccctagtgcctatcagcggacatactcaatgaaatactttaaaaattcatcttctgctaaggacaactcaattaacaccagtaaacacgatcaccgttggagccgccgttggcaagagagccgacgttag

SEQ ID NO: 31413 - DNA, 1968 bp, synthetic construct
  misc_feature 1..1968: note = Description of Artificial Sequence: Synthetic coding sequence
  source 1..1968: mol_type = other DNA
atgttcataaacatcaaatctattctgtggatgtgtagtacactcatagtgacgcacgctctgcacaaagttaaggtgggaaaaagtccacctgtgcggggatctcttagcgggaaagtttcattgccatgtcatttcagcacaatgcccacgttaccaccatcttataacacatcagaattcctacgaattaagtggtcaaagatcgaggtcgataaaaacggcaaggatctaaaagaaactactgtgctagtggcacagaatgggaacattaaaatcggccaggattacaagggaagggtgtctgtgccaacgcacccagaggcagtaggagatgcttctctgacagtggtaaagctgctggccagcgacgccggactttatcgttgcgatgtcatgtatgggattgaagatacgcaggatactgtgagcctgacggtggacggagtggtgttccactacagagctgccacctcccgatacactttgaactttgaggctgcccaaaaagcctgcctggatgtgggagccgtgatcgctaccccagagcagttgtttgcagcctatgaggatggctttgagcagtgcgacgcgggttggctcgcagaccagactgtccgatacccgattagggctccgagggtggggtgctatggcgataagatgggaaaagcgggagtgagaacctacggctttaggtcaccccaagagacttacgatgtgtactgttacgtggatcatcttgacggtgacgtcttccacctgaccgtgccaagcaaattcacattcgaggaagccgctaaggagtgtgagaatcaagatgcgaggttggccactgtgggggagttgcaggctgcatggaggaatgggtttgaccagtgtgactatggatggttatcagacgcctccgtcagacatcccgtcactgtagccagagcccaatgtggtggtggtctgctgggagtccgcaccttgtacagatttgaaaaccagactggcttcccacctcccgatagtcgctttgatgcttattgttttaagcgcccagacaggtgcaagatgaacccctgtcttaatggcggtacctgttatccaacggagacaagttacgtgtgcacatgtgttccaggctattcgggtgaccagtgcgagctcgactttgacgagtgtcactcaaatccttgcaggaatggtgccacctgcgtagacggatttaacacgttccggtgtctgtgcctgccttcctacgtcggagctctgtgtgagcaagacacggaaacctgcgattacggatggcacaaatttcaaggccagtgctacaaatactttgcgcacagacggacatgggacgccgctgaaagagagtgccgactgcaaggcgcacacctgacttctatcctcagccacgaggagcagatgttcgttaatagggtgggccatgactatcaatggatagggctgaacgacaaaatgttcgagcacgacttcagatggaccgatggtagtacactgcagtacgagaactggaggcccaatcagcctgatagttttttcagcgcgggagaagactgtgtggtaatcatctggcacgaaaatggccaatggaatgacgtgccttgcaactatcacctcacatatacgtgcaaaaaaggcactgttgcttgcggacagcctcctgtggtggaaaacgcaaaaaccttcggcaagatgaagcccaggtacgaaattaattcactcatccggtaccactgcaaggatggttttatccagcgccatctgcccactatacggtgtctgggcaacggaaggtgggcaatcccgaagatcacatgtatgaatccgtccgcttaccagagaacctattcaatgaagtacttcaagaattcatcttccgccaaggataactccatcaatacctccaaacacgatcaccggtggagtaggaggtggcaggaatccaggcgatag

SEQ ID NO: 31414 - DNA, 1440 bp, synthetic construct
  misc_feature 1..1440: note = Description of Artificial Sequence: Synthetic coding sequence
  source 1..1440: mol_type = other DNA
atggcttcaaccatcaaggaggctctctcagtcgttagcgaggatcagtctctctttgagtgtgcctatggaactcctcacctggccaaaaccgaaatgacagcttccagctcatctgactatggccaaacctccaaaatgagtccccgagtgccccaacaggattggctgtcacagcctccagccagggtaacaatcaaaatggagtgcaatcctagccaggtcaacggttccagaaacagccctgatgagtgttcagtagccaaggggggaaagatggtgggaagtccagacactgtgggcatgaattatggctcttacatggaagagaaacatatgcctccccctaatatgacgactaatgaaagaagggtcatcgtgcctgctgatcctaccctctggtcaaccgatcacgtacgccagtggcttgagtgggccgtaaaagaatacggtttgcccgacgtgaacattttactatttcagaatatcgatggcaaagagttgtgtaagatgactaaggacgacttccagcggctcactccttcatacaacgccgacatcctgctatcacacctgcactacctcagggaaacgccactgcctcaccttacctctgacgatgtcgataaagccctgcaaaacagccctcggctgatgcacgcaaggaacacaggcggagccgcttttatcttccccaacacttctgtgtatcccgaggctacacagcgtatcactactaggcctgacctcccttatgaacctccgagaaggagtgcctggactggccatggccatcctacgccacagagtaaggcggctcaaccctctccctccactgtgccaaaaaccgaggaccagcggcctcagctggacccctatcaaatcttaggcccaacctccagcaggctggcaaatccagggtcgggacagatccagctgtggcagttcttacttgaactcctgtccgattccagcaacagctcttgcattacatgggagggcacaaatggcgagtttaaaatgacagaccccgacgaagtcgctcggcgatggggtgaaagaaagtccaagcccaatatgaattatgataagttgtcccgcgctctgagatactactacgacaagaacattatgacaaaggtgcatggaaaacggtatgcatataaattcgatttccacggcattgcccaagctcttcagccacatccaccggaaagctctctctataaatacccgagcgaccttccctacatgggctcataccatgcccatccacagaaaatgaacttcgtcgctcctcatcccccagccctgccagtcacctcttcctcatttttcgccgctcccaacccgtactggaactcccctactggcggtatctatcccaataccaggttacctacttctcacatgcctagtcatctcggcacttattactag

SEQ ID NO: 31415 - DNA, 1092 bp, synthetic construct
  misc_feature 1..1092: note = Description of Artificial Sequence: Synthetic coding sequence
  source 1..1092: mol_type = other DNA
atggttggttccccagatacagtaggaatgaattatggatcatacatggaagagaaacacatgcctccaccaaacatgacaactaatgaacgtcgtgttatcgtccccgctgatcccacgctttggtccacggaccatgtgaggcagtggctggagtgggctgttaaggaatatggcttgccagacgtaaacatactgcttttccagaacatagacggtaaagaactgtgtaaaatgaccaaggatgacttccagcggcttacccccagttacaatgcagatattctgctgtcacatctacattacttgagagaaacacccttacctcatctcacctctgatgacgtcgacaaggcactccagaactcaccccgtctcatgcacgctagaaatacagatttgccgtacgaacccccacggagatccgcgtggacgggccacgggcatcctacacctcagagcaaggcggcacagccaagtcctagtacagtcccgaagacggaggatcagagaccccaattagatccttaccagattctgggtcctactagttcccgccttgcaaaccccggatcaggccagatccaactgtggcagttcttgctagaactcctgagtgactccagcaatagttcatgcatcacgtgggaggggacaaacggagaatttaagatgacagacccagacgaggtggccaggcggtggggcgaaagaaagtccaaaccgaacatgaactatgacaagttgtctcgagccctcagatattattatgataagaacatcatgaccaaggtgcatggcaaacggtacgcctacaaattcgattttcatggtatagctcaggctctgcagccacatcccccagagagtagcctgtataagtacccatcagatctcccgtatatgggcagttatcacgcccacccacagaaaatgaacttcgttgcaccacatccgccagccctccccgtgacaagtagcagtttcttcgccgcaccgaacccatattggaattcccctacagggggtatctatcccaacaccagactacccaccagccacatgccctctcacctgggaacctattactag

SEQ ID NO: 31416 - DNA, 1389 bp, synthetic construct
  misc_feature 1..1389: note = Description of Artificial Sequence: Synthetic coding sequence
  source 1..1389: mol_type = other DNA
atgattcagaccgtccccgaccctgctgctcacataaaagaggcattgagcgtagtctcagaagaccagtctttgtttgagtgcgcatatggaacccctcatctggccaagaccgagatgacggcgtcatcttcttctgattatggccaaacttcaaaaatgtctcccagggtaccccagcaggactggttgtcacagccacctgcaagggtcacaatcaagatggagtgcaatcctagtcaggtcaacggctcacgaaacagccctgacgagtgttcagtcgcaaaaggcggaaagatggtcggttcccctgatactgtaggcatgaactatggcagctacatggaggagaaacacatgcctccacctaacatgacgaccaatgagaggagggtgatcgtacctgctgaccctactctgtggagcaccgatcacgtgcggcaatggcttgagtgggccgtcaaggagtacggcctgccagatgttaacatcctgctgtttcagaatatcgatggcaaagagctctgtaaaatgacaaaagatgacttccagcggctgaccccgtcctataatgccgatatcttgctgtcacatctgcattacttacgtgaaaccccattgccccacctgaccagcgatgatgttgacaaggccctgcaaaactctcctcggttaatgcacgcccgtaatactgacctgccttacgagcccccacgcagaagcgcctggacaggtcacggtcatccgaccccccagtcaaaggctgcgcagccatcaccaagcactgttcccaaaacagaagaccaaagaccgcagctcgacccctaccagattcttgggcctacttctagtagactggccaaccccggttctggccaaatacagctgtggcagtttcttcttgagctgctcagcgatagctcaaacagctcatgtataacctgggaagggacaaatggggagttcaaaatgaccgaccccgacgaagtggcaagacggtggggagaacgaaagtccaaacccaatatgaactacgataaactgtcccgtgccctgcgttattactatgataagaatatcatgacaaaggtacatggcaaaaggtatgcctacaagttcgatttccatggtatcgctcaagctctgcaaccacatccccctgaaagctcgctgtacaaatacccgagcgatttgccttatatgggctcgtaccacgcccatccacagaagatgaattttgttgctcctcatccacctgcactcccagtgacttcttcttccttttttgccgcacccaatccttactggaatagccccacaggtggtatttaccccaacaccagactccccacctctcatatgccgagtcatctggggacttattactag

SEQ ID NO: 31417 - DNA, 1461 bp, synthetic construct
  misc_feature 1..1461: note = Description of Artificial Sequence: Synthetic coding sequence
  source 1..1461: mol_type = other DNA
atgattcaaactgtcccagaccctgcagcgcatattaaagaagccctgtccgtggtaagtgaagaccagagcctttttgaatgcgcttacggaacccctcatctagccaaaactgaaatgactgcctccagctcctccgattacggtcagacatccaagatgtcccctcgggtgcctcagcaggactggttgtcgcagcccccagcacgagtgacaatcaagatggaatgcaacccgtctcaggtaaacgggtcacggaacagcccggatgagtgctccgtggctaaaggcggtaaaatggtcggcagccccgacactgttgggatgaactatggcagctatatggaagagaaacatatgcccccaccaaacatgaccacgaatgaaagacgtgtgatcgtgccagcagatcctacactgtggtcaactgaccatgtgaggcaatggttggagtgggctgtgaaagaatatgggttgcccgacgtcaatatactcctctttcagaacattgatggaaaagagctgtgcaagatgacgaaggacgacttccagcgcttaactccttcttataacgccgacatactgctgtctcacctgcactacctccgggagacccccctgccacatctcacatccgatgatgtggataaagccctgcagaattcgccaaggctgatgcatgcaagaaatacaggcggagctgcattcatctttcccaatacatccgtctatcccgaagctacacagcggatcactacccgaccagacctgccctacgagccaccccgaagaagtgcctggacaggccatggacaccccacgcctcagtctaaggcggctcagcccagcccatcaacagtgcccaagaccgaagatcagcggcctcagctggacccttaccagattttaggacccacgtcgtcacgcttggcaaacccgggaagtggccagattcagttgtggcaattcctgcttgagctcctctctgattcttccaatagcagttgtatcacttgggaggggactaacggggagttcaaaatgaccgacccagatgaggttgccaggagatggggtgagcggaagtcaaagcccaacatgaattacgataaactgagcagagccctgagatactactatgacaagaatattatgacgaaagtgcacggcaagaggtacgcctataaattcgacttccatggtatcgcacaggctcttcagcctcatccaccagagtcatccctttacaaataccccagcgatctgccctacatggggtcataccatgcacatccccagaaaatgaactttgtcgcccctcatccaccagctctgcccgttaccagctcctcgttcttcgcagctccaaatccttattggaactcaccaacaggcggaatctaccccaataccaggctgccaacctctcacatgccttctcacctcgggacatattattag

SEQ ID NO: 31418 - DNA, 1461 bp, synthetic construct
  misc_feature 1..1461: note = Description of Artificial Sequence: Synthetic coding sequence
  source 1..1461: mol_type = other DNA
atgattcagacagtgcccgatcctgccgctcacataaaagaagccctaagtgtcgtgagtgaggaccaatccctctttgaatgcgcttatggcacgccacacctggcaaagaccgagatgaccgctagtagttcctctgactacggacagacctctaagatgtccccaagggtgcctcagcaagattggttgagtcagcctcccgctcgggtgaccatcaagatggagtgtaacccgagtcaggttaacggttcccgcaactcccccgatgagtgttccgtcgctaaaggaggaaagatggtaggcagccctgatacagtgggcatgaactacggatcctatatggaagaaaagcatatgccccctcctaatatgactactaacgagcgaagagttatcgtgcctgcagatcctactctgtggtccactgaccatgtgcggcaatggctggagtgggctgttaaagaatacggcttacccgatgtgaatatcctactgttccaaaatatcgacgggaaggaactgtgtaagatgactaaggacgactttcaacgtctcaccccatcttataacgcagatatcctcttgagtcatcttcattatttgcgcgagacaccccttccccacctcacctccgacgatgtggataaagcactacaaaatagtcccagactgatgcacgcccgaaacacagggggagcagcctttatctttccaaacacctctgtgtacccggaggccacacagagaatcacgacgagacctgacctgccctacgaacctcctcgccgatcagcatggacggggcacggccaccctacaccacaatcaaaagccgctcagccttccccaagtacagtgcctaagactgaggatcagagacctcaactcgatccatatcagattttgggtccaacatctagtcggctggccaaccccggtagtggccaaatccagctgtggcagttcctgcttgagctgcttagcgacagttctaactcctcttgcattacgtgggaggggacgaacggggagtttaaaatgactgaccctgacgaagttgctcgacgctggggcgagaggaagagcaagcccaatatgaactatgacaagctgtcacgcgcactgaggtactactacgataagaatatcatgacaaaggttcatggcaaacgctacgcctataagtttgacttccacggaattgctcaggccctccagccacaccctccggaatcctccttgtacaaatatccgtcagaccttccatatatgggctcctaccacgctcaccctcaaaaaatgaactttgtcgcaccacacccgccagccctacctgtgaccagttccagcttctttgcggcacccaacccatactggaactctccaaccgggggaatttaccccaatacgaggttgcccacatcacacatgccaagccacctcgggacatactactag

SEQ ID NO: 31419 - DNA, 516 bp, synthetic construct
  misc_feature 1..516: note = Description of Artificial Sequence: Synthetic coding sequence
  source 1..516: mol_type = other DNA
atggcatctaccattaaggaggcactaagtgttgtctccgaagaccagagtttgtttgagtgcgcctacggcaccccccacttggctaaaacagagatgaccgcttctagttctagcgactatggccagacctccaagatgagtcctcgggtgccacagcaggactggctttctcagcctcccgcaagagtcacaatcaagatggagtgtaatccaagtcaagttaatgggtcccgtaactcccctgacgaatgctctgtagccaaaggaggcaagatggtggggtcaccagataccgtggggatgaactatggatcctacatggaagagaagcatatgccccctcctaatatgacgactaacgaaaggagagttatagtaccagccgatttgccctacgaaccccctcgaagatcagcctggaccggccacgggcaccctacaccgcagtcgaagggaacggtgctcgctccgatgaccctgtcatttatgagtcaggctgtcgacgactgctag

SEQ ID NO: 31420 - DNA, 1389 bp, synthetic construct
  misc_feature 1..1389: note = Description of Artificial Sequence: Synthetic coding sequence
  source 1..1389: mol_type = other DNA
atgattcaaacagttcccgatcccgcagctcacataaaagaagccctgtcagtcgtgagtgaggaccaatcgttattcgaatgcgcctacggcacacctcacctggcaaaaacagagatgacagcctcctcatctagcgactacggtcaaacaagtaaaatgtcaccccgtgtgccccagcaggactggttgagccagcctccagccagagtcaccatcaagatggagtgcaacccttcgcaggtgaatggttcccgcaatagccccgacgaatgcagtgtggccaaggggggtaagatggtaggatctcccgacaccgtggggatgaattacggcagctatatggaagagaaacatatgcctccccctaatatgacaacaaatgagcgtcgggtcattgttcccgcagatccaactctctggtctaccgaccatgtccgccagtggctggaatgggccgtcaaggagtatggcttgccggacgttaatatcctgttatttcagaacattgacggaaaggagctgtgtaaaatgactaaggatgactttcagagattaactccatcttacaatgccgatatactgctcagccacctgcattaccttcgcgagacccctctgccccatcttaccagcgatgatgtggacaaggcattgcaaaattcacctcgcctgatgcatgccagaaataccgatctgccctatgagcccccacgaagatctgcttggaccggccatggccatcccacccctcagtccaaagcggcacagcctagcccttccaccgttcccaaaaccgaagaccagcggcctcagctcgacccctatcagatcctggggcctacttcttctcgtctcgccaaccccggatccggccaaattcagctatggcagtttttgctcgagctgctcagtgattcctctaattcctcttgtattacttgggaaggtaccaacggcgaatttaagatgactgatcccgacgaggttgcgcgaaggtggggggagagaaagagcaagccaaacatgaactatgacaagcttagtagggctctgagatactattacgacaagaacattatgacaaaggtgcacggtaaacgctacgcttataaattcgattttcatggaatcgcccaggccctgcagccccaccccccagagagctcactctacaaataccccagcgacctgccttatatgggctcatatcacgcacaccctcagaagatgaattttgtggcccctcaccctcccgctttaccagtcacctcgagttcttttttcgcagccccaaatccatattggaattcgcccacaggtggtatttaccccaataccaggctgcccacaagccatatgccatcacatctgggaacctattactag

SEQ ID NO: 31421 - DNA, 1164 bp, synthetic construct
  misc_feature 1..1164: note = Description of Artificial Sequence: Synthetic coding sequence
  source 1..1164: mol_type = other DNA
atggtaggctctccagatacggttggcatgaattatggctcctatatggaagagaagcacatgcctccaccaaacatgacgaccaacgagcgaagggtaatcgtgccagcagaccctacgctctggtcaacagaccacgttaggcagtggctggagtgggccgtcaaagagtatggtctcccggatgtcaacattctgctcttccagaatattgacggcaaggagctatgcaagatgactaaagacgactttcagcggctgactccttcgtataacgccgacatcttactctctcatttgcattacctgagggaaacccctttgccccacctcaccagcgatgacgtcgataaagctctgcagaactcaccaagattaatgcacgccagaaacacaggaggagctgcttttatcttccctaacacctcggtttatccggaggccacacaaagaattaccaccaggcctgatctgccatatgagcccccaaggagatccgcttggacagggcacggacaccccacaccgcagtcgaaagcagcccaaccttccccctctaccgtgcccaagactgaggaccagagaccacagctggacccttatcagatcctgggacccacaagctccaggctggccaatcctggatccggtcaaatccagctctggcagttcctgctggaattactgtcggattcttccaacagctcttgtattacttgggaaggcacgaacggcgaattcaaaatgaccgacccagatgaggtggccagacgatggggcgaaagaaaatcgaagccaaacatgaattatgataagttgagtagggctctgagatactactacgacaagaacattatgactaaggtgcatggtaaaaggtatgcctacaaatttgacttccatggaatcgcgcaggcactacagccacacccacccgagagctccctgtataagtaccctagcgatcttccgtacatgggtagttaccacgctcacccccagaagatgaacttcgtggccccacaccccccagcactgccggtgacctcctcctccttctttgctgcccctaacccgtactggaacagcccaaccgggggaatctaccctaacacccgactgccaacaagccacatgccttctcacttgggcacatactactag

SEQ ID NO: 31422 - DNA, 1410 bp, synthetic construct
  misc_feature 1..1410: note = Description of Artificial Sequence: Synthetic coding sequence
  source 1..1410: mol_type = other DNA
atgaatgactttggtattaagaatatggatcaggttgcaccagtcgccaactcatacagaggaacattgaagcgccagcctgctttcgacaccttcgatggctcactctttgccgtatttccttcattgaatgaagagcaaactctccaagaagttcctaccggattggatagtatctcccatgatagcgccaactgcgagctgccactcctgactccttgttctaaagccgtgatgtcccaggctctgaaggctacctttagtggattcaagaaagaacaacggagactcggcatcccgaaaaacccatggctgtggagcgaacagcaggtgtgtcagtggctcctatgggcgacaaacgaattttccctcgttaatgttaaccttcaaaggtttggcatgaacggacagatgttatgcaacctgggtaaggagcgatttctggagctcgcaccagacttcgtcggggacatcctctgggagcacctcgagcaaatgataaaggagaaccaagagaaaaccgaggaccagtacgaagaaaattctcacttgacaagcgtgccccactggatcaactctaatactctcgggttcgggaccgagcaagccccttatgggatgcagacacagaactaccccaagggtggtctccttgacagcatgtgtcctgccagcactccatctgtcttgtccagcgaacaggaatttcagatgttccccaagagtcgcctaagttccgttagtgtaacttattgcagcgtctcacaggatttcccgggaagcaacctaaacttgttgaccaataacagcggtacaccgaaggaccatgattcgccggagaatggggcagacagttttgagtcctcagattctctcctccaaagctggaattcacagagttcattattggatgtgcagagggtgccatcattcgaatctttcgaggatgactgttctcagtcactctgcctcaataagccaacaatgtcttttaaagattatatccaggagcggtccgacccggtggagcaagggaagcccgtgatccccgcagccgttctagcaggatttacaggatccggaccaattcaactgtggcagtttttgttggagctactcagtgacaaatcctgccagtcttttatctcctggactggcgatggctgggaattcaaactagctgatcccgacgaagtcgctagaagatggggtaagcgtaagaataagccaaaaatgaactacgagaagctgagcagaggactcagatactattatgataagaacatcatacataagacatctggcaagcggtatgtgtaccgattcgtgtgtgatttacaaaatctgctgggatttacaccagaggagcttcacgccatcctgggggtccagccggatacagaagactag

SEQ ID NO: 31423 - DNA, 1410 bp, synthetic construct
  misc_feature 1..1410: note = Description of Artificial Sequence: Synthetic coding sequence
  source 1..1410: mol_type = other DNA
atgaacgattttggaattaagaatatggatcaggtggctccagtggcgaattcataccgcggtactctgaaaaggcagccagcatttgacacgttcgacggcagcctcttcgccgtgttccccagcctgaacgaagaacagactctccaggaggtgcctacaggtcttgatagtatctcacatgactccgccaactgcgaactccccttgttaaccccctgctccaaggctgtcatgagccaggctctgaaagcgaccttctcagggttcaaaaaggagcagaggcgactgggtatccccaaaaacccctggctgtggtccgagcagcaggtgtgccaatggctgttgtgggccactaatgagttttccctggtcaacgttaacttgcagagatttggaatgaatggccagatgctctgcaacctcggaaaagagaggtttctggagctggcacccgattttgtcggggacattctgtgggagcatcttgaacagatgataaaagaaaatcaggagaagacggaggaccaatatgaggagaatagccacttgacaagcgtaccacactggattaacagcaacacgctcgggttcggcacagagcaagcaccatatggtatgcaaacgcaaaattatcccaagggtggattgttagattccatgtgtcccgcatctacaccaagtgtgttgagctcggagcaggagtttcaaatgttccctaagagcagactgagttcagtgtcggtgacttattgcagtgttagccaggatttccctggaagcaatcttaaccttttgacaaataactcaggcacacctaaggaccacgactcccctgaaaacggggctgattcctttgaaagcagtgactctctgctccagtcttggaatagccaatccagcctcctcgacgtccagagagtcccttcgtttgaatccttcgaagacgattgcagccaatcactgtgcttgaacaagccaacaatgtcctttaaggactatattcaggagagatcggatcccgtcgagcaggggaaaccagttatccccgcagccgtgctggcgggatttacaggctccggcccaatccagctgtggcaattcctcttggagctgttgtccgataagagttgccagtcctttatatcatggactggtgatggctgggaatttaagctggctgaccctgatgaggtggctaggcgctggggaaaaagaaagaacaaacccaaaatgaattacgagaaattatccagaggtcttaggtactattacgacaaaaatataatccacaaaacgagcggcaagcgatatgtgtacagatttgtgtgcgatctgcaaaatctgctcgggtttaccccagaagaacttcacgccatcctgggtgtgcagcctgatacagaggattag

SEQ ID NO: 31424 - DNA, 507 bp, synthetic construct
  misc_feature 1..507: note = Description of Artificial Sequence: Synthetic coding sequence
  source 1..507: mol_type = other DNA
atgaatgacttcggaatcaagaacatggaccaggtggctcctgtggctaacagttatagaggaacactcaaacggcagcctgcattcgatacgttcgacggctctcttttcgctgtgttcccaagtctgaatgaagagcagacactgcaggaagttcctacaggactggactcaatcagccacgattctgccaattgcgaactgcctctcctcaccccatgtagtaaagcagtcatgtctcaagctcttaaagccacgttttctggatttaagaaggaacagcggcgactgggtattccaaaaaatccttggctctggtctgagcagcaggtttgccagtggctgttatgggccacaaatgagttttccctagtgaatgtaaatctgcagagattcggcatgaacggacaaatgctttgcaatctcggaaaagaacgtttcctcgagcttgccccagatttcgtgggagatattttgtgggagcacctcgaacagatgattaagtag

SEQ ID NO: 31425 - DNA, 813 bp, synthetic construct
  misc_feature 1..813: note = Description of Artificial Sequence: Synthetic coding sequence
  source 1..813: mol_type = other DNA
atgaacgacttcggcattaagaatatggaccaggtggctccagtggcaaacagttatcgcggtactctgaaacgacagccggctttcgacaccttcgatggatctctgtttgcggtctttccctcactcaatgaggagcagaccctgcaggaggtgccgaccgggttggactcaatcagccacgatagcgccaattgtgaactgccgctgctgacaccttgttccaaagccgtgatgtctcaagcccttaaagcaaccttttctggttttaagaaggaacagaggcgcctgggcatccccaaaaatccctggctgtggtctgagcagcaagtctgtcagtggttgctctgggccaccaatgagttttccctggtgaatgtgaacctgcaacggtttgggatgaacgggcagatgctgtgtaacttgggcaaggaaagatttctagaattagctcccgacttcgtgggagatatcctgtgggagcatctggaacagatgatcaaagagaaccaggagaagaccgaagaccagtacgaggagaactcccacctgacatcagtgcctcactggattaactcaaatactctcggtttcggaacagagcaggccccatacggcatgcagacccagaattatcccaagggaggtctgctagactccatgtgccccgcatcgactcctagcgtgttgagctccgaacaggagttccagatgtttcctaaaagccgactctccagtgtgtctgtgacctactgcagtgtctcacaggatttcccaggtagtaacctaaatttgttgactaacaatagttag

SEQ ID NO: 31426 - DNA, 570 bp, synthetic construct
  misc_feature 1..570: note = Description of Artificial Sequence: Synthetic coding sequence
  source 1..570: mol_type = other DNA
atgacagagtataagctggttgtggttggggctgggggtgtaggcaagagcgccctgactattcagctgattcagaaccactttgtcgacgaatacgaccctactattgaggacagttatcgcaaacaggtggtgatcgacggtgagacctgcctcctggatatcctggataccgcaggacaagaggaatacagcgcaatgagggatcagtatatgcgtacaggcgaagggttcctgtgcgtcttcgccatcaataatactaagagcttcgaagatatacaccagtacagagaacagatcaagagggtcaaagattcggacgacgtgcccatggttctcgtcggcaacaagtgcgacttggctgcacggaccgtagagagccgccaggctcaggacttggcacgctcgtatggcattccctacattgaaacttccgccaagacacgtcagggcgtagaggacgcattctacacactggtgcgggagataaggcagcacaagctccgcaagcttaacccccctgatgaaagtgggcctggctgtatgagctgtaagtgcgtgctgtcctag

SEQ ID NO: 31427 - DNA, 513 bp, synthetic construct
  misc_feature 1..513: note = Description of Artificial Sequence: Synthetic coding sequence
  source 1..513: mol_type = other DNA
atgaccgagtataaattggtagtggtaggtgccggtggcgtcggtaagtctgcgctcaccatacagcttatccagaaccacttcgtagatgaatatgaccccactatagaagacagttatcggaagcaagttgtcattgatggggaaacttgcttgttggatatcctcgacaccgccggtcaggaggagtatagcgccatgcgcgatcagtacatgaggactggggaaggtttcctttgcgtgttcgctattaataacacaaagtcattcgaggatattcaccagtacagagagcagatcaagagagtgaaagactctgacgacgttcccatggtgcttgtcgggaataagtgtgacttggcggctcggactgtagagagcaggcaagctcaagatttagcacggtcctatggcatcccctacattgagacttccgccaaaactaggcagggttcaaggtccgggagcagttcgagctctggaaccctctgggatccacctgggccaatgtag

SEQ ID NO: 31428 - DNA, 570 bp, synthetic construct
  misc_feature 1..570: note = Description of Artificial Sequence: Synthetic coding sequence
  source 1..570: mol_type = other DNA
atgactgagtacaagttggtagtcgtcggcgcagggggagttggtaagtcagcactcacgattcagttgatccagaatcacttcgtagatgagtatgatccgacaatagaggacagctaccggaagcaggtggtgattgacggagagacatgccttctggatatcctggatactgccggacaggaagaatacagcgcgatgagagatcagtacatgaggacgggtgaaggctttctttgcgtttttgcaataaacaatacgaaaagtttcgaagatatccaccaataccgcgagcaaatcaaaagggtgaaagattcagacgacgtgcccatggttctcgtggggaataaatgtgaccttgccgcaagaactgttgagtctcggcaggcacaggatctggcaaggtcttatggtatcccctatattgaaacaagcgccaagacacggcagggagtcgaggacgcattttatacactggtgcgggaaatcagacagcataaattgcgcaagcttaaccccccagatgaatccggcccagggtgtatgtcgtgcaagtgtgtgctgtcttag

SEQ ID NO: 31429 - DNA, 513 bp, synthetic construct
  misc_feature 1..513: note = Description of Artificial Sequence: Synthetic coding sequence
  source 1..513: mol_type = other DNA
atgacagaatataaactcgtcgtggtaggtgccggtggggtgggcaaaagtgcacttaccatacagctgatacagaaccatttcgtcgacgagtacgatcccactatcgaggactcctacaggaagcaggtggtgatcgatggggagacctgcttactggacatcctcgataccgccggacaggaggaatactccgccatgcgggatcagtacatgagaaccggcgaaggctttctatgtgtgttcgccattaataataccaagtccttcgaggacattcatcaatacagggagcagattaagagggttaaggactcagacgatgtgccgatggtgcttgtgggaaataaatgtgatctggctgcccgaacagtggagtcaagacaagcccaggacctcgccaggtcgtatggcatcccatacatcgagacgagcgccaaaacccggcagggaagcagatccggtagcagctctagcagtggaactctctgggatccccctgggcctatgtag

SEQ ID NO: 31430 - DNA, 570 bp, synthetic construct
  misc_feature 1..570: note = Description of Artificial Sequence: Synthetic coding sequence
  source 1..570: mol_type = other DNA
atgacagagtacaaattggttgtcgtaggtgccggaggagtcggtaagtctgctttgaccatacagttaatacaaaaccacttcgtggacgaatatgatcctaccattgaggacagctaccggaagcaggtagtaatcgacggggagacatgcctcctggatatcctcgatactgctgggcaggaggagtactccgccatgagagaccagtacatgaggacaggcgaggggtttctatgtgtcttcgctatcaacaatacgaagtcttttgaagatatccaccagtaccgcgaacagataaaacgcgtcaaggattcggatgacgtaccaatggtcttggtgggtaataagtgtgaccttgccgcacggacagtcgagtccaggcaggcacaggatttggccagaagctatggcatcccctatattgaaaccagtgctaagacgcggcagggggtcgaagacgccttttataccttagtgagagagatacgtcaacataaactgcgcaaactgaatcctccagacgaatctggcccagggtgcatgtcttgcaagtgtgtcctctcctag

SEQ ID NO: 31431 - DNA, 513 bp, synthetic construct
  misc_feature 1..513: note = Description of Artificial Sequence: Synthetic coding sequence
  source 1..513: mol_type = other DNA
atgactgagtacaagctggtcgtggtgggagctggaggcgtgggaaaaagcgcactgaccatacagcttatacaaaaccattttgtagacgaatacgaccctaccattgaggactcctaccggaagcaagtggtaatcgacggggagacctgcctgcttgatattttggacacagctggccaggaagagtattctgctatgcgcgaccagtatatgcgaaccggagaaggattcctctgcgtctttgctataaataacactaagtctttcgaggatattcatcagtatagggaacagattaagagagtaaaggattcggatgatgtacccatggtcctggtaggcaacaagtgcgatctggcagcacgcacagtggagagcaggcaggctcaggatctggcccgtagctatgggattccatacatagagacaagcgctaaaactcgccagggctcccgctcagggtcatccagttcctccggaaccttatgggatcctcctggcccaatgtag

SEQ ID NO: 31432 - DNA, 609 bp, synthetic construct
  misc_feature 1..609: note = Description of Artificial Sequence: Synthetic coding sequence
  source 1..609: mol_type = other DNA
atgctgcccccagggaccgccactctgctcacactattgttagccgctgggagtctcggccaaaagccacaaaggcctagacgcccagcctcacccatctcgacaattcagccaaaggccaacttcgacgcgcaacaattcgccggaacctggctgctcgtcgctgttggatccgcctgtaggtttctgcaggagcaggggcaccgagccgaagcgaccacgctccacgtggcgcctcaaggtactgccatggccgtatctacgttccgaaagcttgacgggatctgttggcaagtccgccaactctacggagacacaggcgttttggggaggtttctgctgcaggccagagatgccaggggggcagtgcatgtggtcgtggcagagaccgattatcagagctttgcggtgctctacctggagcgtgccggtcagctgagtgtgaagctctacgccaggtcgctgccagtgagcgactcagtccttagtgggttcgagcagagagtgcaagaggctcacctcactgaagaccagattttttacttcccaaaatacggcttttgtgaagctgccgaccaatttcatgtcctcgacgaggtccgcaggtag

SEQ ID NO: 31433 - DNA, 522 bp, synthetic construct
  misc_feature 1..522: note = Description of Artificial Sequence: Synthetic coding sequence
  source 1..522: mol_type = other DNA
ggcttccttgtgcccctctggctgatgcggaactgcttccgtttgcaagaagagatgctccagcgagaggaggctgagaatacccttcagagcttccggcaggacgtggacaatgcttcactcgctcgcctagaccttgagcgcaaggttgaatctttacaagaggagatcgcctttctcaagaaattacatgaggaagagattcaggaacttcaggcgcaaatccaggaacagcacgtgcagattgacgtagatgtctcgaaacctgatctgaccgccgctttgcgagatgtgaggcagcagtacgagtcagtcgctgcaaaaaacctccaagaagccgaagaatggtacaagtccaaattcgccgacctgtcagaagccgctaataggaacaacgacgctctacgccaggccaagcaggaaagcacggaatacaggaggcaagttcaatcgttgacatgcgaagtagatgctcttaaagggaccgtcagcaccaacccggcagtcaaggagggtaaatag

SEQ ID NO: 31434 - DNA, 687 bp, synthetic construct
  misc_feature 1..687: note = Description of Artificial Sequence: Synthetic coding sequence
  source 1..687: mol_type = other DNA
atgaggaactgctttaggttgcaggaagagatgctccagagggaagaggctgaaaatacactgcagagttttagacaggacgttgacaacgccagcttagcgagattggacctcgagaggaaggtcgaaagcctccaggaagaaatcgcttttctcaaaaaactccacgaagaagaaatccaagaactgcaagcacagatacaggagcagcatgttcaaatcgacgtcgatgtgtccaagccggacctcaccgccgcacttagagacgtgcggcagcagtacgagagcgttgctgccaaaaacctgcaagaggctgaggagtggtacaagagcaagtttgccgacctgagtgaagccgcaaatcggaataacgatgctctacggcaggccaagcaggagagcaccgaataccggagacaagtgcagtctctgacatgcgaggtcgacgctctgaaaggcactaacgagtcactagaacggcaaatgagagaaatggaggaaaacttcgcagtcgaggccgctaattaccaggacactatcggccgactgcaagacgagatccagaacatgaaggaggagatggctagacatctccgcgaataccaggatttgctcaacgtgaaaatggcacttgatatcgaaatcgccacttatcgtaagctgctggagggcgaggaatccaggtag

SEQ ID NO: 31435 - DNA, 1296 bp, synthetic construct
  misc_feature 1..1296: note = Description of Artificial Sequence: Synthetic coding sequence
  source 1..1296: mol_type = other DNA
atgtccacccggagtgtgtcaagctcctcttatcgacgcatgtttgggggaccgggaacagctagccgtccaagtagttctcgcagctacgtgactacatctacaaggacctactcactgggttccgccctgcgaccctctacctcccggtcactgtacgccagctccccgggtggcgtctacgccacgagatcctctgctgtccggttgagatcttccgtacctggagtcagactgctgcaggattccgtcgacttcagcctggccgacgccatcaatacagaatttaagaatacccgtaccaacgaaaaggtggagctgcaagagttgaatgacaggtttgctaactacattgataaagttcgattcctggagcaacagaataaaatcctgttagcagagttggagcagctcaaaggacaaggcaagtcacggctcggagatttatacgaagaagaaatgcgagaactccggagacaggttgaccagcttacaaatgacaaggcccgagtggaagttgagcgggacaatttggctgaagacatcatgcggcttcgggaaaaactgcaggaagagatgttacaacgcgaggaggctgaaaatacactgcagtctttcaggcaggatgtggacaacgcatccttggcaagattggacctggaaaggaaggtcgaatcgctgcaggaagaaatcgcctttctgaaaaagcttcatgaggaagaaattcaggagttacaagctcagatacaggagcagcatgttcaaatcgatgtggacgtatctaagccagacctcactgccgctctgagagacgttaggcagcagtatgagtcagtggcagctaagaacctccaggaggccgaggaatggtacaagtctaaattcgctgacctgagtgaggcagctaaccgtaataacgatgcgcttcgtcaggcgaagcaagaaagtacggaataccgtcgtcaggtgcaatccctcacttgcgaggtcgatgccctcaagggcaccaacgagagtcttgagagacagatgcgtgagatggaggagaacttcgcagtcgaggccgctaactaccaagatacaatcggtcgcttacaagatgaaattcaaaacatgaaagaggaaatggcccgacacctgcgggaatatcaggatcttcttaacgtaaagatggccctcgacattgagatcgcgacctaccggaaactgctcgagggcgaggagtctcggatctctctaccgttgcctaatttctcttcgttaaatttgcgtggcaagcattttatttccttgtag

SEQ ID NO: 31436 - DNA, 1401 bp, synthetic construct
  misc_feature 1..1401: note = Description of Artificial Sequence: Synthetic coding sequence
  source 1..1401: mol_type = other DNA
atgtctacaagaagcgtatcctcttcatcttacagacggatgttcggcggacctggcacagcttcgcgtccctcatccagtaggtcatacgttacgacatcaactaggacatactccctggggtccgcactgcgcccatccacctcacggtcactgtacgcttcctcccccggaggtgtgtatgcaacacgttcttcggccgtccggctgagatcgtccgtccccggagttaggctcttgcaggacagcgtcgatttctcccttgctgatgctatcaacaccgagttcaaaaatacccggacaaatgaaaaagtcgagctccaggaactgaacgataggttcgccaattatattgacaaagtaaggtttctcgagcagcagaataaaatcctactggctgagcttgaacaattaaagggccaggggaagtcccgactcggcgacctgtacgaagaggagatgagggagctgaggcggcaagttgatcagcttaccaacgataaggcaagggtggaggtggaacgagacaacttggctgaggatattatgaggctgcgagaaaagctgcaagaagaaatgcttcaaagggaggaggctgagaacacacttcagagctttagacaggacgtcgacaatgcctccttggctcgactggatctggaacgcaaggtcgaatccctgcaggaggagatcgcattcctcaagaagctacatgaggaggaaattcaggagctccaggcgcagattcaagaacagcacgttcaaatcgacgtcgacgtcagcaagccagacctgaccgcagccctccgtgatgtacgtcagcagtacgagtctgtagcagctaagaatttgcaggaggctgaggagtggtacaagtcaaaattcgccgacctgtcagaggccgctaatcgcaacaatgacgcgttgcgacaagcgaaacaggaatccactgagtatcggagacaggttcagagtcttacttgtgaggtggacgcgctgaaaggaactaacgaaagtctcgagcgccagatgcgggagatggaggaaaactttgccgtggaggccgctaactaccaagacacaataggcaggctccaggacgaaattcagaacatgaaagaggagatggcgcgtcacctgcgcgaatatcaggatctgttgaacgtcaagatggccctcgacatcgagattgcgacatatcgcaaactgctcgaaggcgaggagtcacgaatctctcttcctctgccaaatttctcttccctgaacctcagagagaccaacctagattctctgccacttgttgatactcacagtaagcgcacactgctgatcaaaactgtggagacccgagatggccaagttataaacgaaacttcacaacatcatgatgatctggagtag

SEQ ID NO: 31437 - DNA, 1224 bp, synthetic construct
  misc_feature 1..1224: note = Description of Artificial Sequence: Synthetic coding sequence
  source 1..1224: mol_type = other DNA
atgtttggaggcccaggcaccgcctcaagacccagtagttcccgctcttatgtcaccacaagcacacgaacctattctttgggttcagcacttaggcccagcacttctcggtctctctacgcgtcctctccaggcggtgtatatgctacaaggtcctccgcagttagactccgctcaagtgtccccggtgtgagactgctccaggattcagtggacttttccctcgccgatgcgatcaatactgagttcaagaacacacgcactaatgaaaaagtggagctgcaggaattaaatgatcgctttgctaattacatcgacaaggtgcgtttccttgagcagcagaacaaaattctcctggctgaattagagcagctgaagggccaaggtaaatcaagactgggtgacttgtatgaggaggaaatgcgggaactgcggaggcaagtagaccaacttacaaacgacaaagcaagagtcgaggtggagcgagacaaccttgcggaggacatcatgcggctgcgcgagaaactacaggaggagatgctgcagcgggaggaggccgagaatacgcttcagtctttccggcaggacgtggataatgccagccttgcacggcttgaccttgaaagaaaggtggaaagcctccaggaagagattgcatttctgaaaaaactccatgaagaagagattcaggaactccaagctcagatccaggaacaacacgtgcagatcgatgtggacgtctcaaagccagacctcactgctgctttaagggatgtgcgacagcagtatgagagtgtagccgctaaaaacctgcaagaggccgaagaatggtataaatcgaagtttgctgatttatccgaagctgcaaatagaaataatgacgctctgcgccaggccaagcaggagagtaccgagtacaggagacaagtgcagtccctaacgtgcgaagtagacgctctgaagggtactaacgagagcctggaacgtcagatgagagaaatggaggagaactttgcggtcgaggccgctaactaccaagataccatcggcaggttacaggacgagattcaaaacatgaaagaggaaatggcccgtcacctgcgggagtaccaggatctgctcaatgtgaaaatggccttagatatcgaaatagccacatatcggaaactccttgagggtgaggagtcacgcatattgtgtctgtttcagacattccccccatag

SEQ ID NO: 31438 - DNA, 2256 bp, synthetic construct
  misc_feature 1..2256: note = Description of Artificial Sequence: Synthetic coding sequence
  source 1..2256: mol_type = other DNA
atggaagatctgtcatccccggactcaacactcttgcaggggggacacaatctgttatcttcggcctcattccaagaggctgtgacatttaaggacgtgatcgtggatttcacacaggaagagtggaaacagctggacccaggccagagagacctctttcgtgatgtcacactggagaactatacacacttagttagcatcgggttacaagtctccaaacccgatgtaatctctcaactggagcagggaacagagccttggataatggaaccatcgattcccgtgggaacatgtgctgactgggagacacgccttgaaaatagcgtgtccgcccctgagcccgacattagcgaagaagaactcagcccagaagtcatcgtggagaaacacaagcgtgacgacagttggagctccaatctgctggagtcctgggaatatgaaggcagtttggaacgccaacaggccaaccaacagactctccctaaggaaatcaaggtcaccgagaagaccattccatcctgggaaaagggcccagtgaataacgaatttggcaagtctgttaacgtgtcttcaaatctcgttacccaggagccatcacccgaggagacatctacaaagaggtcgataaaacagaactccaatccagtcaaaaaagagaagagctgtaaatgtaatgaatgtgggaaggccttcagctactgcagcgccctgattaggcaccaaaggacccataccggggaaaagccttataaatgtaacgaatgcgaaaaagcgtttagccgctctgagaacttaattaaccaccagcgaatccacacaggcgacaagccttataagtgtgaccaatgtggcaagggctttattgaaggaccgagccttacccagcatcagaggattcacaccggcgagaaaccatataaatgtgatgaatgcggaaaggcattctctcagagaactcatctggtgcagcatcagcggattcacacaggcgaaaagccctatacttgcaacgaatgcggaaaggctttttcacagcggggtcactttatggagcaccagaagatccataccggggagaaaccctttaagtgtgatgagtgtgacaagacttttactaggtccacccatctgacacagcaccaaaagattcacacaggagagaagacatataagtgtaacgagtgtgggaaggccttcaatggcccatctaccttcatccgccaccatatgatccacactggagaaaagccctacgagtgcaacgagtgcggaaaggctttctcgcagcactccaacctaacgcagcaccagaagacgcatacgggggaaaagccatatgactgcgcggagtgcggaaagtccttcagttattggagttccctcgctcagcatctgaagattcatactggtgagaagccctacaaatgtaacgagtgcgggaaagctttttcatactgttcaagcctgacccagcaccggaggatacatactcgcgagaaacctttcgagtgttctgagtgtggcaaagctttctcctacctgagcaatctgaaccagcaccagaagacacacactcaggagaaggcctatgagtgcaaggagtgtggtaaggcgttcattaggagtagtagtttggcaaaacatgaacgcatccacactggcgaaaaaccttaccagtgtcatgaatgtgggaaaacattcagttatggttcctctcttattcagcaccggaagattcacaccggggagcgcccttacaaatgcaacgagtgcggccgagcctttaatcagaacatccatttgacccagcataagcggattcataccggcgctaaaccttacgagtgcgccgaatgtggtaaggcttttaggcattgttccagccttgcccagcatcagaagacacacaccgaggagaagccatatcaatgcaacaagtgcgaaaaaacattttcgcagtcatcacacctaacgcagcaccagcggattcacactggtgagaaaccttataagtgcaatgaatgcgataaggccttctctagatcgacccatctaaccgaacatcaaaacacccacaccggtgagaaaccctataattgtaacgaatgcagaaagacttttagccagtccacttatttgattcagcaccagcgcattcactccggggagaagccttttggctgtaacgattgtggtaagagttttaggtatcgctctgccctgaacaaacaccaacggctgcatccgggaatttag

SEQ ID NO: 31439 - DNA, 3201 bp, synthetic construct
  misc_feature 1..3201: note = Description of Artificial Sequence: Synthetic coding sequence
  source 1..3201: mol_type = other DNA
atgcccgtgttccatactagaaccattgagtccatcttagaacccgtggctcaacaaatttcccatctggttataatgcacgaagaaggggaagttgatggcaaagccatacctgatttaacagcacccgttgccgctgttcaggccgctgtttctaatttggtccgtgtgggaaaagaaaccgtgcagaccaccgaggatcagatcctgaaacgcgatatgcctcccgcttttataaaagtggagaacgcctgtaccaaattggtccaagccgctcagatgctgcaatcagatccctacagtgtgccagcgagagattatctgatcgacggcagccgaggtattctctccggaactagtgacctgttgttgacatttgatgaggccgaagtgaggaagataataagagtgtgcaagggcattctggaatacctgacagtggccgaagtggttgagaccatggaagacttagtgacttataccaagaatctcggcccagggatgacgaagatggctaagatgattgatgaacgccagcaggaacttactcatcaagagcatagagtgatgcttgtcaacagcatgaatactgtcaaagagctcctgcccgtactcatcagcgcaatgaagattttcgtaaccaccaagaactccaagaatcagggcattgaagaggccttaaagaacagaaactttacggtcgaaaaaatgtctgcagagattaatgagatcataagagtcctccagctgacctcttgggacgaggacgcatgggcttctaaagatacggaggctatgaaacgcgcattggcttcaattgattccaaacttaatcaggcaaaaggatggctcagagatccgagtgcctccccgggagatgctggcgagcaggctatcaggcagattcttgacgaagccggtaaggtgggagagctgtgtgcaggcaaggaaagaagggagatcctgggaacatgcaaaatgctgggacagatgacggatcaggtagccgacctcagggctaggggtcagggtagttctcccgtggccatgcagaaggcccagcaggttagccaggggctggatgtgctgactgctaaggtcgagaacgccgcacgaaagctcgaggcaatgaccaacagcaagcagtccattgccaagaaaatcgacgccgcacagaattggttggcagacccgaacggcggaccggagggagaggagcaaatacggggtgccttagctgaagcccgtaaaatagcagagctgtgtgacgatccaaaggaacgggacgatatcctccggtccctcggcgagatcagcgccctcacctctaagctggccgatctgaggcggcagggaaagggagacagcccggaggcccgagcactcgcaaagcaggtggccactgccctgcagaacctccaaaccaagacaaaccgtgccgtggcgaactccaggcccgcaaaggcagccgtgcacctcgagggcaaaatagagcaggcacagagatggattgacaatcctacagtcgatgaccggggtgttggccaggcagccattagagggctcgtggcggaaggccataggcttgctaacgtgatgatgggaccatacaggcaagatctgctggctaaatgcgaccgcgttgaccagctcactgctcagctcgctgacctagccgctcggggagaaggcgagagccctcaggccagagcacttgccagtcaactccaggatagtctgaaggacttaaaagcgaggatgcaggaagctatgactcaggaagtttccgatgtgttttctgatacaactactccaatcaagctgctcgccgtggccgctaccgcaccccctgacgcccctaatcgcgaggaagtattcgatgaaagggctgctaactttgaaaaccacagcgggaaactcggtgcgaccgcggagaaggccgctgctgtgggtacagcaaataaatctacagtcgagggtatccaagcaagtgtcaagactgccagggagttgacaccccaggtggtgtccgctgctaggatactgctgaggaacccagggaaccaagctgcctacgagcactttgaaaccatgaagaatcagtggatcgataacgtggagaagatgactggactcgttgatgaagcaatcgatacaaagagtctgctggatgcttccgaagaagccatcaaaaaagatctggataagtgcaaagtcgcgatggcaaatatacagccacagatgctggtcgccggtgccacctcaatcgcgaggcgagctaatcgaatccttcttgtagccaaaagggaggtggagaattccgaggatcctaagttccgggaggctgttaaggcagccagcgatgagctgagcaagacaattagccccatggttatggacgccaaggcagtggccggaaacatctctgatcctggactccagaagtcctttctggattccgggtataggatattgggagcagttgccaaagtcagagaagccttccaaccacaagagcctgattttcctcccccacctcccgatctcgagcaacttcggttaacagacgagcttgctccaccaaaaccccctctcccggaaggtgaggtgcctccgcctcgacctccaccccctgaagagaaggacgaagaatttccagagcagaaagccggagaagtcataaaccaacccatgatgatggctgcaaggcagttgcatgatgaggccaggaagtggtcgagcaaaggtaacgatatcatcgctgccgcaaagcggatggccttgctgatggcagaaatgagtaggctggttcggggaggcagcgggaccaagcgcgcactgatccagtgcgcaaaggacatcgctaaggccagtgatgaggtaacacggctcgctaaggaggtagcaaagcagtgtacagacaagagaattaggactaatttactccaagtttgcgagcggatacccaccatctccacacaattgaagatcctgtctaccgttaaggctaccatgctgggtcgaactaatatcagtgatgaagagtccgaacaggccaccgagatgttggtccacaacgcgcagaatctcatgcaaagcgtaaaggagactgtacgtgaggctgaagccgcatctataaaaattcgaaccgacgccggttttaccctgcgctgggtgcgaaagaccccttggtatcagtag

SEQ ID NO: 31440 - DNA, 2784 bp, synthetic construct
  misc_feature 1..2784: note = Description of Artificial Sequence: Synthetic coding sequence
  source 1..2784: mol_type = other DNA
atgctccaaagcgacccgtacagcgtgccggctagagactatctgatagacggcagccgcggaattctctcaggcacaagtgacttacttctgaccttcgatgaagctgaagttcgcaagataatcagggtgtgtaaggggatcttggagtacttaactgtggcagaggtggtcgagacgatggaagaccttgtaacgtacacaaagaacctaggacccggaatgactaagatggcgaagatgatcgatgagcggcagcaagaattaacccatcaggagcaccgcgtgatgcttgtgaatagtatgaacaccgttaaggaactgcttccagttctgatcagtgccatgaaaatcttcgtcaccacaaagaactctaaaaatcagggcattgaggaggccttgaaaaaccgaaattttactgtagaaaaaatgagcgctgagattaacgagatcattagagtactgcagcttacctcctgggacgaggatgcttgggcatcaaaagacactgaagccatgaaacgtgccctggcttccatcgatagtaaacttaaccaggccaagggctggttgagagatccatccgcctctcctggagacgctggggaacaggccatcagacagatcctggacgaggccggtaaagtaggcgaattgtgtgccggaaaagagaggcgcgaaatactgggcacatgcaaaatgctcggccagatgactgaccaagttgctgatcttagggcccgtggacagggcagcagtcctgtggccatgcagaaggctcagcaagtttctcagggtcttgacgtgcttacagccaaggtggagaatgctgccagaaagctggaggctatgacaaattccaagcagagcatagcaaagaaaattgatgcagcacaaaattggctggcagaccccaacggaggcccagagggtgaggaacagataagaggcgcactagctgaggcgagaaaaatcgcggaactgtgtgatgatcccaaggagcgggacgatattcttagatcactgggtgagatctcagctctcacttctaagcttgcagacttgaggcgccagggtaagggagattctcctgaggctcgcgcactggcaaaacaggttgcgaccgccctgcagaatctgcagaccaaaacaaaccgagcagttgccaacagtaggccagcgaaagcagctgtccatctcgaagggaaaattgaacaggcccaaagatggatcgacaaccccacggtggatgaccggggtgtcggacaagcggcaatcaggggcttggttgccgagggacatcggctggcaaatgtgatgatgggaccttatcggcaggacttactggccaaatgtgatcgggttgaccagttaactgcacagctcgcagacctggcagcgcgtggcgaaggagaatccccgcaggcacgggctctggccagtcagttgcaggactctctcaaagacctcaaagcccgtatgcaggaagcgatgacccaggaggtttccgatgtgttctcagatacaacaaccccaataaagctactggccgtcgctgccaccgcgccaccagacgcacctaaccgggaagaagtattcgatgaacgcgcagcaaactttgagaaccatagtggcaagcttggagccacggctgagaaagcagccgcagtcggcacagccaacaagagcacggtggagggcattcaggcttccgtgaaaacagctcgcgaactaacgccccaggtggtgtcagctgccagaatactgcttcggaacccaggaaaccaggctgcctacgaacacttcgaaaccatgaagaatcagtggattgacaacgtcgaaaaaatgacaggcctggtggatgaagctatagatacgaaaagtctactcgacgctagtgaagaggcgattaaaaaggatctggataaatgtaaggtggctatggctaacatccagccccagatgctggttgcaggcgctactagtatagccagacgagcaaacagaattctcctggttgctaaaagggaggtcgagaactccgaagacccgaaattccgagaggccgttaaagcggcaagtgacgaactgtctaaaactatctccccgatggttatggatgctaaggctgtggccggtaatatctccgacccaggtctgcagaaatccttcttggattcggggtataggatccttggggctgttgctaaggtccgagaagccttccaaccccaggaacccgattttccgcctcctccacccgacctcgaacagctcagactgacggatgaattagctccccctaagccaccgctcccggagggggaggtgccaccccctagaccaccgccaccagaggagaaagacgaggagtttcctgaacagaaggctggtgaggtgattaaccagcctatgatgatggcagcacgacagctgcatgacgaggcaaggaagtggagttcaaaacccggaatacccgcagcggaagtgggcattggtgtggtcgccgaagccgacgccgctgacgcggctgggtttcccgtaccacccgatatggaggacgattacgagcccgaattgcttctaatgcctagcaaccagcctgtgaaccaaccgatcctcgccgcagcccaatccctccaccgtgaagctaccaaatggtccagcaaagggaacgatatcattgccgcagcgaagcgtatggcccttctgatggccgagatgtcccgcctggtgcgcggaggctccgtcccaaggacctctcctcgtccccagatgagatag

SEQ ID NO: 31441 - DNA, 984 bp, synthetic construct
  misc_feature 1..984: note = Description of Artificial Sequence: Synthetic coding sequence
  source 1..984: mol_type = other DNA
atgcctgtgttccacacgagaaccatcgagtcgattctggagcccgttgcccagcagatctcacatctggtaattatgcacgaggaaggtgaagtagacggtaaagctattcccgatcttaccgcacccgtggctgccgtccaggccgctgtgtcgaatctcgtccgggttggaaaggagaccgtgcagactaccgaagaccagatcctcaagagggatatgcctccagcatttataaaagtggaaaacgcctgcacaaaactcgtgcaagcagcccagatgctgcaatccgatccatattcagttccggctcgcgattacctgattgatggctcacgcggtatcctatccggcacatcagatctgctgttaacttttgatgaagccgaggtcccacccccacggcctccgccacccgaagagaaggacgaggagttccccgagcaaaaggccggtgaggtgataaatcagcccatgatgatggcagcacgccagctgcacgatgaagctcgcaaatggagtagcaaggggaacgatatcatcgcggctgcaaaacggatggcccttctcatggctgagatgtctagactggtccgcggaggatcaggtaccaagcgggctttaatacagtgtgccaaggatatcgctaaggcttcagatgaggttacaaggctagccaaagaagtggccaagcagtgcacagacaagagaattcgcacgaatctgttacaagtctgcgagaggatccctacaatttccacacagctcaaaattctgtctacagtaaaggccacaatgttaggtcggacaaacatcagcgacgaggagagtgagcaggccactgaaatgctggtgcacaatgcccagaacttgatgcagagtgttaaagaaacagttcgggaggcagaagcagcttcaatcaagatcagaaccgacgccggatttaccctgagatgggttcgcaagacaccttggtaccagtag

SEQ ID NO: 31442 - DNA, 2421 bp, synthetic construct
  misc_feature 1..2421: note = Description of Artificial Sequence: Synthetic coding sequence
  source 1..2421: mol_type = other DNA
ggccaaatgactgaccaggtcgctgatctgcgagctcgcggacagggatcttccccggtcgctatgcaaaaggcccagcaggtgtcccaaggcctggacgtgcttacagcaaaagtcgagaacgccgcacgcaagctggaggccatgaccaactcgaagcagagcattgctaagaaaattgatgccgctcagaattggctggccgatccgaatgggggtcccgaaggcgaggagcaaatacggggagcactggcggaggctaggaaaatcgcagagctgtgcgatgaccctaaggaaagagatgatatactaagatctcttggcgaaatcagcgcccttacctccaagctggcagatctccgaagacagggcaaaggagattcaccagaggccagggccctggctaaacaggtcgcgactgcacttcagaatctgcagactaaaaccaatcgcgctgtggcaaacagccggccagccaaagctgccgtccatctggaaggcaaaattgaacaagcacagcgttggatagacaatccaactgtggacgaccgaggcgtcggccaagccgctatcaggggcttagttgctgagggacatagactggccaatgtgatgatgggcccttacagacaggacttactggcaaagtgtgacagagtcgatcaactgacagcacagctggccgacctggcagcccgaggtgagggggagagccctcaggcccgtgctcttgcttcccagcttcaggacagcctcaaagatcttaaagcccgtatgcaggaggcaatgactcaggaggtgtcagatgtctttagtgacactaccacacccatcaagctgctggcggtagctgccaccgccccacccgacgcccctaacagggaggaggtgttcgacgaacgggctgcgaacttcgaaaaccatagcggcaaactgggtgccacggccgagaaagccgctgcagtggggactgctaataaatccactgtagagggtattcaggcatccgtgaagacagcacgcgaactgacaccacaagtcgttagtgccgcacgtattttgctgcgaaaccctggcaaccaggcggcatatgagcacttcgagaccatgaagaaccagtggatagacaacgtcgaaaaaatgacgggcttagttgacgaggctatcgataccaaatctctgttagacgcctccgaggaggctatcaagaaggacctggacaaatgcaaggtagctatggccaatatacagccccagatgctggttgcgggagccacttccattgcacgaagagctaatcgcatcctgcttgtagctaagagggaggttgagaattcggaggatcctaaattcagagaagcagtcaaagctgcttccgacgagttaagtaaaacaatctctccaatggttatggacgccaaggccgtggctggcaacatcagtgaccccggtttgcaaaaaagtttcttagactcgggctaccgcatcttgggggcagtcgctaaagtccgggaagcctttcagcctcaggaacctgactttccgcctcctcccccagacctcgagcagctgcgcctgacagatgagctggcaccacccaagcctcctctgccagaaggcgaagtgcctccacccaggccaccccctccggaggaaaaggatgaagagtttcctgagcagaaagcaggtgaagtcatcaatcagccgatgatgatggccgctagacagctgcacgatgaggcacgcaagtggagttcaaagcctgggattcccgctgcggaagtgggcattggagtcgtggcagaagcagacgcggctgatgctgccggttttccagtgccccctgacatggaagatgactatgagcctgagctgctgctgatgccgtcaaaccaaccagtgaaccagccaatactcgccgcagctcaatccctgcatcgcgaggctacaaaatggagtagcaaggggaacgacattattgccgcagctaaacggatggcattgctgatggctgaaatgtccaggctggtccgagggggaagcgggactaagagagcacttatccagtgcgcaaaagatatcgctaaagcatccgacgaggtgaccaggctggctaaggaggtggctaagcagtgcacggacaagcgcattcgcaccaacctgctccaagtgtgtgagaggatcccaacaattagcactcagctgaagatactgtctaccgtgaaagcgacaatgctgggacgaactaatatatccgatgaagagtctgaacaggccactgagatgctagtacataatgcacagaacctcatgcaatcagtgaaggaaaccgttcgcgaagccgaggcggcaagcattaagattagaacggatgctgggttcaccctgaggtgggtgagaaaaacaccttggtaccaatag

SEQ ID NO: 31443 - DNA, 3021 bp, synthetic construct
  misc_feature 1..3021: note = Description of Artificial Sequence: Synthetic coding sequence
  source 1..3021: mol_type = other DNA
atgccccctgcctttatcaaggtcgaaaatgcatgcactaagctggtgcaggctgcccagatgctgcaatccgatccatacagcgtgcccgctagagattacctcatcgacgggtcacggggtatattgagcggtactagtgacctcctgctcacctttgacgaagctgaggtgaggaagattattagggtgtgcaaggggattttggaatatctaactgtggcagaagtggtagagacaatggaggatctggtcacttacaccaagaaccttggaccaggtatgactaagatggccaagatgatcgacgagaggcagcaggagctgacccatcaggagcatcgagttatgctcgttaactcgatgaacacggttaaagagctcttaccagtgctaatctctgccatgaaaatctttgtgactactaaaaactctaaaaaccaaggtatcgaagaggccctcaagaacagaaatttcactgtcgaaaaaatgtcagcagaaattaacgaaatcattcgtgtgctgcagctcacctcctgggatgaggacgcatgggccagcaaggacaccgaggccatgaaacgcgcactcgcctctatcgattcgaagctcaatcaagccaagggctggctgcgggacccctccgctagcccaggcgatgctggggagcaggcaatccgtcaaatcctcgacgaggcaggaaaggttggcgaactgtgcgcgggtaaggagagacgggaaatcttaggtacttgtaagatgctcgggcaaatgaccgaccaggtggctgatctcagggctcggggtcagggctctagtccagtcgcaatgcagaaggctcaacaggtatcccaaggactagatgtgttaacggccaaagtggagaacgccgcacgtaaactggaggccatgaccaattctaaacagtcaattgccaagaagatagacgccgctcaaaactggctggcggatcctaacggtggccctgaaggagaagagcagatcagaggcgcactcgcggaggctaggaaaatcgccgagctctgcgacgatccgaaagagcgcgatgatattttgcggtctctgggagaaattagcgccctcacgagtaagcttgccgacctgcgccgtcagggcaaaggggatagcccagaagcccgtgctttagcaaagcaggtagccaccgccctccagaacctgcaaacaaaaacaaatcgggcagtggctaacagtaggcccgctaaagcagctgtgcacctggaaggaaagattgaacaggcccagcgctggattgacaatcctacggttgatgaccggggagtgggacaggctgctatccgcggattggtggctgagggacatcgactggcgaatgtcatgatggggccttatagacaggacttgctggcaaagtgcgacagagtagatcagttaaccgctcaactggctgatctggccgctcgaggtgaaggagagagccctcaggcccgagcactggcatcacagctgcaggattcactcaaggacttgaaggcacgaatgcaggaggccatgacccaggaggtctcggatgtattcagcgacactacaactcccataaagctcctggccgtagccgctaccgccccaccagatgccccaaaccgagaagaagtattcgacgagcgggctgccaacttcgagaatcactctggcaaactgggcgctacagccgagaaagccgctgccgtgggcaccgcgaacaaaagcacagtcgaagggatccaggcctctgtaaagactgccagagagttaactccacaagttgtgtcggccgcacgcatcttacttcgcaacccaggcaaccaggccgcatatgaacatttcgagacaatgaagaatcagtggattgataatgtagagaagatgactggcctcgtggatgaagccattgacactaagtctctcctggacgctagcgaagaggccattaagaaggacctggataaatgtaaggtggcaatggccaatatacaaccacagatgttagttgccggagcgacatcgattgcaagacgagccaatcggattctgctggtggccaagagggaagtcgagaactcagaggacccaaagttccgggaagctgtgaaggctgcctccgatgagctctccaagacgatttctcctatggttatggacgccaaagccgtggccggaaacatttcagatccagggcttcaaaagagctttctagacagcgggtaccgaattttgggtgccgtggccaaagtgagggaggcatttcagccccaggaaccagattttcccccacctcctccagatttggagcaattaaggcttaccgacgaacttgcccctccaaaacccccattgcctgaaggggaagtgcctcctcccaggccccctccacctgaggagaaagacgaggagttccccgaacagaaagcaggagaagtgataaaccagcccatgatgatggccgctagacagctccatgacgaggccagaaagtggtcttccaaggggaatgatatcatcgccgctgccaagcgaatggctctgctcatggcagaaatgtccagactagtgagaggagggagcggtaccaagcgggctctgatccaatgcgcgaaagacatcgcaaaagctagtgacgaggtcaccaggctggctaaagaggtggctaagcagtgcacagataaacgaatccgcaccaacctgctacaagtatgtgaacgcattcccacaatatccactcaattaaagatcctgtccaccgttaaggcaacaatgttgggccgaacaaacatcagcgacgaggagagcgagcaggcaacagaaatgctcgttcataatgcgcagaacctgatgcagtctgtcaaagagaccgttagggagctaaaactgctgcagagtaaatttgaacaaatgctagacctgcactgtgctggcctcgaacggctgccaggcacatccagacaccttgcagagcctggatggcatcgaaacttgtattag

SEQ ID NO: 31444 - DNA, 570 bp, synthetic construct
  misc_feature 1..570: note = Description of Artificial Sequence: Synthetic coding sequence
  source 1..570: mol_type = other DNA
atgactgagtacaagctggtcgtggttggagccggaggagtaggaaagtctgccctgacaatccagttaatccagaatcacttcgtcgatgaatacgatcctacaattgaggactcttataggaagcaggtcgttattgacggagaaacctgcttactggatattttggatacagcaggccaggaagaatatagtgcgatgcgtgaccaatacatgcgcacaggagaaggattcctctgtgtgttcgcgattaacaataccaagagtttcgaagatattcatcactaccgggaacagattaagagagtcaaggactccgaggacgtgcccatggtactcgttggcaacaagtgcgacctcccgagccgtacagtagacacaaagcaggcccaggacctggccaggtcttatggaataccttttatagagactagtgcaaagactcgtcagcgcgtagaagacgcgttttacacactggtgcgggaaatcagacagtaccggctaaaaaaaatttctaaggaagaaaagacacctggatgtgtgaagattaaaaaatgtatcataatgtag

SEQ ID NO: 31445 - DNA, 567 bp, synthetic construct
  misc_feature 1..567: note = Description of Artificial Sequence: Synthetic coding sequence
  source 1..567: mol_type = other DNA
atgaccgaatacaaactggtcgtggtgggtgcaggtggtgtgggcaagtcagccctgaccatacagttgattcagaaccattttgtggacgagtatgatccgacaatcgaggacagttatcgcaaacaggtggtgatcgatggggaaacatgtctcctggatatactcgacactgccggtcaggaagagtatagcgctatgcgcgaccagtacatgaggacaggggaaggctttttgtgtgtcttcgcaatcaacaacaccaaatctttcgaagacatccaccactacagggagcaaataaaaagggtgaaagactcggaagacgtccccatggtgttggtgggcaataaatgtgatctgccctctcggacagtggacacaaaacaggcccaggatctggccagatcctacggcattcctttcattgaaacatcagccaagacccggcagggggtggatgatgccttctacacgctcgtcagggaaataaggaagcataaagagaaaatgtctaaagatggtaagaaaaagaagaagaagtccaaaaccaagtgtgtgattatgtag

SEQ ID NO: 31446 - DNA, 228 bp, synthetic construct
  misc_feature 1..228: note = Description of Artificial Sequence: Synthetic coding sequence
  source 1..228: mol_type = other DNA
atgactgaatacaagttggtcgtggtaggcgctggcggagtaggcaagtctgctctaactatccagctgattcagaaccactttgtcgatgaatacgatcccacaattgagggcgttgacgacgctttttatactctcgtgagagagattcgaaaacataaagaaaagatgtcaaaggatggaaaaaagaagaagaagaaaagcaagaccaaatgtgtgatcatgtag

SEQ ID NO: 31447 - DNA, 2931 bp, synthetic construct
  misc_feature 1..2931: note = Description of Artificial Sequence: Synthetic coding sequence
  source 1..2931: mol_type = other DNA
atgagaggagctagaggtgcctgggattttctttgtgtgctcttacttttactgcgcgtccagaccggatcctcccagcctagcgtgtctcccggtgagcctagtccccctagcattcaccctggaaaatccgatctgatagtgcgggtgggtgacgaaattaggctcctttgtactgaccccggatttgtgaagtggacgtttgagatcctggacgaaaccaacgaaaataaacagaatgagtggattactgagaaagctgaggcgactaataccggaaagtacacgtgcaccaataagcatggactgagtaactcaatatacgtcttcgtgagagacccagctaaattgtttcttgttgatcggagcctgtacgggaaagaggacaacgatactctagtacggtgtccgctgaccgatcctgaggtgacaaactactccctgaaaggatgccagggtaaacccctgccaaaagaccttcggttcattccagatcccaaagccggtatcatgatcaaatcggtgaagcgagcctaccatcggctttgcttgcactgcagtgtggaccaggaaggaaagagcgtgttatccgagaagttcatactcaaagttcgtcctgcgttcaaggctgtgcccgtagtcagtgtctcaaaagctagctatctcctgcgagagggagaggaatttacggtcacttgcacgatcaaagacgtgagctccagtgtatattcaacctggaaacgggaaaactctcagaccaagttgcaagagaagtataacagctggcaccacggggacttcaattacgagagacaggctaccctgaccatcagctccgcacgcgtgaatgattcaggtgtcttcatgtgttatgccaataacacgtttggcagcgcaaacgtgaccacaacactggaagtggtggacaaggggttcatcaacattttcccaatgatcaacactacggttttcgtgaatgatggagagaacgtggatttgatcgtagagtacgaggcgttccctaaaccggaacaccagcaatggatttacatgaatcgtacatttactgacaagtgggaagactaccctaagtctgaaaacgaaagcaacatacggtacgtgagtgaactccatctcacaagactcaaaggcacagagggaggtacatatacgttcctggtgtccaacagcgatgtgaacgctgctattgcattcaatgtgtacgtgaatactaaacccgagatcctgacctacgaccggttagtgaacggcatgttacagtgtgttgcagctggttttcccgagcccacaatcgattggtacttttgtcctggtactgaacagcgctgtagcgcctcggtgcttccagtggatgtgcagaccctgaacagctctggcccacccttcggtaagctggtggtgcagtcttctatagacagcagtgcctttaagcataatgggaccgtcgaatgtaaggcttataacgatgtgggaaaaacttctgcttacttcaatttcgccttcaaaggcaataacaaggaacagattcatccccacaccctgttcacccccctgttgatagggtttgtgattgttgctggtatgatgtgcatcattgtgatgatcctcacatataaatacctgcaaaaacccatgtacgaggtgcaatggaaggtggtggaggaaatcaatggcaataattatgtgtacattgatccgacacaattgccctacgatcacaagtgggagtttcccagaaatcgactgtcttttggcaagactctaggcgctggcgctttcggcaaggtcgtggaggctaccgcctatgggttgatcaagagtgatgctgcaatgactgtcgctgtgaaaatgttgaagccctctgcccatctaactgaacgggaggcattgatgtctgagcttaaggtgctgtcttatctcggaaaccacatgaacatcgtgaacctgctgggtgcatgtactattggtggccctaccctggtgatcaccgagtattgctgctatggcgatctgttgaatttcttgagacggaagagggatagtttcatctgctctaagcaggaggaccatgccgaggcagccctttataagaacctgctgcacagcaaagagtcatcctgctctgattctaccaatgaatacatggatatgaagcctggcgtcagttatgttgtccctacaaaagcggataaaagaagatcagtgagaattggtagctatatcgaacgcgatgttacacccgcaatcatggaagacgatgaactggcactggacctggaggatctgttgtcattctcctaccaggtggctaagggaatggcctttctggcatcaaaaaactgtatccaccgagacctggcggcaaggaatattctcttgacccatggtcggatcacgaagatatgtgactttggcctggctagggacattaaaaatgactcaaattacgtggttaaaggtaacgctcggctaccggtgaagtggatggcgccagaaagcatcttcaactgtgtgtacacgtttgagagcgacgtatggagctatggaattttcctttgggagctcttttcccttggatcatccccctaccccggaatgccggtcgactctaagttttacaaaatgatcaaggagggattccggatgctttccccagaacacgcgcctgccgaaatgtatgacattatgaagacctgttgggacgccgacccccttaagaggcctacattcaaacagattgtacagctgatcgaaaaacagatcagtgagtccactaatcatatctacagcaatctggccaactgctcccccaatcggcaaaaacctgtcgtggaccacagcgtgaggattaactccgtgggatccactgcaagctcctcccagcccctgttagtccacgacgatgtttag

SEQ ID NO: 31448 - DNA, 2919 bp, synthetic construct
  misc_feature 1..2919: note = Description of Artificial Sequence: Synthetic coding sequence
  source 1..2919: mol_type = other DNA
atgcgcggtgcccgtggcgcttgggatttcctgtgtgtgctgctgctgctgttacgtgtgcagaccgggtcttctcagccctccgtgagccctggcgaacctagtccgccttccattcacccaggcaaatctgacctgattgtgagggtaggcgatgagattaggctgctgtgcactgaccctggttttgtgaaatggacatttgagattctggatgagacgaatgagaacaagcaaaatgaatggattactgagaaagcggaggccacaaatactggaaaatatacttgtaccaataagcatggcctgtccaacagcatatatgtcttcgtcagggatccagctaagctctttctcgttgaccgatctctgtatgggaaagaagataacgatacgttagtccgctgtccgctgaccgacccggaggtcacaaactatagtctgaagggttgccaggggaagcccctccctaaagacttacggttcatccctgatccaaaggctggcatcatgataaagagtgtgaagcgggcttaccatcgcctgtgcctccattgtagcgttgatcaggagggaaagtcagtactcagcgagaagtttatcctaaaagtaagacccgctttcaaagcagtgcccgtagtttccgtgtcgaaagcctcctaccttttacgcgaaggggaagagtttaccgttacatgcactattaaggatgtaagttcaagcgtttactcaacgtggaaacgggaaaactcccagacaaagctgcaagaaaagtataatagttggcaccacggagacttcaattatgagagacaagccactttgactatcagctcggctcgggtcaatgactccggcgtgtttatgtgttatgcaaacaacaccttcggaagtgccaacgttacaaccacactggaggtcgttgacaaagggtttattaacattttccctatgattaatacgacagtgttcgtgaacgacggcgaaaacgtagatttaatcgtcgagtacgaggctttcccaaagcccgagcaccagcagtggatctacatgaaccgcacgttcaccgataagtgggaagactacccaaaatctgagaatgagagtaacattcgatacgtatccgaattgcacctgacaagactgaagggtaccgagggcggtacatacacctttctggtttctaatagtgacgtgaacgccgctatcgctttcaacgtctatgtaaatactaagccggagatcttgacttatgaccgattggtgaatgggatgttgcagtgcgtggctgccggattccctgagcctacgattgactggtatttctgtcctggcaccgagcagaggtgctccgctagcgtccttcctgttgacgtgcaaactctgaacagctccgggcctccattcggaaagctggtggtgcagtcttccattgacagctcagccttcaagcataatggcacggtggagtgcaaggcatataacgatgtgggaaagacaagcgcctacttcaatttcgcttttaaggaacaaatacaccctcacactcttttcaccccgttgctgataggtttcgtgatcgtggctggcatgatgtgtatcattgtcatgatccttacctataagtatcttcaaaagcccatgtacgaggttcaatggaaggtggtagaggagattaacggcaataactacgtgtacatcgaccccacacagctcccttatgaccacaaatgggagttccctcggaatcgtctctcgtttgggaaaacacttggggcaggtgccttcggtaaggttgtcgaggcaaccgcgtacgggctcatcaagtcggatgccgcaatgacagtggccgttaagatgctgaagccatctgctcacctgacagagagagaggctctgatgtccgagctaaaggtgctgtcctacctgggcaaccacatgaatattgttaacctgctcggggcttgtacaatcgggggtccgacactcgtcattactgagtattgttgctatggtgacctgctaaactttctgcggcgtaagcgcgactcctttatttgtagcaagcaagaggaccacgcggaggctgcactatacaaaaatctgcttcacagtaaggaaagttcatgctcggactccaccaatgagtacatggacatgaaaccaggcgtgagttatgtcgtgcccacaaaggctgacaaacgaagatctgttcgcatcggcagctatatcgaaagagacgttactccggctataatggaggacgatgaactcgccctggatctcgaagacctgctttccttcagctatcaggtggccaaaggaatggcattcctggcatcgaagaattgcatccatcgagatctcgccgcacggaacatactcctgacccatggccgtatcacaaagatatgtgacttcggcctcgcccgtgacatcaaaaacgactctaattacgttgttaaagggaacgctcgcctccctgttaagtggatggcccctgaatccatcttcaattgcgtctacacatttgagtctgatgtttggtcttatgggatattcctttgggagcttttctctcttggctcatcaccatatcctggcatgcccgtggacagcaagttctataaaatgatcaaggagggctttagaatgctgtctcccgaacacgcgcctgcagagatgtacgacatcatgaagacctgctgggatgctgacccattgaagaggcctacctttaagcagatcgtgcagctcattgaaaagcagattagcgaaagtaccaatcacatctattccaacctggctaactgctcccctaataggcagaagcccgttgtcgaccacagtgtgaggattaattctgtgggctccactgctagcagcagccagccacttctggtgcacgatgatgtgtag

SEQ ID NO: 31449 - DNA, 1242 bp, synthetic construct
  misc_feature 1..1242: note = Description of Artificial Sequence: Synthetic coding sequence
  source 1..1242: mol_type = other DNA
atgcgcggagcaagaggggcttgggactttctgtgcgtgctccttttgcttctgagggtgcagaccggcagctcacagcccagtgtgagccccggagaacctagccctccatctattcaccctggcaagtccgatctgatcgtgcgcgtcggtgatgagatcaggctgctgtgtacagatccaggcttcgttaaatggacgtttgagattcttgacgaaactaacgagaacaaacagaatgaatggatcaccgaaaaggctgaggccactaatacaggaaagtacacttgcaccaacaagcacggcctgagcaatagcatttacgtatttgtacgggaccccgcaaagctcttcctggtggacagatctctctacgggaaagaggacaatgacaccctcgtgagatgcccactgactgatcctgaggtaacgaattactctttgaaagggtgccaggggaaacccctgcccaaggacttgcgcttcattcccgacccaaaagccggaatcatgatcaagagcgtcaaaagagcttatcaccggctgtgcctccactgttctgtggatcaggaggggaagtcggtgctgtcagagaaatttattctgaaggtgcggcctgctttcaaggcagtgccggtcgttagcgtttctaaagctagctaccttctgcgggaaggggaagagttcactgtcacatgcaccattaaggatgtctctagctcggtctacagcacctggaaacgggagaacagtcagactaagctccaagaaaaatacaactcatggcatcacggggacttcaattacgagcgtcaagctactctcacaatctcgagcgcccgagtgaacgattcaggcgtgttcatgtgctacgccaacaatacattcgggagcgccaacgtcacaactactctcgaagtagttgataaagggtttataaacatttttcccatgataaatactacggttttcgtgaatgacggggagaatgtcgacctgattgtcgaatatgaagcgtttccaaagccagaacatcaacagtggatctatatgaataggacttttactgacaagtgggaagactacccaaaaagcgagaacgagtctaatatcaggtacgtgtctgaactccatctcactcggttgaaaggtacggagggcggaacttatactttcctggtgtcaaacagtgacgttaacgctgcaattgccttcaatgtgtacgtcaatagcaaactctag

SEQ ID NO: 31450 - DNA, 1212 bp, synthetic construct
  misc_feature 1..1212: note = Description of Artificial Sequence: Synthetic coding sequence
  source 1..1212: mol_type = other DNA
atggcctcagagttggccatgtccaattccgaccttcccacgagcccactcgccatggagtacgtcaatgatttcgatctgatgaaatttgaggtgaagaaagagccagtggaaacagataggatcatttcccagtgcgggaggctgattgccggaggctccttgtctagcacaccaatgagtactccatgtagctcagtgccaccctcaccttccttctcagctccctcaccaggttccggaagtgaacagaaagctcacctggaagattactattggatgactgggtacccacagcagctgaatcccgaggctctcggctttagtcctgaggatgcagtcgaggcactgatcagtaactcacaccagctccagggtggattcgacggatacgcccgtggagctcagcagctggctgcagcagctggtgctggagcaggagcttccctaggaggaagcggcgaggagatgggacccgctgctgccgtcgtctccgccgtgatcgcggcagccgcagcccagagtggtgccggaccgcattatcatcatcatcaccatcatgccgcaggacatcatcaccaccctaccgccggtgctccaggtgccgctggctcagctgcggcatccgctggaggtgcaggcggagctggaggtggtggacctgcctctgcaggcggaggagggggtggcggtggcggaggtggaggcggaggggctgctggtgctgggggagcgctccatcctcatcatgctgccggtggactccacttcgatgatcgcttcagtgacgaacagcttgtgactatgtcggtgagggagttgaacaggcagctgaggggcgtaagcaaagaggaagtgatcaggctcaaacagaaacggaggacactgaaaaaccggggatacgctcagagctgtcgcttcaagagagtgcaacaaaggcacgttttggagagcgaaaagaatcagctcctgcagcaagtggatcatctgaaacaggaaattagccgtctcgtgagggaaagagacgcctacaaggaaaaatacgaaaagctggtctccagcggtttccgggaaaacggctcctcctctgataatcctagtagtccggaattcttcatcacggagcccactagaaaactggagccttcagttggctacgccaccttctggaagccccaacacagggttctgacatctgtgttcacaaagtag

SEQ ID NO: 31451 - DNA, 1122 bp, synthetic construct
  misc_feature 1..1122: note = Description of Artificial Sequence: Synthetic coding sequence
  source 1..1122: mol_type = other DNA
atggcctccgaactggctatgagcaattctgacctccccaccagccctctggctatggagtatgtcaatgacttcgacctgatgaaattcgaagtgaagaaggaaccagtcgaaacagaccgcattatcagtcagtgcggtagattgatcgcaggtgggtccctcagctcaacacctatgtccactccttgttcttcagtgcctccctccccttcttttagcgctccaagcccgggttctgggagtgagcaaaaggcacacctcgaggactactattggatgactgggtacccacagcagcttaaccctgaggctttggggttcagcccggaggacgccgtggaagcgctcatttcaaattcacatcaactgcaaggtggatttgatgggtatgccaggggcgcacagcagctcgcagctgccgcaggagcgggtgctggagcatctctcggcggtagtggcgaggagatggggccagctgcagccgtagtcagtgcagttatagctgcggctgcagcccaatctggcgctgggccacattaccaccatcaccaccatcacgcagcgggtcaccatcaccaccctactgccggagccccaggcgcagccggatcagctgccgcttctgccggtggtgcagggggtgccggagggggaggacccgcaagcgcaggaggcggaggaggcggaggcggtgggggtggcggaggaggcgctgccggtgcagggggtgccttgcacccacatcatgccgcaggcggacttcacttcgatgatcgcttttccgatgaacaactcgtaaccatgtccgtgagagaactcaatcggcagctgagaggagtctccaaggaggaagtgatccggctcaagcagaagcgacgtaccctgaagaatcggggttacgcccagagctgtcgctttaaaagagtgcagcagaggcatgtactggagtcagagaaaaatcaacttctgcagcaggtggaccacctgaagcaggaaatctcccggttggtacgtgaacgcgacgcatataaggagaagtacgagaaactcgtgtcgtcaggcttccgtgaaaatggatctagttccgataacccatcgtcaccagagttttttatgtag

SEQ ID NO: 31452 - DNA, 1062 bp, synthetic construct
  misc_feature 1..1062: note = Description of Artificial Sequence: Synthetic coding sequence
  source 1..1062: mol_type = other DNA
atggcagcggagctggcgatgggcgctgagctgccctcatcccctttggccatcgagtatgtaaacgattttgacctgatgaagtttgaagtcaagaaagagccaccggaagccgagagattctgccacaggttaccaccagggagtctttcatcaaccccgctcagcactccctgtagctcagttccatcttcaccgtccttctgtgccccatcccccggtaccggcggtggcggaggcgctggcggagggggaggctctagccaggccggtggcgcaccgggtccaccaagcggcggacctggggctgttggtggtacctctggcaagccggctctcgaggatctttattggatgagcggctatcagcaccatttaaacccggaggctttgaatctgacacccgaagatgccgttgaggcgttgatcgggagcggccaccacggggctcatcacggggctcaccacccagccgctgccgcagcctacgaggctttcagggggcctggcttcgccggagggggaggagctgacgatatgggggcagggcatcaccacggagcacatcatgcggctcaccatcaccatgccgcacaccatcaccaccaccatcaccaccatcacgggggtgctggacacgggggtggggctggccaccacgtaaggctggaggaacgtttcagcgatgatcaactggtgtctatgtcagtccgggagctaaataggcaactgcgcggtttctccaaggaagaagtcatccggctgaagcagaaaagacgtacactgaaaaatcggggatatgcacagtcctgtcggttcaagcgtgtgcagcagcgacatatcctcgaatctgagaagtgccagctgcagtcccaagttgagcagctgaagctggaggtgggcagactggctaaggagagggacctgtacaaggagaagtatgagaagctcgccggaaggggagggcctggcagcgccggaggtgcgggattcccacgagagcctagtcctccccaggccggtcctggtggcgctaaaggaacagccgatttttttctctag

SEQ ID NO: 31453 - DNA, 972 bp, synthetic construct
  misc_feature 1..972: note = Description of Artificial Sequence: Synthetic coding sequence
  source 1..972: mol_type = other DNA
atggccgctgagctcagtatgggcccagaactgcctaccagtcctttagccatggagtatgtaaacgacttcgatctcctgaaatttgacgtgaaaaaagaaccgctgggccgagctgagaggcccggaaggccatgcaccagactgcaaccagcagggtccgtgagtagcactcctttatctacgccatgctcgtcagtgccttccagcccatcattctctcccaccgagcagaaaacgcacttggaagacctttactggatggctagcaattaccaacaaatgaacccagaagccctaaatttgacacccgaggacgctgtggaggccttgatcggcagtcatcctgtgccccaacctttgcagagttttgattctttccggggagcccaccaccaccatcaccatcaccatccacatccccatcatgcctatcctggggctggcgtagcccacgatgagctagggccacatgctcacccccatcaccaccaccaccatcaggcttcccctccaccgtccagcgcggcatcgcctgctcagcagttaccgaccagccatccaggtccagggccacacgccactgccagtgccacagctgcaggtggaaacgggtcggtggaggaccgcttcagcgacgaccagttggtctccatgagcgtgcgggaacttaacaggcatctcagaggattcactaaagacgaggtcatcagactcaagcaaaagcggcgaacactgaaaaatcgtggttacgcgcagtcctgccggtacaagcgggtccagcagaaacatcatctggaaaacgagaagacccaactgattcagcaggttgaacagcttaaacaagaagtgtcccggttggcgagagagagggatgcctacaaagtgaagtgtgagaagctggccaattcaggtttcagggaagcaggcagcacatcagactccccctcttcccccgagttttttttgtag

SEQ ID NO: 31454 - DNA, 972 bp, synthetic construct
  misc_feature 1..972: note = Description of Artificial Sequence: Synthetic coding sequence
  source 1..972: mol_type = other DNA
atggcagctgagctctcaatgggtccagaactgccaaccagtcctctcgctatggaatacgtgaacgatttcgacctgctaaagttcgatgtgaagaaggagcccctcggacgcgctgaacggcctggacgcccttgtacacggctgcaacctgccggatcggtgagcagtaccccattgtcaacaccatgttccagtgttccatcctctccgtctttttcccccacagagcagaaaacacatctggaggacctttactggatggcttcgaactaccagcagatgaaccctgaggctctcaatctgaccccggaagacgcagttgaggccctaattggctctcacccagttccccagccacttcagtcgttcgattcatttcgcggagcgcaccatcaccaccaccaccaccatccccatccccaccatgcctatcccggagctggagttgcgcacgacgagctgggtccacatgcccacccacaccaccatcatcatcaccaggccagtccccctccatccagtgcagcttcccccgcacaacaactgcctacatcccatcctggtccgggacctcatgccacggcaagcgccactgccgcaggcggaaatggatctgtcgaagatcgattctctgacgaccaattggtaagcatgtcggtaagggagctgaatagacatctccgcggttttacgaaggatgaggtaatcaggctcaaacagaaaagaaggacattgaaaaatagggggtacgctcagtcctgcagatataaaagagttcagcagaagcaccacctcgaaaacgaaaaaactcaactcattcagcaggtggaacaactgaagcaggaggtaagcagattggcacgggaacgggacgcatataaagttaagtgtgagaagctggccaatagcggatttagagaggctgggtccaccagcgactccccttctagcccagagttcttcctctag

SEQ ID NO: 31455 - DNA, 1233 bp, synthetic construct
  misc_feature 1..1233: note = Description of Artificial Sequence: Synthetic coding sequence
  source 1..1233: mol_type = other DNA
atggctaaacggagcagaagtgaggacgaggacgacgatcttcagtatgcagatcatgattacgaggtgcctcaacagaaaggccttaagaagttgtggaatagagttaaatggacccgcgatgaggacgataagcttaaaaagctggtcgagcaacacggcactgatgactggaccctgatcgcgagccatctccagaatcgatccgatttccagtgccagcatagatggcaaaaggtgctaaatccggagctgatcaaggggccttggactaaagaggaagaccagcgcgttatcgaactcgtgcaaaaatatggaaaaaagagaaagatgcgggtaggccactctcccggtagtgagctgagagatggctctctgaatgatggcggtaacatggccctcaagcatacaccgctcaagaccctgcctttcagcccctcccagttttttaatacatgccccggtaatgagcagcttaatattgaaaatccatctttcacgtccacccccatctgtgggcagaaagccctaataactacacctttacataaggagactacaccgaaggatcagaaggagaacgtcggatttcgcacccctaccatccggcgaagtatcctgggaaccacaccacgcacgcctacgccgtttaagaacgccctagctgcccaggagaagaagtacgggcctctcaagatcgtatctcagcccttggctttcttggaggaggatattagagaagtactcaaagaagagactggcactgacctgtttttaaaagaggaggacgaacccgcatacaagagctgcaagcaagagaataccgcctccgggaaaaaggtaagaaagtccctagtgctggacaattgggagaaggaagagagcggtacccagctgttgacggaggacatctccgacatgcaatctgagaaccggtttacaacctctctgcttatgattccccttctcgagatccacgataatcgatgtaatctaatcccagagaaacaggacatcaactctacaaacaagacatacaccctgacgaagaagaagcccaatccaaatacgagcaaggtggttaagctcgaaaagaatctacagtcaaattgtgagtgggagaccgtggtttatgggaaaaccgaggatcaacttataatgaccgagcaagcacgacgctatctgtccacttatactgcaacttccagcaccagcagggccttgatcctatag

SEQ ID NO: 31456 - DNA, 2259 bp, synthetic construct
  misc_feature 1..2259: note = Description of Artificial Sequence: Synthetic coding sequence
  source 1..2259: mol_type = other DNA
atggctaaaaggagtcggtccgaagatgaggatgatgatctacagtacgcagatcacgactacgaagtccctcagcagaaaggcctaaaaaaactgtggaatagggttaagtggacccgcgacgaagatgataagctgaaaaaactggtggaacagcacggcactgacgattggaccttaattgcgtctcacctccagaacagatctgatttccagtgtcagcatcgctggcaaaaggtgttaaaccccgagctaataaagggaccttggactaaggaggaagaccagcgggtgatcgaattggtgcaaaagtatgggccaaaacggtggagcctgattgccaagcacctcaagggacgtatcggaaaacagtgcagggagagatggcacaatcatctcaaccccgaagttaaaaaaagcagctggacagaggaagaggaccgcatcatatatgaggcacacaagcggcttgggaaccgctgggccgagatagccaaactcctgcctggtagaaccgacaactctattaagaaccactggaatagtacgatgcggcgaaaggtcgaacaagagggctacttgcaagacggcattaaaagcgaaagatcatcctccaagctccagcataagccttgtgccgctatggatcacatgcagacccaaaaccagttttatattccagtgcagatccccggataccagtacgttagccctgaagggaactgcattgaacacgtgcagccaaccagtgccttcattcagcaaccattcatcgatgaggaccctgacaaagaaaagaaaatcaaggagttggagatgttgctcatgagcgctgagaacgaagtgagacggaaaagaataccctcccaaccgggaagcttctccagttggtccggcagcttccttatggatgataatatgtctaacacccttaattcactagatgagcatacttctgaattttactccatggatgaaaatcagccagtgtccgctcagcagaacagcccaacaaaattccttgccgtcgaggctaatgccgtgctatcgagtctgcagactattccggagttcgcagaaaccctggagctcatcgaaagcgaccctgtagcctggtcggatgttacctccttcgatattagtgatgccgcagcgagtcccattaaatctactccagtcaagcttatgaggatccagcataacgagggtgccatggagtgtcagttcaatgtgagtctggtgctcgagggcaaaaaaaatacgtgtaacgggggtaatagtgaagccgtgcctctgacatcgccgaacattgccaagttctccacccctcccgctatacttaggaagaaaagaaaaatgcgggtcggtcattctccagggtctgaacttcgagatggcagcctgaacgatgggggaaacatggcgttgaagcacacgcccttaaagaccttgcctttctctccctcacagtttttcaatacctgtccaggaaacgaacagttgaatatcgaaaatccatcattcacctcaacacccatctgtggccagaaggctctgataacaacaccactgcacaaggagacaacacccaaggaccagaaggagaatgtgggatttaggacccccacaattcgtagatctatcctgggcacaaccccaaggacccctactcctttcaaaaatgcgctcgccgctcaagagaagaagtacggtcctttaaagatcgtgtctcaaccattagccttcctggaagaggacatacgggaagttttgaaggaggagacaggaacggacctgttcctgaaagaagaagatgagcctgcttacaagagctgcaaacaagagaatacagcgtccgggaagaaagtgcgcaaatccctcgtgttagataattgggagaaagaggaaagcggcacgcagctcctgaccgaggacataagtgacatgcagtcagagaatcggtttacaaccagcctcctcatgatcccgctgctagagatccatgacaaccgctgtaatttgattccagagaagcaggacattaatagtactaataagacttatacattgaccaaaaaaaagccaaatcccaacaccagcaaagtcgtcaaactggaaaagaatctccagagtaactgcgaatgggaaaccgtggtttacggaaagacagaggaccagctcatcatgacagagcaagcacgcaggtatctctcgacatacaccgcaaccagctctacctcccgtgctctcatcctctag

SEQ ID NO: 31457 - DNA, 2079 bp, synthetic construct
  misc_feature 1..2079: note = Description of Artificial Sequence: Synthetic coding sequence
  source 1..2079: mol_type = other DNA
atggctaagaggagtaggagtgaagatgaggatgacgatctacagtatgccgaccacgactatgaagtgcctcagcagaaaggactgaagaagctctggaatagagtaaagtggacaagagacgaagacgacaaactcaagaagctcgtggagcagcatggaactgatgactggacacttattgcctcccatctgcaaaatagatcagattttcagtgccagcaccggtggcagaaggtgttaaacccagagcttattaagggtccctggactaaggaagaagaccagagggtgatcgaactggtccagaagtacgggcctaagagatggagtttaattgccaagcacctcaagggaaggattggtaaacagtgtcgagaacggtggcacaatcacctgaatccagaggtgaagaaatcgtcttggactgaggaggaggatcgcatcatctacgaggcgcataagagactgggcaaccggtgggcagaaatcgccaagttgctgcctggcaggaccgacaactctattaagaaccactggaactcaacaatgcggaggaaagtagagcaagaaggctacctgcaggacgggattaaatcggagcgctctagctcaaagctccagcacaaaccgtgtgcggctatggaccatatgcagacccagaatcagttctacatacccgtgcagattccgggatatcagtacgtttcccctgagggaaattgcatcgagcacgtccagcccacctcagcttttattcaacaaccttttatcgacgaggatccagataaggagaagaaaatcaaagagctcgagatgcttctgatgtccgcagaaaacgaggtgaggcggaagaggattcctagccaacctggaagttttagttcctggtccggcagtttcctcatggatgataacatgtccaatacgttgaatagccttgatgagcacacgtcagaattctactcaatggacgagaatcagccggtctccgcccagcagaactctcctacgaagttcctggcagttgaagctaacgctgtgctgtccagcctgcaaaccatacccgagttcgccgagacactggagctgatcgaatcagaccccgtggcatggtcagatgttacctcatttgatatttccgatgccgcagccagccccatcaagtccactccggtgaagttaatgcgaatccagcacaacgagggagccatggagtgtcagtttaacgtgtctctcgtgctggagggcaaaaagaatacttgcaacgggggtaattccgaagctgtgcctcttactagccctaatatcgccaagttcagcacccctcccgcaatcctgaggaagaagagaaagatgcgggtgggacactcacccggttcagaattgcgggatggatccttgaatgacgggggtaatatggctctgaaacataccccccttaaaacattacctttttctccaagtcagttctttaacacttgtcccggaaatgaacaactcaacattgagaatccttctttcacctccacacccatctgcggccaaaaggctcttatcaccacacccctacataaagagaccactcctaaggatcagaaagaaaacgtgggcttccgcacccctaccatcagacggagtattctgggaactacaccccgaacacccacccctttcaagaacgcactcgccgctcaagaaaagaaatacggcccactcaagatcgtgtctcaacctctggccttcctggaagaggatattagggaggtattaaaagaggagacagggaccgacctgtttttgaaggaagaggatgagccggcttataagtcttgcaagcaggaaaataccgcctctgggaagaaagtccgcaagtcacttgttctggataactgggaaaaggaggaatctggcactcagctgctgactgaggacatctcggacatgcagagcaattgtgagtgggagaccgtcgtgtacggcaagactgaagaccagttgataatgactgagcaggcgaggagatacctgagcacttataccgcaacctcctcgacctcccgggctcttattctgtag

SEQ ID NO: 31458 - DNA, 711 bp, synthetic construct
  misc_feature 1..711: note = Description of Artificial Sequence: Synthetic coding sequence
  source 1..711: mol_type = other DNA
atgtgcgtctgcgcaggctgccgtgcagctcctagccggagaggggcaggtccacttcaggttgccggaggatggtcggagggggctgatatggactacgatagctaccagcactatttctatgattatgactgtggtgaagacttctatcggtccaccgcgccttctgaggatatctggaaaaaattcgagctggtgccctcccccccaacaagcccaccatggggtctgggtcccggtgctggggaccctgcccctgggatcgggcctcccgagccctggccaggaggatgcacgggagacgaagccgagtcaagaggccactccaagggctggggcaggaattatgcgagcatcatccgcagagactgtatgtggtctgggttttccgccagagagcggctagagagagcagtatcagatcgcctcgccccaggtgcgccacgaggtaatcctcccaaagccagtgccgcacccgattgtacgccatctctcgaagcagggaatcccgcaccagctgcaccttgccccctgggagagcccaagacgcaggcctgctccgggagtgagagcccgtccgacagcggaaaggacctgcccgaaccaagcaaaaggggacctcctcatggctggcctaagctgtgcccctgtttgcggagtggtattgggagcagtcaagccctggggccttcacctcccctctttggctag

SEQ ID NO: 31459 - DNA, 1095 bp, synthetic construct
  misc_feature 1..1095: note = Description of Artificial Sequence: Synthetic coding sequence
  source 1..1095: mol_type = other DNA
atggattacgacagttaccagcattacttttacgattatgattgcggggaagatttctatcgctcaacagctccctcagaggatatttggaagaagtttgagctcgtcccctccccacccaccagtcccccttggggacttgggccaggagcaggggaccccgctccagggattgggcctccagagccatggccgggtggctgcactggcgacgaggctgaatcgcggggacactctaaaggatggggccgtaattacgcttccatcatcaggagagattgcatgtggagcgggttttccgcacgcgagcgactggagcgcgctgtgagtgatcgacttgctccgggagcgcctcggggaaacccaccgaaggcgagtgcagcccctgactgcactccctcactagaggccggaaatccagcacccgcagcaccctgccctctcggcgagccgaagactcaggcatgcagtggatctgagtcacccagtgacagcgagaacgaggaaatcgacgtggttacagtggagaaacgccagtccctcggaattcggaagcctgtgacgatcaccgtccgggctgacccactcgatccgtgcatgaagcacttccatatcagcatccatcaacagcagcacaactacgctgccaggttcccacctgagtcttgcagccaagaggaggcatctgagagaggtccgcaagaagaagtacttgaacgcgacgcggcaggcgagaaggaagatgaggaggacgaagagatagtgtctcccccaccggtcgagagcgaagctgcacaaagttgtcatcccaaacccgtttcttccgacaccgaggacgtgacaaagcgcaagaaccacaatttcttggagagaaaaagacggaacgatctgcggtcaaggtttttagccctcagggatcaagtcccgacacttgcctcatgtagcaaggcgcctaaggttgtgattctctctaaggcgttagaatatttacaggccctggtgggcgcagagaaaagaatggctaccgaaaagagacaactgcggtgtagacagcagcaacttcagaagagaatagcctatctaaccggatattag

SEQ ID NO: 31460 - DNA, 1185 bp, synthetic construct
  misc_feature 1..1185: note = Description of Artificial Sequence: Synthetic coding sequence
  source 1..1185: mol_type = other DNA
atgtgcgtgtgcgcaggatgtagagctgcaccgtctcggcgaggtgccggacctctccaggtcgcagggggatggagtgagggcgcagacatggattatgattcataccagcactatttctacgattacgattgtggtgaggacttttataggtccacagctccgagcgaagacatctggaagaagttcgagctggtcccctcccccccaactagccccccttggggcctcggacccggagctggcgatccggcacctggaattgggcctcccgaaccatggcctggtggatgtaccggcgacgaagcagaatccaggggccattccaagggttgggggcgaaactatgcctccattattcgtagagattgtatgtggagtggattctccgccagggaacgcctggagcgtgccgtttccgaccgattggcgcctggggcaccaagggggaatccaccgaaggcgtccgccgcacctgactgcactccgtccctggaagccggtaatccagcgcctgcagccccatgtcccttgggagaacctaagacacaggcctgctccggaagtgaaagtccaagtgactcggagaatgaagagatagacgttgttacagtcgaaaaacgccagagcctaggcatccgcaagcctgtaaccatcacagtacgcgctgacccactcgacccttgcatgaaacactttcatataagcatacaccagcaacaacacaattatgccgctcggttcccccctgaaagctgttcccaagaggaagcaagtgaaagggggcctcaagaagaggttttggagagggatgctgccggtgagaaggaggatgaggaggatgaagagattgtgagccccccacccgtagaatccgaggccgcacagtcctgtcacccaaagccagtgtcatccgacactgaggatgtgactaaaagaaagaatcataatttcctggagcgaaagcggagaaatgatttgagaagtaggttcctggctctccgcgatcaggtacccactctggcatcttgctccaaggctccaaaagtggtaatattatcgaaagctcttgagtacctgcaggcattggtgggtgccgagaagagaatggccaccgagaagaggcaactacgatgtagacagcagcagttgcagaaacggatagcctaccttacaggatactag

SEQ ID NO: 31461 - DNA, 621 bp, synthetic construct
  misc_feature 1..621: note = Description of Artificial Sequence: Synthetic coding sequence
  source 1..621: mol_type = other DNA
atggactatgactcctaccagcactacttctatgactacgattgcggagaagacttctaccgttcgactgcaccaagcgaagatatttggaaaaaatttgaactggtaccatctccacccacatcccccccttggggtctgggtccaggagccggagatcctgctcctggaataggccctcccgagccgtggcctggcggttgtacaggtgatgaggccgaaagtcgagggcactctaagggctgggggcgaaactacgcatcgattatcaggcgggattgtatgtggtctggatttagtgccagagaaagattagagcgggcagtatccgacaggttggccccaggtgcccctcgcggaaacccccctaaagcttcagcggcacccgattgcaccccatccctggaagcaggaaacccagcacccgctgccccatgccctctgggtgagccgaaaacccaggcatgctcggggtccgagtcaccttccgactccgggaaagatctcccagaaccatccaaaaggggtcctcctcatggatggccgaagttatgtccctgtcttaggtccgggattggttcctctcaagcattggggccatcacctcctctctttggctag

SEQ ID NO: 31462 - DNA, 303 bp, synthetic construct
  misc_feature 1..303: note = Description of Artificial Sequence: Synthetic coding sequence
  source 1..303: mol_type = other DNA
atggactacgactcatatcaacactacttctacgactatgactgcggtgaggacttctacagaagcactgccccttcagaagatatatggaagaagtttgagctggtgccttcaccaccaacgagtcccccttgggggttagggcctggcgcaggcgaccccgcacctggaattggaccacccgagccctggcccggtggctgcactggggatgaggctgagtctcgcggtcacagtaagggctggggtaggaactatgcttcaataattcggagggattgtatgtggagtggcttttcctag

SEQ ID NO: 31463 - DNA, 642 bp, synthetic construct
  misc_feature 1..642: note = Description of Artificial Sequence: Synthetic coding sequence
  source 1..642: mol_type = other DNA
atgcctagacgggctgaaaactgggacgaagcagaagtgggggctgaggaagctggagtcgaggagtacggtccggaagaggatggaggggaagaatcaggcgctgaggaatccggcccagaagagagtggccctgaggagctgggagcagaggaggagatggaagctggcagacctcggccagtcttgaggtccgttaactcaagggaacctagccaggtaatcttttgcaaccgtagtccgagagtcgtgctacctgtgtggctaaactttgatggcgagccccagccttatcctactctgcccccaggcacaggcaggagaatccactcctacagaggacacctgtggctgtttcgtgatgctgggacacatgatggcttacttgttaaccagacagagctgtttgtcccctccctgaacgtcgatggccagcccatttttgccaatattactttgcccgtgtatactttaaaggagagatgtctgcaggttgtgcgaagtttagtgaaaccagaaaattatcgcaggctggacattgtccgaagcctgtacgaggacctcgaggaccatccaaatgtccaaaaagatctggagagactcacccaggaacgtatcgcccatcaacgaatgggggactag

SEQ ID NO: 31464 - DNA, 519 bp, synthetic construct
  misc_feature 1..519: note = Description of Artificial Sequence: Synthetic coding sequence
  source 1..519: mol_type = other DNA
atgccacgcagggccgaaaactgggatgaagctgaagttggcgcagaggaggccggagtcgaggaatacgggcctgaagaggacggtggagaggagtcaggagcagaagaaagcggccctgaggagtccggcccagaggaattgggcgctgaagaggagatggaggccggaaggccacgacccgtcctccgcagcgtgaatagccgcgagccatcacaagttatcttttgcaacaggtccccaagagttgttctgcctgtttggctgaactttgacggggagccacagccctatccgactctgccacccggaacggggagaagaattcactcctatcgcgtttatacactaaaggaacgctgtcttcaggtggttagaagcctcgtaaagcctgaaaactacagaaggctggacatagtccggagcttatatgaggatctggaagaccatccaaacgtgcagaaggacctggagcgtctcactcaggagcggattgcccaccagagaatgggggattag

SEQ ID NO: 31465 - DNA, 396 bp, synthetic construct
  misc_feature 1..396: note = Description of Artificial Sequence: Synthetic coding sequence
  source 1..396: mol_type = other DNA
atgccgagaagggccgagaactgggatgaagctgaggtgggagccgaggaagctggcgtggaagaatacggcccagaggaggattcttatcggggacatctctggctgttccgcgacgctggaacacacgatggacttctggttaatcaaacagagctcttcgtgccatctctgaatgtagacggccagccgatctttgcaaacatcaccctgcccgtgtataccctaaaagagcgctgccttcaggtggtgcgtagtttggtcaaaccggagaactacagacgcctggatatagtgcgctcgctgtacgaagacttagaggaccaccctaacgttcagaaagacctggagcgcctgacccaggagcgtatcgcgcaccagcgcatgggcgattag

SEQ ID NO: 31466 - DNA, 1281 bp, synthetic construct
  misc_feature 1..1281: note = Description of Artificial Sequence: Synthetic coding sequence
  source 1..1281: mol_type = other DNA
atggtgcacttctgtggacttctgacactgcacagagaacccgtccctctgaaatcgatatcggtgtccgtgaatatctatgaatttgtggctggcgtgtccgccaccctcaattacgagaacgaggagaaggttccactggaggcgttttttgtgttcccaatggatgaagatagcgcagtgtattcttttgaagccctcgtggatggaaagaaaatcgtagcagagcttcaggacaagatgaaagctagaactaattatgaaaaggccatttcacagggccaccaagcgttcctcctcgaaggcgactcaagtagcagggatgtgttctcttgtaacgtcggtaacctgcagcctggttctaaggctgcagtcacactcaaatacgtgcaggaactgccacttgaagctgatggggctctcagatttgtgcttccagccgtcctgaatccaagatatcagttcagcggtagctccaaggattcctgtctgaatgtcaagacgccaattgtcccagtggaagacctgccatacaccctttccatggtcgcgaccatcgatagccagcatggcatcgagaaagtccaatccaactgtcctctttctcccactgaatatctgggggaagataaaacaagcgcccaggtgagcttggctgctgggcataaatttgatagggatgtggagttgctcatttactacaacgaagtgcacactccctcagtcgtgctggagatgggcatgccaaatatgaaaccgggacatctgatgggagacccaagcgcaatggtaagtttttatccaaatataccagaagaccaaccttccaatacctgcggtgagttcatctttctgatggatcgatccggcagcatgcaatccccaatgtcgagccaggatacgagccaattacggatacaggctgccaaagagaccctcatactcctgctcaaaagcctgccaatcgggtgttattttaacatctacgggttcgggtccagctacgaggcatgtttcccggaatccgtgaaatacactcagcagactatggaagaagcactgggacgggtcaaactgatgcaggcggatctcggtgggacagagatcctggctcccctgcaaaacatctaccgcggtccgagtatccccggtcacccgctccaggtgttcgagcgcccatacacactcacggtcctgctgctgcacctctcccctgaaggaaatctgtgtgtgattcggccaaggcattcaaggtggactataactgtgtctgtgggctag

SEQ ID NO: 31467 - DNA, 2361 bp, synthetic construct
  misc_feature 1..2361: note = Description of Artificial Sequence: Synthetic coding sequence
  source 1..2361: mol_type = other DNA
atggtccacttctgtggcctcttaactctgcaccgggagccggttcctcttaagagcataagcgtctcggttaacatctacgagttcgtggccggagtaagtgcgactctcaattatgaaaatgaggaaaaagtgccacttgaagcgttctttgtgttccccatggatgaggattctgcagtgtacagcttcgaggccttggtcgatgggaaaaagatcgttgccgaattgcaggacaaaatgaaagcccgtactaattatgaaaaggccatctctcaggggcaccaggcttttcttctagaaggtgactcaagttcccgtgatgtgttttcatgcaacgtgggcaacttacagcctgggtcaaaagccgcagttacactaaagtacgtacaggagctcccactggaggctgacggcgctttgagatttgttctgcccgcagtgctcaatcctcggtaccaattcagtggaagcagtaaggattcatgcctaaacgtcaagacccccatagtgcccgtcgaagacctgccgtataccctgagtatggtggccactatcgacagtcagcacggaatcgaaaaggtacagagcaattgtccactcagtcctacagagtatttgggagaagataaaactagtgcccaggtgagccttgccgcaggccataaatttgatagagacgtggaactgcttatatactacaatgaggtccacacccccagcgtggtcctcgaaatggggatgcctaacatgaagcctggtcacctgatgggagacccttccgctatggtaagtttctatcctaacatacccgaagatcaaccttcaaacacgtgcggcgaatttatcttcttaatggaccgtagcggatctatgcaaagcccaatgtcatcccaggatacttctcagctgcgcatccaggccgctaaagaaactctgatacttctcctgaagtcgctgcctatcgggtgttacttcaacatttatggctttggatcttcgtacgaggcgtgtttcccagagtctgtcaaatatacccagcagaccatggaagaagccttaggcagagttaaactgatgcaggctgacttgggaggcacagagatactcgcacccctgcagaatatctaccgtgggcctagtatccccggtcacccactccagctgttcgtattcacggacggagaggtgactgacacttttagcgtgatcaaggaagtgcggatcaaccggcagaagcacaggtgcttctcatttggcattggcgagggaaccagcacaagcctcattaagggcatcgccagagcatctggaggaacgtccgaattcattacaggcaaggataggatgcaatccaaagcactgcggacccttaaacggagcctccagccagttgtcgaggatgtgagcttgtcttggcacctgccacctgggttatccgcaaagatgctgtccccagaacagacagtaatttttcgcggacagcggcttatcagctacgcccagctgactggaaggatgccagccgcagaaacaaccggggaggtgtgtttaaagtacactttacagggcaagacatttgaagacaaggtcaccttcccattgcagccaaaacccgacgttaatctgaccattcaccggctggccgctaaaagtttactgcaaacaaaagacatgggactcagggaaactccagccagcgacaaaaaagatgcactgaacctgagtctggagtccggcgtaatatcaagctttacggcgtttatcgctattaacaaggaactaaacaagccagtccagggaccactggcacacagggacgtccctaggcccatcctactcggggcttccgccccattgaagataaaatgccagagcgggttccgaaaagctctccactcagacaggccgccatccgcaagtcagccgcgaggagagttgatgtgttacaaggccaagacattccagatggatgactactcgctgtgcggtctcataagtcacaaagatcagcactctcctgggtttggtgagaatcacctggtgcagttgatttatcaccagaatgctaacggttcatgggatttgaacgaggacttggcaaaaatcctgggcatgtctctggaagagatcatggccgcacagcccgctgagctcgtagactcatcgggatgggctaccatcttggctgtcatttggttgcactcgaatggcaaggatttgaaatgtgaatgggaacttctggagagaaaagctgtagcctggatgagagcccatgcaggcagcaccatgccctccgttgtgaaggcagccatcactttcttaaagagcagcgtggacccagctatattcgcattctag

SEQ ID NO: 31468 - DNA, 1248 bp, synthetic construct
  misc_feature 1..1248: note = Description of Artificial Sequence: Synthetic coding sequence
  source 1..1248: mol_type = other DNA
atggtccacttctgtggtctcctgactctgcacagagagcctgtgccactaaagtctatttcagtatctgttaacatctatgaatttgttgcaggcgtttccgctacacttaattacgagaatgaggagaaagttcccttggaagccttctttgtcttccctatggacgaagattcagcggtttattccttcgaggcgctcgttgacggtaagaaaatcgtcgccgaactgcaggacaagatgaaagccagaacaaactacgagaaagctattagccagggacatcaggcctttctgttagagggagactccagttcacgagacgttttttcttgtaatgtggggaacctgcagccaggtagtaaggccgcagtgactctgaagtatgtccaggaactgccattagaagccgacggcgcactccgattcgtgttgcctgccgtgttaaatcctaggtatcagttcagcggctcgagcaaggacagttgtcttaacgtgaaaacgccaatcgtgccagtagaggacctcccatacactctgagcatggtagccaccattgactctcagcatggtatcgagaaggttcaatcaaactgccctctgtcccctactgaatatcttggggaagataaaactagcgcccaggtcagcctggccgctggccataagttcgacagggacgtggagctcctcatttactacaacgaggttcatacgccctctgtcgtgcttgaaatgggtatgccaaatatgaagcctggccatctaatgggtgaccccagtgctatggtgagtttctaccctaacatccccgaggatcagccatcaaatacatgtggggaatttatcttcctgatggaccggagcgggtctatgcagagtccaatgagtagccaggataccagccagctaaggatacaggccgcaaaagaaaccctgattcttttgttgaaaagcctgccaattggctgttatttcaacatttatggtttcgggtctagctatgaagcctgctttccagagtccgttaaatacacccagcagacaatggaggaggcactcggtcgcgttaaactgatgcaggctgacttgggcggaaccgaaatcttggcccctctccagaacatatataggggcccatccattccagggcaccccctccaactcttcgtattcacagatggggaggtgactgacactttcagcgttattaaggaggtccgcatcaacagacagaagcatagatag

SEQ ID NO: 31469 - DNA, 2361 bp, synthetic construct
  misc_feature 1..2361: note = Description of Artificial Sequence: Synthetic coding sequence
  source 1..2361: mol_type = other DNA
atggtgcatttctgtggcctgcttaccctacaccgtgaaccagtcccactgaagtcaatctcagttagtgtcaatatctacgaatttgtagccggagtgtcagccactctgaactacgagaacgaagagaaagttcctctggaggcctttttcgtcttccccatggatgaggactccgctgtgtactcctttgaggcactggttgatgggaaaaagattgtcgcagaactacaagacaaaatgaaagccagaaccaactatgaaaaagcaatttcacaggggcaccaggctttcctgcttgaaggggacagtagcagcagagatgttttcagctgtaatgttgggaacttgcaaccagggtccaaggccgctgtgactcttaagtacgtgcaggagttacctttggaggccgacggcgctttacgatttgtgctgcccgcagtcctgaatcccaggtatcagttctctggttcatcaaaggacagctgtttaaacgtgaaaaccccaatcgttcctgtagaggacctgccatacactctgagcatggtcgccaccatcgatagccagcacggcatcgaaaaagttcagtctaattgtcctttgagtcctacagagtacctcggtgaggacaagacgtcggcccaagtctctctggctgcgggacacaagtttgatagagatgttgaactcctcatatattataacgaggtgcacaccccttccgtcgtgctggagatgggcatgcccaatatgaaacctggacacctcatgggcgaccctagtgccatggtgtctttttatccaaacattcctgaggaccagccttctaacacatgtggggagtttatctttctgatggaccgatccgggtcgatgcagtcacctatgtcttcacaggatacttcacaacttcggatccaggctgccaaagaaaccctcatactgctcctcaagagtctgcctattgggtgttattttaatatctacggctttggcagctcatacgaggcttgttttcccgagagtgtgaaatacactcagcagactatggaggaagccctgggcagagtcaagttaatgcaagctgatctgggcggaacagaaattctggcacctttgcagaatatctacagagggcctagtattccaggtcatcctctgcagctgtttgtgttcaccgatggtgaggttacagacacattttccgtgatcaaagaagtcaggattaatagacagaagcaccgctgttttagcttcggaatcggtgaaggtacatccacctctctgataaaggggattgctcgggctagcggcggaacctctgagttcataacgggcaaagaccgcatgcagagtaaggcactgcgcacccttaagcgatctttgcagccggtagtggaggatgtctccttatcatggcatctgccacctggactgtctgccaagatgctctctcccgaacagacggtgatcttccggggtcagaggcttattagctacgctcagctgactggtaggatgccagcagcagagactacaggagaggtttgcctcaagtatacactacagggcaagacatttgaggacaaggtcacgtttccactccagccaaagcccgacgtaaatctgactatccacaggctggccgctaaatctctgctgcagaccaaagatatggggctgagggaaactcctgcgtccgacaagaaggacgccctaaacctttcccttgaaagcggggtgatttcctcttttaccgccttcatagcgatcaataaagaactgaataagcccgtgcagggacctctggctcacagggacgtgcctagacctatcctcctgggtgccagtgcacctctcaaaatcaaatgccagtccggctttcgcaaagctcttcactctgatagacctccatctgcctcccagcctagaggcgaactgatgtgctacaaggccaaaacttttcagatggatgactatagtctgtgcggactcatatctcataaggaccagcattctccgggtttcggagagaatcatctcgtacagctgatctatcaccaaaacgctaatggcagttgggaccttaatgaagacctcgccaagattctgggcatgagcctcgaggaaattatggcagcacagccggctgagctggttgacagctcagggtgggccaccattctggcagtgatctggctgcattctaacggaaaggatctgaagtgtgagtgggagctgctggagcggaaagccgtggcctggatgcgcgctcacgcaggcagcactatgccaagcgtcgtcaaagctgccatcacttttctgaagtctagcgtcgatccagccatctttgcattttag

SEQ ID NO: 31470 - DNA, 1248 bp, synthetic construct
  misc_feature 1..1248: note = Description of Artificial Sequence: Synthetic coding sequence
  source 1..1248: mol_type = other DNA
atggtccatttttgcggactgctgaccctccaccgggaaccggtccccctcaagtcaatcagcgtgtctgttaacatctacgagtttgtggccggagtaagcgcaactctgaattacgagaatgaagaaaaggtcccactggaggccttcttcgttttccctatggacgaagactccgctgtctacagctttgaggccctggtggatggtaaaaagatcgtggcggaactgcaggacaagatgaaagctcgtacaaactatgagaaggctatcagtcagggccaccaggccttcttgctggagggggactcatcatctcgcgatgtcttcagctgcaacgtgggcaaccttcagccaggctccaaggcagccgtgacgctaaagtatgtgcaggagttaccccttgaggcagacggcgctctcagatttgtactgccagcagtgctgaacccccgttatcaattctccggctcttccaaagatagctgtctaaatgtgaaaactcccatcgtacctgtggaggacttgccttacacactatccatggtggccaccatagattcccagcacggcatcgagaaggtgcagtcaaactgtccattgtctcccactgaatacctcggcgaagataagactagtgcgcaagtttcactggctgccggtcataagtttgacagggatgtggagctcctcatttattacaacgaggtgcataccccctccgtcgttttggaaatgggtatgcccaatatgaaacccggacacctcatgggggacccatctgctatggttagcttctaccctaatatacctgaggaccagccttctaacacgtgtggggaattcatctttcttatggacaggtccggctccatgcaaagccccatgtcctctcaggatactagccagttacggatccaggctgcaaaagagaccctcatcctcctcctgaagagcttgcctatcggatgttattttaatatatatggattcgggagcagctatgaggcgtgtttcccagagtcggttaaatacactcagcagacaatggaggaggcactcggccgtgttaagctgatgcaggcagacctggggggtactgagattctggcccctctccaaaatatctatcggggtcctagcataccaggacatcctcttcagcttttcgtcttcactgacggggaagttacagacactttttctgtgattaaagaagtgcggatcaataggcagaagcaccgttag

SEQ ID NO: 31471 - DNA, 2301 bp, synthetic construct
  misc_feature 1..2301: note = Description of Artificial Sequence: Synthetic coding sequence
  source 1..2301: mol_type = other DNA
atggccgcattgagcgggggagggggaggcggagcagaacctggccaagccttgttcaatggcgatatggaaccagaagccggtgcaggagcaggtgccgcagcatcctccgccgcagatcccgctatccctgaagaggtatggaacatcaagcagatgattaaacttacccaagaacacattgaagccctgttagacaaattcggcggagaacataaccctcccagcatctatctggaggcctacgaggaatacacctcaaagctcgacgccctgcagcagcgcgaacagcagctgctggaaagccttggcaatggaaccgacttctccgtgtcttccagcgcgtcgatggacaccgtgacaagcagttccagctcatccctgagcgttctcccatcctctttatccgtattccagaaccctacagatgtggcccgatccaatccaaagtccccccagaagccaattgtaagggtgttcctccctaacaagcagcggacagtcgtaccagctaggtgcggcgtcactgtgcgcgactccctcaagaaggccttaatgatgcgcggactgatcccagaatgttgcgctgtataccggattcaggacggcgagaaaaaacccattggctgggacactgacatcagctggctcacaggggaggagctccacgtggaggtgctagaaaatgttccgctgactacccacaactttgtacgaaaaacgtttttcaccctggccttctgcgatttctgtagaaagctgctgttccaaggcttcagatgccaaacttgtgggtacaaatttcaccaacgctgctccacagaagtgcccctgatgtgcgtcaactatgatcaactcgacctgttgtttgtgtcaaagtttttcgagcaccatcctattccccaggaagaagctagcctggctgaaaccgctctgacgtcagggtcgtccccctccgctcccgcttcggatagtattggtcctcagattctgacctccccatctcccagtaaatcaatccccatcccacagccgttcagaccggctgatgaggatcatcggaatcaatttgggcagcgagatcgctcatctagtgcccctaacgtgcacataaatacaatcgaaccagtgaatattgacgaccttatcagagaccaggggtttcgtggcgacggcggaagcaccaccggactgtctgctacccctccagcctcactgccaggttcactgacgaatgtcaaagctttgcagaagagtccaggtcctcagcgcgaaaggaagtccagcagttcctccgaggataggaatcgcatgaaaactctgggcaggcgggattcatctgatgactgggagattcccgacggacagataactgtcgggcaacgcatcggctctggaagcttcggaaccgtgtataaaggtaagtggcatggcgacgtcgcggttaaaatgctcaacgttaccgctcctacaccccaacagctgcaggcctttaagaatgaagtgggtgtgttgcggaagaccagacacgtcaatattctgttattcatgggctattcgaccaaaccacagctcgccatagtgactcaatggtgcgagggctcgtctttgtaccaccatctgcacataattgagaccaaattcgagatgattaagcttattgacatcgccaggcaaactgcgcagggaatggactacttgcatgccaagtccattatacatagggatctgaagtctaacaatattttcctgcacgaagaccttactgtcaagataggagactttggtctggcaactgttaaaagccgttggtctggttctcaccagtttgagcagctgagcgggtccattctctggatggctcccgaagttatccggatgcaggataagaacccttactcctttcaatcagacgtgtatgcgttcggtatagttctttacgaacttatgacaggacaattaccatactccaatattaacaatagggaccagatcatctttatggtggggagagggtacctgtcccccgatctatcaaaggttcggagtaactgccctaaagcaatgaaacggcttatggccgagtgtcttaaaaagaagcgcgacgaacggcctctgttccctcagatccttgccagcattgagttgctggcaaggagcttgcctaagatccatcgctcagcctctgagccatcattaaacagagccggttttcaaaccgaagacttctccctctatgcttgtgcctcacccaagacccctattcaagctggtggatatggcgctttccctgtgcactag

SEQ ID NO: 31472 - DNA, 1947 bp, synthetic construct
  misc_feature 1..1947: note = Description of Artificial Sequence: Synthetic coding sequence
  source 1..1947: mol_type = other DNA
atggaacatatccagggtgcatggaagaccataagtaatggatttggattcaaggatgccgtgtttgatggatccagctgtatttctcctaccatagtgcagcagttcgggtatcagcgcagggcgagtgacgacgggaagctgacagacccttcaaagacaagcaacaccatcagagtgttccttccaaacaagcagcggacagttgttaacgttcgcaacggcatgagtttgcacgactgtctcatgaaggccctaaaggttagaggactccagccggagtgttgtgctgtattcagactgctccatgagcacaaagggaagaaggcgcgtctggactggaacaccgacgccgcttcccttataggtgaagagcttcaggttgattttctggaccatgtccccctgaccacccataattttgccaggaaaacttttcttaaactggctttttgtgatatctgccagaagttccttctgaatgggtttaggtgccaaacctgcggctacaagttccatgagcactgttctaccaaagtccctacaatgtgtgttgactggagcaatatacgacagctactgctatttccaaatagtaccattggggactcaggcgtacccgctttacccagtctgacaatgcgtcggatgagagaaagcgtctcaagaatgcctgtcagcagtcagcatcgctactctacaccacacgccttcaccttcaatacgtcctctccatcttcagaaggctcgcttagtcagcgccagcgctccacaagtactcccaacgtacatatggtttcgacaacgctgccggtagacagccgtatgatagaagatgctattaggagccattcagaatccgcgtccccatccgccctgtcaagctccccgaacaatctgagtcccaccgggtggagccagcctaaaacacctgtgcctgcacagcgggaaagagcacctgtgtccggcacccaggagaagaataagatccgtcctagaggccagagagacagctcttactattgggagattgaagcctcagaggtgatgctgtcgaccagaatcggaagtggctcctttgggacggtgtacaaaggcaagtggcatggcgatgttgctgtgaagatccttaaggtggtggaccccacaccagaacagttccaggcgtttaggaacgaggttgctgttctaaggaaaacacggcatgtcaatattctattgttcatgggctatatgaccaaagacaaccttgccatcgtgactcagtggtgtgagggaagctcgctatacaagcacctgcatgtccaggaaacaaaattccaaatgttccagctgatcgatatagcccgacaaactgcacaggggatggactacctgcatgccaaaaacattatccacagagatatgaagtctaacaacatttttctgcacgaaggtctgacagtcaagataggcgacttcgggctggccacggtaaagtctagatggtctgggtcacagcaggtagaacagcctaccggatctgtgctttggatggcccctgaagttataagaatgcaggataacaatccattctcctttcagagtgatgtgtatagctatggtatagtcctctatgagctgatgacaggagaactcccatacagtcacatcaataaccgggaccagattattttcatggttggacggggatatgcctcccccgaccttagtaaactgtacaaaaattgtcccaaggccatgaaaagactggttgctgactgtgtcaagaaagtgaaagaagaacgaccgctgttccctcagattttgtcaagtatcgagcttctgcaacacagcctgccgaagattaacagaagtgcttccgagccctcactgcatcgggctgcccataccgaagatatcaatgcctgtactttgaccacgagtcctagactgcctgtgttttag

SEQ ID NO: 31473 - DNA, 2007 bp, synthetic construct
  misc_feature 1..2007: note = Description of Artificial Sequence: Synthetic coding sequence
  source 1..2007: mol_type = other DNA
atggagcacattcagggggcatggaaaacaatcagcaacggattcggtttcaaggacgctgtatttgacggctcgtcttgcatcagccctacgattgtgcaacagttcggctatcagcgcagggcaagcgatgatgggaagctgactgacccctctaagacatctaacacaataagagtctttcttcctaataagcaacgtactgtcgtgaacgtgcggaatggtatgtccttacatgattgccttatgaaggccctaaaggtcagaggacttcagcctgagtgctgtgccgtgtttcgcctgctccatgagcataaaggtaagaaggccaggctagattggaacactgacgcagcgtctcttattggcgaggaacttcaggttgattttctcgaccacgtgcctcttaccacacacaatttcgccaggaagaccttcttaaaattggcgttctgtgacatctgtcagaaatttctcctgaacggattcagatgccagacgtgcggttataagttccacgagcactgctctacaaaggtcccaaccatgtgtgtcgactggagcaacatacgccagctcctcttatttcccaattccacaataggagacagtggcgtgcccgctctgccaagtcttacaatgcgtcggatgcgggagtccgtgagccgcatgccagttagtagtcagcaccggtactccactccacatgccttcactttcaatacctcctccccgagctccgaaggctctttgagtcaacgccaacggagcacctccacaccaaacgtgcacatggtgtcgacaactctccccgttgacagcagaatgatcgagaacaacaatttaagcgcctctccaagggcatggtcccgaagattttgcctccggggacgggatgctatcagatctcactctgaaagcgccagtccttctgcattgagttcgagccctaataatttgtctcccactgggtggtctcaaccaaagacccccgttcctgcccagagggaaagagctcccgtatctggcactcaggagaaaaacaaaattcgaccgagaggacagcgtgactcatcatattattgggaaattgaagccagtgaggtgatgctctctacaaggatcggaagtggcagctttgggactgtttataagggcaagtggcacggcgacgttgccgtcaagatactcaaagttgtagaccccacacctgagcagttccaggcttttaggaatgaggtcgcagtactgaggaaaacacgtcatgtgaatatattactcttcatgggctatatgaccaaggataatcttgcaatcgtgacacaatggtgcgaggggtcctctctctataagcacctgcatgtacaggagaccaagttccaaatgttccagctgattgacatcgctcggcagacagcgcaaggaatggactacctccatgccaaaaacatcattcaccgagacatgaaaagcaacaacattttccttcacgaaggtttaacagtgaagatcggcgattttgggctggcaacagtaaagtctcgttggtctggctcgcagcaagtcgagcaaccaaccggcagcgtgctctggatggccccagaggtcataaggatgcaggacaataaccctttttcttttcagtccgatgtctattcttacggcattgtcctgtatgagctcatgactggcgagcttccctactcacacattaacaatagagaccagatcatttttatggtcggtaggggttatgccagtcccgatctgtcaaagctatacaagaactgccccaaggcaatgaagagactggtggccgactgtgttaaaaaggtcaaagaggagcggccattgttccctcagatactgtcatctattgagcttctacaacacagcctgccaaaaattaatagatccgcttcagaaccttctctacaccgcgctgctcatacggaagatataaacgcatgcaccttgacaacctctcctcggttgccggtgttctag

SEQ ID NO: 31474 - DNA, 1302 bp, synthetic construct
  misc_feature 1..1302: note = Description of Artificial Sequence: Synthetic coding sequence
  source 1..1302: mol_type = other DNA
atgtgcgtggattggagtaacattagacaattattcagtcagcaccgatacagcacccctcatgcttttacgttcaacacttcctcaccaagtagcgaaggtagtttgtcacagagacaacggtcaaccagcactcctaacgtgcatatggtgtcaactacattacccgtggactcacggatgatcgaggacgcaatacgctctcattcagagagcgcatccccctctgctctgtcctcctcccctaataatctgtcccctacggggtggagtcagccaaagacccctgttccagcacagagggaacgcgctccagtgtctggcacgcaggaaaaaaataagatccgaccccgtggacagagggacagctcttattattgggagatcgaggcatctgaagtgatgctcagcacccgaattgggtctggcagttttgggactgtctataagggaaaatggcacggggacgttgccgtcaagattttaaaggtcgtggaccccactccagaacaatttcaggcctttcgaaacgaggtggccgttcttcgcaagactaggcatgtaaatatactcctgtttatgggctacatgactaaagataatctggctatcgtgactcagtggtgtgaaggatcaagtctctataagcaccttcacgtgcaggagaccaagttccagatgtttcaactgatcgatattgcacgccagactgctcaaggaatggattaccttcatgctaagaacatcattcaccgcgacatgaagagcaataatattttcctccacgagggtctgaccgtcaagatcggagacttcgggttggctacggttaaatcaagatggtctgggagtcagcaagtcgagcaaccgacaggttctgtactctggatggcccctgaggtgatacgaatgcaggataacaatcccttttcctttcagtcagacgtgtacagttatgggatcgtactgtatgagctcatgaccggcgaactcccctacagccacatcaacaaccgagaccaaatcatctttatggttggcagaggatacgcctctcctgacttgagtaaactgtacaaaaactgcccaaaagccatgaagcggctcgtggccgattgtgtcaagaaggtcaaggaagaacgccctttgtttccccaaattctttccagtattgagcttctgcagcactctctgccaaagatcaatcggagtgccagcgagccatctctacacagagccgcacacacagaagatatcaatgcctgcaccctcacgacctctcctcgactgcccgttttttag

SEQ ID NO: 31475 - DNA, 1704 bp, synthetic construct
  misc_feature 1..1704: note = Description of Artificial Sequence: Synthetic coding sequence
  source 1..1704: mol_type = other DNA
atgatggccaatagtcagattctgctgcggcaggcgacgctgagcgtgttttcgtgtagaacctcaaaggagcagtgcaagaaggccagactggactggaataccgacgccgcatctcttatcggcgaagagttgcaggtggacttcttagaccacgtacctctgactacccacaatttcgcacgtaaaaccttccttaagttagccttctgtgacatctgccagaagtttctcctgaatgggtttaggtgtcagacatgcggatacaagttccatgaacattgcagtaccaaagtcccaactatgtgcgttgattggagtaacatcaggcagttgctgttgtttcctaactcaaccatcggagactcaggagttccggctctgccctccttgactatgcggcgaatgagagaaagcgtatcacggatgcccgtgagttcccaacacagatatagcaccccgcatgccttcacattcaatacatcttcaccttcttcagaagggagccttagccaacggcagcgcagcacatcgactcctaacgtgcacatggtgagtactactctgccagtcgattcccggatgatcgaagatgcgattagaagccattccgagagcgcctctccaagtgccctgtcttcatcaccgaacaatctgagccctactggatggagtcagcccaaaactcccgtgcccgcacagagggagagagcacccgtttccgggactcaggaaaaaaacaagatccggcctcgcggtcagcgcgactcctcttactattgggaaatcgaagcatctgaggtcatgctttccaccaggatcggttcaggatcctttgggaccgtctataaggggaagtggcacggagatgtcgcagtgaagatactcaaggtggtggatcccactccggagcagttccaagcgttcaggaacgaggtggccgtgctgcgcaagacccgccacgtaaacattctgctctttatgggatacatgaccaaggataacctagcaatagtgactcagtggtgcgagggctcctctctttataagcacctgcatgtgcaggaaaccaaatttcagatgtttcaattgatcgacatagccaggcaaaccgcccaaggcatggattacctgcacgccaaaaatattattcaccgggacatgaagagcaataatatctttctgcacgagggactgacggtgaaaataggcgactttggactcgccactgtgaaaagcaggtggtccggatcccagcaggtggagcaacctaccggttccgtgttatggatggcaccagaagtcattcgcatgcaggataacaaccctttttcatttcagtccgacgtgtatagttacggcatagtcctttacgaactcatgactggtgaattgccctactcccacatcaacaacagggaccaaattatctttatggtggggagaggatacgccagccccgaccttagcaaactgtataagaactgtcccaaagccatgaagaggctcgttgcagattgcgtgaaaaaagtgaaagaagagcgtcccctctttccacagatactctcatcaattgagttacttcaacactctctgccaaagataaataggtctgcttccgagccctcattacaccgtgccgctcacaccgaagacataaacgcatgtacactaactacctcaccccgtcttcctgtattttag

SEQ ID NO: 31476 - DNA, 1611 bp, synthetic construct
  misc_feature 1..1611: note = Description of Artificial Sequence: Synthetic coding sequence
  source 1..1611: mol_type = other DNA
atgggatcgaataagtctaagcccaaggacgcttcacagaggcgcagaagtctggaacctgcggagaacgttcacggagctgggggaggggctttcccagcttcacaaacaccgtcgaagcctgcgagcgcagacgggcacaggggtccctccgctgctttcgcaccagcagcagcggagcctaaattgttcggcggtttcaacagctccgacactgtaacatctcctcagcgcgctggtcctctggccggaggtgtcacaaccttcgtcgcactctatgactacgaaagccgaacggagactgacctgtcgtttaagaaaggtgagagactgcagatagtcaataacacagagggggactggtggctggctcacagcctttcaaccgggcaaacaggctacatacccagtaactacgtcgcgccatccgactcaatacaggcggaggagtggtattttggaaagattacacgacgtgagagtgagagactgctgctgaacgcagagaatcctcggggaactttcctggtcagagaatcagagacaactaagggcgcatattgtttaagtgtgtctgacttcgataacgcaaagggtctcaatgtgaaacactacaagatccgcaagctcgattctggaggcttttacatcacgtcacgaactcagttcaactcgttacaacagctggtcgcttactactccaagcatgccgatggcctttgccaccgtctcacaacagtttgccccacatccaaaccccaaacccagggcctagcgaaagacgcatgggagatacccagggagagcctccgtctggaagtgaagctagggcaaggttgttttggcgaagtttggatgggcacatggaacggaacaaccagagttgcaattaagactcttaaacccggaacaatgtctccggaggccttcctgcaagaggcgcaggttatgaaaaagctgcgacacgaaaagttggtgcagctgtacgctgttgtaagcgaggagcccatttacatagtaacggagtatatgagtaagggatcattactggacttcctcaagggagagacagggaagtacctccgactgccccaacttgtagacatggctgcccagattgcaagcgggatggcatatgttgaacgcatgaactacgtgcaccgagatctgcgcgcagccaacattcttgtcggcgaaaatttagtgtgtaaggtcgcagatttcggactggccaggctaatcgaagataacgagtataccgccagacagggggctaaatttccaatcaagtggaccgcacccgaggcagctctttacggcagattcactattaaaagcgacgtctggagcttcgggatcctcttaacagagctgacaacaaagggcagggtgccttacccgggaatggtgaaccgagaggtgctggaccaggtggaaaggggttacaggatgccatgtccccctgaatgccccgagagcttgcacgatctaatgtgtcaatgttggaggaaagagccagaggagagaccaacatttgagtacctgcaggcgttcttggaggattacttcacatcaactgaaccccaatatcagcctggcgagaacttgtag

SEQ ID NO: 31477 - DNA, 1629 bp, synthetic construct
  misc_feature 1..1629: note = Description of Artificial Sequence: Synthetic coding sequence
  source 1..1629: mol_type = other DNA
atggggtctaataagagtaaacctaaagacgcaagccagcgccgacgatccttagaacccgcagagaacgtgcacggggcaggagggggagcctttccagccagccagactccatcaaagcccgcatcagcggatggtcaccgcggtccttccgcagcctttgcccctgccgctgcagaaccgaaactcttcggcggtttcaactcctcagacaccgtaacaagtccacaacgggcagggcctctcgccggtggcgtcacgacgttcgtggcactctatgattatgaatcccgtaccgaaaccgatctgtcttttaaaaaaggcgaacgcctgcagattgttaataatactcggaaagtcgacgtgcgcgaaggtgactggtggcttgcccattctctgtctactggccagacaggttacataccttctaattatgtcgcgccatcggatagcatccaggccgaggagtggtacttcggcaaaatcacccgcagggagtccgaacggcttctactgaatgccgagaacccccgtggcacttttctggttcgggagagcgaaactaccaagggtgcatactgtctgtcggtgtctgatttcgataatgcaaagggtctaaatgtgaagcactataagattcgcaaactcgatagcggaggattctacataacgagccgcactcagttcaacagtctgcagcagctcgtagcctactacagcaaacatgctgatgggctgtgccacaggctgaccacagtttgcccgactagtaaaccacaaactcaaggtctggctaaggacgcctgggaaatccctcgggaaagcttgcgcctggaagtgaagcttgggcagggttgctttggggaggtatggatgggtacttggaatgggaccaccagagtggcgataaaaacactgaaaccagggaccatgtcacctgaggcgttcctgcaagaggctcaggtaatgaaaaagctgcgccacgaaaagctggtacagttgtacgccgtagttagtgaagaaccaatctatatcgttacagagtacatgagcaagggctcactgctggatttcctcaaaggcgagaccgggaagtatctgagattaccacagctggtggatatggcagcacaaatcgcaagcggcatggcatatgttgagagaatgaattatgtgcaccgggatcttcgcgctgccaatattttggttggcgagaacctggtctgcaaggtggcagattttggattggccagactgatcgaggataatgagtacacagccaggcaaggcgcaaaattccccattaagtggacagcccctgaagccgcattgtatggacgtttcacgatcaagagcgacgtatggagcttcgggatacttctgaccgagcttacgactaaggggcgagtcccataccctgggatggtcaatagagaagtcctcgaccaagttgagcgagggtacagaatgccctgccctccagagtgtccagagtccttacacgatctcatgtgccagtgctggaggaaggagcctgaggaacgccctacatttgaatatctgcaggccttccttgaagattactttacatcgaccgagccacagtatcagccaggcgaaaacctttag

SEQ ID NO: 31478 - DNA, 1611 bp, synthetic construct
  misc_feature 1..1611: note = Description of Artificial Sequence: Synthetic coding sequence
  source 1..1611: mol_type = other DNA
atgggatccaataagtccaaaccaaaggacgcaagccagcgacgcaggtctcttgaacctgccgagaacgtacatggcgcaggtggaggagcttttcctgcctcacagacaccctcaaaacctgctagcgctgatggtcacagaggaccttccgcggcatttgctcctgctgccgctgagccaaaattgtttggcggattcaacagctctgacactgtgaccagtccacagcgcgctggtccactggctggcggagttacaactttcgtagccttgtatgattacgagtcaaggactgagaccgacctgagtttcaaaaaaggggagcggcttcagattgtgaacaacacggagggggactggtggctggcccatagcctgagtacaggtcagaccgggtacatcccctccaattacgtagcccctagcgatagtattcaggctgaagaatggtattttgggaaaatcacacgcagagaaagcgaaaggttgctgttaaatgctgagaatccgagggggaccttccttgtcagggaaagcgaaaccactaagggggcttattgtctgtctgtgtctgacttcgacaatgcaaagggacttaatgtgaagcattataaaatcagaaagctggacagtggcggtttttatataacttcacgaacacaattcaactctctgcagcagctcgtcgcttactattccaagcacgccgatgggctgtgccaccgtctgaccacggtgtgtcctaccagcaaaccccagacccagggcctggcgaaggatgcatgggaaatcccaagagagtcactcaggttagaagtcaagcttggtcagggctgtttcggagaggtttggatgggtacatggaacggaaccacgcgagtggcgattaaaacgctcaagcccggtactatgtccccagaagctttcctgcaagaagctcaagtgatgaaaaagctgcgccacgagaaacttgtccaactttacgcggttgtctccgaggagccaatctacatcgtgactgagtacatgtcaaagggcagcctactggattttctgaagggggaaacgggaaaatacctgcgtctgccacagcttgtggacatggcagctcagatcgcatcaggcatggcatacgtggaacggatgaactacgttcatcgagatttgcgagccgctaacatcctcgtgggcgagaacctggtttgcaaagtggctgactttggccttgccagactaattgaggataatgaatacacagctaggcagggtgccaagttccccatcaagtggaccgctcccgaggcagccttgtatgggcgatttacaatcaagagcgatgtgtggtcttttgggatactgttgaccgagcttacaaccaagggacgcgtcccctaccccggtatggtgaaccgcgaagttctggatcaggtggagcgcggttaccggatgccctgcccccctgagtgccctgaatctctgcatgacctcatgtgccagtgctggagaaaggagcctgaggagcgtccaacatttgagtaccttcaggccttcttggaggattacttcacatcgacagaacctcagtatcagcctggagaaaacctttag

SEQ ID NO: 31479 - DNA, 1611 bp, synthetic construct
  misc_feature 1..1611: note = Description of Artificial Sequence: Synthetic coding sequence
  source 1..1611: mol_type = other DNA
atggggtcaaacaaaagcaaacccaaagacgcttcacagcgcagaaggtctctcgaacccgctgagaacgtccacggtgctggaggcggtgcattccctgcttcacaaaccccgagcaaacccgcatcggccgacgggcatcgaggtccgtccgcggctttcgcacccgctgccgctgagcctaaattatttggcggattcaactcgtccgacacagtgaccagccctcagagagcaggtcccctggctggaggggtcaccacattcgtggcactgtatgactatgagagcagaacggagacggatctttccttcaaaaaaggcgaacgcctgcagattgtgaacaatacagaaggagactggtggctggctcacagtctatcaaccggccagaccgggtatataccatcaaactatgtggctccgagcgattcaatccaagccgaggaatggtacttcggtaagatcacgcggcgagagagcgagcggctgctgctcaacgccgaaaatcctaggggtacatttttggtcagggaatccgagaccactaaaggggcttactgtctgtctgtaagtgattttgacaatgctaaaggcctgaatgttaaacattacaagattcggaagctggactcaggcggattctatatcaccagtcggacacagttcaatagcctgcagcaactagtcgcatactactcaaagcacgctgacgggctttgtcacagacttactactgtctgccctacatccaagccgcagacccaggggcttgctaaggatgcttgggagatcccaagagaatccctccgtcttgaggtaaagctgggtcaggggtgttttggagaagtatggatgggaacctggaacgggactacaagggttgccataaagaccctgaaacccggaaccatgtctccagaggcatttttgcaagaggcacaggtgatgaaaaaactgaggcacgagaaactagtccaattgtacgctgtggtctccgaagaaccgatctacattgtgacggaatatatgtctaagggaagccttctggactttcttaaaggagagactggcaaatatttgaggctcccacaactggtggacatggctgcccaaattgcctctggcatggcttatgtcgaacggatgaactacgttcatcgagatctgcgcgctgccaacatcctggtgggagagaacctcgtgtgcaaagtcgccgactttgggctcgcccgactgattgaggataatgagtacaccgcgcgtcagggagccaagttccctatcaaatggactgctcctgaagccgcactttatgggagattcactattaagagcgatgtctggagctttggaatacttcttactgagctcacaactaaggggagagttccgtacccaggcatggtcaaccgcgaagtgctcgaccaggtggaacgcggatacaggatgccatgcccaccggaatgtcccgaaagtctccacgatttaatgtgccagtgctggcgaaaagagccagaggagcgaccaacatttgaatatttgcaggcttttctggaagattattttacttctaccgagccccagtatcagccaggcgagaatctgtag

SEQ ID NO: 31480 - DNA, 1611 bp, synthetic construct
  misc_feature 1..1611: note = Description of Artificial Sequence: Synthetic coding sequence
  source 1..1611: mol_type = other DNA
atgggcagcaataagtccaaacccaaagatgcctcccagcggcgtcggagtctggaaccagctgaaaatgtccatggcgcaggcggaggggctttcccggcttctcagacaccctcaaaacctgcctccgcagatgggcatagagggccatccgctgcgtttgccccagcagcggctgaacctaaactattcggaggcttcaatagttcagacacagtcacttctccccagcgagctggccctcttgccggaggagtgactactttcgtcgctctttacgattacgagtccagaactgagacagacctgtcttttaaaaagggtgaacgtctgcagatcgttaacaataccgaaggcgactggtggcttgctcacagcctgagcacggggcagaccggttacatcccctctaattatgtcgccccatctgactccatacaggcagaggagtggtattttgggaagattacgcggagggagtctgagcgtctgctactgaacgctgagaacccaaggggtacgttcctcgtccgtgaatcggaaactaccaagggtgcctactgtctctccgtgagtgactttgacaacgccaaggggctgaacgttaagcactacaagatcaggaaattagatagcggaggattctacattacatcaaggacgcagttcaacagtcttcaacagctggtggcctactattccaaacacgctgacggactgtgtcatagactcaccactgtgtgtcctactagtaaaccacagacacagggtctcgctaaggatgcgtgggaaatccctcgggagtctctaaggttggaggtgaaacttgggcaggggtgtttcggagaggtatggatgggcacatggaatggaaccacaagggtagcaattaagaccctcaaaccaggtacaatgtcgcctgaggccttcctccaggaagctcaagtgatgaaaaaattgcggcacgaaaagctggtgcagctgtacgccgtggtgtctgaagaaccaatttatatcgtcactgaatatatgtccaagggcagcctcctggattttctgaaaggcgaaactggcaagtatctacgcctcccccagctcgtggacatggctgctcagatcgcctcaggaatggcctacgtggagcgcatgaactatgtccatcgtgacctgcgcgctgctaacatcctcgttggcgagaatctcgtctgtaaagtcgcggattttggcctggcaaggttgatcgaagacaacgagtatacagccagacagggagccaagtttccgatcaaatggacagccccagaggccgctctatacggacggttcacaataaagagcgacgtctggtcttttggaatccttcttacagaattgacaacaaagggcagagtgccgtatcctggcatggtgaaccgcgaagtgctggatcaggtggagaggggatacaggatgccatgtccccctgagtgtcctgagtccctgcatgacctgatgtgtcagtgctggcggaaagaacctgaggaaaggcccacgtttgagtacctgcaggcctttttggaagattacttcacgtccactgagccacagtaccagcctggagagaatttgtag

SEQ ID NO: 31481 - DNA, 423 bp, synthetic construct
  misc_feature 1..423: note = Description of Artificial Sequence: Synthetic coding sequence
  source 1..423: mol_type = other DNA
atgcccctggtgaagaggaatattgatccgagacatctgtgccataccgccctcccccgaggaatcaaaaatgaactggagtgtgtgacgaacataagcctggcaaacatcattcgacagctttcttcacttagtaaatatgcagaagatatcttcggggagttattcaacgaggcacacagcttctcatttcgcgtgaattcactgcaggagagagtggaccgcttaagcgtctctgtaactcagttagatcccaaggaggaggaattgtctttacaggacattaccatgagaaaggccttcaggtcatccaccatacaggatcagcaactctttgaccgcaaaacgctgccaattccacttcaggagacttatgacgtgtgtgagcaaccacccccacttaacattctgaccccttattag

SEQ ID NO: 31482 - DNA, 1680 bp, synthetic construct
  misc_feature 1..1680: note = Description of Artificial Sequence: Synthetic coding sequence
  source 1..1680: mol_type = other DNA
atgccacttgttaaacggaacattgatcccaggcacctgtgtcatactgcccttcctcgaggcataaagaacgagctggagtgtgttactaacatcagtctagcgaacattatccgacagctgtcaagcttgtctaagtacgctgaagacattttcggggaactttttaatgaagcccactctttttcctttcgcgttaactctctccaggaaagggtggatcggctgagcgtctctgtgacccagctggaccccaaagaggaagagctgagcctccaagacatcacaatgcgtaaggcattccgatcatctaccatccaggaccagcagctgttcgatcggaagacccttcctatacccttgcaggagacttacgacgtgtgtgagcagcccccacctctgaatattttaaccccataccgagatgacggtaaagaagggcttaagttctatacgaatccatcgtactttttcgatctgtggaaagagaagatgctccaagacaccgaggacaagcgcaaagagaagcggaaacagaagcagaagaacttggatcggcctcacgaacccgaaaaagtgcccagagcccctcacgacagacgcagggagtggcaaaaactcgctcagggcccagagctcgctgaagatgacgccaacctgctacataaacacatcgaagtggcaaatgggccagcctcgcacttcgagactcgacctcagacctatgtcgatcacatggacggtagttacagtctgtcggctctaccctttagccagatgtctgagcttctgactagagcggaggagagagttttagtgcggcctcatgaacctcctcccccacccccaatgcacggtgccggagatgctaagccgatccccacgtgcatatctagcgccactggcctcattgagaatagaccacagagcccagccacgggaagaacgccagtcttcgtgtccccaactcctccaccacctcctcccccactaccgtctgccctgtctacgtccagcctgcgggctagcatgaccagcaccccaccgccaccggtcccacctcctccaccccctccggctacggctctccaagcgcctgctgttccaccaccacccgctccgctccagattgcccctggcgtgctgcaccccgctccaccacctatcgcaccaccactggtccagccctctcccccagtggcccgagccgcacccgtgtgcgagactgttccagtccatcctctgccgcagggagaagtgcagggcctccccccaccacccccacctccacccctccctccgccaggaatcagacccagctccccagtgaccgttaccgctctcgcccacccgccttccgggcttcacccaactccctccactgcccctggaccccacgtccccctgatgcctccatcacccccatcacaggtcatacctgccagcgaacccaagcgtcatccctcaacactacctgtcatcagtgacgcgagatccgtgttacttgaggccattagaaagggcatccaactccggaaggtggaggaacagagggagcaggaagctaagcacgagcggattgaaaacgatgtggcaacaatcctatcccgcaggattgcagtggagtatagtgacagcgaggatgatagcgagtttgatgaggtggattggctggaatag

SEQ ID NO: 31483 - DNA, 423 bp, synthetic construct
  misc_feature 1..423: note = Description of Artificial Sequence: Synthetic coding sequence
  source 1..423: mol_type = other DNA
atgcccctagtcaaacggaatatcgatccacgacatctgtgccataccgcattaccgagagggataaagaacgaactcgagtgcgtaaccaacattagcctagccaatataatccgccaattgtcaagcttgagtaagtacgccgaggacatattcggtgaattgttcaacgaagctcattcgttcagcttccgcgtaaatagcctgcaagaaagagttgatcggctgtccgtgtctgtgacgcaattggacccaaaggaagaagaactcagcttgcaagatatcaccatgaggaaagcattccggagttcgacgatccaagatcaacaattgttcgaccggaaaacactgcctattccactgcaagagacatacgatgtgtgcgaacagcctccccctcttaatattctgactccatactag

SEQ ID NO: 31484 - DNA, 1680 bp, synthetic construct
  misc_feature 1..1680: note = Description of Artificial Sequence: Synthetic coding sequence
  source 1..1680: mol_type = other DNA
atgccactcgtgaagcggaatatcgatcccagacacctttgccatacagccctcccgcgtgggataaagaacgaactggagtgcgtgacaaatatctcacttgccaacatcatcaggcaactcagctcgctctctaagtatgcggaagacatattcggggagttgtttaacgaggcgcattctttttcgtttagagtcaattctctacaagagagggtagatcggctgtcagtatccgtgacccagctcgacccgaaggaggaggaattgtctctgcaggacatcacgatgaggaaggctttccgcagttctaccatccaggaccagcagctgttcgacagaaagaccttgcccattccattgcaggagacctacgacgtgtgtgaacagcccccacctctgaatatcttgacaccctatcgcgacgatggcaaagagggcctgaaattttacacaaacccttcatattttttcgacttgtggaaggagaaaatgctacaggataccgaggataagcggaaggagaaaagaaaacagaaacagaaaaatctggacaggccgcacgaacccgagaaggtcccacgcgcacctcatgaccggcgaagggagtggcaaaaactggcccaggggccagagctcgctgaggatgacgcgaatctcctgcacaagcacatcgaggtggcaaacggcccagcatcccattttgagacccgtcctcaaacgtatgtcgaccacatggacggaagctatagcctgtccgccctcccattctctcagatgtctgaactcctgacacgtgctgaggaacgcgtacttgtgcgaccccacgaaccacctccgcctcccccaatgcacggggcaggggacgcaaaaccaattccgacctgtatctctagtgcaacgggcctcatcgagaatcgacctcagtctcctgcaactgggcgaacacctgtctttgtttcccccacacctcctcccccacctccaccccttccaagcgctctgagcacctcatctctcagggcttcaatgacatccaccccccctccgcctgttccccctccacctcctccacccgcaactgctttacaggccccagcagtgcccccaccaccggcaccacttcagatcgccccaggggtgttacacccagccccacctccaatcgcacccccattggtgcaaccatcgcccccagtggctcgcgcagccccagtgtgcgaaactgtgcctgtgcaccccctgcctcagggggaagtgcaggggctgcctcccccaccccctcctcctcctctgcctcctcccggaattcgccctagtagtcctgtcacagtgaccgccttggcccatcccccttccgggctgcacccaacaccttccaccgccccaggacctcatgttccacttatgccgccttctcctccaagccaggtgatccccgcaagcgaacccaaaagacacccttctacgctccctgtgattagtgatgccagaagcgtgctgctggaggcaattaggaagggaattcagctgcgcaaagtggaggagcagcgggagcaggaagctaagcacgaaaggattgaaaacgatgtggcaaccattctctcgcgtcgcatagctgtggagtatagcgattcggaagatgattcagagtttgatgaagtggactggcttgagtag

SEQ ID NO: 31485 - DNA, 1680 bp, synthetic construct
  misc_feature 1..1680: note = Description of Artificial Sequence: Synthetic coding sequence
  source 1..1680: mol_type = other DNA
atgcccctcgtgaaaagaaatatcgatccgagacacctctgtcataccgctctgccgagggggattaagaacgagttagagtgcgtgactaacatatccctggccaacatcatccgacaactgtcgtcccttagtaaatacgcggaagatatattcggagaactgtttaatgaagcccacagtttctcgttccgggtgaacagcctgcaggaacgcgtcgatcgactgtcagtttctgtcactcagcttgatccaaaggaagaagagctgagtctgcaagacattaccatgagaaaggcgtttcgttcttcgacaatacaggaccagcagctgttcgacaggaaaactctgccgatccccctgcaggaaacctatgatgtatgcgagcagcctccaccattgaatattttaacaccatatagggacgacgggaaggaggggttaaagttttacacaaaccccagctacttttttgacctgtggaaggagaaaatgttgcaggacacagaagacaagcgtaaagaaaagagaaaacagaagcagaaaaatctagacagaccacacgaacctgaaaaggtacctcgggcaccccacgaccgaaggcgtgaatggcaaaagctcgcgcaggggcctgagctggccgaagatgatgcaaacttactgcataaacatatcgaggtggccaacggccctgcttcacacttcgagaccagaccacagacttacgttgaccacatggacgggtcttacagcctgagcgccttaccctttagtcaaatgtccgagctcttgacaagggccgaggaaagagtccttgtcaggccgcatgaaccacctcctcctcccccaatgcacggggctggggatgcgaagccgatcccaacctgcatttcatcagccactgggcttattgagaatagacctcaatcaccagccacgggacgaacaccagtgtttgtcagcccaactcctcccccaccccctcctcctttgccttctgcactgtcaaccagtagtctgcgggctagtatgacaagcactcctccccctcccgtgccaccacctcctcctcccccagccactgccctgcaggcgccagccgttcccccaccccctgcacccctgcagatcgcaccaggcgttttgcaccccgctcccccacccatagcaccccctttagttcagcccagcccacccgtcgcacgcgcagcccctgtctgcgaaactgtacctgtgcatccactgccacagggcgaggttcagggactgccacctccacctccaccccctccactcccgccaccaggtattcgtccatcctcccccgtaacagtgacggctttagcacatcctccgagtggcctccaccccactcccagcactgctcccggacctcacgtcccccttatgcccccaagcccgccaagtcaggtaattccagccagtgaacctaagagacatccaagtaccctgccggtgatcagtgacgcccgatcagtgctgttggaagccatcagaaaaggaatccagcttcgcaaagttgaggaacagagggaacaggaggctaaacacgagaggatcgagaacgacgttgccacaattttgagcagaagaatagccgtggagtattcagacagcgaggacgactccgaattcgacgaggtagattggctggagtag

SEQ ID NO: 31486 - DNA, 1680 bp, synthetic construct
  misc_feature 1..1680: note = Description of Artificial Sequence: Synthetic coding sequence
  source 1..1680: mol_type = other DNA
atgcccctcgtgaagcggaacattgatccgcgtcacctctgccataccgcgctccccagaggcatcaaaaatgagctggagtgtgtgaccaatatatcgcttgcaaatataatcaggcaactgtccagcctgtccaagtacgccgaggatatatttggagaactcttcaatgaggcacattcatttagcttcagagttaactcccttcaagaaagggtagataggctgtcagtaagcgtaacgcagttggaccctaaagaagaggagttaagcttacaggatataaccatgaggaaggcttttcgcagttccacaatccaagatcagcagttattcgatcgtaaaacactgcctattccacttcaggaaacctacgacgtgtgtgagcagccccctcctctgaatatactcacaccctatcgggatgacggcaaagaaggtctcaagttctacacgaaccctagctatttctttgatttgtggaaagagaagatgctgcaggataccgaggataaacgaaaggagaagcgaaagcaaaaacagaaaaacctggacaggccgcacgagcctgaaaaagttccgagggcccctcacgacaggagacgggagtggcaaaagctagcacagggcccagaactcgccgaagatgacgctaatttactccacaagcatatagaagttgccaacggtccggcatcgcacttcgagacccgtccacagacctatgtcgaccacatggacggcagctactctctttcagcattgccgttcagccagatgagcgagctgctcacccgcgctgaagaacgagtgctggtgcgcccacacgagccaccccctccacccccaatgcacggcgcaggggacgctaaacccatccctacctgcattagtagtgccacaggcctaatcgagaacagaccacagtctcccgcaaccggacgcacccctgtgttcgtatcccctactccaccacccccacctccccctctcccaagcgctctctcgacatcctccctccgagctagcatgacctccacgccccctcccccagttcctccccctccaccacccccagcaacggccctgcaagccccagctgtgccccctccacccgctcctctacaaatagcgcctggagttcttcatcctgcgcctccgcctatcgcacctccccttgtccagccttccccaccagtggctagggctgccccagtctgcgagactgtgcccgtccacccactgccgcaaggagaggtgcagggtttgccccctccaccaccaccccctcctctgccacccccagggatccgcccttcctcccctgtgacagttacggccctagcccatcccccatccggtctccaccccacgccctccacggccccaggccctcatgtcccactgatgccgccttcacctccatctcaggtgatccctgctagcgaaccgaagcggcacccatcaactctgccagtcatcagcgatgcacgttccgtcctcctggaagcaattaggaagggtatccagctccggaaagtcgaagagcagcgtgaacaggaggccaagcacgagaggatcgaaaatgatgtggctacaatactgtctcgcaggatcgctgtcgaatacagcgattctgaggacgactccgagtttgacgaggtggactggctggaatag

SEQ ID NO: 31487 - DNA, 1680 bp, synthetic construct
  misc_feature 1..1680: note = Description of Artificial Sequence: Synthetic coding sequence
  source 1..1680: mol_type = other DNA
atgcccctggtgaagcgcaatattgaccccaggcacctctgtcatacagctctgcctcgcggaatcaagaacgagctcgaatgcgtaacaaatatttcattagcgaatataatccgacagttgagttctctgagtaaatatgcagaggacatttttggtgagctatttaacgaggcccacagctttagcttccgtgtgaatagtctgcaggagagagtggatcgtctgtccgtcagtgttacacagctggaccccaaggaggaggagctctcattacaggatatcacgatgagaaaagcatttagatcatctacgatccaggatcagcagctgttcgaccgtaaaactttgccaatccccctgcaagagacgtacgatgtctgcgaacagccaccccctctaaacatcttaaccccctatcgcgatgatggaaaagagggcctcaagttctacacaaatcccagctatttctttgacctctggaaggaaaagatgttgcaggacaccgaagataagaggaaggagaagcggaaacagaagcagaaaaacctggacaggccgcacgagcccgagaaggtgcctcgggcaccacacgatcggaggagggaatggcagaagttggcccagggtcccgaactagcggaggacgacgccaacttgctgcacaagcatatagaggtggctaatggaccagcctcccattttgaaactaggccacaaacctacgtcgatcacatggacgggagttatagtttgagcgcgctccccttctcacaaatgagtgagttgctaacacgtgccgaggaaagagtgttggtgcgccctcacgaaccacctcccccaccacccatgcacggagccggagacgcaaaacccatcccaacttgtatcagtagcgcaacaggcctgatcgaaaaccggccacagagtcctgcgacagggaggaccccagttttcgtctcccccacaccccctcctccgcctcccccactgccttccgcactcagcacctcatcactgcgtgcaagcatgacctccacccctccacccccagtgccaccaccaccgcctccacccgcaacggctctgcaagcccctgccgtaccccctccacctgcgccattgcagatcgccccaggagtgttgcatcccgcaccccctcccattgctcccccactcgtccaacccagcccacccgtcgccagagcggctccagtgtgtgagactgtccccgtgcaccctttaccccagggcgaagtccagggtctgcctccccctcccccacccccaccattacctcctcccggtatcagacctagcagcccagtcaccgtcaccgccctagctcaccccccaagtgggctccaccctactccgtcaaccgctcccggaccccacgtccctttgatgcccccttcaccgccaagccaggtgatcccggcttccgaacccaagcggcacccctcaacattgcctgtcattagcgatgcacggagcgtactgctcgaagcaatccggaaaggaattcagctgcggaaggttgaggaacaacgggagcaggaggccaagcacgagaggattgaaaacgacgtggccactattctaagcaggagaattgctgtggagtattcagacagtgaagacgacagtgaattcgacgaagtcgactggctcgaatag

SEQ ID NO: 31488 - DNA, 270 bp, synthetic construct
  misc_feature 1..270: note = Description of Artificial Sequence: Synthetic coding sequence
  source 1..270: mol_type = other DNA
atgcctcttgtcaagagaaacatagaccctagacatctttgtcacacggccctaccccgtggcattaagaatgagttggaatgcgtgacaaatatctcgctggctaacattatcaggcagttatcatcactctctaagtatgccgaagatatcttcggcgaattattcaacgaggcccactctttctcattcagagtcaacagcctccaagagcgggtggaccgtctgtcagtctctgtaacccaattggatcctaaagaagaagagtag

SEQ ID NO: 31489 - DNA, 543 bp, synthetic construct
  misc_feature 1..543: note = Description of Artificial Sequence: Synthetic coding sequence
  source 1..543: mol_type = other DNA
atgcccctcgtgaagaggaacattgaccctaggcacctttgtcatacggctctgcccagaggtattaagaacgagctagaatgcgtgactaatatcagccttgctaacatcattcgacagctgtcatccctgagtaagtatgctgaggatatcttcggagaattattcaacgaggcccatagcttcagtttccgcgtgaattccctccaggagcgcgttgacagactttctgtgagcgttacccaactggacccaaaagaagaggagctgagcctccaggacattaccatgaggaaggcctttcgttcatctaccatacaggatcaacaactgttcgatcgcaagacattgcccataccccttcaggaaacctatgacgtctgcgagcaacctccgcctctgaacatcctgaccccatacagggatgacgggaaggaggggctgaaattttatacaaaccctagttacttttttgacctctggaaggaaaaaatgctgcaggataccgaagacaagcggaaggagaaacggaagcagaaatag

SEQ ID NO: 31490 - DNA, 270 bp, synthetic construct
  misc_feature 1..270: note = Description of Artificial Sequence: Synthetic coding sequence
  source 1..270: mol_type = other DNA
atgccactagtcaagcggaacatcgatcctcgccacctgtgtcatacagccctgcctcgaggaatcaaaaacgagctggaatgcgtgaccaacataagtctggccaatatcatcagacagttgtcctctctgtctaagtatgcggaagacatcttcggtgagctgtttaatgaggcccactcattcagctttcgagtgaattcactccaggaacgcgtggacaggttgtctgtgagcgtcacacaactagatccgaaagaggaggaatag

SEQ ID NO: 31491 - DNA, 1497 bp, synthetic construct
  misc_feature 1..1497: note = Description of Artificial Sequence: Synthetic coding sequence
  source 1..1497: mol_type = other DNA
atgcccttggtgactagaaatattgaaccaagacatctgtgccggcaaaccctaccgagcgtgagatctgagctagagtgtgttaccaacatcaccctcgccaacgtgattcgacagctgggcagtctgtcaaaatacgccgaggacatctttggagagctcttcacccaggccaacaccttcgcttcacgtgtttcatctctcgccgaaagagttgacagattgcaggttaaagtcactcaactggaccccaaggaagaagaggtgagtctccaggggatcaacacgcgcaaggctttccgtagctcgaccattcaggatcagaagctgttcgatagaaactctttacccgtacctgtcttagaaacctataacacttgtgacacccccccaccattgaacaacctcaccccataccgagatgacgggaaagaggccttaaaattttacactgatccctcttacttctttgacctttggaaggagaaaatgttacaagatacaaaagatatcatgaaagagaaaaggaagcaccgaaaggagaaaaaagacaatcctaacagggggaatgtgaacccccgaaagattaaaactcgcaaagaagagtgggagaaaatgaagatgggccaggagttcgtggagtcgaaggagaagttgggaactagcggctacccgcctacccttgtgtatcagaacggaagcatcggttgtgtggagaatgtcgacgcatcctcctatccacctcctccccagtccgactcggcgagcagtcctagtccttccttttccgaagataatctgccgcctccacctgcggaatttagctatcccgtcgacaatcagaggggcagtggactggctggaccaaaacggagcagtgtcgtgtcccccagccacccacccccagctccacccctgggctctcctccaggccctaagcctggtttcgcgccacctcccgctccccctccccctccgcctccaatgatcggcatcccaccaccgcctccaccagtaggattcggtagcccgggtacaccaccgcctcctagccccccaagtttcccacctcatccagacttcgctgcccctccacccccacctccacctcccgcagcagattatcccacactcccgccaccccctctgtctcagcctaccggcggagctcccccaccacccccaccaccacctccgccaggacccccaccccctccgtttacgggggctgacggacagccagctattccgccaccattgtcagacaccactaaacctaagtcatcgctgcccgctgtgtcggacgcccgatccgatcttctttccgcaattagacagggatttcagctgcgacgagtggaggagcagcgggaacaggagaagagggatgtagtcggaaacgatgttgccacaatcctgtcacggcgtattgccgtggagtactccgacagtgaggacgattcatctgagtttgatgaggacgattggagcgattag

SEQ ID NO: 31492 - DNA, 846 bp, synthetic construct
  misc_feature 1..846: note = Description of Artificial Sequence: Synthetic coding sequence
  source 1..846: mol_type = other DNA
atgcctttggtcacaaggaatattgagccacggcacctgtgccggcaaaccctcccatcagtccgatcagaactggaatgcgtgacaaacatcacccttgctaacgtgatccggcagcttggaagcctgagcaaatatgcagaagatattttcggagaactctttacccaggctaacacatttgcatcacgcgtgagcagcttggcagaacgagtagaccggctccaagtgaaggtaactcagctggacccaaaagaagaggaggtgagtctgcagggtatcaatactcggaaagccttccgctcgtcaacgatccaggatcagaagctgtttgatagaaactcactgccggtgcctgtcttagagacctataatacgtgcgatactccgcctcctctcaacaacctgactccttacagggatgatggcaaggaggctttaaaattttataccgaccctagttatttctttgatctctggaaggagaaaatgctgcaggacacgaaagatattatgaaggagaagcgcaaacacagaaaagagaagaaggacaatccaaatagaggtaacgttaatcctagaaagattaaaacccgtaaagaagagtgggaaaagatgaaaatgggtcaggaattcgtagagtcgaaagaaaaacttggtactagcggatatccacctacactcgtataccaaaacgggtctatcggctgcgtcgagaatgtggacgcaagctcttatcctccaccgcctcagagtgactcagcatcttctcctagtccttccttcagcgaagacaatttgccgccaccccctgcagagttcagattcagcgccgctcagggttag

SEQ ID NO: 31493 - DNA, 1533 bp, synthetic construct
  misc_feature 1..1533: note = Description of Artificial Sequence: Synthetic coding sequence
  source 1..1533: mol_type = other DNA
atgcccgtccccccaccccctgcccctcctccgcctccaaccttcgcactcgcaaacacggagaagccaaccctgaataaaacggagcaggcaggaagaaacgccctactgtccgacatttccaaagggaagaaactgaaaaaaactgtgaccaatgaccgtagcgcgcctatcctggataagcctaaaggtgcaggagcaggcggtggcggtggtggctttggaggtgggggaggcttcgggggagggggaggcggaggcggaggtggctctttcgggggtggcggaccacctgggctaggtggacttttccaggctggaatgcccaagcttagaagtactgcaaatcgcgacaatgatagtggaggctcaagaccaccactgttgccaccgggtggtagaagcacttctgccaaacccttcagtccaccgtccggccctggacgatttcctgtgccgtccccgggtcaccgttcaggcccacccgagcctcagcgcaatcgcatgcctcccccacggccagatgtcggaagcaaaccagacagtattcccccaccagtcccatctacccctaggcctattcagtcaagcccacacaataggggatcccctcctgtccccggaggtcccaggcaaccttcgccgggaccaactccacctcctttccctgggaaccgtggcaccgccctgggcggaggctccatccggcagagccccctcagcagcagctctcccttttcaaatcgccctcccctgcccccaacacctagtcgagctctagacgataagcctccgccaccacctccaccagtggggaaccgcccttctatccaccgagaggccgttcctccaccacctccgcagaacaataagcctccagtgccatccacaccccgtcccagcgcatcttcacaagctccaccaccgccacctcctccctcacgcccaggcccacctcctctaccaccctcgagcagcggcaacgatgaaactccaaggctgccccagagaaatctatccctctcatcctccacaccccctctccctagtccaggacgctcgggacccttacctccaccacccagcgagagacctccccctccagtccgcgacccacccggaagatctggtccccttccccctccccctccagtgagtaggaatggatcaacaagtcgcgctctgcctgcgaccccccagctgccaagtcggtctggagttgattcacctcggtccggaccgcgaccacccctcccaccagacaggccatccgcaggcgcaccgccaccgcctccgccttctacctccatcaggaacggatttcaggacagtccctgtgaagatgagtgggagtctcgcttctactttcatcccattagcgaccttccgccacctgagccttatgttcaaactacgaagtcctatcccagtaagttggcccgaaacgagtcacgttcagggtccaatcgcagggaaaggggggctcctcctcttcctccaattcctcgtcctcccaagcaagccgcagaatag

SEQ ID NO: 31494 - DNA, 1512 bp, synthetic construct
  misc_feature 1..1512: note = Description of Artificial Sequence: Synthetic coding sequence
  source 1..1512: mol_type = other DNA
atgcctgtgcctccacccccagctccccctccaccccctacattcgcattggctaacaccgaaaaacctacgctcaacaagaccgaacaggctgggcgaaatgccctgctgagtgacatatccaagggaaaaaaactgaagaagactgtgacgaacgatcgatcggcccctattctggacaagcccaagggggctggagccggaggaggagggggagggttcggcggaggtggcggatttggcggaggtgggggaggaggcggaggtggtagcttcggaggaggcggaccaccaggcctgggaggcttgttccaggccggaatgcctaaactgaggtcaactgccaaccgggacaatgactcaggaggatctaggcccccattgctgccccctggcggaaggagtacctccgccaagcccttctctccaccgtcaggtccagggaggtttcctgtgccgtcccccggtcacaggtctggacccccagagccccagcgcaacagaatgccacctcccagaccagatgtaggctccaagcccgacagcattcctccacctgtaccctcgacaccaaggcccatccaaagttcgcctcacaatcgtggctcacctcctgtgcccggaggtcccagacagcccagcccaggtcctacaccgccaccatttccaggaaatcgaggaactgccctgggagggggttccataaggcagagtcccttgtcctcaagctcgcctttttccaatcggcctcccctcccaccaacccctagccgcgcactcgatgacaaaccgcctcctccgccacctcctgtgggaaatagaccatccatccacagagaagccgttcctcctccccctccccaaaacaataagccacctgtacccagcactcctaggccatctgcctcttcacaggcgccacctcctccccctccaccatcgcggccaggcccacccccacttcccccttcatcttccggaaatgatgaaacccctagattaccccaaaggaatctgtcacttagttcaagtaccccgccattgccttctcccggtaggagtgggcctctccccccaccaccctccgaacgcccaccaccccctgtcagagatccgcctgggagatcgggacctctgccaccgccacctcccgtctcaagaaacgggtctacttctcgggctttgcccgctacacctcagctgccctcgcggtcaggcgtggactccccaagatcaggaccaaggccaccgcttccccctgaccggccaagcgccggagccccacctccacccccaccatcaacatcaattcggaatggattccaggatagtccatgcgaggatgagtgggaaagtcgattttacttccacccaatttccgaccttcccccacccgagccttacgttcaaaccacaaagagttatcctagtaagttggcgaggaatgagagtagatcgggtagcaacaggcgtgagagaggcgctccacctctgcctcctatcccaagatag

SEQ ID NO: 31495 - DNA, 1512 bp, synthetic construct
  misc_feature 1..1512: note = Description of Artificial Sequence: Synthetic coding sequence
  source 1..1512: mol_type = other DNA
atgccagtaccccctcctccagcacctccccctcctcccactttcgcactggctaatacagaaaaacccactctcaacaaaacagaacaggctgggcgaaatgctctgctgagtgatatcagcaagggcaaaaaactcaagaaaactgtgacgaatgaccgtagtgccccaatactggacaaacccaaaggagctggggcaggagggggaggtggcggatttggcggaggcggtggcttcgggggtggaggcggtggaggtgggggtggcagttttggcggaggcggacctcctggacttggtggactgttccaggccggtatgcctaagcttcggagcacagctaatcgggacaacgattctggcggatccagacctccccttctgccaccagggggtaggtcaactagcgccaaacctttttcacccccttccgggcctggcaggtttcccgtgccgtcgcctggacatcgctcaggaccccctgaaccccaaaggaaccgcatgccgccaccccgtcccgacgtgggaagcaaaccagacagcatcccaccccctgtcccaagcacccccagaccaattcagagctctccacataaccgtggaagcccaccagtgcccggtggcccacgtcagcccagtcccggtcctacaccaccacctttccctggcaataggggtaccgcccttggcggagggagcatacgccaatcacccctgagcagttccagtcccttctcaaacaggccacccttaccacccaccccaagtagagctctggacgataaaccccctccccctccccctcctgtcggtaacagaccttctattcaccgcgaggcagtgcccccaccccctccccagaacaacaagccacccgtcccttctactccccgacctagtgcttcatcacaagccccacccccaccccctccaccctctcggcctggtcctcctcctctcccccctagttcatcgggcaatgacgagacgcctaggctgccacaacgtaatctttcacttagctcatccaccccgccattgccctccccagggagatccggccctctccctcccccacccagtgagcggcctccccctccagtaagggaccctcccggtaggtctggacccttaccacctccccctcctgtaagcagaaacggttccaccagccgggctctgccagccaccccacagctgccctcacgaagcggagtggattccccacggtctggaccccgaccgcctttgccacccgaccggccttccgcaggtgctcccccacccccacctccctccacttccattaggaacggtttccaagacagtccttgcgaagacgaatgggagtccagattttacttccaccccattagcgacctcccaccacccgagccttatgtacagacgactaagtcttatccgagtaaactggcacgcaacgaaagccgaagcggctctaatcgtcgcgaaaggggagcgccacctcttccccctattccaagatag

SEQ ID NO: 31496 - DNA, 1512 bp, synthetic construct
  misc_feature 1..1512: note = Description of Artificial Sequence: Synthetic coding sequence
  source 1..1512: mol_type = other DNA
atgccggtgccgcctccacccgctccacctccacccccaacatttgctcttgcgaacaccgagaagccaaccctgaataagaccgagcaagcaggaaggaacgccctactgagcgacataagtaagggcaaaaaacttaaaaaaactgttaccaacgatagaagcgccccaatccttgacaagcccaagggcgcaggcgctgggggtggcggtggaggatttggtggtgggggaggttttgggggtgggggagggggtgggggtggtggatcttttggtggcggaggcccacccggtctggggggtctgtttcaagctggaatgccaaagcttaggtctactgccaatagggacaatgacagcggaggaagtcgtcccccactgttacccccaggcggtcggtcaacttccgccaaaccgttctcacccccatctgggcctggacgctttcccgtcccctcccccggacaccgttcagggcctccagaacctcagcggaatcgaatgcctcctccccgacccgatgtcggatcaaaaccagatagtattcccccacccgtcccaagcactccacggccaattcagtcgagccctcataaccggggttctccccctgtacccggaggaccacggcagccaagccccggtcccacccccccaccatttccagggaatagaggtacagccctgggtggagggagcatccgacaatcacccctctccagctcttctccattcagcaaccgccctcccctcccaccaacccccagccgggctctggacgacaaaccgccaccccctcctccgcctgtgggaaatagaccaagcattcaccgggaggcggtacctccaccaccaccacagaacaataaacctccagtaccgtctacacccaggccaagcgcctcttcacaggcaccacccccaccccctcctccaagtagacccggtccccctccactcccacctagctccagcggtaacgatgaaacccctcgcctacctcagcgcaatctatctctttcaagcagtaccccccctctgccaagcccaggccgatcagggcctctcccgccaccccctagcgagcgacctccaccaccagtacgagaccctcccggaaggtcagggccactcccgccacctcctccagtctcacgtaacggaagcacatccagggccctccctgctacaccacagctaccctctaggtcaggagtcgatagcccccgatccgggcctcgccctcctttacctcctgatcgcccatctgcgggagctccgcctcccccacccccatccacatcaatacgtaacgggttccaggatagcccgtgcgaggacgagtgggaatcccgattttattttcacccaatatccgacctccccccacccgaaccatatgtgcaaacaacaaagagctacccaagtaagctggctaggaatgagagtaggtccggttccaatcgtcgcgaaagaggggcacctcctctgccacccattccaaggtag

SEQ ID NO: 31497 - DNA, 1080 bp, synthetic construct
  misc_feature 1..1080: note = Description of Artificial Sequence: Synthetic coding sequence
  source 1..1080: mol_type = other DNA
atgccagtgccgcctccacctgcacctccacccccaccaacgttcgccctggccaataccgagaaaccaaccctgaataaaacagagcaagcgggacggaacgccttattatcagatatctcaaaggggaaaaagctcaagaaaaccgtgactaacgataggtccgccccaattctggacaaaccaaagggcgctggggctggcggaggaggtgggggattcggtggaggaggaggattcgggggagggggagggggaggtggtggcggaagtttcgggggaggtggccctcctggattaggagggctttttcaagcaggtatgcctaagcttcggtctacagcaaatcgtgacaacgacagtggagggtcacggcctcctcttttgcccccaggtggcagaagcacctccgcaaagcccttcagtccccctagcggcccaggcaggttcccagttccatcccctgggcatcgctcagggccacccgagccccagcggaaccggatgcctcccccacgaccagacgtaggtagtaagcccgacagtattccaccacctgttccctccacgccgagacccattcagtctagtccacacaatagggggtcccccccagttcccggaggccctcgacagccatcccctggcccaacacccccaccgcctccgcctgtgcgggatcctcctggacgaagcggccctcttccacctccccctccagtcagcagaaatggctccacgtcgcgcgctctgcccgcaacacctcaactgccttcccgaagtggagtggacagcccacggagtggtcctcgtcctccactgccacctgatagacctagcgcaggtgctcctccacccccacctccgagtacatccattcgcaacggcttccaagattctccctgtgaagacgaatgggagagtaggttctattttcatcccatttccgatctacctcctcccgaaccctatgtgcaaacaaccaagagttacccctccaagttggccaggaacgagtctagatctggttcaaatagaagagagagaggagccccacctcttccgcctatcccacggtag

SEQ ID NO: 31498 - DNA, 1482 bp, synthetic construct
  misc_feature 1..1482: note = Description of Artificial Sequence: Synthetic coding sequence
  source 1..1482: mol_type = other DNA
atgccagtcccgccacccccagctcctccccctccccctacctttgccctggctaacactgagaaaccaacactgaacaaaacagagcaagccggacgaaatgcacttttatcagatatcagcaaagggaagaagctgaaaaagacagtgactaacgaccgctctgctcctatcttggataagcccaagggcgcaggagccggaggcggaggtgggggatttggtggcggtggagggttcggtggtggcggtggcggaggtggtggagggtcctttgggggagggggacccccaggcctgggcggactgtttcaggcaggaatgccaaagctgcgttcaaccgcaaaccgcgacaatgactccggcggttctagaccaccactgcttcctcctggaggcagatcgacatcagccaagcctttctcgccaccatccggacccggacgattccctgtacccagccccggacatcggtcagggcctcccgagccacagcgcaatcgaatgccgcctccccgtcccgatgtggggagtaaacctgactccataccacctcctgtcccttcgaccccaagaccaatccagtctagtcctcacaacagaggatcgcctccggtccctggcggacctaggcagccatctcctggtcctacacccccaccgtttcctgggaaccgaggcacagcccttggtgggggttccattagacagagccctttgtcctcgagctctcctttcagcaatagaccccctctccctcccaccccatcccgggcactggacgacaaaccccctccgccaccaccaccagtgggaaatcggccatcaatccaccgggaagccgtgccgcctcccccaccacaaaacaataagccaccagtcccatctacgccccgtccgtccgccagctcgcaggcccctcctccaccaccccctccctctcgtcctgggcctccgcctcttcctccctcatcttcgggtaatgacgaaacaccccgtttgcctcagcgcaatttatcattatcttcctcaacacctcccctgcctagcccagggagatcaggacccctgccgccacctcctagtgagagaccaccaccacctgtacgcgacccaccaggtagaagcggacccctcccaccaccaccaccggtcagtcggaacggctcaacatcccgagcactcccagcaacacctcaactaccatctcgtagcggcgtggacagtccacgctcgggccctcggccacctctgccgcctgacaggccatcggccggagcacccccacctccacccccatccaccagcatcagaaacggtttccaagattctccttgtgaagacgagtgggaatctcgattttattttcatcccattagcgatttacctccaccagagccttacgtccagaccaccaaatcatatccaagcaaactggccagaaacgagagtaggtccgaatacttttgccaagggttttag

SEQ ID NO: 31499 - DNA, 303 bp, synthetic construct
  misc_feature 1..303: note = Description of Artificial Sequence: Synthetic coding sequence
  source 1..303: mol_type = other DNA
atgcctgtgccccctcccccagctcccccaccacctccaacatttgctctcgctaacactgaaaaaccaaccttaaacaaaactgaacaggctggacgtaatgccctcctgtctgacatctctaagggaaaaaaattaaagaaaacagttacaaacgatcggagcgccccaattctcgacaaacccaaaggcgcaggcgctggtggcggtggtgggggtttcgggggtggcggtggattcggaggaggcggagggggtggaggcggagggtcattcggcggtgggggaccaccaggactatag

SEQ ID NO: 31500 - DNA, 1647 bp, synthetic construct
  misc_feature 1..1647: note = Description of Artificial Sequence: Synthetic coding sequence
  source 1..1647: mol_type = other DNA
atgaaaacactcgaaactcaaccgctggcccctgattgctgccccagtgaccaggaccccgcaccagcccatccaagtccgcatgcatcacctatgaataagaatgcagatagcgaactgatgccaccaccccctgaacgaggggacccacctagattaagccctgatccagtcgctggatcagccgtctcccaggagctacgagagggcgacccagtctccctgagcacgcctctggagacagagttcggctcccccagcgagctgagccccaggatcgaggaacaggagttgtccgaaaacacatccctacccgctgaggaagcgaatggctctttgagcgaggaggaggctaatggaccagaattaggttcgggaaaggccatggaggacacttctggggaacctgcggcagaggacgaaggcgacaccgcctggaactatagttttagccaactcccacggtttctctctggatcatggagtgaattttctacccagcccgagaatttcctgaagggctgcaaatgggccccagatgggagctgcattctcaccaattcagccgacaacatcctccgcatctataacctgcctccagagttgtatcatgaaggcgagcaggtggagtatgctgagatggttccggtgctgagaatggttgagggagacaccatatacgactattgttggtatagtctcatgtcctctgcccagcctgatacttcttatgtggcctccagttctagggagaaccctatccacatctgggatgcatttactggcgagcttcgcgcttcttttcgtgcttataatcacctggatgagcttactgcagcccattccctgtgtttttcccccgacggctctcagctattctgcggattcaaccgcaccgtccgggtattctcaactgctcgacccggaagggactgtgaagtgcgcgcaacatttgctaaaaaacagggacagtctggtatcatctcttgcatcgcatttagtcccgctcagcccttgtatgcctgcgggtcatatggccgaagtctgggattgtacgcatgggacgatggaagcccattagccctcttgggaggccaccaggggggaatcacccatctgtgtttccaccccgatgggaatcgtttctttagcggtgcgagaaaggacgccgaactcctttgttgggatctgagacagtctggctatcctttgtggagcctcggccgtgaagttacaactaaccaacggatctacttcgacctggacccaaccggccagtttcttgtgtctgggagcacaagcggagctgtatccgtctgggataccgatgggccaggcaatgacggaaagccagagcccgttttatcgtttcttccccagaaggactgtacaaatggtgtgtcattgcatcctagcctgcccctccttgccacagcatccggtcagcgtgtttttccagagcctactgaatcaggcgacgagggagaagagctcggactgccactgctgtccacaagacacgtgcaccttgaatgtagactgcagctctggtggtgtgggggagccccagacagctcaatccctgatgatcaccagggagagaaaggccagggcggtaccgaggggggagtgggggaactgatttag

SEQ ID NO: 31501 - DNA, 1647 bp, synthetic construct
  misc_feature 1..1647: note = Description of Artificial Sequence: Synthetic coding sequence
  source 1..1647: mol_type = other DNA
atgaagacactcgagacgcaaccactcgcacctgattgttgcccatcagatcaagatccggctcccgctcatccctcaccgcatgccagtcccatgaataagaacgctgactccgagctgatgccccctcctcctgaaagaggcgatcccccacggctgtctccggatcccgtggctgggagcgcagtgtcacaggagctgcgggagggagatccagtgtccctgagtacgcccctcgagacggaattcggctcaccaagcgaactctctccccgaatcgaggagcaagaactgtccgagaacacgagtctgccagccgaagaggctaatgggagtttgtcagaagaagaagcaaatgggccagaactcggctccggcaaggccatggaggatactagcggagaacccgcagctgaagacgagggcgatacagcctggaattattctttttcgcaactccctcggttcttatctgggtcatggtccgagttcagcactcagccagagaactttctcaaaggctgcaaatgggctccagacggtagctgcattcttactaatagtgcagataatatactacggatctacaacctgcccccagaactgtaccatgagggggagcaggtcgagtacgccgagatggtcccggtgcttagaatggtggagggtgacaccatctacgactactgttggtattcgctgatgtcctccgcccagcccgatacttcttatgtcgcaagttcctcccgtgagaatcctatacacatctgggatgcctttacaggcgagttacgagctagttttcgggcatacaaccacttagacgagttgaccgccgctcactcactgtgttttagccctgatgggagccagcttttctgcggctttaaccgcactgtgagggtcttttccacagctagacctggcagggattgtgaggttcgggcaaccttcgcaaagaagcaggggcagagcgggatcatatcctgcatcgccttctctccagcccagccactctatgcttgcggctcgtatgggagaagcctcggactatatgcctgggatgatgggagccctttggcccttctcggaggtcaccaaggaggaatcacacatctttgtttccatcccgatggcaataggttcttcagcggcgctcggaaggacgctgaactgctttgctgggatctgcggcagtccggatacccactctggtccctgggcagagaggtcacaaccaatcagcgcatttacttcgatttggacccaactggtcagttcttagtgagtggctctacctcgggagccgtgagtgtgtgggatactgatggtcctggaaatgacggcaaaccggaacctgtgctgtcttttctgccccaaaaggattgcaccaacggggtgagtctgcaccccagcctgcccctcctggcaactgcctcaggacagcgagtctttcccgagcccactgaatccggcgatgaaggagaggagcttgggctgcccctgctgtccacacgacacgtccatctggaatgtagattgcaactgtggtggtgcgggggtgcccctgattcaagcattcccgacgatcaccaaggtgagaaggggcagggaggcacagaagggggtgtaggcgagttgatctag

SEQ ID NO: 31502 - DNA, 1647 bp, synthetic construct
  misc_feature 1..1647: note = Description of Artificial Sequence: Synthetic coding sequence
  source 1..1647: mol_type = other DNA
atgaagactctggagacacagccattagcccctgactgttgtccaagtgaccaggatcctgcccctgcgcatccgagcccacacgcttcccccatgaataaaaacgctgattctgagcttatgccgccaccccctgagaggggtgatcctccaagactaagtccggacccagtcgctggatccgcggtctcacaggaactcagggagggggatcctgtgagtttgtcaacccctctcgaaactgagttcggcagtccttcagaactctcacccaggattgaggaacaggaactcagtgagaatacctctcttcctgcggaggaggctaacggctccctgtcggaagaagaagcgaacggtcccgaactgggcagcgggaaggccatggaagatacttccggcgagcctgcggctgaagatgagggagataccgcctggaattactcattttcacagctgccccgttttctgagtggatcctggtccgagtttagcacccagcccgaaaattttctgaagggttgcaagtgggccccagatggtagttgcatactcacaaattccgcggacaacatcttgaggatatacaatctgcccccagagctttaccacgaaggtgagcaagtggaatatgcagaaatggtgcctgtgcttcgcatggtcgaaggcgacaccatctatgattactgctggtactctctgatgtctagcgcacaaccagatacgtcctacgttgccagctcatcacgcgaaaaccccattcatatctgggacgcattcactggtgaactgcgtgcaagctttagggcatacaatcacctggatgagttgacagccgctcacagtctttgcttttcgccagacggtagccagctgttttgtggattcaatcgaacggtgagagtgttctccaccgcccgacccggaagagattgcgaggtgcgggcaactttcgccaagaaacagggacagtccggaattatcagctgtattgcctttagccccgctcaaccactgtacgcctgcggtagctacggacgctctttggggctttatgcctgggatgacggctctccactggcccttctgggcggtcaccagggaggtattactcatctctgtttccaccctgacggtaatagattctttagcggagcgagaaaagatgcggagctgctttgctgggatctgcgacagtcaggctaccccctttggagcctaggtcgtgaagtgacaacaaatcagagaatctatttcgacctggatcccactggacagttcttggttagcgggtccacatccggcgctgtatccgtgtgggacaccgatggtcctggcaatgacggaaagcctgaaccagtgttgagctttcttcctcagaaggactgtacaaatggtgtcagtctacatccttctttgcccctactggccactgcatctgggcaacgcgtctttcccgaaccgaccgaatccggggatgagggcgaagagctgggcctcccccttttgtctacaaggcacgtgcatttggagtgcaggcttcagctgtggtggtgtgggggagccccagactcctcaattcccgacgaccatcagggagagaaggggcagggtggaacagaaggcggagttggggaactaatatag

SEQ ID NO: 31503 - DNA, 567 bp, synthetic construct
  misc_feature 1..567: note = Description of Artificial Sequence: Synthetic coding sequence
  source 1..567: mol_type = other DNA
atgaagacattggagacacagcctctggccccagattgttgcccatctgatcaggatcctgctcccgctcaaccagacacatcttacgtcgcttcaagcagtagagagaatcctattcatatctgggatgcattcaccggagaattgcgcgctagcttccgcgcatataaccatctcgacgaattgactgccgcacattccttgtgcttcagcccagacggctcccagcttttttgcggatttaatcgcacagtgagagtatttagcaccgctcggccaggacgggactgtgaggtgcgcgcaacctttgggaagcatttgtgcttgcagggacggaggcgcggtaagggaaccgcgacatgtaccggagccttttgcgaacccggagctacttgcggaggctcacgcagaccgctgtacggtccagggagcagatgctccccggttggaagaggagcaaatcggctgcgagcgggaagaaaaccctcgcagggccagcctgcaggacagaggaccgcaagtttccttaattcctatccagtctcatgtggggcatttgggctctag

SEQ ID NO: 31504 - DNA, 1647 bp, synthetic construct
  misc_feature 1..1647: note = Description of Artificial Sequence: Synthetic coding sequence
  source 1..1647: mol_type = other DNA
atgaaaactctagaaacccagccactcgccccagactgttgccccagcgatcaagatccagcacctgctcatccgtcaccacatgcatcgccgatgaacaaaaacgccgacagcgagctaatgcctcccccacccgaaagaggagatcccccaagactgagccccgaccctgttgccggttccgcagttagtcaggagctgagggagggggatcccgtctcactgtccacaccactagagacagagttcggatcccctagcgaattgtctccaaggatcgaggaacaagaactgagcgaaaacaccagcctgccggcagaggaagctaacgggtctttatcagaggaggaagccaatggccctgagcttggctccggaaaggccatggaagacacatccggcgagcctgctgccgaggatgagggcgacacagcatggaattatagttttagccagctaccccgttttttgtccggaagttggagcgaattttctacccagcccgagaactttttaaagggctgtaaatgggccccagatggaagctgcatcctgacaaacagcgccgataacattttgagaatctacaatctacctcccgagctctatcacgaaggagaacaggtcgagtacgctgagatggtgcccgtgctcagaatggtggagggtgatacaatttatgactattgctggtactcccttatgtcttctgcacaacccgacacatcatatgtggcctcgtcgtctcgcgagaaccctattcacatttgggacgcattcacgggtgagttgcgcgctagcttcagagcctacaaccatctcgacgagctgaccgcagcccattctttgtgcttctcgcccgatgggtctcaacttttttgcggatttaatcgcaccgtccgggtttttagcacagcacggccagggagggattgcgaggtcagggccacatttgcaaaaaaacaaggacaaagcgggattatctcttgcatcgccttctctcccgcacagcctctttacgcctgtggttcatacggtaggtcactgggactctacgcatgggacgatggcagcccactagcgcttctcgggggacaccagggcggaatcactcatctctgcttccatcccgatggaaatcggtttttttcaggagccagaaaggacgcagaactgctgtgttgggacttgcggcagtccgggtatccattgtggagcctcggcagggaggtgaccaccaaccagagaatatactttgatttggatccaacaggccagtttctcgtgagcggcagcacgtctggcgctgtgtccgtttgggataccgacggccctggcaacgatgggaaacctgaacccgttttaagtttcctgccccagaaagactgtaccaatggagtgtcattgcacccttctctacccctgttggcaactgcatccgggcagagagtgtttcctgagccaactgaatcgggagacgaaggagaagaattggggctccccctactgtccaccaggcacgtgcatcttgagtgccgtctgcaactgtggtggtgcggaggtgcaccagattcatcaattccagacgatcaccagggcgagaaaggccagggcggaacagagggaggcgttggggagctgatatag

SEQ ID NO: 31505 - DNA, 1299 bp, synthetic construct
  misc_feature 1..1299: note = Description of Artificial Sequence: Synthetic coding sequence
  source 1..1299: mol_type = other DNA
atggacactgaaaaaagcggcaaaagagagttcgatgtacgccaaacacctcaagtgaacataaaccccttcacccccgatagcctgctgctccactcatccggccagtgtcgcagacgcaagaggacctattggaacgacagctgcggcgaagacatggaggcctccgattatgagctcgaggatgaaacccgtcctgccaagcgcattacaatcactgagagcaacatgaaatctaggtacactacggagttccacgaactggagaagattggctccggcgagttcggttcggtgtttaagtgtgtcaaaaggctggacgggtgcatctacgctattaagcgcagcaaaaagcctctggctggaagcgtggacgagcagaatgcccttcgagaggtttacgcacatgccgttctcggacaacactcacacgtggtgcgctacttttctgcgtgggcagaggacgatcacatgttgattcaaaatgaatattgtaatgggggttcactggccgatgctatatccgagaactatcgtattatgtcatacttcaaggaagcggaacttaaggacctgctcttgcaagttggacgcggactgaggtacatccattctatgtcactggtccacatggacatcaagccttccaacattttcatcagccgcactagcatcccaaatgctgcctctgaggaaggcgacgaggacgattgggcatcgaacaaagtgatgttcaagatcggggatctgggtcacgtgacgaggatctcttcaccccaggtcgaagagggagacagcaggttccttgccaatgaagttcttcaggaaaattacacacacctgccaaaggctgatatctttgccctcgccctgactgtggtctgtgcagccggagcagagccccttccaaggaacggggaccaatggcatgaaattcgtcaaggcaggctgcctcggataccgcaggtgttgtcccaagaatttaccgaactgctgaaagtcatgattcatccagacccagagagacggccttcagccatggctctagtgaagcactccgttctgctctctgcttctcgcaagagtgccgaacagctgaggatcgagctgaatgcagaaaagtttaaaaactctctattgcaaaaagagctcaaaaaggcccagatggcaaaggcagcagcggaggaaagagcactgtttacggacaggatggctaccaggtccacgacacagtcaaaccggacctctcggcttataggtaagaagatgaatcgcagtgttagtttaacaatttattag

SEQ ID NO: 31506 - DNA, 1941 bp, synthetic construct
  misc_feature 1..1941: note = Description of Artificial Sequence: Synthetic coding sequence
  source 1..1941: mol_type = other DNA
atgtcattcctgtcacgccagcagcctcccccaccaaggcgggcaggcgcagcctgcactttgcgccagaagctgatcttctctccctgttctgattgcgaggaggaagaagaggaagaggaggaggagggctctggccactctacaggcgaagacagcgcctttcaagagcccgactctccactgccacccgcacgatcccctaccgagcctgggccagaacgacggaggtcacccggaccagccccaggctcccctggagaacttgaagaagatctgctcttgccaggagcctgtccaggcgcagatgaggccggtggaggggcagagggcgactcttgggaggaagagggtttcggatcttcttcacccgttaagagccctgcagcaccatattttcttgggtcgagcttctctccagtgcgttgtggtggccctggggatgcaagtcctagaggctgtggcgctcgaagagccggagaagggaggcgatcgccccgacccgaccatcctggtactcctccccacaaaacattccgtaaactgcgcctcttcgataccccacatactccgaagagcctcctgtctaaggcgaggggtatcgactcatcaagcgtcaaactgaggggttcttccctttttatggatactgagaaaagtgggaagagggagttcgatgtacggcagaccccccaggtcaacataaacccattcacccccgatagcttattgctgcacagttccgggcagtgcagacggcgaaagcgcacttattggaatgacagctgcggtgaggacatggaggcctccgattacgagctcgaggatgaaacacgccctgcaaagcgcattacaataacagaaagcaatatgaagagcagatatacaacggaatttcacgaattggaaaaaattggcagcggcgaatttggctctgtgtttaagtgcgtgaagagattagacggttgcatttatgctattaaaagaagcaagaaacctctcgcaggttcagtggatgaacagaatgccctcagagaagtctacgcacatgcggtcctggggcagcacagtcatgtggtccgttacttttcggcttgggcggaagacgatcatatgttaattcagaatgagtactgtaacgggggttccctggctgacgccattagtgagaactaccgtatcatgtcctactttaaggaggcggagctgaaggatctgttgctgcaggtgggacggggactcaggtacatccactctatgagtctggtccatatggatattaaaccaagtaacatctttataagccggacttccatacccaacgctgcaagcgaagagggagacgaggatgattgggccagtaataaagtcatgtttaaaatcggcgacttgggccacgtcacccgcatatcctccccacaggttgaagaaggcgactcccgattcctggccaatgaggtgttacaggagaattacacacacctcccaaaggctgacatttttgccttagccctgactgtggtgtgcgccgctggtgctgaacctctgccacggaatggcgatcaatggcacgagatccgtcagggcagactcccaagaattccacaggtgttgtcccaggagtttaccgaactgctcaaggtaatgatccatccggatcccgagaggcgcccaagtgcaatggcattagtgaagcactccgtgttattaagcgcttcaagaaaatctgcagagcaactgaggatagaactcaatgccgagaaattcaagaactctctgctccagaaagaacttaagaaagctcagatggctaaggccgctgccgaggaaagagccctgtttaccgatcggatggctactcgctccactacccagtccaatagaacatcccgcctgatcgggaaaaagatgaataggtcagtgagcctgacaatatattag

SEQ ID NO: 31507 - DNA, 1554 bp, synthetic construct
  misc_feature 1..1554: note = Description of Artificial Sequence: Synthetic coding sequence
  source 1..1554: mol_type = other DNA
ttgcaggatcccgcttcaacctgcgtgccagaacctgcctcacagcacacgctgcgctccgggcctggctgcctacaacaacctgagcagcagggcgttcgagatcccggtggcatctgggccaagctgggtgcggctgaagctagcgcggagagactccaaggaagacggtctaggggggctagcggaagcgaaccgcagcagatgggctccgatgtgagagatttgaacgccctgctacctgccgtgccatcactcggtgggggtggagggtgcgctctgccagtgagcggcgcagcacaatgggcacccgtgctggactttgcccctcccggtgccagcgcatacggatccctcggcggacccgcaccccctccagccccacctcccccacccccaccccctccacatagctttatcaaacaggagcccagctggggtggggcagaaccgcatgaggagcagtgcctgagtgccttcactgtccatttctctggtcaatttactgggaccgctggcgcatgccgctatggccctttcggcccacccccaccaagccaggcttcctctggccaggctcgcatgttccctaatgccccatacctcccttcgtgcctggaatcgcaaccggcaatccgaaaccaagggtattccactgtgaccttcgacggcacacccagctatggtcatacaccaagtcaccacgcagctcagttccctaaccattcctttaaacatgaagaccctatgggacagcagggtagcctgggagagcagcagtactcggtgccaccccctgtttacggatgtcacacccctacagatagctgcactgggtcgcaggccctactgctacggactccctattcttccgacaatttatatcaaatgacctctcagcttgaatgcatgacctggaaccagatgaatctgggggctacattgaaaggcgtggctgctgggagctcctcctccgtgaagtggactgagggccagtcaaaccacagtacaggctatgagtctgataaccacaccacacccatcttatgcggcgctcagtacaggatacacacacacggtgtcttcaggggtattcaggatgttcgtagggtcccaggagtggcacccacacttgtcagaagcgcatcagaaacttccgagaaaaggcctttcatgtgcgcctaccccggatgcaacaagcgatactttaagctgtcgcatctccagatgcattccaggaagcacaccggtgagaagccataccaatgcgactttaaggattgcgaacgtcgtttcagcaggtctgaccagctgaagaggcaccagcgtaggcataccggcgtgaaacctttccagtgtaagacatgccaaagaaaatttagcagatccgatcacttaaaaactcatacacggacacacaccggcaagacaagcgaaaagccattcagctgtaggtggcctagctgccaaaaaaagttcgcacggtctgatgagctggtacggcaccacaacatgcaccagaggaatatgacaaagctccagctggccctgtag

SEQ ID NO: 31508 - DNA, 954 bp, synthetic construct
  misc_feature 1..954: note = Description of Artificial Sequence: Synthetic coding sequence
  source 1..954: mol_type = other DNA
ctgcaggatcctgctagtacctgcgtccctgagccggcttctcagcacaccctgagaagcggacctggttgtctccagcagcctgaacaacagggcgttcgggatccagggggaatttgggccaaactcggggcagccgaagcatctgctgagagactgcaaggcagacggagtaggggcgcttccgggtctgagccgcagcagatgggttctgatgtgcgcgacctgaacgccctgttgcccgcagtcccttctctgggaggtgggggaggatgtgccctgccagtgtctggagcagcccagtgggctcccgttttggacttcgctcccccaggcgcatcagcctacgggtcccttggaggacccgctcccccaccggctcccccaccgccaccaccacctccccctcattccttcatcaagcaggagccctcttggggaggggcagagcctcatgaggagcagtgtttgtcagctttcactgtacatttctcagggcagttcacaggtacagctggtgcttgtagatacggccctttcggcccacctcctcccagccaggctagtagcggtcaagccagaatgttcccaaacgctccttacctgccctcatgcctcgaaagccagccagccatccgcaaccaggggtactctactgttacattcgacggaacccccagttacggacataccccctcccatcatgccgcacagttccccaatcactcttttaagcatgaagaccctatggggcagcagggtagtctgggggagcagcagtacagtgtgccgccacccgtgtacggatgtcatactcccaccgacagctgtaccggatcccaagcactgctgctcagaactccttattcctctgataatctgtaccagatgacctcccagctggagtgcatgacttggaaccagatgaacctgggagccaccctgaaagggtag

SEQ ID NO: 31509 - DNA, 909 bp, synthetic construct
  misc_feature 1..909: note = Description of Artificial Sequence: Synthetic coding sequence
  source 1..909: mol_type = other DNA
atggagaagggttactcaacagtgacctttgatggcaccccatcctacgggcacaccccttcacaccacgcggctcaattccctaatcattccttcaagcacgaggatcctatgggccaacagggtagcctaggggagcagcagtacagcgtgccaccaccagtgtacggttgccatacaccaacagattcctgcactggaagccaggctctgcttttacgaacaccctacagctcagataacctgtaccaaatgacatctcagctcgagtgcatgacgtggaatcagatgaatttaggagcaacattgaaaggggtagctgccggtagttcatcttctgtgaagtggaccgaggggcagagtaaccattcaacagggtatgagagcgacaaccatacaaccccaattttgtgtggtgcccagtacagaatacatacccacggcgtcttccggggaatccaggacgtgaggcgcgtgcccggtgtcgcgcctaccctggtgaggtcggcatctgaaacatccgagaaaagaccctttatgtgtgcgtaccctgggtgcaacaagaggtactttaagcttagccacctacagatgcattcccgcaagcacacaggcgaaaaaccttatcagtgtgattttaaggactgcgaaagacgcttctcaagatccgaccagctaaaacgccatcagcgcagacatacaggcgtgaagcccttccagtgtaagacctgtcagcgtaagttttctaggtcggaccacctgaaaacacacacaaggacccatacgggagagaagccattcagttgccgttggccatcatgccagaagaagtttgctcgatccgacgaactcgtgcgacatcacaacatgcaccaacgaaatatgaccaagttgcagctggcgctctag

SEQ ID NO: 31510 - DNA, 1545 bp, synthetic construct
  misc_feature 1..1545: note = Description of Artificial Sequence: Synthetic coding sequence
  source 1..1545: mol_type = other DNA
cttcaggatccggcatcaacgtgtgtgccagagccagcgtcacagcacacccttcgctctggccctggatgcctgcagcaaccggagcagcagggcgtccgcgatcccggtggcatatgggcgaaactcggagcggctgaggcatccgcagagcgcctgcagggcaggagaagtcggggagcttctggctcagaaccacagcagatggggagtgatgtgcgcgacctgaacgctctcctgccagccgtgcctagccttggcggtggaggaggctgcgcactcccagttagcggggcagcgcagtgggcccctgttttggattttgcccctccaggtgcaagcgcctacgggagcctcgggggaccagcacccccacccgcacctcctcccccaccgcctccccctccccatagcttcattaagcaagagcctagttggggaggcgcagaacctcacgaggagcagtgtttgagcgccttcacagtgcatttctccggccagtttacgggcacagctggggcatgtagatacgggccattcgggcctccacctccctcccaagctagctccggccaggccaggatgtttcctaacgcgccttacctgccctcttgcctggaatctcagcccgctataagaaatcaaggatactctacagtaaccttcgacgggactccctcttacggtcacacccctagtcatcatgccgctcaattccccaatcactcttttaaacacgaagacccgatgggacagcaggggagcctgggtgagcagcagtactccgtgccccctcctgtgtatggttgtcacacaccaaccgattcctgcactgggagccaggctttgcttctgaggaccccctattcctccgataacctctaccagatgacaagccagctggagtgcatgacttggaaccagatgaatttgggagccactctgaaaggcgtcgccgctgggtcctcttcctctgttaaatggactgagggccaatcaaaccactctacagggtatgaatctgacaatcacaccacaccaatcctctgtggggctcaatatagaatccacactcacggcgtgttccgcggtatccaggatgtgcggagagttccgggagtagctccaacattggtgagatctgcctccgagacttctgagaagaggccctttatgtgtgcatacccgggatgtaataagcggtactttaaactgagtcacctgcaaatgcactcaagaaagcacaccggagagaaaccgtaccagtgcgactttaaagactgcgaaaggcggttttctcgctctgaccagttaaaaaggcatcagcgtaggcacaccggggtgaagccatttcaatgtaagacctgccagcggaagttctcaagaagcgatcatttaaagacccacacaagaacccacaccggtgaaaagccattttcatgtcgctggccatcctgccagaagaagttcgcacggagtgatgaactggtgagacatcataatatgcaccagagaaacatgactaagctccagctggcattgtag

SEQ ID NO: 31511 - DNA, 1494 bp, synthetic construct
  misc_feature 1..1494: note = Description of Artificial Sequence: Synthetic coding sequence
  source 1..1494: mol_type = other DNA
ctgcaggacccggcatctacttgtgttcctgaacctgcttcgcagcatacacttaggtcaggaccaggttgcctgcagcagccagagcagcaaggagtgagagaccctggaggaatctgggcaaagctgggtgcggctgaggcctcagctgagcgcctgcagggacgcagatcaaggggagccagcggatcagagccccaacaaatgggcagcgacgtgagagatctgaacgcgttgttaccagctgtgccttcactaggaggagggggaggatgcgccctgccagtgtccggagccgctcagtgggccccagtcctggatttcgcccctcccggtgctagcgcctatgggagcctgggagggccagccccaccccctgcacctccccctcccccacccccaccgcctcattctttcataaagcaggagccgtcctggggtggggcagagcctcatgaagagcagtgcctctccgcctttaccgtgcactttagtggtcaattcacgggcacagctggtgcctgtcgttatggtccttttggaccccctcctcctagccaagcgtcctctggtcaggcaagaatgtttcccaacgctccatacctgcctagctgtctcgagtcccagcccgcaatcagaaaccagggctattctactgtgaccttcgatggtactccctcttacggccatacaccgtctcaccatgcagcccagttccccaaccatagctttaagcatgaagatcccatgggccagcagggcagtttaggagaacagcagtacagtgtgccgcctccagtatacggatgccacacaccaaccgatagctgcaccggttcccaggcattattgctacggaccccttattccagcgataacttatatcagatgacctcccagttggagtgtatgacctggaaccaaatgaatcttggcgcaacgttaaaggggcactctaccggatatgagtcagataatcacactaccccgattctgtgtggagcccaatacagaatccacacacacggagtgttccgtggcatacaggacgtacggcgtgttccaggggtggctccaacactcgtccggagcgcctcagagacctccgagaaacggccttttatgtgcgcctatcccggatgtaataaaagatactttaagttgtcccatctgcagatgcactccagaaaacataccggcgaaaaaccctaccagtgcgacttcaaggactgcgagaggcggtttagtcgctctgatcaattaaaaagacatcagagaaggcatactggcgtgaagccctttcaatgtaaaacttgccagcgcaaattcagcaggtccgatcatctgaaaacccacaccagaacccacacaggggagaaaccgtttagctgccgatggccctcctgccaaaagaagttcgcccgtagtgacgagctggtgagacatcacaacatgcaccagaggaatatgactaagctacagctggccctctag

SEQ ID NO: 31512 - DNA, 396 bp, synthetic construct
  misc_feature 1..396: note = Description of Artificial Sequence: Synthetic coding sequence
  source 1..396: mol_type = other DNA
atgggccaacaggggtcgctgggagagcagcagtacagtgtgcccccaccagtgtatgggtgccacaccccaactgattcctgtacggggtcacaagccttgttgttgcgaaccccatactccagtgacaatctgtatcaaatgacgtctcagctggaatgtatgacatggaatcagatgaatctgggtgctaccttaaaaggcgtcgctgccggatccagttctagtgtgaaatggacagaaggccagtctaaccactcaacaggatacgaaagcgacaaccacaccacaccaattttatgcggggctcagtatcgcatccacactcatggggtgtttcgagggatccaggatgtgcgccgagtacctggagtggcacctacgctggtccggtag

SEQ ID NO: 31513 - DNA, 537 bp, synthetic construct
  misc_feature 1..537: note = Description of Artificial Sequence: Synthetic coding sequence
  source 1..537: mol_type = other DNA
tgactaggcgctacactgaaaggtgtcgctgccggatcatcttcctcggtcaagtggacagaaggccagagcaaccacagtactgggtacgaatccgataaccacaccactccaattctctgtggcgcacaatacagaattcacacacatggagtctttcggggaatacaagacgtaagacgtgtacctggagtcgccccaactctggtgagatccgcttccgaaacaagtgagaaacgccctttcatgtgtgcctaccccggttgcaacaagcgttacttcaaactgtctcacctgcagatgcacagccgcaaacatacaggcgttaagcccttccagtgtaaaacctgccagcgtaaattttcaagatctgaccacttaaaaacacatacacgtactcacacgggaaaaacgtcagaaaagccattctcttgtcggtggccctcctgccagaagaagttcgcgcgatccgatgaacttgtgcggcatcataatatgcatcagaggaatatgaccaagctgcaactcgcactgtag

SEQ ID NO: 31514 - DNA, 867 bp, synthetic construct
  misc_feature 1..867: note = Description of Artificial Sequence: Synthetic coding sequence
  source 1..867: mol_type = other DNA
atggaaaaaggctacagcacagtgaccttcgacggcaccccaagctacggccacacccctagccaccacgcagctcaattcccaaaccactcctttaagcacgaggacccaatgggccagcagggttccctcggagagcaacagtattcagtgccacccccagtgtacggctgtcacacacctaccgactcgtgcacagggtcacaggcgttgttgctgaggacaccgtatagcagcgataatctgtatcagatgacatctcagcttgagtgcatgacctggaatcagatgaatctcggcgctacattgaagggccattcgacagggtacgagagcgacaatcacacaacaccgatcctgtgcggtgcccagtaccgcatccacacacatggtgtgttccggggaatacaagatgtccgtcgggtccccggagtggccccaacgttggtgcggagcgcctcagaaacatccgagaagaggcctttcatgtgcgcctaccctgggtgtaataaaaggtatttcaagctgtcgcacctgcagatgcacagcagaaagcatacaggagaaaagccttatcagtgcgattttaaagactgtgagcgacgcttctccagatcagaccagcttaaacgccaccagaggcgacacaccggggttaaaccattccagtgtaagacctgtcagaggaagttttctaggtctgaccacctgaagacacacactcggacacacaccggcaagaccagcgagaagcctttctcgtgtcggtggcccagctgtcagaagaagttcgcacgtagcgatgagttagtacgacatcacaacatgcatcagcgcaacatgacaaagcttcagcttgctctttag

SEQ ID NO: 31515 - DNA, 1065 bp, synthetic construct
  misc_feature 1..1065: note = Description of Artificial Sequence: Synthetic coding sequence
  source 1..1065: mol_type = other DNA
atgagagccaggcctcaagtctgtgaagcccttttgttcgccttggccctgcagaccggggtgtgctacggcataaaatggcttgcacttagtaagacgccttcagctctcgctctgaaccagacacagcattgcaagcaacttgaggggttagtttccgcacaggtacagctttgcaggtccaatcttgagctgatgcacacagtggtgcatgcagcaagagaggtgatgaaggcgtgcagacgcgcttttgccgacatgaggtggaactgttcttccatagagttggccccaaattacctcctcgatctcgagcggggaacacgcgaaagcgcgtttgtatacgccctgtcagccgcagccatcagtcacgccatcgctcgcgcatgtacatctggggatctgcctggttgtagttgcggccctgtacctggtgaaccaccaggaccaggaaaccgttggggcggatgtgctgacaatcttagttatgggcttctcatgggggctaaattctcggacgcccctatgaaggtgaagaagaccggatcgcaggccaacaaactgatgcgattgcacaattcggaagttgggagacaggcattgcgggcttcgctggaaatgaaatgtaaatgtcatggagtttcagggtcctgctccattcgcacttgttggaagggtttgcaggaacttcaagatgtggcagcggatttaaagaccagatatctctcggccaccaaagtggtgcatagaccgatggggaccagaaaacacctcgtgccaaaggatctggatattcggccagttaaggattccgagctggtatatctccagtcctcacccgacttttgcatgaagaacgaaaaggtggggtcccatggaactcaggaccgacagtgcaacaagactagtaatggctcagattcttgtgatctgatgtgttgcggaagaggatacaatccttacactgacagggtggtggaaaggtgccactgcaagtaccactggtgttgttacgttacctgccggaggtgtgaaagaacagttgagagatatgtatgcaagtag

SEQ ID NO: 31516 - DNA, 762 bp, synthetic construct
  misc_feature 1..762: note = Description of Artificial Sequence: Synthetic coding sequence
  source 1..762: mol_type = other DNA
atgcgcgcaaggccgcaagtttgtgaggctctcctgtttgcgctagcactccagacgggagtctgctatggcatcaaatggctcgcgttgtccaagacaccttctgcactggccctaaatcagacccagcattgtaaacagctagaaggtctcgtcagtgcacaggtgcaactttgcagaagcaatcttgagcttatgcacaccgtggttcatgccgcacgggaagtcatgaaagcttgcaggcgcgctttcgcagacatgagatggaactgttctagcatcgaactggctcccaactacttattagacctcgaacggggtactagagagtctgcgtttgtgtatgcactttccgctgctgctatcagtcacgcaatagcacgggcttgcacctcaggggatctccctgggtgttcctgcgggccagtgcccggagaacctcccggacctggtaaccgctggggcggttgcgcagacaatctgtcctatggtctcctgatgggagccaagttcagtgacgcacctatgaaggtgaagaaaaccggctcacaggctaacaagctgatgcggctgcacaattcagaagtgggtcggcaggccctgcgggcttccctgctcgtcaacagccgctgccaggcatgggaggccgcttgtgctctgccttcgctgggaagtcaccaggaacagaaggtttggcctccgtggaaggaaggcagaacgtcaaaagagactgataagataaaaaacaaccttgcggcatag

SEQ ID NO: 31517 - DNA, 18 bp, synthetic construct
  misc_feature 1..18: note = Description of Artificial Sequence: Synthetic coding sequence
  source 1..18: mol_type = other DNA
atgagggccaggccgtag

SEQ ID NO: 31518 - DNA, 1143 bp, synthetic construct
  misc_feature 1..1143: note = Description of Artificial Sequence: Synthetic coding sequence
  source 1..1143: mol_type = other DNA
atgaagaaatcaatcggaatcctgtccccaggcgtcgctctgggaatggcaggttcggctatgagcagcaaatttttcctggtggccctggccatattctttagtttcgcccaagtcgtgattgaggctaattcatggtggtccctggggatgaacaatcctgttcagatgtccgaagtttatattattggtgctcagcccctgtgtagtcagttggcaggcctctcccagggtcagaaaaagctgtgccacctttaccaggatcatatgcagtacattggcgaaggggcaaagaccggaattaaggagtgtcagtatcagtttcgacatagacggtggaattgctccacggtggacaatacctccgtgttcgggcgagtgatgcagattggaagcagggagaccgcgtttacatatgctgtctccgctgccggagttgtcaatgccatgtcccgcgcatgccgcgagggagaactgtctacttgtggctgctcacgggcagctagaccaaaggacttgcctagagattggctctggggcggttgtggcgataatattgattatggatatcgcttcgccaaagagttcgttgatgccagagagcgagaaaggattcacgcgaaaggctcttacgagtctgccagaatcctgatgaacttgcacaacaacgaagccggaaggagaaccgtgtacaatttagctgatgtggcttgcaaatgccacggagtcagcgggtcttgttctctgaaaacttgctggctacaactcgccgatttccggaaggtcggagatgccctgaaagagaagtatgactctgccgctgccatgcggctgaattctaggggcaagcttgtacaggttaactcccgctttaattcccccacgacccaggatctcgtatatatcgatccgtctcccgactattgcgtgaggaatgagtctaccgggtccctggggacccagggcagactgtgcaataagaccagtgagggcatggacggctgcgagctcatgtgctgcggaaggggctatgatcagttcaaaaccgttcagacagagcgctgtcactgcaaattccactggtgctgttatgtgaagtgtaagaaatgcactgagattgtggatcagttcgtctgcaaatag

SEQ ID NO: 31519 - DNA, 390 bp, synthetic construct
  misc_feature 1..390: note = Description of Artificial Sequence: Synthetic coding sequence
  source 1..390: mol_type = other DNA
atgaagaaatccatcgggatcctgtcccctggggtcgcattggggatggctgggagcgccatgagcagcaagttctttctggtggcattagcgatcttcttcagcttcgcccaagtggttatcgaagctaattcatggtggagtctgggaatgaacaacccagtccagatgtcccaggacgtgggtggtcacgggtggctgcgagctcacgttttgaggccctggttacgcccagtacaggatcgggctgacggcgctctcccactgcaggtgccacttgttctgctacgccaggtccaagaagtccacggagatcggggtccggtgtgtgtgcaggtggtaggagctacccagcactccgccccacttcctgggccagcttatctgtag

SEQ ID NO: 31520 - DNA, 1143 bp, synthetic construct
  misc_feature 1..1143: note = Description of Artificial Sequence: Synthetic coding sequence
  source 1..1143: mol_type = other DNA
atgaagaagagcatcggtattttgagtccaggagtggcattgggaatggccggttcggcaatgtcaagcaaattcttcctggtggctcttgcgattttcttcagcttcgcacaggtggtaattgaggcgaattcttggtggtctctgggcatgaataatcctgtccaaatgtctgaggtgtatattatcggagcccagccattatgtagtcaattagcgggtctatcccagggccagaagaaactctgccacctctaccaggatcatatgcagtacattggggaaggggctaaaacgggcatcaaagaatgtcagtaccagtttaggcatcgcagatggaactgtagcacggtggacaacacctctgtgttcggccgagttatgcagattggcagcagagagacagcattcacctacgccgtatccgctgcaggagtcgttaatgccatgagccgcgcatgccgggaaggcgagctctccacttgtggatgcagcagagcggcacgtcctaaggatctacctcgtgattggttgtggggtggatgtggtgacaatattgattacgggtaccgttttgccaaagaattcgtggatgctcgtgagagagagcgcattcacgccaaagggagttatgagagcgctcgtatacttatgaatctccacaataatgaagccggtaggaggaccgtgtataacttagccgatgttgcatgtaaatgtcatggggtcagcggcagctgcagccttaagacatgttggctgcagctggctgattttagaaaagtaggagacgcacttaaagaaaagtacgattctgcagcagctatgcgcctcaactcacggggtaagctggtgcaagttaattctagatttaattcgccaacgactcaggacttggtctacatcgatcctagccctgattactgtgtgcgcaatgaaagcaccggatctcttggaacacagggccgactgtgcaacaaaacgtccgagggaatggacggttgcgaactgatgtgctgcgggagaggctatgatcagttcaaaaccgtgcagactgagagatgccactgtaagttccattggtgttgctacgttaagtgtaaaaagtgtaccgagatcgtggaccagttcgtgtgtaagtag

SEQ ID NO: 31521 - DNA, 645 bp, synthetic construct
  misc_feature 1..645: note = Description of Artificial Sequence: Synthetic coding sequence
  source 1..645: mol_type = other DNA
atggcaggatcagcaatgtccagcaagtttttcctcgtggctttggcaattttcttttcattcgcccaggtggtgattgaggccaactcctggtggtcgcttgggatgaataaccccgtgcagatgtcagaagtgtacattataggggcacagcctctgtgttctcagctggctgggctgtcccagggccagaagaaactgtgtcatctgtatcaggatcacatgcaatacatcggggagggggctaaaaccggtatcaaggaatgccagtaccaatttagacaccgacgctggaactgctctactgtagacaatacgtcggtttttggtcgggtcatgcagatcggttccagagagacagcctttacttacgccgtgagcgccgctggggtagtaaacgccatgtctagagcatgccgagaaggcgaactatcaacatgcggttgctcgcgcgctgcccgacctaaagacctccccagagactggctctggggcggttgtggcgataacatagactacgggtatcgttttgcaaaagaattcgtggacgccagggagcgggagcgtattcatgcgaaggggtcctacgagagcgcacgaatcctgatgaacctgcataacaatgaagctggtcgccgagtctag

SEQ ID NO: 31522 - DNA, 1098 bp, synthetic construct
  misc_feature 1..1098: note = Description of Artificial Sequence: Synthetic coding sequence
  source 1..1098: mol_type = other DNA
atggctgggagcgcgatgtcttccaagttcttcctcgtagccttggcgattttcttttcttttgctcaggtagtgattgaggcgaacagttggtggtcactcggcatgaacaacccagtacagatgagtgaggtgtatattatcggtgctcagcccctctgctcacagctcgccggactgtctcagggccagaagaagctatgtcatctttatcaggaccacatgcagtatatcggggaaggcgctaagactggaatcaaggaatgccagtaccagttcaggcatcgccgatggaattgttccaccgtggataacacctccgtctttgggagagttatgcagattggtagtagagaaaccgcttttacatacgccgtgtctgcggctggggtggtgaatgcaatgagtcgcgcatgccgcgagggagaactgtcaacctgtgggtgctcaagagcggctcgcccaaaagatttacctcgggactggctttggggaggctgtggggataatattgactacgggtatagattcgctaaggaatttgtggatgctcgggaaagagagcgaatccacgccaaaggttcgtacgaaagcgcgcgaattctcatgaatctccacaacaacgaggccggacgcagaacggtatacaaccttgccgatgtggcttgtaaatgccacggagtctctggttcctgttcactaaagacctgctggctgcagctcgccgattttcgcaaggtcggcgatgctttaaaagaaaaatatgactcggctgcagcaatgcggcttaattcgcgtggcaaactcgtccaggttaatagcagattcaactcccccaccacccaggaccttgtgtacatcgacccctcacctgactattgcgtgaggaacgaatccaccggaagcctaggcacccagggtcgcctgtgcaacaagacttcagaagggatggacggatgcgagctgatgtgctgtggcaggggctatgatcagttcaaaacggtgcagacagagagatgtcactgtaagtttcattggtgctgctatgtgaagtgtaaaaaatgtactgagattgtagaccagttcgtctgcaagtag

SEQ ID NO: 31523 - DNA, 876 bp, synthetic construct
  misc_feature 1..876: note = Description of Artificial Sequence: Synthetic coding sequence
  source 1..876: mol_type = other DNA
atgcaatacattggcgaaggagccaaaaccggcatcaaggagtgtcagtatcagttcagacatcgcagatggaattgtagcacagtcgataatacaagtgtcttcggcagggtcatgcagattggctctcgtgagacagctttcacatatgcggtctccgctgcaggggtggtgaatgccatgtcgcgggcatgtcgggagggagagttgtccacctgcggatgctctcgagcagcacgaccaaaagacttgcccagagactggttgtggggtggatgcggggacaacatcgattatggttatagattcgcaaaggagttcgttgacgcaagagaacgcgaacggatccacgcaaaaggctcatatgagagcgctcgaatcctaatgaatctacacaataatgaagctggacggagaaccgtgtataacctggcagatgttgcctgtaaatgccatggggtctcaggatcatgttcgcttaagacatgctggctgcagcttgccgactttcggaaagtaggtgatgcactcaaagagaagtatgatagtgccgcagccatgcgcctgaatagtaggggtaagctcgtgcaagtgaactctagatttaacagcccaactactcaggatttggtgtatattgatccttctcccgactattgtgtgcgtaacgaaagcactggctctcttggtacccagggaagactatgtaataaaacaagcgaaggcatggatggatgtgagcttatgtgctgcgggagaggatacgatcagtttaagactgtgcagactgagaggtgccactgcaagtttcactggtgctgttacgttaagtgcaaaaagtgcacagagattgtggatcagttcgtgtgcaagtag

SEQ ID NO: 31524 - DNA, 1080 bp, synthetic construct
  misc_feature 1..1080: note = Description of Artificial Sequence: Synthetic coding sequence
  source 1..1080: mol_type = other DNA
atgcctagccttttgctactattcaccgcagcccttctctcctcgtgggcacagctactaacagacgccaattcatggtggtcactggccctgaatccagtccaaaggcctgaaatgttcatcatcggcgctcaacctgtgtgctctcagcttcctgggctgagccccggtcagcgcaagctgtgccagttgtaccaggaacacatggcttatatcggcgagggggcaaaaacaggcatcaaagagtgccagcatcagtttcggcagcgtaggtggaattgctctacagctgacaacgcaagcgttttcggacgcgttatgcaaatcggatctcgagaaacagcgttcacacacgccgtgagcgccgcaggagtcgtgaacgcaattagtcgtgcctgccgtgagggggagctctcgacttgcgggtgttcacggactgcgaggcctaaagatctacctcgggattggctgtggggcggttgcggggataatgtggagtacggttacagattcgctaaggaattcgtcgatgcccgagaaagggagaagaactttgctaaggggagtgaagagcagggacgagtgctgatgaacctgcagaataacgaggccggacgaagagctgtgtataaaatggctgatgtggcgtgcaaatgtcatggagtcagtggcagctgttccttgaagacttgctggctacagctggctgaatttagaaaggtgggcgaccgccttaaagagaaatatgacagtgccgcagctatgcgagtgacccgtaagggaaggctggagcttgtaaacagtcgattcactcagcccacccccgaagacctggtctacgtagacccaagccctgattattgtctacgaaacgaatcaacaggatcccttggcacccaaggcagactgtgcaataaaacgtccgaaggcatggatggttgtgagctcatgtgttgcggcagggggtataaccagtttaagtctgtccaggttgaacgctgtcactgcaaatttcactggtgctgctttgtgcgctgtaaaaaatgtacagaaatcgtggaccagtacatatgcaagtag

SEQ ID NO: 31525 - DNA, 1080 bp, synthetic construct
  misc_feature 1..1080: note = Description of Artificial Sequence: Synthetic coding sequence
  source 1..1080: mol_type = other DNA
atgccaagtttgctcctgttgtttacagccgctctgctcagcagttgggcccagttgctgacagatgcaaacagttggtggagccttgcccttaatcccgttcagagacctgaaatgtttatcatcggcgcacagcctgtctgctcccaactcccaggtctttctccgggtcagagaaaactctgtcaattgtaccaggaacacatggcttatattggtgaaggggctaagacaggcattaaagaatgtcaacaccaattcagacaaaggcgctggaactgttcaaccgctgataacgccagcgtgttcggtcgggtgatgcagatcggatcccgcgagaccgctttcactcacgcagtgtctgccgcaggcgtcgtaaacgcaatctcacgcgcatgcagggaaggagaacttagcacctgtggatgctcaaggaccgctcggccaaaagatctgcccagggactggctctggggtggatgcggtgacaacgtggagtacggatatcggtttgcaaaggagtttgttgatgctagagagcgggaaaagaactttgctaaaggctcggaagagcaaggccgtgtgcttatgaatcttcaaaataacgaagcaggaaggagagctgtgtataagatggccgatgtcgcctgcaagtgtcacggcgtgtccggtagctgcagcttgaaaacttgttggctccaactggctgaattccgtaaggtaggtgaccgactcaaggaaaagtacgactccgcagccgcaatgagggtgactagaaaaggtagactggagttggtcaacagcagatttactcagcccacaccagaggatctcgtgtatgtagatccaagccccgattactgcctaaggaatgagagcacagggagcctcgggacccaaggacggctgtgtaacaagacctctgaaggaatggatggatgtgagctcatgtgttgtggcagaggctacaaccagtttaagagtgtacaggtggagcgctgtcactgtaaattccattggtgctgctttgtgcgttgtaagaagtgcaccgagatagtagatcagtacatctgcaagtag

SEQ ID NO: 31526 - DNA, 1080 bp, synthetic construct
  misc_feature 1..1080: note = Description of Artificial Sequence: Synthetic coding sequence
  source 1..1080: mol_type = other DNA
atgccatctcttttgttgctttttaccgccgctttactcagctcgtgggctcaactacttaccgacgcaaattcttggtggtccctcgcacttaaccctgttcagagacccgaaatgttcatcatcggggcacagccagtgtgttcacagctgcctggcctgtctcctggccagcgaaagctgtgccaattgtaccaggaacatatggcctacattggcgaaggggctaaaactggtattaaggaatgccagcatcagtttcgccagagaaggtggaactgttctaccgcagataatgcatccgtctttggaagggtaatgcagatcggctcgagggagactgctttcacccacgccgtctctgcagctggtgtcgtaaatgcaatctcccgggcatgtagagagggagaactttccacctgcggctgttcacggaccgcccgtcccaaggatttgcccagggattggttatggggcggatgcggggacaatgttgagtatgggtatcgtttcgccaaggaattcgtcgatgccagagaaagggagaaaaacttcgccaaagggtcggaggagcagggtagggtattaatgaacctccaaaataacgaggccggtcggagggccgtctacaaaatggcagacgttgcatgcaagtgtcatggcgtaagtgggtcttgctctctgaagacctgttggctgcagctcgccgaatttcggaaagttggcgataggctgaaagaaaaatacgacagcgcagccgctatgagagttacacgcaagggcagactggaactggtcaattcaaggttcacccagccaaccccggaagacttggtttacgtggaccctagccctgattactgcctcaggaatgaaagcacgggcagcctgggaacccagggacgactgtgcaataagacatcagaaggcatggacggctgcgagctgatgtgctgcgggaggggctataaccagtttaagtctgtccaggtggagaggtgtcactgcaagtttcattggtgttgttttgtgcgttgcaagaagtgtacagaaattgtcgaccaatacatatgcaaatag

SEQ ID NO: 31527 - DNA, 1398 bp, synthetic construct
  misc_feature 1..1398: note = Description of Artificial Sequence: Synthetic coding sequence
  source 1..1398: mol_type = other DNA
atgaccggtcgcgcaatggacccgctgccagctgctgcagtgggagctgcagctgaagctgaggccgacgaggaggctgacccacccgctagcgatcttcctactccccaggctatcgagcctcaggctatcgtccaacaggtgcctgcgccaagtcggatgcagatgccccagggcaacccccttctactctcgcacaccctgcaggagctgctggcccgtgacacagtgcaggtggagcttattccggaaaagaaaggactgttcctgaagcacgttgagtatgaggtctctagccaacggtttaagtcctccgtctaccgcaggtataatgatttcgttgtgttccaggagatgctgcttcacaagttcccctaccgcatggtcccagctctccctcctaaacggatgcttggcgctgaccgggagttcatcgaggcgcgtagacgcgctcttaagaggttcgtaaatcttgtggcacgccatccactattctctgaggacgtggtgcttaagctctttctttcattttccggatcagatgtccaaaacaaactaaaggaaagcgcccagtgcgtgggagacgagttcctgaactgtaaactggcaaccagagcgaaagattttctacccgctgacattcaagcccagtttgccatctcgcgggaactgatccgtaacatatacaacagtttccataagcttagggatcgggctgaaagaatcgcctcccgggctatcgacaacgctgccgacctcctgatctttggcaaagagctcagtgcaatcggcagcgataccaccccgcttcccagctgggctgcacttaacagctccacatggggatcattaaagcaggcccttaagggcctgtcagttgagtttgccctcctggctgacaaagctgctcaacagggaaaacaagaggaaaacgacgtggttgaaaagctgaatctgtttctggacttactacagagctacaaggacctctgcgaacgccacgagaagggagtactgcacaagcaccaaagggctctccataaatatagtttgatgaaaaggcagatgatgtctgccactgcgcagaaccgcgaacccgagtccgttgaacaactcgagtccagaatagtcgagcaggaaaatgcaatccagacgatggagctccgcaattactttagcctgtattgtcttcatcaggagacgcagttgatccacgtttatttgcctctcacctcacatatcctccgagcatttgttaactcgcagatccaggggcacaaagaaatgtctaaagtttggaacgatttgaggcctaagctgtcttgtctattcgccggaccccatagcacactgacgcccccttgttcgcctcccgaagatggtctgtgtccacactag

SEQ ID NO: 31528 - DNA, 174 bp, synthetic construct
  misc_feature 1..174: note = Description of Artificial Sequence: Synthetic coding sequence
  source 1..174: mol_type = other DNA
atgagttcggtacagcagcagccaccgccaccccgacgagtgaccaatgtcggatctttactgcttaccccgcaggagaatgagtcgctatttactttcctgggaaagaagtgcgtgacaatgtcatctgctgtggttcagctctatgcggcagaccgtaacctgtcttgttag

SEQ ID NO: 31529 - DNA, 1140 bp, synthetic construct
  misc_feature 1..1140: note = Description of Artificial Sequence: Synthetic coding sequence
  source 1..1140: mol_type = other DNA
atggctcgacgcagcgccttcccagcagccgcactgtggctctggagtatcctgttatgccttttggccttgcgcgcagaggctgggccacctcaggaagagtcgctgtacctgtggatcgacgcccatcaagcgagggtgttgatagggtttgaggaagatattttgatcgtgtcggagggaaagatggctcctttcacccacgacttcaggaaggctcaacagagaatgcccgcaattccagtaaatatccactctatgaacttcacatggcaggctgctggccaggctgagtacttttacgaatttctctcactgaggtccttggacaagggaattatggccgatccgacagtgaatgtgccactgctcggaaccgtgccccacaaagcgtcagtcgtccaggtaggatttccctgcctagggaaacaagacggggtcgccgcttttgaggtggatgtcattgtcatgaatagcgagggtaacacgatactgcagacaccacagaacgcgattttcttcaagacttgtcaacaagccgagtgccccggagggtgcagaaacggtggattttgcaacgaaaggcggatttgcgaatgccccgacgggttccacggccctcactgcgagaaggcactgtgtacaccgagatgcatgaatggaggtctgtgcgtgaccccaggattttgcatatgtccgccagggttctacggcgtgaactgcgataaagccaattgctccactacatgctttaacgggggaacttgtttttaccctggaaaatgcatttgccccccaggcctcgagggtgaacagtgcgagatcagcaagtgcccccagccttgcagaaatggtggaaagtgtataggtaagagtaagtgcaagtgctcaaagggctatcagggcgacttatgttctaagcctgtctgcgaaccaggttgtggcgctcacggcacatgccacgaacccaataaatgtcagtgccaagagggatggcacggccgacattgtaataaaagatatgaagcctctctaatccatgccctgcggcctgccggagcacagctgcggcagcacaccccctccctgaagaaggctgaggaacgccgtgacccacctgagtccaactacatttggtag

SEQ ID NO: 31530 - DNA, 120 bp, synthetic construct
  misc_feature 1..120: note = Description of Artificial Sequence: Synthetic coding sequence
  source 1..120: mol_type = other DNA
aaaaagcgcaaggaaaaaaaacgtgaaaagaggaggggtaaagaaagaaaagagctctttaaactggtgtcacacgtgctagagaaccgaatggggtggcagcaccttaaatggatgtag

SEQ ID NO: 31531 - DNA, 1095 bp, synthetic construct
  misc_feature 1..1095: note = Description of Artificial Sequence: Synthetic coding sequence
  source 1..1095: mol_type = other DNA
atggccagggcatccgaggcggttagtcgaattcttgaagagtggcataaggccaaagtcgaggcaatgacccttgatcttgcactactgcgtagcgttcagcacttcgcagaggccttcaaggcaaaaaacgttcctcttcatgtcctggtgtgcaacgctgccacctttgccctgccctggagtttgacgaaggatggtttggaaacaactttccaggtaaatcacctcggacatttttacctcgtgcagctcctgcggatgttttgtgccgcacaactgctgccagtctcattgtggagtccgcagtccccaattgacctccagattttaactaccccatgggaaaactggacgtccgtcgcctctctacaacagaaaacaaccatcggcaggtgttggctgatcacaggccctagttcagcaacctcctcatcccccacctcctgtaccgtcgcccctacaagaggccacgtcgaacgaagcgcttcgtggaagtacgatgtcctccagcattcgagtcaactggttggcgtgcatactgctgtgtatctcggagaagcctttcatcaagtacatgctacaggctcatgtcaccacagggtgctttgctgttgtcctaggacaggtggtagcgggagagacgttttgcagcaactgcttcccctgcacgccctgacgagatcatccgagcggcgagacggacccgaccccgtcggtagcgaaaggctcatacaggaacggttagccagcccggcaaagtggagcagtgagagaatgggtactcatacgcgccctgtctgcgtgccaagcagaaaatgccaaggtcctctgcccaatgttcccccaacacagatccggaaaagtaagggcaataagagctcacataatcgggtgaagaacctgaaataccagtgggaggctggcaattcctggggcaaggtgagtcttttttggggctgggccaggcatcggtccctttgtttcctggtcgttgcttgcctcaaggttaaaacgtgcctggtgtgtaggttcaggatttccctggagaagcaccagcagttttcttttttttactgctacaggatcgcgtag

SEQ ID NO: 31532 - DNA, 570 bp, synthetic construct
  misc_feature 1..570: note = Description of Artificial Sequence: Synthetic coding sequence
  source 1..570: mol_type = other DNA
atggcagctctgagatacgcgggactcgacgataccgatagtgaggacgaattgccacctgggtgggaagagagaactaccaaagacggctgggtgtactatgctaaccataccgaggagaagacacagtgggagcaccccaaaactggaaaaaggaaaagggtcgcaggcgacttaccctacgggtgggagcaagagactgacgagaacggtcaggtgttcttcgtagaccatattaacaaaaggacaacttacctagatccaaggctagccttcaccgtggacgacaacccaacaaagcctacaactcggcagcggtatgatggaagtactacagccatggaaatactccagggaagagacttcaccggcaaagtagtggttgtcactggggcaaacagcggaatcggcttcgagactgcgaaatccttcgccctccatggcgcacacgtaatactggcatgtcgcaacatggcgagggctagcgaggctgtatcgcggatcttggaagagtggaaaactaagtaccacccaccccctgaaaagtgcaggatcaaaatctttcattag

SEQ ID NO: 31533 - DNA, 936 bp, synthetic construct
  misc_feature 1..936: note = Description of Artificial Sequence: Synthetic coding sequence
  source 1..936: mol_type = other DNA
atggcagctttgcggtatgccggattggatgacaccgacagcgaggacgagctgccccctggttgggaggagcgaacaaccaaggatggttgggtatactacgctaaccacacggaagaaaaaacccagtgggagcaccccaagaccggaaaaaggaagagagtggccggtgatttaccttatggctgggaacaggaaactgatgaaaacggacaagtgttttttgtcgatcatatcaacaaacggacaacctacttagacccgaggctggccttcacagtggatgataaccctactaaacctacaacccgtcagaggtacgacggtagcacaaccgcgatggagattctgcagggacgggattttaccgggaaagtggtagtggtaactggggcaaattctggtatcgcaaccggaagttgccaccatagggttctgtgttgttgtccacggactgggggatctggcagagatgtgctccagcagctgctgcctctccacgctcttacacgctccagcgaacgccgagatggtccagatcccgttggggcacaaagagaggccgacccacgaacagcttggcagcccgtaagactgtcaggagcccagtctggatgggctcatacgcccgctctttgcgtgagcccgcatgcatctgctagggccggacctctgcctaatgttccccctacacagattaggaagagtaagggaaataagagttcccacaaccgagttaaaaacctcaagtatcagtgggaggctgggaacagctggggcaaggtgtccctgttctggggctgggcccgacatcggtcactctgcttcctcgtggtggcgtgccttaaggtcaagacttgtctggtgtgccggtttcgcatttccttggagaagcaccagcaattttcatttttctactgctaccggattgcgtag

SEQ ID NO: 31534 - DNA, 705 bp, synthetic construct
  misc_feature 1..705: note = Description of Artificial Sequence: Synthetic coding sequence
  source 1..705: mol_type = other DNA
atggctgccctaagatacgcaggtctcgatgataccgacagtgaggatgagctgcctccaggctgggaagagcgtactacaaaggacggctgggtgtactatgcgaaccacaccgaggaaaaaactcagtgggagcatccaaagaccgggaagaggaaaagggttgcgggtgatctgccatacggctgggagcaggagacagacgagaacggacaggtattttttgttgaccacattaataaaaggacaacctacctggacccgagactcgctttcaccgtggacgacaaccctacaaagcctacaaccaggcagcgctacgacggcagcacgactgccatggagatcctgcaagggcgtgacttcacagggaaggtcgtggtcgtgaccggagccaacagcggaatcggatttgagaccgcaaaatcttttgctctgcacggcgctcatgtgattctcgcatgtagaaacatggctcgtgcaagcgaagccgttagccggattctcgaggagtggcaacagggggctgctacgactgtatactgtgccgcagtgccagagctcgagggacttggtggaatgtactttaacaactgctgtcgttgtatgcctagccccgaagctcaatccgaggagaccgcaagaacactctgggcgctctccgagcgcctcattcaggaacggcttggtagccagtctggatag

SEQ ID NO: 31535 - DNA, 1245 bp, synthetic construct
  misc_feature 1..1245: note = Description of Artificial Sequence: Synthetic coding sequence
  source 1..1245: mol_type = other DNA
atggcggcactgaggtatgccggactggatgatactgacagcgaggatgagctgcccccaggatgggaagagcggactaccaaagatggctgggtgtattatgccaatcataccgaagaaaagactcaatgggagcaccctaagacgggaaagaggaagagagtcgcaggggacctaccttacggctgggaacaggagactgacgaaaacgggcaggtcttctttgtggaccacattaacaaaagaacgacctacctcgatcctagactcgccttcactgtggatgacaatcctactaaacctaccacccggcaacgatacgatggatccacaaccgccatggagattctacaggggagagattttacgggtaaggttgtcgttgtcaccggggcaaattccggcattggattcgagaccgccaagtcctttgcccttcacggggctcatgttatactcgcttgtcgcaacatggcgagagctagcgaggctgtgtcccgaatactcgaagagtggcataaggccaaagtagaggccatgactttagatcttgctctgcttaggagcgtccagcattttgctgaagccttcaaggcgaagaacgtgccacttcatgtactggtctgcaatgccgctacattcgctctgccttggagccttaccaaggatggtcttgagactactttccaggtgaatcacctgggacacttctatctcgtacagctcctccaggatgttctgtgcagaagcgcacccgctagggtcatcgtggttagttccgagtcacatcgctttactgacatcaacgactccttgggaaaacttgatttcagtcgcctctcacctactaagaatgactattgggccatgctggcatataacagatcaaaactatgcaacatcctgttttcaaacgagttgcatcgtcgactaagccctaggggagttacgtcaaatgcggtgcatccaggaaacatgatgtattcgaacatccatcgatcttggtgggtatacactttgctgttcactttggctagaccttttaccaaaagcatgcagcagggcgctgctacaacggtgtattgcgctgctgtacccgagctcgagggcctgggcggtatgtactttaacaactgctgtcgatgcatgcctagccccgaggctcagagtgaagaaaccgcgagaaccctctgggccctgtccgaaagactgatccaagagcgcctcggtagtcagagcggctag

SEQ ID NO: 31536 - DNA, 642 bp, synthetic construct
  misc_feature 1..642: note = Description of Artificial Sequence: Synthetic coding sequence
  source 1..642: mol_type = other DNA
atggccgcattgagatatgccggtctcgatgatacggactctgaagatgagctccctcccggttgggaggagcggaccacgaaggatggttgggtttattatgccaaccacacagaggagaaaactcagtgggagcatccaaagacaggtaaacgcaaacgggtggccggtgaccttccatatggatgggagcaagagaccgatgaaaacggacaggtttttttcgtggaccacattaataaaagaactacctacctggaccctagattggccttcacagtagatgataaccctaccaaacctactaccagacagagatatgacggatcaacaaccgctatggagatcctccagggacgcgattttacaggcaaagtggttgtcgtcacaggggctaatagtgggatcggaaaggcttcctgccatgtgggaaggatcctgaagcatacaagagtggaagaactgagcctgctgccaacagctataaacagagaattacctccgccatgcactgtgctgctcagtcaaaactggagggtatgggagggttgtacctctaccacggctgctgccgcttgccctcatcagaagcttagggccaaaaggcggccaggcccttgtgggaggtctgccaggggatag

SEQ ID NO: 31537 - DNA, 1245 bp, synthetic construct
  misc_feature 1..1245: note = Description of Artificial Sequence: Synthetic coding sequence
  source 1..1245: mol_type = other DNA
atggcagcgctgcgatacgctgggcttgatgacaccgacagcgaagatgagctgcccccaggctgggaagagaggactactaaagatggctgggtttattatgccaatcacaccgaggaaaaaacccaatgggaacacccaaaaaccggaaaacgtaagcgagtcgctggcgacttaccatacggatgggaacaggaaaccgatgaaaacggccaggtgttctttgtggaccatatcaataagagaaccacctatctcgaccccaggctggcttttactgttgatgataatcccacgaaaccgaccacacgacagagatacgatggctctactacagctatggagatcctccaaggtagggattttacgggtaaagtggtggttgtgacaggtgccaactcaggcatcggattcgagacggccaaatctttcgcactccatggtgcccatgtcatcctagcgtgcagaaacatggctcgtgcctcagaagctgtaagtagaattctggaagagtggcataaggccaaagttgaagccatgacgttggacctcgcacttctccgcagcgtgcagcacttcgctgaagcattcaaggccaagaacgtgcctctgcatgtactagtgtgcaacgcggcaacgttcgctctgccatggtctctcaccaaggatggattggaaaccacttttcaggttaatcatctgggccatttctacctcgtgcagttgctccaggacgtcctgtgcaggtctgcccctgctagggtgatcgtcgtttctagcgagagtcaccggttcactgacataaacgacagcctgggaaagctggatttttcccgactaagccccacaaaaaacgattactgggccatgctggcctacaacaggagtaaactctgcaatattttattcagtaacgagctgcataggcggctttcaccaaggggagtgacttccaacgccgtccatccaggcaacatgatgtactccaatatccacaggtcctggtgggtatatacacttttgtttacactcgctcgaccattcacaaaatcaatgcagcagggtgccgctacaaccgtgtattgtgctgctgtaccagaactggaaggcctgggcggtatgtacttcaacaattgttgtagatgtatgccatctccggaagcccagtcggaggaaactgcccgaacactttgggccctgagtgagagactgattcaggagaggctcggttcacaaagtggttag

SEQ ID NO: 31538 - DNA, 111 bp, synthetic construct
  misc_feature 1..111: note = Description of Artificial Sequence: Synthetic coding sequence
  source 1..111: mol_type = other DNA
atggctgccctgcggtacgccggactggacgacaccgacagtgaggatgaattacctcccggatgggaggagaggactaccaaagatggctgggtctactacgcaaagtag

SEQ ID NO: 31539 - DNA, 1047 bp, synthetic construct
  misc_feature 1..1047: note = Description of Artificial Sequence: Synthetic coding sequence
  source 1..1047: mol_type = other DNA
atggctcactctcagaatagtttagagctgccaatcaatattaatgcaacacagattaccactgcttatgggcatcgggctttacctaagctgaaggaagagctgcagtcagaggatctccaaacccggcagaaggccctcatggcactctgtgacctgatgcacgaccctgaatgtatctataaagcgatgaacatcggctgcatggaaaacttaaaggccttgctcaaggactcaaatagtatggtgagaattaaaaccactgaggttcttcacatcacagcctctcactctgtgggtcgttacgcctttctggagcacgacatcgttcttgctttgtcatttctgttgaatgaccctagccctgtttgccgcggtaatctgtataaagcttatatgcagctggtccaggtgcctaggggtgcacaggagattatctccaagggcctgattagcagccttgtttggaaactgcaagtagaagtagaagaggaggagtttcaggaatttattctggacacccttgtcctctgcttgcaggaggatgcgactgaagcgttaggcagcaacgtagtcctcgtcttaaaacagaaactgcttagcgccaaccagaatatcaggtcaaaggcagcaagggcattgctgaatgtttcaatttctcgggaagggaaaaaacaggtttgccatttcgatgtgataccaatccttgtccatctgttgaaggatccagttgagcacgtcaagagcaacgctgcaggcgctcttatgttcgcaaccgtgatcaccgagggtaagtacgccgctctggaggcgcaggcaatcggtctcttactcgagttactgcattccccaatgacaattgctcgtttaaatgccaccaaggctctgaccatgctggctgaggcaccggaagggaggaaagcactccaaacccacgtgccaacatttcgggcaatggaggtggagacctacgaaaaaccccaagtggccgaggcgcttcagcgcgcagcccgtatcgcaatttctgtgattgaattcaaaccctag

SEQ ID NO: 31540 - DNA, 1131 bp, synthetic construct
  misc_feature 1..1131: note = Description of Artificial Sequence: Synthetic coding sequence
  source 1..1131: mol_type = other DNA
atggtggttgttgccgctgctccgaaccccgctgatgggacgcctaaggtcctcctgctctcaggacaaccagccagcgcagctggggctccggctgggcaggctctgcccctgatggttccagcccagcgcggagcttcccccgaagcggctagtgggggattgcctcaagctcgcaagagacagcgcctaactcacctcagccccgaagagaaggctctgagaaggaaactgaaaaatcgtgtggccgctcagactgccagggatcgaaagaaggctaggatgagcgagctggaacaacaggtggtagatctcgaggaagaaaatcagaagctcctcctggaaaaccagctcttaagggaaaaaacccacgggctggtcgtcgaaaatcaggagctgaggcagcgacttggcatggatgcactagttgccgaagaggaggccgaagccaaggggaatgaggtccgccctgtggctggtagcgcagagtccgccgctggcgctggcccagtcgtaacccctcctgaacacctgcccatggacagcgggggaatagacagtagtgacagcgaaagcgacatcctattggggatccttgataacctcgaccccgtgatgtttttcaaatgcccctctccagaacccgcatctcttgaggagctgcccgaagtgtatcccgaaggccctagtagtctccccgctagcttgtccctctcagtcgggactagcagcgccaagcttgaggccattaatgaactgatccgattcgaccacatctataccaagccattggtgctggaaatcccttccgagactgagtcccaggcgaatgtggttgtcaagattgaggaagctccgttgagtccctcagagaatgatcatcccgagtttatagtgtcagtgaaagaggagccagtcgaagacgatctcgtgccggagcttgggatcagcaatctcctcagctcaagtcattgtccgaagccgagcagctgcttactagatgcctacagcgattgtggctacggtgggagcctgtccccctttagcgatatgtcatctctcctaggcgtgaaccacagctgggaggatacatttgctaatgagctgtttccacagttgatctcggtgtag

SEQ ID NO: 31541 - DNA, 801 bp, synthetic construct
  misc_feature 1..801: note = Description of Artificial Sequence: Synthetic coding sequence
  source 1..801: mol_type = other DNA
atggtcgtggtcgccgctgcacctaatcccgcagatggcacccctaaagtcctgctgctcagcggccagcctgcctctgccgctggggctcccgcaggccaggcgttgccattgatggtgcctgcgcagcgaggagcatctcccgaggctgctagcggtgggctaccgcaggctcgtaagaggcagcgccttacccacctgagtccggaggaaaaggccctcagacgcaaactgaaaaatagggtcgcggctcagacagcccgtgaccggaagaaagctcggatgtcagagctggaacagcaagttgtggatctcgaggaggaggtgaaactcctcaaaaaccagaagctcttactcgaaaaccagctgctccgtgaaaagacacacgggttggttgtggaaaatcaggaattacgtcagaggcttggaatggacgctctggtggctgaggaagaggctgaggccaaggggaatgaagtacgtccagtcgcaggtagtgccgagagtgccgcactgcggttgcgggcaccactgcaacaagtacaggcacagctgagccctttgcagaatattagtccttggattttggctgtgctgaccttgcagatccagtccctgataagctgctgggctttctggactacatggacacaaagctgtagcagcaacgcacttccccagtctttgcccgcttggcgttctagccagaggtctacacaaaaggacccagtaccctatcagcctccgttcttgtgccagtggggaagacatcagccctcttggaagcccctgatgaactag

SEQ ID NO: 31542 - DNA, 636 bp, synthetic construct
  misc_feature 1..636: note = Description of Artificial Sequence: Synthetic coding sequence
  source 1..636: mol_type = other DNA
atgcgtgctccggtgttccaggctctgctgctgtgtgggaggcggttggtggtgcagccacttaactccgacatgcgtaaattgaagaatcgggtggcagcccaaactgcgagagatcggaagaaggccaggatgagtgagctcgagcagcaggtggttgatctcgaagaagaaaatcagaagctcttgctcgagaaccagctgctgcgggagaagacccatggcttggtggtggagaaccaggaactgcgacagagacttggtatggacgccctggtggccgaagaagaagcggaagctaagggaaacgaagtgaggcccgtagcaggtagtgctgagtccgctgctttacgcctgcgggcaccactacagcaggtgcaggctcagctgtcgcccctgcagaacatctccccatggatcctggccgtattgacactgcagatccagagcctcattagctgctgggccttttggactacatggacccagtcctgctctagcaacgccctccctcagagcttgccagcgtggaggagtagccagagaagtacccagaaagacccagtgccataccagcctccatttctgtgccaatggggacggcaccagcctagctggaagccgcttatgaactag

SEQ ID NO: 31543 - DNA, 822 bp, synthetic construct
  misc_feature 1..822: note = Description of Artificial Sequence: Synthetic coding sequence
  source 1..822: mol_type = other DNA
atggctgcagccgacggcgctttgcctgaagccgcagctctggagcagccggctgagcttcctgcctccgtccgggcatcaatcgaacgtaagaggcagcgtgctctcatgttgcgtcaggcacgcttggctgctcggccttatagcgcgaccgctgcggctgctaccggcggaatggccaacgtcaaagccgctccaaaaattatcgatactggtgggggattcattctcgaagaagaggaggaggaggaacaaaagattgggaaggtagtgcaccagcccggtcccgtgatggagtttgattacgtcatctgcgaagagtgtggtaaagaatttatggactcctatctcatgaaccatttcgacttgccaacttgtgacaattgcagggatgcggatgataagcataaactgataaccaagacggaggccaagcaggaatacctcctcaaggattgtgatctcgagaagcgggaaccacctcttaaattcattgtcaagaaaaatccacatcattctcagtggggggatatgaagctgtacctgaagctgcagatcgttaagcgatcgctggaggtttggggaagccaagaggcactcgaggaagcaaaagaggtgcgccaagagaacagagaaaagatgaagcagaaaaagttcgataaaaaagttaaggaactgcgaagagccgtccgtagtagtgtgtggaagcgggagacgatcgtgcaccagcatgaatacggtcctgaagagaacctggaagatgacatgtacagaaaaacatgcactatgtgcggccacgagctgacctatgagaagatgtag

SEQ ID NO: 31544 - DNA, 2823 bp, synthetic construct
  misc_feature 1..2823: note = Description of Artificial Sequence: Synthetic coding sequence
  source 1..2823: mol_type = other DNA
atggctcgaaaacgggcagctggaggcgaacccagaggacgagagctcaggagccagaaatccaaagcgaaaagtaaagcccgaagagaagaagaggaggaggacgcttttgaggatgagaaaccccctaaaaagtccctgctgtctaaagtcagccaaggcaaacggaaacgcggatgctctcatcctggagggagtgccgacgggcctgcaaagaagaaagtggcaaaggtgactgtgaagagcgaaaacctgaaggtcattaaagatgaggccctgtcagatggagatgaccttagggactttccttcggatctcaaaaaggcccaccacctgaaaaggggtgcgaccatgaatgaggattctaacgaggaagaagaagaaagcgagaatgactgggaggaagtggaagagctgagcgaaccagtgctcggggatgtccgagaatcaacagcttttagtaggtctctactcccagtgaagccggtcgagatcgaaattgagacccctgaacaggccaagacccgcgagcgatcggagaagattaagctcgaatttgagacctatctccgaagagctatgaagaggttcaacaaaggagtgcacgaggacacccacaaggtgcacctcttgtgcctcctggcaaacggtttctataggaacaatatttgcagtcagccggacctccatgccattggactgagcatcattcccgcacgctttacaagagttcttccacgagatgtggatacctattatctgtccaaccttgttaaatggtttatcggaacgttcaccgttaatgctgagctgtccgcaagcgagcaggacaatttgcagaccactttggaaagacggttcgccatttactctgcccgtgacgacgaggagcttgtgcatatatttctcttgatcctccgagcgctccaactgctgacgcgcctggtgctgagcctgcagcccatccctctgaagtccgctactgctaaaggcaaaaaaccctctaaagaaaggctcactgccgatccaggcggatctagcgagacctcttcccaggtactggaaaatcatactaaaccaaagacctccaaaggaacaaaacaggaggagacattcgccaaggggacgtgccggccatcagctaaggggaagagaaacaagggtgggcgaaaaaagcgatcgaaaccatcctcctctgaagaggacgagggccctggcgataagcaggagaaggccacgcagcgcagaccccacggcagggagcgtcgggtcgcttcaagagtaagttacaaagaggagtccggatcagatgaggcgggtagcggctccgactttgagttaagctccggcgaggccagcgaccctagtgatgaagactccgaacccggaccaccaaaacaacgcaaggcgccagcccctcagagaaccaaagcaggtagcaaaagcgcttctcgcacccaccgcggtagtcataggaaggatccgtcactgcccgctgctagctcaagcagctcatcctctaaacgagggaagaagatgtgttccgacggcgagaaggccgagaaacgaagcattgctgggattgaccagtggctggaagtcttttgcgaacaggaagaaaaatgggtctgcgtggattgcgtacatggggtcgtggggcagccactgacatgttacaagtacgccactaaaccaatgacatacgtcgtaggtatagattccgacggttgggtgagagacgtgacgcagcgttatgatccagtgtggatgacagtgacaaggaagtgccgggttgacgccgaatggtgggccgaaactctccgtccatatcaaagccccttcatggaccgagagaagaaggaagatctcgaatttcaggccaagcacatggatcagccactgcctaccgcaatcggtctgtacaagaatcaccctctgtacgccctcaaacgtcatctgcttaagtatgaggccatttaccccgagactgccgctatcctcggatactgtcgtggggaagccgtgtattctcgcgactgtgtgcatacactgcactcacgggatacatggctgaagaaggcacgagttgtgcgcctgggtgaggttccatataagatggtaaagggtttctccaacagggccagaaaggctcggcttgccgagccccagcttagagaggagaacgacctgggcctcttcggatattggcaaacagaggaatatcagccaccagtcgccgtggacggtaaagtccccaggaatgagtttggcaacgtgtacttgtttctgccctcaatgatgccaattggttgcgtacagctcaacctccctaatctgcacagagtagcacgtaagctggacatagattgtgttcaggcgataacgggatttgactttcatggaggttactctcatccagtaaccgacggatacatcgtctgcgaagaatttaaagatgttctgctaaccgcgtgggaaaatgaacaggcagtcatcgaacgaaaggagaaagaaaagaaagagaagagggcacttggcaactggaaattgctggccaagggcctccttatccgcgaacgcctgaagcggagatacgggcctaagtcagaagctgctgctccccacacggatgctggcggaggtttgtctagcgatgaagaggaaggcacatctagccaagcggaagccgctcgcatcctggccgcaagctggccccagaaccgagaggatgaggagaaacagaagctgaaagggggtcccaagaagaccaagagagaaaagaaagctgctgcatctcacctctttccatttgaacagctttag

SEQ ID NO: 31545 - DNA, 2712 bp, synthetic construct
  misc_feature 1..2712: note = Description of Artificial Sequence: Synthetic coding sequence
  source 1..2712: mol_type = other DNA
atggctagaaaaagagccgctgggggtgaacccagaggaagagagctgaggtcccaaaagagcaaggcaaagtcgaaagctaggcgggaagaagaagaagaggacgcctttgaagatgaaaaacccccaaagaaatctctgctcagtaaggtgtcacagggaaagaggaaacgcggttgcagtcacccaggaggcagcgccgatgggcctgccaagaaaaaggttgctaaagtgacagtcaaatcagaaaacctaaaagtgattaaggatgaggccttgtctgacggtgatgacctcagggatttcccatccgacttgaagaaagcccatcatttgaagagaggcgctaccatgaatgaggattctaacgaggaagaggaagaatcggaaaacgactgggaggaagccaaaaccagagaaagaagtgaaaagattaagttggaattcgagacgtatctcaggcgggcaatgaaacgatttaacaaaggcgttcacgaagacacgcacaaagttcacctgctgtgtttgttggctaatggattctatcgtaacaacatctgttcacaacctgaccttcacgccatcggtctgtcaatcatcccagctaggtttaccagggtgctaccccgtgacgtagatacctactacctcagtaatctggtaaagtggttcattggcacctttacagtgaatgccgaactgtcagcaagcgaacaggacaacctgcagacaacgttggagagacggtttgcaatctattccgctagggatgatgaggagctggtgcacatctttctcttgatattgcgcgcactgcagctgctgacaaggcttgtactctccttgcagcccattcctctgaagagtgcgaccgccaagggaaaaaagccaagcaaggagcgcttgacagctgatcctggtggctcgtccgagactagttcgcaagtgctcgagaatcacactaagcccaaaacatccaagggtacaaagcaggaggaaactttcgcgaagggcacttgccgaccttccgccaaggggaagagaaataaaggaggcagaaaaaagcggtcaaaaccatcttctagcgaagaggatgaggggccaggcgacaagcaggagaaggccacccaacgtcgaccccacggtcgagagcggagagtggcttctagagtgagttataaggaagaatccggcagcgatgaagctggctctggctctgacttcgagcttagtagcggagaagcttctgacccctcggacgaggattccgaacccggaccccctaaacagcggaaagcaccagcccctcagagaacaaaagcagggagtaagtcagctagtaggactcaccggggatcacacagaaaggacccttctctgcccgcagcttcgtcctcgtcgtctagctccaagcgcggaaaaaagatgtgttctgatggcgaaaaagcagaaaaacgcagtattgccggaattgaccagtggctggaagtgttttgcgagcaagaagagaaatgggtctgtgtggactgcgttcacggcgtcgtcggacagcctctgacatgttacaagtacgccacgaagccgatgacctacgtggtgggtatcgacagtgacggatgggtccgtgatgtcactcaacgatatgaccctgtgtggatgacagtgaccagaaaatgcagagtagatgctgagtggtgggccgaaactctcagaccgtaccagtctcctttcatggaccgcgagaagaaagaggacctcgaattccaggctaagcatatggaccagcctctgcctaccgctatcggcctgtacaaaaatcatcccttgtatgcactgaagcggcatctgctgaagtatgaagctatttatcccgagactgccgcaattttaggatactgtcgaggcgaggctgtttattccagagattgtgtccacaccctgcactctcgggatacatggctgaagaaggccagagtggtgaggctgggagaggtgccatacaaaatggtcaagggattcagcaatagagctcgcaaggctcgcctggcggaaccacagctcagggaagagaacgaccttgggctgttcggctattggcaaaccgaagagtaccagcctccggtggccgtggacgggaaggtgccccgtaacgagtttgggaatgtgtatctgttcctacctagcatgatgcctattggttgcgtgcagctcaacttgccgaacttacatagagtcgcaagaaagctcgacattgactgtgtgcaggcaataaccggtttcgacttccacggcggttacagccatcccgtcaccgacggatatatagtttgcgaagagttcaaggacgtgctcctgactgcgtgggagaatgagcaggccgtaatagaacggaaggaaaaagagaaaaaagaaaaacgcgcactgggaaattggaaactgctagcgaaaggcctgttgattcgcgaacgacttaagaggagatatggtcccaaaagcgaggcagcagcgcctcacaccgacgccggtggcggactatcttcagacgaggaagaggggaccagcagccaggcggaggccgcacgcattctggctgcctcctggcctcagaaccgggaggacgaggaaaagcagaaactcaaaggtgggccaaaaaaaaccaagcgggagaaaaaagctgcagcaagccatctttttcccttcgaacagttgtag

SEQ ID NO: 31546 - DNA, 423 bp, synthetic construct
  misc_feature 1..423: note = Description of Artificial Sequence: Synthetic coding sequence
  source 1..423: mol_type = other DNA
atggcccgtaagagggctgcaggtggagaacccaggggccgagaactccgatcccagaagagcaaagccaagagcaaagcacgaagagaggaagaagaagaggatgctttcgaggacgagaagccaccaaagaaaagcctgttgtcaaaagtctctcaggggaagaggaagcgtggatgcagtcatcccggtggtagcgccgatggccctgcaaagaagaaggtagccaaagtgacagtgaagtcagaaaacctgaaggttatcaaggacgaagccctttcagatggggatgaccttcgagattttcccagcgatctgaagaaagcccaccacctgaaacgcggagcaactatgaatgaggatagcaatgaagaggaggaagagagcgaaaatgactgggaggaagtggaggtgaagagatag

SEQ ID NO: 31547 - DNA, 507 bp, synthetic construct
  misc_feature 1..507: note = Description of Artificial Sequence: Synthetic coding sequence
  source 1..507: mol_type = other DNA
atggccaggaagcgcgctgccggtggcgagcctcgtggacgcgagctgcgctcacagaagtcaaaggccaagtctaaagctagacacgctttcgaagacgaaaaaccccctaagaagtccctgctctccaaggtgtcacaaggtaaaaggaaacgaggctgcagccaccccggtggcagtgccgatggtccagctaagaaaaaagtggcgaaagtgactgtgaagtcagagaacttaaaggtcattaaggacgaggcattgtcggacggtgacgatctgcgggatttcccctcggaccttaaaaaggcacaccacctgaagagaggcgctaccatgaacgaggacagtaatgaggaggaggaggagtccgagaacgactgggaggaggtggaggaattaagtgaacccgtgcttggcgatgtccgggagtctactgctttctcccggtcgttgcttccggtgaagcctgtggaaatcgagatagaaactccagaacaggcgaagtag

SEQ ID NO: 31548 - DNA, 462 bp, synthetic construct
  misc_feature 1..462: note = Description of Artificial Sequence: Synthetic coding sequence
  source 1..462: mol_type = other DNA
tccagtagtaaacggggtaaaaagatgtgttctgacggtgaaaaggcagagaagagatctatcgccggtattgaccaatggctggaggtgttttgcgagcaggaggagaaatgggtgtgcgtggactgtgtccacggtgtggtgggccagcccttgacatgctataaatacgccactaagccaatgacctacgttgtcgggattgactccgacggctgggtgcgagacgtgactcaaagatacgaccccgtgtggatgacggtcacccgaaaatgcagggttgatgctgagtggtgggcggagactctgagaccttaccagtcgccattcatggatcgcgagaagaaggaagacctggaggggttatgtgcccatagcgccttccagggacacgtggccgaagaaagcaaatcgggcgaggcctggagatcaacattgcaggacggagaaaggctattttag

SEQ ID NO: 31549 - DNA, 177 bp, synthetic construct
  misc_feature 1..177: note = Description of Artificial Sequence: Synthetic coding sequence
  source 1..177: mol_type = other DNA
atgtgctcagacggggagaaagctgaaaaaaggagcatcgcaggcatcgatcagtggctggaggttttctgcgagcaggaggagaaatgggtctgcgttgattgccggtgcggtggaccagcctcagacctcctacaggtgcgccatcaggcgcatgatctctgtggtggtcattag

SEQ ID NO: 31550 - DNA, 231 bp, synthetic construct
  misc_feature 1..231: note = Description of Artificial Sequence: Synthetic coding sequence
  source 1..231: mol_type = other DNA
aaagccacgcagagacgacctcatgggcgagaaagaagggtggcttccagagtatcctacaaagaggagagtgggtcagatgaagccggatccggatccgatttcgaactcagttccggcgaagcatccgatcccagcgacgaggatagtgagcctggacctccgaagcagagaaaagccccagccccacaacgtactaaggccggatccaagagtgccagccgcacctag

SEQ ID NO: 31551 - DNA, 849 bp, synthetic construct
  misc_feature 1..849: note = Description of Artificial Sequence: Synthetic coding sequence
  source 1..849: mol_type = other DNA
atggagggggacttttcggtgtgtagaaactgtaaaaggcacgtagtgtcagccaactttacactccacgaggcttactgcctaagattcctggttctgtgtcccgagtgcgaggagcccgtgccaaaagagactatggaggagcattgtaaattggagcatcaacaggccaatgagtgtcaggagagacccgtagaatgtaagttttgtaagctggatatgcaactcagcaagttagaactccatgagtcgtactgcggctctcgtaccgaactgtgccaggggtgcggtcagtttatcatgcatcggatgctggctcagcacagagacgtgtgccgctcggagcaggcacagctcggaaaaggagaacgcattagtgcccctgagagggaaatctactgtcattattgcaatcaaatgattcctgaaaacaagtactttcatcacatgggaaaatgttgtcctgacagcgagttcaaaaaacacttccctgtggggaaccccgagatactgccctcctccctccctagtcaggccgcagaaaatcagaccagcactatggagaaagatgtgaggcctaagaccaggtccattaatagattcccactccattccgagagcagttccaaaaaagccccaaggagtaagaacaagacactggacccccttctgatgagcgaaccgaaacctcgcaccagctcaccaagaggggacaaagcagcttatgacatcctgagaagatgttcgcagtgtggaattttactacccctccccatcctgaaccagcatcaggaaaaatgcagatggctggcttcaagcaaagggaagcaagtcagaaacttctcctag

SEQ ID NO: 31552 - DNA, 906 bp, synthetic construct
  misc_feature 1..906: note = Description of Artificial Sequence: Synthetic coding sequence
  source 1..906: mol_type = other DNA
atggaaggagacttctccgtctgccggaattgtaaaagacacgtggtgtcagccaactttaccctgcacgaagcctattgtctgaggttcctcgttttatgtcctgagtgcgaggaacccgtaccaaaggagactatggaggagcattgtaaactggagcatcagcaagtgggttgtacaatgtgtcagcagagtatgcaaaagtcctccctggaatttcataaggctaatgaatgtcaggagcgtccggttgagtgtaagttctgcaagctcgacatgcaattgtcgaagctggagctgcacgaaagctactgtggaagtcggaccgagctctgccaggggtgcggacagttcatcatgcaccgcatgctggcacagcaccgcgacgtttgtcgctccgagcaggcccagctaggcaaaggagaaagaatatctgcacctgagagagagatatactgccattattgcaaccagatgattccggagaataagtactttcaccatatggggaagtgctgtcccgatagcgagttcaagaagcatttcccagtcggcaatccagaaattctaccctcctcactgccaagccaggccgcagaaaaccagacctctaccatggagaaggacgtccgcccaaagactcggtccatcaaccggttccctttgcatagcgagtctagcagcaaaaaggcccctcggagtaagaataaaactctggatccgctgctgatgagcgagcccaagcccaggacctccagccccagaggggacaaggccgcttatgatatcctgcgccgatgctcacaatgtggcatcctcctcccattacctatactgaatcagcaccaggagaagtgccgttggctggcaagcagcaagggtaagcaggtgagaaacttttcctag

SEQ ID NO: 31553 - DNA, 600 bp, synthetic construct
  misc_feature 1..600: note = Description of Artificial Sequence: Synthetic coding sequence
  source 1..600: mol_type = other DNA
atgagtctacactacggctgttgttgtcccgaatgtacaagcgtcgctattaaagaaatgatgtgggtgatccgaccgagggtggcctgcgtggtgaaggatgctggaagtgccggagaacggatcagcgcccctgaaagagaaatatattgccattactgtaaccagatgatccccgagaataagtacttccaccatatgggtaagtgctgtccggattccgaattcaagaagcactttcctgttggaaatccggagattctgccctcatcgctacctagtcaggctgcagaaaatcagacttctacaatggaaaaggatgtccggcctaagacccggtcgataaatcggttcccactgcattcagaatccagctcgaagaaagctcctagatctaagaacaagacactcgaccccctgctcatgtctgagcctaaacctcggacttcatcacctaggggcgataaagccgcatacgacattctgcgcaggtgttcccagtgtggcatacttctacctctacctatactgaaccagcaccaggagaaatgtaggtggttggcctcctccaaaggtaaacaggtccgcaatttttcgtag

SEQ ID NO: 31554 - DNA, 495 bp, synthetic construct
  misc_feature 1..495: note = Description of Artificial Sequence: Synthetic coding sequence
  source 1..495: mol_type = other DNA
atggaaggcgacttctccgtctgtcggaattgtaagcggcatgtggtgtctgccaatttcacgctgcatgaggcttactgtctgagattcctcgtcctctgtccagaatgtgaagagcctgttcctaaggagacaatggaagagcattgcaagctggagcatcaacaggtgggctgtactatgtgccagcaatctatgcagaaatcaagtctcgaattccataaagccaacgaatgtcaggaaaggccagtcgagtgcaaattttgcaagttggatatgcagctgagcaagctcgagttgcacgaatcatattgtggttcccgtaccgagctctgccaagggtgcgggcagtttataatgcatagaatgctggcacagcatcgggatgtctgtcggtcagaacaggctcaactggggaaggagaccagccccgatcctggaaagtgcctgtccattaccgtagcagccgctttaagcgcacacttgtggccatag

SEQ ID NO: 31555 - DNA, 906 bp, synthetic construct
  misc_feature 1..906: note = Description of Artificial Sequence: Synthetic coding sequence
  source 1..906: mol_type = other DNA
atggaaggagatttttcagtttgccgcaactgcaaacgtcatgtcgtctccgctaacttcaccctgcatgaggcatattgtctcagattcctcgtgctctgtcctgagtgtgaagaacccgttcctaaagagacaatggaggagcattgcaagcttgagcatcaacaggtgtccgagatgggatctggcagggggaaatgctccattttgcctgcccgtaaaaaggcgaatgagtgtcaggaacgccctgtggagtgtaagttttgcaagctggatatgcaactgtcaaaactggaattgcatgaatcatactgtggctcacgaacagaactgtgccagggctgcgggcagtttatcatgcataggatgctagctcaacaccgggacgtgtgtaggtcggaacaagcgcagctcggaaagggcgagcgcatctcagccccagaacgcgagatctactgccactattgtaatcaaatgatccccgagaacaagtatttccaccacatgggcaaatgctgccccgattccgaatttaaaaagcattttcccgtagggaaccccgagatactaccatctagcctgcctagccaagcagccgagaaccagacctctaccatggagaaggatgtgaggcccaagactcgcagcatcaatcgcttcccactgcactcagaaagtagcagcaaaaaagcacccaggagcaagaataagacgctggatcccctgcttatgagcgagcctaagccacgcacatcttcccccagaggcgacaaagctgcctacgacattctgcgaaggtgtagtcaatgcggcatactcctgcctctccctattctgaaccagcaccaggagaaatgtcgatggttggcatccagtaagggcaagcaggtacgcaattttagttag

SEQ ID NO: 31556 - DNA, 1494 bp, synthetic construct
  misc_feature 1..1494: note = Description of Artificial Sequence: Synthetic coding sequence
  source 1..1494: mol_type = other DNA
atgacatttaactcttttgagggctccaagacatgtgtccctgctgatatcaacaaggaggaagagtttgtggaggagttcaatagacttaaaacttttgcgaacttccccagcggcagtcccgtgtctgccagcacgcttgctagagcaggttttctgtataccggggagggtgacacagtgcggtgtttctcatgccatgctgccgtggatcggtggcaatacggagacagcgctgtcggaagacaccgcaaagttagtcctaactgtcgtttcatcaacggattttacttggagaattccgccacccagtcgactaactcagggatccagaacgggcagtacaaggtggaaaactatctcggtagcagagatcatttcgcgctggaccgaccctctgagacacatgccgactatctccttcggacaggacaggtagtcgacatttctgatactatttatcctagaaatccagcaatgtacagcgaagaggcacggttaaagtctttccagaactggcctgattatgcgcatcttacaccacgcgagcttgctagtgcaggactgtactacacaggcataggcgaccaggtacaatgcttctgttgtggcggtaaattgaaaaactgggagccctgtgaccgggcttggtcagaacatcgtaggcattttcccaattgcttctttgtcctggggaggaacctcaatatcagatcagagtccgacgcggtgagctcagaccgaaatttccctaactcgacaaaccttcccaggaatccatcaatggctgactatgaggccagaatctttacttttggaacatggatctatagcgtcaacaaagagcaattggctcgagccggattctacgccctgggggagggggacaaagtcaagtgtttccactgcggcggagggctaaccgattggaaaccaagcgaagatccatgggaacagcacgcgaagtggtatcccggttgtaaatacctgctcgagcaaaaaggtcaggagtacattaacaacattcacctgactcactctctggaagaatgcctggttcggactaccgaaaagactccttccctcacccggaggatagatgatactatcttccagaaccccatggtgcaggaggcaataagaatgggattctcctttaaggacattaaaaagataatggaggagaaaattcagatatcaggcagcaattataagtccctggaggtcctcgtggctgaccttgttaacgcgcagaaggattccatgcaagatgagtcctctcagacatctttgcagaaagaaataagcacagaggagcagctgcgccgactgcaggaggagaagctgtgcaagatttgcatggaccgaaacattgcaatcgtgtttgtgccttgcggccatcttgtgacctgcaagcagtgcgctgaagcggtggacaaatgtcctatgtgctacactgtgatcacatttaaacagaagatcttcatgtcctag

SEQ ID NO: 31557 - DNA, 1494 bp, synthetic construct
  misc_feature 1..1494: note = Description of Artificial Sequence: Synthetic coding sequence
  source 1..1494: mol_type = other DNA
atgacattcaacagcttcgaaggcagcaaaacctgtgtgccagctgacattaacaaggaggaggaattcgtggaggaatttaacagattgaaaacgtttgcaaatttcccaagcggaagtccagtcagtgccagtaccctggcccgtgcgggatttctgtacacaggtgaaggcgatacagtgagatgtttctcctgtcacgccgctgttgatcggtggcagtatggcgattctgccgtgggcagacataggaaggtgtcacccaattgtaggtttatcaacgggttctaccttgaaaatagtgcaacccagtccaccaattcaggaatccagaacggccagtacaaggttgagaattacttggggtcgcgtgatcacttcgcattagaccgaccgtcagaaacccatgccgattacctgttgaggacgggacaagttgtggacatctcagacacaatttatccccgaaaccctgccatgtattcagaggaggcacgactcaaaagttttcaaaactggcctgactacgcgcacttgacaccacgcgagctagcatctgcgggtttgtattacactgggatcggagaccaggtgcagtgtttttgctgcggtggtaagctgaagaactgggaaccttgtgacagagcatggtccgagcacaggcgccacttccctaactgtttcttcgtcctgggaaggaatttgaatattcgcagcgagtcagacgcagtatctagtgaccgtaattttccaaatagcaccaacctgcccagaaatccttccatggcagactacgaggctcgtatcttcaccttcggtacttggatctactctgtgaacaaagaacagttggcgcgtgctggcttctacgcgctgggtgagggagataaagttaaatgcttccactgcggcggtggcctgacggactggaaacctagtgaggacccgtgggagcagcatgccaagtggtaccctggctgtaagtatctgctggaacagaaggggcaggagtacatcaacaatatccacctgacacacagcttagaggagtgtctggtccgcaccaccgagaaaactccctcactgacccggaggattgacgacacaatcttccagaacccaatggtgcaagaggctatacgaatgggcttcagctttaaggatatcaaaaaaataatggaggaaaagatacagatctctggatccaactacaaatcgctagaagtcttggtggccgacctggtgaatgctcagaaagattccatgcaggacgaaagttcacaaacaagtctgcagaaggaaataagcactgaggaacagctgaggcgattacaggaggagaagctttgtaagatttgtatggacaggaacatcgctatcgtatttgtcccttgtggacatctggttacctgtaagcaatgtgccgaagccgtggacaaatgcccgatgtgctatacagtcattacatttaagcagaagatcttcatgtcctag

SEQ ID NO: 31558 - DNA, 51 bp, synthetic construct
  misc_feature 1..51: note = Description of Artificial Sequence: Synthetic coding sequence
  source 1..51: mol_type = other DNA
atgactttcaacagttttgagggatccaaaacttgcgtaccagccgactag

SEQ ID NO: 31559 - DNA, 471 bp, synthetic construct
  misc_feature 1..471: note = Description of Artificial Sequence: Synthetic coding sequence
  source 1..471: mol_type = other DNA
atgacctttaattccttcgagggatctaaaacctgcgttcctgccgatattaataaagaggaggagttcgtggaggaatttaatcgcctcaagaccttcgccaacttcccctctggctccccggtttctgccagtaccctcgcacgcgctggctttttgtatacaggggagggggatacggtaagatgttttagttgccatgcagccgtcgaccgttggcagtatggtgattctgcagttgggcgacacagaaaggttagcccgaactgccgcttcatcaacggattctatctggagaatagcgcaacacaaagcacaaactctggaatccagaatggacagtataaggtggaaaactacctgggcagcagggaccatttcgctctggatcgtcccagcgagacacacgcagactaccttttgcgcacaggccaggtcgtagacatctccgacaccatctacccgaggtag

SEQ ID NO: 31560 - DNA, 1494 bp, synthetic construct
  misc_feature 1..1494: note = Description of Artificial Sequence: Synthetic coding sequence
  source 1..1494: mol_type = other DNA
atgacctttaatagctttgagggaagcaaaacatgcgtcccagcagatatcaataaagaagaggagttcgtggaggagttcaacaggcttaagacatttgcaaactttcctagtggcagcccggtctccgcaagcactctggccagagccggtttcctctataccggcgagggtgacacagtgagatgcttttcctgtcatgccgctgtagatcggtggcagtatggggactcagcggttggtagacatagaaaagtgtcacctaactgtagattcataaatgggttttatctggaaaactccgccacgcaaagtactaatagtgggattcagaatggccagtataaggtagaaaattacttgggatcaagggatcacttcgcgctggataggccttccgagacacatgccgactatcttctgagaacggggcaggtggttgacatttccgacaccatctaccccagaaatcctgccatgtatagcgaggaagcaaggctaaagtcttttcagaattggcccgactatgcccatctgacacctcgagaactggccagcgctgggctgtattacacgggcatcggcgatcaggtgcaatgcttttgttgcggaggaaagcttaaaaactgggaaccctgcgatagagcttggagcgaacaccgtagacacttcccaaactgtttctttgtgcttggacgtaatctgaatatccggtctgagtcagatgccgtgagctccgataggaacttccccaatagtactaatctcccgcgaaacccctcaatggcagattacgaagcaaggatttttacgttcgggacttggatttactctgtgaacaaggaacaactggccagggcaggattttatgccctgggggagggcgacaaagtgaagtgttttcattgcgggggtggcctcaccgattggaaaccctcagaggacccttgggaacagcacgccaagtggtaccccggatgcaaatacctgttagagcagaaagggcaggagtacattaataacatccatctgactcacagtctcgaggagtgtctggtacggacaacagagaaaactccctcgctgactagaagaatcgatgacaccatcttccagaacccaatggtgcaggaggcaattcggatgggtttttctttcaaggacattaaaaaaatcatggaagagaaaatccaaatctccggcagcaactataagtccctggaagtgctcgtagcagacttggtaaatgcccagaaagacagtatgcaagatgagagttcccaaacatccttgcaaaaggagatcagcactgaagaacagctgcgcagactccaagaagaaaaactttgcaagatatgcatggataggaacatcgcaatagtgtttgtgccttgtggccatctcgtaacttgcaagcagtgtgccgaagctgtcgataagtgtcctatgtgttatactgtcattacctttaaacagaaaatttttatgtcttag

SEQ ID NO: 31561 - DNA, 2568 bp, synthetic construct
  misc_feature 1..2568: note = Description of Artificial Sequence: Synthetic coding sequence
  source 1..2568: mol_type = other DNA
atggtggtcatggctcgcttatctcgccctgagaggccagacttggtcttcgaggaagaggacctcccctacgaggaggagataatgaggaaccaattcagtgtgaagtgctggttgcgatacattgaatttaaacagggggcacctaagccacgactgaaccagctgtacgagagggccctgaagctgctgccttgcagctataagctatggtataggtatttgaaagcacgacgggctcaagtgaaacaccgatgtgtcacagaccccgcttacgaagacgtaaacaattgccatgaacgggcatttgtgttcatgcataagatgcccaggctttggctggattactgtcagttcctaatggaccagggtcgggtcacccacacaagaagaacattcgacagggccctcagagcactgcctattactcagcattcacgcatttggcccctgtacttacggtttctgcgttcccaccccctgccggaaaccgccgtgaggggctataggcgcttcttgaaactgagccctgaatcagcagaggagtacatagagtatctgaaatctagcgacagactcgacgaggctgcccagcggttggctacagttgtgaatgacgagcgctttgtgtcaaaggccggaaaatctaactatcagctatggcacgagttatgcgatctgattagccagaacccggacaaggtgcagtcattgaacgtggacgctattatcagaggaggactgaccaggttcaccgatcaattagggaagctgtggtgtagtctcgcagactactacatccgtagcgggcacttcgagaaagccagagatgtgtacgaggaggcgatccggactgttatgacagtacgggactttactcaggtttttgactcttacgcccagttcgaagaatctatgatagccgcaaagatggagactgcttcggagctgggtagagaggaggaggatgacgtggacttagagttaagactggcacggtttgaacagcttatctctagacggcctcttctgctgaacagtgtgctcttgcgccagaacccacatcatgtgcatgagtggcacaagcgtgttgctctgcatcagggcagaccacgtgagattattaatacctacactgaggccgtacagaccgtcgacccctttaaagctaccggcaaaccgcataccttgtgggtggctttcgccaaattttatgaggacaacgggcagttggatgacgccagggtgattctggagaaagccacaaaagttaatttcaaacaggttgatgatcttgcctccgtgtggtgccaatgcggcgaactggagctcagacatgagaattacgacgaagccctgcgcctgttgcggaaggccacggcgctgccagcaagaagggccgagtacttcgatggcagcgaaccggtgcagaaccgcgtctacaaatcactcaaggtatggtccatgctcgctgacttagaagaaagcctgggtacatttcagtctacaaaggcagtttatgatcggattctggatttgcgcatcgcgacaccccagatcgttatcaattacgctatgtttcttgaagagcacaagtatttcgaggaaagctttaaggcttatgaacgcggtatcagtctgtttaagtggcctaatgttagcgacatttggtctacttacctcacgaaatttatagctcgctacggaggtcggaagttggagcgcgcacgggacctgtttgaacaagcccttgatggttgtccccctaagtatgccaaaacactgtacctcctttacgctcagctggaggaggagtggggcctagcccgacacgccatggccgtctacgagcgcgcaacccgtgcagtggagcctgcccaacagtacgacatgtttaacatttatattaagagggctgcggaaatatatggcgtgacccatacacgtgggatctatcagaaagctattgaagttttatccgacgagcacgctagagagatgtgcctaagatttgccgacatggagtgtaaactcggtgagattgatagagctagagccatttatagcttctgtagccagatctgtgatcccaggaccacgggtgccttttggcaaacttggaaggatttcgaggtgcgccatggaaatgaggataccataaaagaaatgcttcgcattcggagatcagttcaagctacatataacactcaggtaaatttcatggcaagccagatgctgaaagtaagcggatcagccacgggcaccgtaagcgaccttgcacctggccagtccggcatggatgacatgaagcttttggaacagagggccgagcagctggctgcggaggccgaacgcgaccagcctctgcgggctcagagcaagattctgtttgtgcgcagcgacgctagtagggaggaactggccgagctggcgcagcaggttaatcctgaggagatccagctgggcgaggacgaagacgaagatgagatggacctggaacctaacgaggtgcgtttagagcaacagagcgttcccgctgcagtcttcggcagcctgaaggaggactag

SEQ ID NO: 31562 - DNA, 2559 bp, synthetic construct
  misc_feature 1..2559: note = Description of Artificial Sequence: Synthetic coding sequence
  source 1..2559: mol_type = other DNA
atggcgaggcttagtagacccgagcgtcctgaccttgtgtttgaggaggaggacctgccctacgaggaggagataatgagaaaccaattcagcgttaagtgttggttgcgctatatagagttcaagcagggagcacctaagccgaggttaaaccagttatatgaacgggcactcaaactgctgccctgctcgtataagctctggtaccggtacctgaaggcaaggagagctcaagtaaagcacaggtgtgtcacggatccggcttacgaggatgtgaataactgtcacgagagggcgtttgtgtttatgcataaaatgcccagactgtggcttgactattgtcaattcctgatggatcagggcagagtcacccacactaggagaacttttgatagggcattgcgggcactgcccataacccagcattcccgtatctggccactatatcttagattcctgcgctctcacccactccccgagacggctgttagagggtatagacgcttcctcaaactgagcccagaatctgccgaagagtatatagaatacctgaaatctagtgaccggttggatgaggcagcacagaggctggccacggttgtcaatgacgaaaggttcgtatccaaggccggaaaaagtaactatcagctgtggcacgagctgtgtgatctaatctctcagaatccagacaaggttcaatctctgaatgtcgatgcgattatcagagggggactcacccgatttaccgaccaattagggaaactgtggtgttccctggcggactattacattcgatctggacatttcgagaaggccagggacgtatatgaagaggcaatcagaacagtcatgacggttcgggatttcacacaggtgttcgactcgtacgctcagtttgaagaatctatgatcgccgctaagatggagaccgcatcggagttgggtcgtgaagaagaggacgatgtcgatctggagctcagactcgctagatttgagcaattgatctcacgcaggcccttgttgttgaattctgtcttgctgcggcaaaatccacatcatgtgcacgaatggcataaaagagttgctttacaccaggggcgtcccagagagattattaatacatacaccgaagctgtgcagactgtggatcctttcaaggcaactgggaagccacatactttgtgggtggccttcgccaaattttacgaagataacgggcagctagatgacgcgagagtgattttagaaaaagctacaaaggttaacttcaagcaggtggatgacttggcatcagtgtggtgccagtgtggagagctcgaactgcgtcacgagaattacgatgaggctctacgcctgcttcggaaggcaacagctctgcccgctagaagggccgaatacttcgacggtagtgagcctgtgcagaaccgggtctacaagtctctgaaggtatggtcgatgctggccgacctggaggaatcactgggcacttttcagagtaccaaagccgtttacgaccgaatcctggacctgagaatagcgaccccccagatagtgattaattatgccatgttcctggaagaacacaaatacttcgaggagtcatttaaggcgtacgagaggggcatttcgctgttcaaatggcccaatgtgtctgacatctggagcacgtatttaaccaagtttatcgctcggtatgggggtcgcaagctcgagcgcgcacgggatctgttcgaacaagcgctggacggttgcccacctaaatacgctaagacactgtatctgttgtatgcccagctggaagaggaatggggcctggcgcgtcacgccatggctgtgtacgagagggcaacgcgggcagttgaaccagcgcaacaatacgatatgttcaacatatacattaaaagagcagccgagatttacggggtcacgcacacaagaggtatctaccagaaagccattgaggtgctgagtgacgaacatgctagggaaatgtgtctgaggtttgctgacatggagtgtaagttaggggaaattgatcgcgcacgggctatttacagcttctgttcacagatctgtgacccccgtaccaccggcgcattctggcaaacctggaaggacttcgaggtccgtcatgggaacgaagacacaatcaaggaaatgctgcgcatccgccgaagtgtacaggcgacttacaatacacaagtaaattttatggcaagtcagatgctgaaggtgtcaggttccgccacaggtactgtgagcgacctagcacctgggcagtccggaatggacgatatgaagcttcttgagcagagagccgagcagctcgccgcagaggccgagagggatcagccactgagagcacagtcaaaaattctgttcgttcgcagcgatgctagccgggaggaactagccgaactggcacagcaagtgaaccccgaagaaatccagctcggcgaagatgaagatgaggacgagatggacctggagcccaatgaggtgaggctggagcaacagtccgttccggcagcagtgtttggcagcctgaaagaggactag

SEQ ID NO: 31563 - DNA, 1902 bp, synthetic construct
  misc_feature 1..1902: note = Description of Artificial Sequence: Synthetic coding sequence
  source 1..1902: mol_type = other DNA
atgccagagattcgcctgcggcatgtggtttcttgctcttcccaggatagcactcattgtgcggagaatttactgaaggctgatacataccggaagtggagagctgcaaaagcaggcgagaagaccatttctgtggtcctacagctggagaaggaagaacagatacacagtgtggatataggaaatgatggatccgccttcgttgaagtgctggttgggagttcagccggtggggctggagagcaggactacgaagtattgctagtaaccagctcttttatgtcaccatcagagagtcggagtggcagcaatccgaaccgggtgcggatgttcggaccggataaactcgttcgagcggctgctgagaagaggtgggaccgcgtgaaaatcgtctgtagtcagccatactcgaaagattcacctttcggcctgtccttcgtgcgctttcacagccctcccgataaagacgaggcagaagccccttcacagaaggtaacagtaaccaagttaggccagtttagggtgaaagaggaggatgaaagtgcaaattctctgaggccgggagcacttttcttcagccgaatcaacaagacgtcccctgtaaccgcttctgacccggcaggaccctcttacgcggcagccactttacaagcatcctcagcagccagtagcgcctctcctgtcagccgcgctatcggaagcacgtccaagccccaagaaagcccaaagggaaagcgaaaattggatttgaatcaagaggagaaaaagactccatcaaaacctcccgctcaactgtccccctccgtccctaagcggcctaagctgcccgctcctaccaggaccccagctacagccccagtgcccgcacgagcgcagggtgccgttaccggaaagcccagaggtgaaggaaccgagcctcggagaccccgagcaggcccagaggaactgggcaaaatcctacagggcgtcgttgtggtgttaagcggcttccaaaaccccttccggagcgagcttcgcgataaggccttggagttaggcgctaagtaccgaccagattggacccgagactcgacccacctaatttgtgcattcgccaacaccccaaagtactcccaggtgctcgggttgggcggacggatagtgcgcaaggaatgggtgctggactgccatcgaatgaggcggcgtctgccctcccaacggtatctgatggctgggcctggctctagctccgaagaggatgaggcctcccattctggaggctctggagacgaggcacccaaacttccccagaaacagccacaaaccaagacgaaaccaactcaggccgctggaccctctagcccacagaagccaccaacccctgaagagaccaaggccgctagcccggtcctgcaggaggatatagatatcgagggggtgcagtcagaggggcaagacaacggggctgaggacagcggggacaccgaggacgaactccgacgggtcgccgagcagaaagaacacaggcttcctccgggtcaggaggagaacggcgaggacccttacgcgggttctaccgacgagaacactgattcggaggagcatcaagagccaccagatctgcccgtccctgagctgcccgacttttttcagggtaaacactttttcctgtatggtgagtttccaggagatgagcgacgcaagctcatacgctacgtgaccgcctttaacggcgagctggaagacaacatgtcagacagggtgcaattcgtgatcactgcccaggagtgggatccatcctttgaagaagcgttaatggacaatccctccttggctttcgtgcgaccacgttggatctatagctgcaacgagaagcaaaagttactcccgcatcagctgtacggggtggtcccacaggcctag

SEQ ID NO: 31564 - DNA, 1944 bp, synthetic construct
  misc_feature 1..1944: note = Description of Artificial Sequence: Synthetic coding sequence
  source 1..1944: mol_type = other DNA
tctacatcatcgttttggccgggagaggcgcatgatgtggacatgcccgagattagacttagacacgtcgtttcatgtagttcgcaggattccacccattgtgcagagaatctactcaaagctgacacatatcgaaaatggcgtgcagccaaagccggagaaaagactattagcgtggtgctgcagctggagaaggaggagcagattcacagcgtggatatcggcaatgatggcagcgcattcgtcgaagttttggtgggcagtagcgccggaggggcaggggagcaggactacgaagtgctgttagtgacgagttcttttatgtcaccctctgaaagtaggagtggaagtaatccaaaccgggtcagaatgtttggccctgataaactagtccgagctgccgctgagaagcgctgggaccgggtcaagatagtgtgcagtcagccttacagtaaagattcccccttcggcctgagttttgtgaggtttcattcaccaccagataaagacgaagccgaagccccttctcagaaggtgaccgtcacgaagttaggccaattccgagtaaaggaagaggatgagtcagctaattcactgagaccaggagcattgtttttctctcggattaataaaacgtcccctgttacggcatcagatccggcagggccttcttacgcagccgcaacgctgcaggcatcttcagctgcttcgtcggcctcacccgttagcagagccattggtagcactagcaagcctcaggaatccccaaagggtaagaggaagctagacctgaatcaggaggagaaaaaaacaccatcaaaaccaccagctcagttaagcccctctgtgcccaaaaggccaaagctcccagctccaacacgcaccccagccacagctcctgtgccagccagggcgcagggagccgtcacaggcaaaccacggggtgaggggacagaaccaagacggccacgagctggacctgaggagctcggtaagattctccagggcgtagtcgtagtcctttctggattccagaacccatttcgttcagagcttcgcgacaaggccctcgaactgggggctaagtaccggcctgattggactcgggacagcactcacctgatttgcgcatttgccaatacacccaagtattcacaagtcctgggcctgggtggccgaatagtgcgtaaggaatgggttctggattgtcaccgtatgaggcgacgcctgcccagccagaggtacctgatggcgggtcctggatcatcctctgaggaggacgaagcctcacatagcgggggttctggcgacgaggcccctaaactaccccagaagcagccccagaccaagacaaagccaacgcaggccgctggaccatcgtcaccccagaaacctcccactcctgaggaaacgaaagctgccagtcccgtcctccaagaggacatcgatatagaaggggtgcagagcgaggggcaggataatggagctgaggattcaggtgatacggaggacgaactccgcagagtggcagaacagaaggagcatcgccttcctcctgggcaggaagagaatggcgaggacccctatgcagggtcaactgatgaaaacaccgacagcgaggaacaccaggaacctcctgacctgccagtgcctgagttacctgatttttttcagggcaaacacttcttcctatatggggagtttccaggggatgaacgcagaaaacttattcgctacgtcactgccttcaacggggaactggaagataacatgtccgatagggttcagttcgtgattacggcccaggagtgggaccctagttttgaggaagcactgatggacaacccaagcttggctttcgtgagacctcggtggatttatagctgtaatgagaagcaaaagttactcccccaccaactgtatggggtggtcccacaagcgtag

SEQ ID NO: 31565 - DNA, 1203 bp, synthetic construct
  misc_feature 1..1203: note = Description of Artificial Sequence: Synthetic coding sequence
  source 1..1203: mol_type = other DNA
atgcctgagatcaggcttcgacatgttgtgtcctgctctagccaggacagtactcattgtgccgagaacctccttaaggccgatacataccgcaaatggagagcagccaaggccggagaaaaaaccatctctgtcgtgctgcagctggagaaggaggaacaaatccacagtgtcgacattggcaatgatggcagtgcgttcgtggaagtgctggtcgggtcttctgcaggcggtgctggcgaacaggattatgaggtgctgttggtcacgtcttccttcatgagtccttcagaatcacgctccggatctaacccgaaccgcgtgcgaatgttcggacccgataaactggtgagggccgcagctgagaaacggtgggaccgggtgaagattgtgtgttcacaaccttactccaaagacagcccctttggtctttctttcgtgcgctttcactctccgccagacaaagacgaagccgaggctccaagtcagaaggtgaccgtcaccaaactcggtcagtttagggtgaaggaggaagatgaaagtgctaactcccttcgaccaggtgcactgtttttttctagaatcaataagacctcacccgtgaccgcctcagatcctgcaggaccaagctatgctgccgctacattacaagcctcaagtgctgcctccagcgccagccccgtgtcacgcgctattggcagtactagcaagcctcaggaaagcccaaagggtaagcgcaagctggatctgaatcaagaagagaaaaagactccatcaaaaccccctgcgcaattgtcccccagcgtacccaagaggccaaaactgccagctcctactcgtacccctgcaacagcccctgtgcctgcacgagcccagggcgctgtcacaggtaaacccagaggcgaaggcaccgagcctcgccgacctagggcaggccctgaggagctaggtaaaatactgcagggggtggtcgtggtgctgtccgggttccagaacccattccgcagcgagctgcgggataaagccctggagctaggcgcaaagtaccggccagattggacccgtgatagtactcacctaatctgcgcgtttgccaacactcccaaacttccccagaaggtgccccctcagcacaccccagatcaaaatcaagcccactctggctcttggacacagctgacacctgaagctcccaatccatag

SEQ ID NO: 31566 - DNA, 1809 bp, synthetic construct
  misc_feature 1..1809: note = Description of Artificial Sequence: Synthetic coding sequence
  source 1..1809: mol_type = other DNA
atgccggagattaggttgagacacgtcgtatcctgcagctcccaagacagtttagagaaagaagagcagatccacagtgtggatattggcaacgacggatctgcattcgtggaagtccttgtgggcagtagtgctgggggagctggcgaacaggactacgaagtgctgcttgtgacatcctcattcatgtccccttcggaatccaggtccggttccaaccccaaccgagtacggatgttcggcccagataaactagttcgcgctgcagcggagaaaagatgggacagggtgaaaatcgtctgctcacagccatacagtaaagattctccttttggcctgagttttgtacggttccattcgccccctgataaggacgaggccgaggctccgagccaaaaggtgacggtgaccaagctgggacaatttagagtgaaagaagaagacgagtccgctaactctctgcgaccaggcgctctcttcttctctagaatcaataaaacctctccagtaactgcctctgatcctgcaggcccttcgtacgcagcagcgacccttcaggcaagctcggccgcatcttcagcttcccccgtcagtagagctatcggcagtacaagtaagcctcaggaaagcccaaaagggaagcgcaaactggacctgaatcaagaggagaaaaaaactccttctaaacctccagcccagctaagtccaagtgtccccaaacggccaaaactgcccgcacccacacgaacccccgctacagctcccgtcccggctcgtgcccagggagcagtaacaggcaagccgcgaggcgaaggcaccgagcccaggcggcctcgggcaggcccagaagagttggggaaaatcttacagggagtggttgtagtgttgagtggcttccagaatcccttccggagtgaactgagggataaagccctcgagttaggggcaaagtataggccagactggacacgtgattctacccaccttatatgtgcttttgccaatacccctaaatacagccaggtgctcggtctgggcggtcgcatagtcaggaaggaatgggttctggactgtcaccggatgaggcgccgtctcccaagccaacgctacctaatggccggaccaggctcttcgagcgaagaagacgaggcttctcactctgggggaagtggtgatgaagctcctaaattgccacagaagcagccccaaaccaagacgaagcctacccaggccgcagggccaagtagcccacagaagccacctaccccggaagaaaccaaggctgcatctccagtgctccaggaggacatcgacatcgaaggcgtccagtcagagggccaggacaacggggctgaggattccggagatactgaggacgaactaaggcgggttgcagagcagaaagaacatcggttgcctcccggtcaagaagaaaacggtgaagatccatatgctggatcaactgacgagaacactgacagcgaggagcaccaggaaccgccagacctccctgtgcctgagctgcctgatttcttccagggcaagcacttcttcctgtatggggaattccccggagacgaacgccgtaaactgatccgctacgtgaccgcgttcaatggagagttggaagacaacatgagtgatcgggtccagttcgtgatcactgcacaggagtgggacccatccttcgaggaagccctgatggataaccccagcctggcttttgtccgcccacgatggatttattcctgcaacgagaaacaaaaactcttgccccaccagctctacggggtggtgccacaggcatag

SEQ ID NO: 31567 - DNA, 843 bp, synthetic construct
  misc_feature 1..843: note = Description of Artificial Sequence: Synthetic coding sequence
  source 1..843: mol_type = other DNA
atgtgttcagccttccacagagctgagagcggcaccgagctgctggctaggctggagggacggagctctcttaaggagattgaacccaatttgttcgccgacgaagactcccccgtgcatggcgacatcttggagtttcatggacctgaggggacgggtaagaccgaaatgctataccacctgacagccagatgcatcctgcccaagagtgaaggcggtttggaagtggaggtgctgttcatcgacacagactaccacttcgatatgctgaggctcgtcacaatactcgagcaccgactgtcccaaagcagcgaagaaattatcaaatactgtctcgggcgattcttcctggtttattgctcatcgtctacacatttactactgaccctctactctttggaatctatgttctgcagtcacccctctctttgcttgctcatactggattccctgagcgccttctactggatagaccgcgtgaacgggggagagtcagtcaacctgcaggagagcaccttgagaaaatgctcacagtgtctcgaaaagctcgtcaacgactatcggcttgtattattcgcgacgactcagacgattatgcagaaggcttcttcatctagtgaggagccctcccatgcctcacggcgtttgtgcgacgtggacatcgattaccgcccttacctgtgtaaagcttggcagcaattggtgaagcatcgtatgttcttttcaaaacaggacgatagtcagtcatctaatcagttttcgctggtgagcagatgccttaaatccaactcacttaagaagcacttcttcattattggtgagtctggtgttgagttctgttag

SEQ ID NO: 31568 - DNA, 1041 bp, synthetic construct
  misc_feature 1..1041: note = Description of Artificial Sequence: Synthetic coding sequence
  source 1..1041: mol_type = other DNA
atggacctagatcttctcgacttgaatccgcgtatcattgcagctatcaagaaggcaaaactcaagagcgtgaaggaggtgttgcatttttccggcccagaccttaaaagactcactaacctgagcagtcccgaagtctggcatcttctcagaacagcctccctgcatttgcggggatcttccatactgactgcattgcaactccaccaacagaaggagagatttcccacacagcatcagaggttgagtctgggatgtcccgtgctggatgcgctgctgagaggcggactgcccttagacggaatcactgagctcgctggacgctctagcgcaggcaagacgcagctggcactccagctctgcctagcagtgcaattccctagacagcacgggggattagaggctggcgctgtttatatttgcaccgaggacgcgtttcctcacaaaaggttgcagcagctcatggctcagcagcctcgtctaaggacagatgtgccaggggaactgctgcagaagctaagattcggctcacaaatttttatcgaacacgtagccgacgtcgatactttgttggagtgcgtgaacaagaaagtgcccgtgttgctgagccggggaatggccagactggtcgtaattgatagtgtcgccgctcctttcaggtgtgagttcgatagtcaggctagcgcacctagagcccgtcacttgcagtctttaggagcgactttgcgggagcttagcagcgcgtttcaatcccccgtgctgtgcatcaaccaggtcacagaagccatggaagagcagggcgcagcccacggccctctgggattttgggacgaaagagtgtcacccgctctgggcattacatgggccaatcagctattggtgcgactgcttgcagacaggcttagagaagaagaggccgctctgggatgtcccgcaaggaccttaagggtgctcagtgcgccacacctcccacccagctcatgttcttacacaatctcagctgagggcgtgcgcggaacacccggaacccagtcacactag

SEQ ID NO: 31569 - DNA, 1041 bp, synthetic construct
  misc_feature 1..1041: note = Description of Artificial Sequence: Synthetic coding sequence
  source 1..1041: mol_type = other DNA
atggatttagacctgctcgacctgaatcccaggataattgctgcgattaagaaagctaaactgaagtcagtgaaggaggtgttgcacttctctggccctgacctgaaacgactcacaaatctgtctagtcccgaagtttggcacctgctgagaactgcgtccctccacctgcggggttcatcaatactcactgccctccaactccatcagcagaaggagcggtttccaactcagcatcagaggttgtcgctggggtgtcccgtgctggatgcattattacgcggagggctacctctggatggtattaccgaattagcaggtaggagttctgcaggaaaaacacagcttgcactgcagctgtgccttgcagtccaatttcctcgacagcacggaggcttagaagcaggggcagtttacatatgcactgaggatgcctttccccacaaacgcctccaacaactgatggcacaacagcccagactgaggaccgacgtcccaggcgaactgctacagaaactgcgcttcgggagccagatctttattgagcacgtagccgacgtggataccctcctcgaatgtgtgaataagaaagtacccgttctgctcagccgcggtatggcccgattggtcgttattgattcggtggctgccccatttcggtgcgagttcgatagccaggcaagtgccccaagagctcgacacctgcaatctctaggtgccactctaagggagctctctagtgccttccagtcacctgttctgtgtatcaaccaggtcacagaggcaatggaagaacagggggcagcccacggtcctctgggtttctgggacgaacgtgtctcgcccgcacttggtattacatgggcgaaccaattgctggtgagactgttggctgaccgtctgcgggaagaggaagctgcactggggtgcccagccagaactctccgcgtgctgtccgcgcctcacctgccacccagctcctgttcttatactatcagcgcggagggggtgcgaggaacaccgggaactcagagtcattag

SEQ ID NO: 31570 - DNA, 1041 bp, synthetic construct
  misc_feature 1..1041: note = Description of Artificial Sequence: Synthetic coding sequence
  source 1..1041: mol_type = other DNA
atggatctcgacttgctcgacttaaatccacggattatcgctgctatcaagaaagcaaagctgaagagcgtcaaagaggtgctgcattttagtggtccagatctgaaaagactgacaaatcttagttccccagaagtttggcacctgcttaggaccgccagcctacaccttagggggtcaagcatattgactgcactgcagttgcatcagcagaaagagaggttccccacacaacatcagaggttgagccttggatgtccagtcctggacgcgctcctgcgcggtggactgcccctcgacggcataacggaactggccggtaggtccagcgctgggaaaacccagctggcactacagctgtgcctggccgtccagtttcccaggcaacatggcggtctagaagcaggagcagtgtacatttgtactgaggacgcctttcctcataaacgtcttcagcaactcatggcacagcaacccagattacgcactgacgtccccggtgaacttcttcagaagctgcgctttggctcccagatatttatcgaacacgtggccgatgtggataccctgttagaatgtgtcaacaaaaaggtgcctgtgctactctcacgcggtatggcccgactagtagtgatagacagcgtggccgctcccttcagatgcgaattcgatagccaagcttcggcccctcgcgctaggcacctccagagtctgggggcaacgcttagagagctgagtagcgcgttccagagtcctgttttgtgcatcaaccaggttaccgaagcaatggaggaacagggggctgcccacggcccactgggcttctgggatgagagagtaagtcctgctctcgggattacctgggcgaaccaactgcttgtgcgtcttctggcagatagactgcgcgaagaagaggcagccttgggctgccctgcaagaaccttgagagtgttgtctgctcctcaccttcccccaagttcctgtagctacactatcagtgcagagggagttaggggaacccctggaacccaatcccactag

SEQ ID NO: 31571 - DNA, 144 bp, synthetic construct
  misc_feature 1..144: note = Description of Artificial Sequence: Synthetic coding sequence
  source 1..144: mol_type = other DNA
atggatctggatctgctggatctgaaccctagaataatcgcggctattaagaaagcaaagttgaaatctgtaaaggaggttctccacttctctggacccgacttgaaaaggctgacaaatctctcatcccccgaagtttggtag

SEQ ID NO: 31572 - DNA, 138 bp, synthetic construct
  misc_feature 1..138: note = Description of Artificial Sequence: Synthetic coding sequence
  source 1..138: mol_type = other DNA
atggatctggatttgttggacctgaatcccaggatcattgctgcaatcaagaaggctaaactgaagagcgtcaaggaggtgctgcattttagcggacccgacttaaaacgtttaaccaatctctcatctcccgagtag

SEQ ID NO: 31573 - DNA, 1041 bp, synthetic construct
  misc_feature 1..1041: note = Description of Artificial Sequence: Synthetic coding sequence
  source 1..1041: mol_type = other DNA
atggacctggatctgctggatttaaatccaaggattatcgccgcaattaagaaagccaagttaaaaagcgttaaagaagtgctccacttcagcggacccgacttaaagaggttaacaaacttgtccagccctgaggtctggcacctcctgcgaaccgcaagcctgcacctgcgcggatcttcaatcttgactgccctgcagctccaccagcagaaagagcgcttccccacccagcaccaacggctgtccctgggatgccccgtgctggatgcacttctccggggaggcttgccgcttgatggaatcaccgaactggctgggaggtcaagcgctgggaagactcaactggctctgcagctctgcctggccgtccagtttcccaggcaacacggcggactggaggcaggggctgtctacatctgtacagaagatgcttttccgcacaaacgcctccagcagctgatggcacagcagccacgtctcaggaccgacgttccaggggaactgctacagaaattaagattcggctctcagatttttatcgagcatgttgctgatgtggatacgctcctcgaatgtgtgaacaaaaaagtgcctgtgctgctttcccgcggtatggctcgccttgtggtcatcgacagtgtcgccgctcctttcaggtgcgaatttgacagtcaagcctctgcacctcgggctcggcacctgcagtctctaggtgccaccctgcgagagctttctagcgctttccagtccccggttctctgtattaatcaggtgaccgaagctatggaagaacagggggcagcgcatggcccactcggcttctgggacgagcgtgtgtcccccgctttagggataacatgggccaaccaactacttgttagactcctggccgacaggctgagggaagaagaagccgctctgggctgtcctgctcgcaccctgcgcgtgctcagtgcacctcatctgcctccgtcctcatgttcgtacacaatctccgctgaaggggtgcgaggaacaccaggaacgcagtcacattag

SEQ ID NO: 31574 - DNA, 1041 bp, synthetic construct
  misc_feature 1..1041: note = Description of Artificial Sequence: Synthetic coding sequence
  source 1..1041: mol_type = other DNA
atggacttggaccttttagatcttaatcccagaattatcgccgctattaaaaaggcaaagctgaagagtgttaaggaggtgcttcacttttcaggaccagatttaaaacgcctgactaacttatcatctccagaagtttggcacctgctgcggaccgccagtctccacttgcggggaagcagcattttaaccgcactccagctgcaccaacagaaagagcgctttccgactcagcaccaacgcctgagtctggggtgccctgtcctggatgccttgttaagagggggactacctctggacggcattactgagctggccggacgttcctcagccggaaagacacagctggctctgcaactgtgtctggccgtgcagttcccacgacagcatggaggcctggaagctggggctgtatacatttgtactgaggacgcattcccccacaagcgattgcaacaactgatggcccaacaaccaagattgcggacggacgtcccaggggaactgctgcagaagttgaggttcggctcacaaatatttatagaacacgtggctgacgtcgatacactacttgagtgcgtcaataagaaggtcccagtgcttctcagtagaggcatggctcgactggtggttatcgactctgtggctgccccttttcgttgtgagttcgactcccaggcaagtgccccacgcgctagacacctacagtcactgggagcaaccctgcgggagcttagctccgcctttcagtctcctgtcctttgcattaatcaggtgacagaagcaatggaagaacagggcgcagcgcacggcccactcggcttctgggacgaaagggtgagtcctgccctggggatcacatgggccaatcagctgctggtacgtctgctcgccgaccgcctgcgggaggaggaagccgctctgggttgccctgccaggacactccgtgtgctgagcgcccctcacttgccgcctagctcttgttcatacactataagcgctgagggggttagaggaacgcccggaactcaatctcattag

SEQ ID NO: 31575 - DNA, 309 bp, synthetic construct
  misc_feature 1..309: note = Description of Artificial Sequence: Synthetic coding sequence
  source 1..309: mol_type = other DNA
atggatctggatctcctggacctgaatccgagaatcatagcagctataaagaaagccaaactgaagtctgtgaaagaagtgttacacttctcggggcctgacctgaagcgactgacgaatctgtctagccccgaggtgtggcatcttctccggaccgccagcctgcacttaaggggctctagcatacttactgccctccaactccaccaacagaaggagagatttcccactcagcaccagcgcctgtctcttggctgcccagtgttagacgctctgttgcggggaggactgcccctcgacggcatctag

SEQ ID NO: 31576 - DNA, 186 bp, synthetic construct
  misc_feature 1..186: note = Description of Artificial Sequence: Synthetic coding sequence
  source 1..186: mol_type = other DNA
atggaccttgacttgctcgatctgaaccccagaataattgccgcaatcaaaaaggcaaagctcaagtccgttaaggaggtactgcatttttcgggccctgacctgaagcgtctgaccaacctgagtagcccagaagtctggcacctgctccgaacggcgagcctccaccttcgcggttcttcgtag

SEQ ID NO: 31577 - DNA, 339 bp, synthetic construct
  misc_feature 1..339: note = Description of Artificial Sequence: Synthetic coding sequence
  source 1..339: mol_type = other DNA
atggacctggatcttcttgatctgaacccacggatcatcgcagcgataaagaaggctaagctgaagtctgtcaaagaagtacttcacttctccggccctgatctgaaaagactgacaaatctgtcttcacctgaagtgtggcacctgctgagaacggcgtcgttacacctcagagggtcatcaattctcaccgcgttgcagttacatcagcagaaagaacgattccccactcagcaccagagattgtcccttggctgccccgtcttagacgcccttttgagggggggactaccccttgatgggattaccgagctggccggacggagttccgcgggatag

SEQ ID NO: 31578 - DNA, 1005 bp, synthetic construct
  misc_feature 1..1005: note = Description of Artificial Sequence: Synthetic coding sequence
  source 1..1005: mol_type = other DNA
atggagcgcaagatctcccggattcatcttgtgtctgaaccctctataacccacttcctgcaggtgtcctgggagaaaacgctggagagtggattcgtgatcacactgaccgatgggcactctgcctggaccggaacagtctctgaatccgaaattagtcaggaggcggatgacatggctatggagaagggcaaatatgtgggggagctgagaaaagcccttctctctggcgctggacctgccgacgtgtacactttcaactttagtaaggagtcttgctactttttctttgagaagaatctgaaagatgtgtcattccgtttggggagcttcaaccttgagaaggtggaaaatcctgctgaggtgattcgagagcttatctgttattgcctggacaccattgccgaaaatcaagccaagaacgaacacctgcaaaaggaaaacgaacgcctgctaagagactggaatgacgtgcaagggaggttcgaaaaatgcgtcagcgcgaaggaggcgctagaaaccgacctgtacaagaggtttatcctggtattgaacgagaagaaaaccaaaattcggtctctgcacaacaaactgctaaacgccgctcaagaacgggagaaggatatcaaacaggaaggggagacagccatttgctcggagatgacagcagatagagatccagtctatgatgagagtactgatgaggaaagcgagaatcagacagatttgagcgggctggcttctgctgctgtaagcaaggacgactctatcatctcatctctggacgtgaccgacattgcgcctagtaggaagcgtcgacagcggatgcagcggaacctgggcaccgaacccaagatggcaccccaggaaaatcaactacaggagaaggagaaacccgacagctcactgccggagacatctaagaaggagcacataagtgccgagaatatgagtctcgagaccttgagaaatagtagtccggaagacctgtttgatgagatttag

SEQ ID NO: 31579 - DNA, 1011 bp, synthetic construct
  misc_feature 1..1011: note = Description of Artificial Sequence: Synthetic coding sequence
  source 1..1011: mol_type = other DNA
atggagcgaaagatcagtcgcattcacctggtgtcagagccgagcattacccactttctacaggtctcctgggagaagactctggagtccgggtttgtgatcactctcaccgacggccattccgcttggacggggaccgtctcagaaagcgagatctcacaggaggctgatgatatggccatggaaaagggaaagtacgttggcgaactgcggaaggccttgttgtccggagccggacctgcagacgtatataccttcaacttctcgaaagagtcatgctactttttcttcgaaaagaacctcaaagacgtgtcatttaggctggggtctttcaaccttgagaaggttgaaaaccctgctgaggtgatcagggagttgatctgctactgtctcgataccattgccgaaaaccaggcgaagaacgaacacctacagaaagagaacgagcgattgcttcgcgattggaatgacgtgcaaggccgatttgagaaatgcgtgtctgccaaagaagccttagaaaccgacctctacaaaagatttatcttggttttaaatgagaagaaaactaagattcgtagcctccataataagctgttaaacgcggctcaggaacgtgaaaaggatattaagcaggaaggcgaaacagctatctgcagcgagatgactgctgatcgagaccccgtttacgacgagtcaaccgacgaagaatctgagaatcagaccgatctgagcggtttggcttccgcggcagtatctaaagacgattctatcatcagtagcctggacgtaaccgatatagcgccatcaagaaaacgacgtcagcgaatgcaacggaacttgggaacagaaccgaaaatggcgccacaggaaaatcagctccaggaaaaagagaattctaggcctgattcatcactgccagagacctcaaaaaaagagcacatcagtgcggaaaatatgtccctggagaccctgcggaactcttcgcccgaagacctattcgacgagatatag

SEQ ID NO: 31580 - DNA, 1005 bp, synthetic construct
  misc_feature 1..1005: note = Description of Artificial Sequence: Synthetic coding sequence
  source 1..1005: mol_type = other DNA
atggagagaaagatttcacgcatccacctggtctccgagcctagcattacgcatttcctgcaggtctcatgggagaaaacactggaatcagggttcgttatcaccttgactgatggacattccgcgtggaccggaaccgtctctgagagtgagatatcccaggaggccgacgatatggcaatggagaaaggcaagtacgtgggtgaactaagaaaggcacttctgagcggagcaggccctgcagatgtctacaccttcaatttctcgaaggaaagctgttacttcttcttcgagaaaaatctcaaggatgtgtcttttcgcctcgggagctttaatcttgaaaaagtagaaaatccggcagaggtcattagagagctgatctgctactgtcttgatactatcgcagagaatcaagctaaaaacgaacacttgcaaaaggagaacgagaggctgctgcgcgactggaacgacgtgcagggcagatttgagaagtgcgtgtctgccaaggaagccctcgaaactgacttgtataagaggtttatcctggtgctcaatgagaaaaagactaaaattcgatcccttcataataaactgctgaatgctgcccaggagcgagaaaaggacattaagcaggaaggagaaaccgccatatgtagcgagatgacagctgaccgagatccagtatatgacgaatcaaccgatgaggagtcggagaaccagaccgatctgagcggattggcctccgctgctgttagcaaagatgactcaatcatcagctcactcgatgtcacagatattgcaccaagtcgtaagcggcgtcagcgaatgcagcgcaatttgggaacagagcctaagatggccccacaggaaaatcaactgcaagaaaaagagaagccagattctagtctccccgagactagtaagaaagagcacatttcagctgagaatatgtctttagagactttgcgcaattcatcacccgaggacctcttcgacgaaatatag

SEQ ID NO: 31581 - DNA, 1011 bp, synthetic construct
  misc_feature 1..1011: note = Description of Artificial Sequence: Synthetic coding sequence
  source 1..1011: mol_type = other DNA
atggaacgaaagatttcaagaattcatctcgttagcgaaccgagcatcacccattttcttcaagtgtcgtgggaaaagacactggagtccggcttcgttatcacactgacagatggtcatagcgcctggactggcactgtgagtgaatccgagattagtcaggaggctgacgatatggccatggaaaagggaaaatacgtgggcgagttgcggaaagcgctgttgtctggtgccggaccggctgacgtctacaccttcaattttagtaaggagtcttgctacttttttttcgaaaagaaccttaaagacgtgtccttcaggttggggagcttcaatctagagaaagtggaaaacccggctgaggtgatccgggagcttatttgctattgtttagataccattgctgaaaatcaggccaagaatgaacacttgcagaaggagaacgaaagacttctgagagattggaatgacgtgcagggcagattcgagaaatgcgtgtctgcaaaagaagcccttgaaactgatctttacaaacggttcatcctggtattaaacgaaaagaaaactaaaatccggagtctgcacaataagctgttgaacgcggcacaggagcgagagaaggacattaaacaagagggagagaccgccatctgctccgagatgaccgccgatcgggacccagtctacgatgagtctacggatgaggagagcgagaaccaaactgacctctctggattagcttccgcagccgtctctaaagatgatagtattatctcgtcactcgatgtgaccgatatcgccccatccagaaagagacggcagcgtatgcagcggaatttggggacagagcccaagatggcccctcaggaaaatcaacttcaggaaaaggagaactctcgaccggactctagccttcccgaaacctccaaaaaagaacacatttcagcggaaaacatgtctctggaaaccctaagaaactctagccccgaggacttgttcgatgagatttag

SEQ ID NO: 31582 - DNA, 186 bp, synthetic construct
  misc_feature 1..186: note = Description of Artificial Sequence: Synthetic coding sequence
  source 1..186: mol_type = other DNA
atgcagagaaacctggggactgagcccaaaatggcccctcaggaaaatcagttgcaggaaaaagaaaactcaagaccggatagctcactacccgagacctctaaaaaggagcatatcagcgccgaaaacatgtctctggagacattaagaaattccagccccgaggatctgtttgtctctatttag

SEQ ID NO: 31583 - DNA, 2199 bp, synthetic construct
  misc_feature 1..2199: note = Description of Artificial Sequence: Synthetic coding sequence
  source 1..2199: mol_type = other DNA
atggtgagaagtgggaacaaggcagcagttgtgctgtgcatggatgttgggtttactatgtcaaactccatacccggtatcgaatcacctttcgaacaggccaaaaaagtgattaccatgtttgtgcagcgccaggtgtttgccgagaataaggacgagatagctctggtgttgtttggaacagacggcaccgacaaccctctctccggaggggaccaatatcaaaacatcaccgtgcacaggcaccttatgcttccggacttcgacctgctcgaggacattgaaagtaaaattcagcctgggagtcagcaagcagactttttagacgccctcatcgtgtctatggacgtgattcagcatgaaaccatcggaaaaaaatttgagaagcggcatattgaaatattcacagatctgtcatcgcgatttagtaagagccagctggatatcatcatccactcgctaaaaaaatgtgacatctccctgcagtttttcttgccgttttccctgggaaaggaagacgggtcaggagaccgcggtgatggaccgtttagattaggtggacatggaccgtcatttcccttgaagggaatcacagagcagcaaaaggagggtctggagatcgtgaaaatggtcatgatctccctggagggcgaggacggccttgatgagatatattcatttagtgaaagcctgcggaaactctgcgtttttaagaaaatcgagcgtcactcgattcactggccgtgtagattgaccatagggagcaatctgagtataaggattgcggcatacaagagcattctgcaggagagagtgaagaagacgtggacagtggtggatgccaagacactgaaaaaagaggacatacagaaggagactgtctactgtcttaacgatgacgacgagactgaagttctcaaggaggacattattcagggatttcggtatgggagtgacattgtccccttttcaaaggtggatgaagagcagatgaagtataagagtgagggaaagtgtttctccgtgctgggtttctgcaaatcctcacaggtgcagagacgattttttatgggtaatcaagtcctgaaggtgttcgccgcacgtgatgatgaagccgcagcggtggcactgagttcactaattcatgccctggatgacttggatatggtagcaatcgtgcgttatgcctatgacaagagagccaacccacaggtcggcgtcgcatttcctcacattaagcataactacgagtgtttagtctacgtgcagttgccattcatggaggatttgaggcaatacatgttttcctcactaaaaaacagcaagaaatacgcacccaccgaggcgcagctgaacgcagtggacgccctcatcgattcaatgagcttggccaaaaaggatgagaaaaccgacaccctcgaagatttgtttccaacgaccaagatccctaacccacgctttcagaggctcttccagtgcctcctgcatcgagcgctgcaccccagggagccactgcccccaatccaacagcacatctggaacatgcttaatcctcccgctgaggtgaccacgaagagccaaatcccactttcgaaaatcaagactctgtttccgctgatcgaagcaaagaagaaggatcaggttacagcgcaagagatctttcaggacaaccacgaagacgggcctaccgccaagaaactcaaaacagagcaaggaggagcccacttttcagtgtccagccttgccgagggtagcgtgacaagcgttggcagcgtgaatccagccgagaacttcagggttctagtgaagcaaaagaaggcaagttttgaggaagcaagcaatcagcttatcaaccatattgaacagttcctcgataccaacgagactccctatttcatgaaaagcatcgattgtattcgggcatttagggaagaagcaatcaagttttccgaggagcaaaggttcaataacttcttgaaggcactgcaagagaaggtggaaattaagcaattgaatcatttctgggaaatcgtggttcaagacgggatcaccctcatcacaaaagaggaggcaagcgggtctagtgtgacggcggaggaagccaaaaagttccttgctcctaaggataagccaagcggtgacacagctgcggttttcgaagagggtggagacgttgacgaccttctggacatgatatag

SEQ ID NO: 31584 - DNA, 2199 bp, synthetic construct
  misc_feature 1..2199: note = Description of Artificial Sequence: Synthetic coding sequence
  source 1..2199: mol_type = other DNA
atggtgaggagcggaaataaagcggcagttgtactatgcatggatgtcgggttcaccatgtcgaatagcattcctggaatcgaatcaccatttgaacaagctaaaaaagtcatcaccatgttcgtgcaaaggcaggtatttgccgagaataaggacgaaatcgcgcttgtactgttcggcactgatggaacagacaaccctctgtccggcggtgaccaatatcagaacattactgtgcaccggcatcttatgctgcccgactttgatctccttgaagacatagagagtaaaatccagcctggctctcagcaggctgatttcctggatgctctcatcgtatccatggatgtgattcagcatgagactataggaaagaaatttgagaagcgccacattgaaattttcacggatctgagcagccggttctctaagtcccaattagatattatcatacattccctcaagaagtgcgacatttccctccagttctttctgcctttctctctcgggaaggaagacggctcaggagacagaggcgacgggccttttcgtcttgggggacatggacccagcttcccactaaaaggcataactgagcagcaaaaagagggactggagatagttaagatggttatgatttccctcgaaggcgaggacgggctagacgaaatttactcattctccgagtccttgagaaaattatgcgtcttcaaaaagattgaaaggcacagtatccactggccctgtagattgacaataggaagcaaccttagcatccggattgccgcttataaatccatcttgcaggagcgagtaaagaaaacatggaccgtggttgacgctaagacattgaagaaggaagatatccagaaagaaacggtgtactgtttgaacgatgacgatgaaaccgaagtgctgaaagaggacattattcagggatttcgatatggctctgatatcgttccgttcagcaaggtcgacgaagaacagatgaaatataaaagcgagggcaagtgtttctcggtgttggggttttgcaagtcgtcccaggtgcagcgacgttttttcatgggtaatcaggtgctaaaggtcttcgccgctcgggacgacgaagccgcagctgtcgccctctcatctcttattcatgcattggacgatcttgacatggtggccattgttcggtacgcctacgataagagagccaatccacaagtcggtgtggctttccctcatatcaagcataattatgagtgccttgtatacgtacagcttccttttatggaggatcttaggcaatatatgttctcttccttgaaaaatagcaagaagtacgctcccacggaggcacaactcaacgctgtcgatgccttgatagattcaatgtcactggctaaaaaggatgagaaaacggacacactcgaggatttattccctaccaccaaaataccaaatccacggttccaacgcctattccagtgcctgctgcatcgggcattacacccgagggagccactccccccaatacagcagcatatctggaacatgctcaaccccccagcggaggtcaccaccaagtcccagatacctctcagtaagataaagacactgttcccactgatcgaggcaaaaaaaaaagatcaggtcaccgcccaggagatcttccaggacaaccacgaggacggtccaacagcaaagaaattgaaaactgagcaggggggagctcacttttccgtctccagcttagctgaagggtccgttacctctgtggggagtgtcaacccggcagagaattttagagtgctggtgaaacagaagaaggccagcttcgaggaagccagcaatcagttgatcaaccatattgagcagtttctcgacacaaatgagacaccgtattttatgaagtctatcgattgcattagggccttcagggaggaagccatcaaatttagtgaagaacagaggtttaataactttctgaaggccctgcaggaaaaggtggaaatcaagcagctgaatcatttctgggagattgtggtgcaggacggtataacgcttattactaaggaggaagcctccggatcaagtgtgactgctgaggaagccaaaaagttcctcgcacccaaggacaagcctagcggtgacacagcggctgtcttcgaggaggggggtgacgttgacgacctgttggatatgatctag

SEQ ID NO: 31585 - DNA, 1830 bp, synthetic construct
  misc_feature 1..1830: note = Description of Artificial Sequence: Synthetic coding sequence
  source 1..1830: mol_type = other DNA
atgtctggctgggagagctactacaaaacagagggtgatgaagaggcagaggaggagcaagaggaaaatttggaagcctctggggactataagtacagtggaagggacagccttattttcttagtggacgcatctaaggcaatgtttgagagccagtccgaagatgaattgacaccctttgacatgagcatccagtgtattcagagcgtatacattagcaagatcatctcatcagatcgtgaccttctcgctgtagtattctatggcacggagaaagataagaactcagttaattttaagaatatttatgtcctccaggagctggacaaccccggagccaagaggattctggaactcgatcagttcaaggggcagcagggacagaagcgctttcaagatatgatgggccacggatctgattatagtttatcggaggtgttgtgggtgtgcgccaacttgtttagcgacgtgcagttcaagatgtctcataaacgcattatgctgtttactaatgaggacaacccacatgggaatgattcagcaaaagcttcccgggcacgtactaaagctggcgatctcagagatacaggaatcttcctggacctgatgcacctgaaaaaacctggtggttttgacatctcactcttttacagggatataatttctattgctgaagacgaagatcttcgcgtgcacttcgaggagtcctccaaactggaggatctgctgagaaaggtgcgcgctaaggagacacgaaagcgggcattgagcaggctgaagctgaaactcaacaaggatatcgtgatttccgttggaatatataatctggtccagaaagccctaaagccgccacccatcaagctgtatcgggagaccaacgaacccgtgaagaccaagacacggacgttcaacactagtaccggaggactgctgttaccaagtgataccaagagaagtcagatctatggcagccgccagatcatcctggagaaagaagagactgaagagttgaagcgctttgacgatcccggattgatgctgatgggctttaagccgttggtgctcctgaaaaagcaccactacctgaggccgtcgctgtttgtgtatcctgaagagtcccttgtgataggctccagcactttgttttcagcactgctgatcaagtgtctcgagaaagaggtggctgcactgtgccggtacacgccgaggcgcaacatcccgccttacttcgtagctttagttccacaggaggaagaactcgatgatcaaaaaattcaggtgaccccacccggttttcaactggtcttcttgccgtttgcagacgacaagcggaaaatgccttttacagaaaagattatggctaccccagagcaggtgggcaaaatgaaagctatagtggaaaaactccgattcacctaccgcagcgatagctttgaaaacccagtgctccagcagcacttccgcaatctcgaagcattggcgctggatctgatggagccggaacaagccgttgacttgactcttccaaaagtggaagccatgaataagagattagggagtctagtggatgagttcaaagaacttgtctaccccccagattataatcctgaaggaaaggtgactaagagaaagcatgataatgaggggtcggggagcaaacggcctaaagtagagtactcggaggaggaactcaagacacatatttctaaagggacacttgggaaattcacagtgccaatgctcaaggaggcttgtcgcgcatatggacttaaaagcgggttgaagaaacaggagctcttagaggccctgactaaacatttccaggattag

SEQ ID NO: 31586 - DNA, 1830 bp, synthetic construct
  misc_feature 1..1830: note = Description of Artificial Sequence: Synthetic coding sequence
  source 1..1830: mol_type = other DNA
atgtctggctgggagtcctactacaagacagaaggtgacgaggaggccgaagaagagcaggaagagaatttagaggcctcaggcgactacaagtattctgggagagactctctgatttttctagtggacgcatcaaaggcgatgtttgagtcccaaagtgaggacgagctcacaccgtttgacatgagtatccagtgcattcagtccgtctacatttctaagattatctcttctgatcgagacctgctggcagtggtcttttacgggaccgagaaagacaagaactctgtgaactttaagaatatctacgtcctgcaggaactggacaatcctggcgctaagcgtattttggagcttgaccaatttaagggccagcagggtcagaaacgtttccaggacatgatggggcatgggagcgactactcgttaagtgaggtcttatgggtgtgcgccaatctgttcagtgacgttcagttcaagatgtcgcacaagagaattatgttatttactaacgaagataacccgcatgggaatgattccgccaaggccagcagggctcggacaaaagctggcgatctgagagatacaggcatatttctcgatctgatgcatcttaaaaagccaggcggatttgacatcagtttgttctatagagatataatatccatcgcagaggacgaggatctaagggtccactttgaggagtcctcaaaactggaggatctgttacgcaaggtgcgggctaaagaaaccagaaagagggccttgtcaaggctgaagctcaaacttaataaggatattgttatctctgttggtatttacaacttagtccaaaaggccctgaagccccctcctattaagctttaccgggagactaatgagcctgtgaagaccaagacgcgaacattcaacacatctacaggaggacttctgttgccgagcgacactaaacggtcccaaatctacggctcccgtcaaatcatcctggagaaggaggaaacagaagagcttaagagattcgacgacccgggactcatgctcatgggcttcaagccactggtgcttctaaaaaagcaccactatctgcggccaagtctgttcgtgtatcctgaagagagtctggtgatagggtcctctacattgttctctgccctactgataaaatgcctagagaaggaggttgccgctctgtgcaggtatacacctcggaggaacattccaccatacttcgtcgccctggttccacaagaggaggaactggacgaccagaagatccaggtgaccccccctggttttcaattggtcttcttgcccttcgccgacgacaaacgcaagatgcccttcaccgagaagatcatggccaccccagaacaggtggggaagatgaaggctatcgtggagaaactgcgttttacttaccggtccgattcctttgaaaatccagttctgcagcaacacttccggaacctagaggcgctggccctggacttaatggagcctgagcaggccgtggacctaaccctgcccaaggtggaggctatgaacaaacggcttgggtctctggtggacgagtttaaggaactggtgtaccccccagattataatcccgagggtaaggtgactaaacggaaacacgataacgaaggttccggctccaaaaggcctaaagttgagtacagcgaggaggaattgaagacccacatctccaagggaaccctgggcaaattcacagtacccatgctcaaggaagcctgccgcgcatatggactcaagagcggcctgaagaaacaagaactgttggaggcacttacgaagcatttccaggattag

SEQ ID NO: 31587 - DNA, 1674 bp, synthetic construct
  misc_feature 1..1674: note = Description of Artificial Sequence: Synthetic coding sequence
  source 1..1674: mol_type = other DNA
atgtccggctgggagagctactataagactgaaggcgacgaagaggcagaggaggagcaggaggaaaatctagaggcaagtggcgactataagtactccggtagagatagcctgattttcctggtcgatgcctcgaaagcgatgtttgagtctcaatccgaggacgagcttaccccatttgatatgtcgatccagtgtattcagagcgtttacatctcaaaaatcatttcaagcgatagagaccttctagcagtagtgttctacggaactgaaaaggataaaaatagtgtgaacttcaaaaatatttatgtcctgcaggaactggacaatccgggagcaaagagaatcttagaactggatcagttcaaggggcagcagggccagaaacgcttccaagacatgatggggcacggcagcgactattcactgtctgaagtattatgggtgtgcgccaacctgttttctgatgtgcagttcaaaatgagccacaaacgcataatgctctttactaacgaagataacccccacggaaacgattctgccaaggcttccagagctcggaccaaggcgggagatttgagagatacggggatctttcttgacctgatgcatttgaagaagccaggcggattcgatatttccctcttctacagagatatcatctctatcgcagaggacgaggacctcagagtgcactttgaagaaagtagtaaattggaagacctgctccgtaaggtgcgggctaaggagactcgcaagagggccctatctagattgaagttgaagttgaataaagacattgtgattagcgtcggtatttacaacttagtacaaaaagccctcaaacctcccccaattaagttataccgagagaccaatgaacccgtgaaaaccaaaacgagaacattcaacacctctaccggcggactgttgctacccagtgataccaaaagatcacagatctatggctctaggcagatcatcctggagaaagaggaaacagaagagctgaagaggttcgatgaccccggtctcatgctaatggggtttaagccgctggtgttgctgaagaagcaccattatctccgaccctctctgttcgtctaccccgaggagtcactggtaatcggaagctccaccttgttctcggcgctgttgatcaaatgcctggaaaaggaagtggccgcactgtgcagatatacacccagaaggaacatacccccttacttcgtcgcacttgtaccccaggaggaagagctcgacgaccagaagatccaggttactccccctgggttccagcttgtgtttctcccgtttgcggatgacaaacggaaaatgccctttactgaaaagattatggccactcctgagcaggtggggaagatgaaggctatcgttgagaagctgcgctttacttatcgaagcgattcctttgaaaaccctgtgctgcagcaacattttcgtaatctggaggcactcgctctggatctgatggaacctgagcaggccgtggacctgacattgccaaaagtggaagcaatgaacaagcgtctcggatccctggtagatgaatttaaagagttagtgtacccaccggactataatccagagggtaaggtaaccaaacgcaaacacgctaagggcccaaggtggtctatacagaagcggagttag

SEQ ID NO: 31588 - DNA, 1707 bp, synthetic construct
  misc_feature 1..1707: note = Description of Artificial Sequence: Synthetic coding sequence
  source 1..1707: mol_type = other DNA
atgagtggctgggagagttactacaaaaccgagggggatgaggaggctgaggaagagcaagaagagaacctggaagctagtggggactacaagtacagcggccgagacagcctgattttcttggtggacgcctcaaaggccatgttcgagtcccagtctgaagacgagttgacgccatttgacatgagcatccaagagctggataaccccggtgctaagagaattttagagctcgaccagttcaagggccagcagggacaaaaaagatttcaggatatgatgggacacggctccgattattcccttagcgaggtgctgtgggtgtgtgctaatctttttagcgatgtgcagtttaaaatgagccacaaacgcatcatgctcttcactaatgaggataatcctcatggcaatgatagtgcaaaggcctcacgagccaggacgaaagccggagatctccgcgacacaggcatctttctggatttgatgcacttgaaaaaaccaggcggatttgacattagcctcttttaccgggatattatcagcattgcggaggatgaggacttaagggtacactttgaagagtcgtctaaactagaagaccttttacgcaaagtgcgcgctaaagagaccagaaagagggccctgagccggctgaagctcaagctcaacaaggacattgtcatttccgtgggcatatacaatttagtgcagaaggcgctcaaacccccaccaatcaagttatatcgggagactaatgaacctgtaaaaaccaagactaggacatttaacaccagtacagggggtctcctgctgccaagtgacaccaagaggagccagatatatgggagtaggcagatcattctggagaaagaggaaacggaggaattgaagcgctttgatgatccaggcctcatgctgatgggcttcaagccgctggtattactcaagaagcaccactaccttcgcccaagtttattcgtctaccccgaggagagtttggtcatcggatcctcaactcttttctcggccttactgatcaaatgcctcgagaaggaggtggctgcattgtgtcgctacacccccagacgcaacataccaccatatttcgtggcgctcgtccctcaggaggaagagctggacgaccagaagatacaagtcacaccaccaggatttcagctggtcttcctgccttttgccgatgacaaacgtaaaatgcccttcactgaaaagattatggctaccccggagcaggtgggcaaaatgaaggcaatcgtggagaaactgcgctttacatacagaagcgactcttttgaaaatcctgtgctacagcaacacttcagaaacctagaggcactggctcttgatctgatggaacccgagcaggccgtagatctgactttgcccaaggtggaagctatgaataagcggctcggttctctggttgacgagtttaaagaactggtgtatccccctgattataacccagagggcaaagtcacgaagcgtaagcatgacaacgaagggtctggctctaaacggcctaaagttgagtactccgaagaggaattaaaaacccatatatccaaggggactctgggaaaatttactgtcccaatgttgaaagaggcctgccgcgcatacggattgaagtctggcctgaaaaagcaggaactgttagaagctctgaccaagcactttcaggattag

SEQ ID NO: 31589 - DNA, 1680 bp, synthetic construct
  misc_feature 1..1680: note = Description of Artificial Sequence: Synthetic coding sequence
  source 1..1680: mol_type = other DNA
atgaaaaaacaaaggaagaacaaaaagagaactcttaagcaggtgtgtatccagtcagtttacatcagtaaaatcatcagctccgaccgtgacttgctggccgttgtattttatggaaccgagaaagacaagaactctgtgaattttaagaacatctatgtgctgcaggagctggataaccctggagccaaacgcattctcgaactggatcagttcaagggccagcagggccagaagaggttccaggatatgatgggccatggttcggactattcattgagtgaggtcctctgggtttgtgcgaatctcttctccgacgttcaattcaagatgagccataagcgaattatgctcttcaccaacgaggataacccccacggcaatgatagtgcaaaagcgtcccgcgctcgaaccaaggctggagatttaagggatactgggatcttcttggacttgatgcacttaaagaaaccagggggattcgatataagtctgttctaccgggatattatcagcatcgcggaggacgaagatttgcgcgtacactttgaagaatctagcaaactcgaggacctccttagaaaggtcagggccaaggaaaccaggaaaagggcgctaagtagattgaagctgaaactgaacaaagatatagtcatcagcgtcggaatctataacctggtgcaaaaagcccttaaaccccctccaatcaaactttatagagaaacgaacgagcctgttaagaccaaaaccaggactttcaacaccagtaccggtggcctgctgctgccgtccgacaccaagagatcacagatctacggctccagacagataatcctagaaaaagaggagacggaggagctcaagagattcgatgatcccggacttatgcttatgggctttaagcctctggtcctcctaaagaaacaccactacctgaggccatctcttttcgtgtatccagaggagagcttggtcattggttcatccacactgttctccgccctcctaattaagtgccttgagaaggaggtcgctgcgctatgccgctacacacctcgcagaaatattcctccctactttgtggcactggtaccccaggaggaagagttggatgatcagaaaatccaggtgacgccccctgggttccagctggtgttcctaccctttgcagatgacaagagaaagatgccttttacagagaagattatggccaccccagagcaggttggcaaaatgaaagcaattgtggagaagttaaggttcacatacagatctgactctttcgaaaaccccgttctgcagcagcacttcagaaacttagaggccctggctttagatctgatggagccagaacaggccgttgatctgactctgcccaaagttgaggcaatgaacaagcgactgggatcccttgtcgatgagtttaaagaactggtgtatcctccagattacaatcctgagggaaaggtgaccaagcggaagcacgataacgaaggctctgggtccaaacgcccaaaggtcgaatactcagaagaggaactgaagacgcacatttctaaaggaaccttagggaagttcaccgtacccatgctgaaggaggcttgcagagcctatggcctgaagagcggccttaagaagcaggaactgctcgaggctctgaccaagcactttcaagactag

SEQ ID NO: 31590 - DNA, 1830 bp, synthetic construct
  misc_feature 1..1830: note = Description of Artificial Sequence: Synthetic coding sequence
  source 1..1830: mol_type = other DNA
atgtctgggtgggaatcttactacaagactgagggagatgaggaggctgaggaagagcaagaggaaaatctggaggcctctggcgattacaaatatagtggtagagacagtttaatttttttggtcgatgcttctaaggctatgttcgagtctcagagtgaggatgaactgactccatttgacatgagcattcaatgcatccaatcagtttacatttctaagatcattagtagcgatcgggatcttttggcggttgtcttttacggaacggagaaggacaaaaattcggtgaatttcaagaacatctacgtgttgcaggagctcgataatccgggagccaagcggatactcgaactcgatcagtttaaggggcagcagggccagaagcgattccaggacatgatgggtcacggctcagattacagtctaagcgaagtcctgtgggtttgtgcgaatctgttcagcgacgtgcagttcaagatgtcacacaaacgcatcatgctgttcacaaatgaggacaatccccatggcaatgattccgcgaaggcatcacgcgcaaggacaaaagccggtgatctgcgcgacactggcatcttcctcgaccttatgcatctcaaaaaacctggaggcttcgacatctcactgttctaccgggatattatcagcatcgctgaggacgaggacctgcgcgttcatttcgaagaatcgtcaaagctggaggacttgctgcggaaagtcagagcaaaggagacaagaaaacgggcactgagccgattgaaactgaaactgaacaaggacatagttatctcagttggaatttacaatctggtccagaaagcccttaagcctcccccaatcaaactgtatcgtgaaaccaatgaaccagtcaagaccaagactaggacctttaatacatctaccgggggtttgctcctgccgtccgatacgaagcggagccaaatatacggctcccgtcagataatcttagagaaagaagagacagaggagttaaagcggtttgacgatcccggtctgatgctcatggggttcaagccgttggttctgctgaagaaacatcattatctcagaccgtccttgttcgtctaccctgaagagtcgttggttataggttcttcgactcttttttccgccctgctgattaaatgcctggagaaagaggtggccgctctttgccgttacacacccagaagaaacatccccccatacttcgtggctctggtgccccaggaagaggaactcgatgatcaaaaaatccaggtgacccccccagggtttcagttggtcttcttacctttcgctgatgataagcgcaagatgccttttactgaaaaaattatggctacccctgaacaggttggaaaaatgaaggctatcgttgagaaactgagattcacttatcggtctgattcgttcgagaatcccgttttgcagcagcactttcggaatctagaggcactggctttagatctgatggagcccgagcaagctgtagacctcactctgcctaaggtagaggctatgaataaacggcttggatccctagtggatgaattcaaagaattagtttatccccctgattacaatcctgaaggcaaagtaaccaagaggaagcacgacaacgagggaagtgggtcaaagagacccaaagtagagtactcggaggaggagctgaaaactcacattagtaaggggactctgggcaaatttaccgtgccaatgctgaaggaggcctgcagagcgtacgggctgaagtcaggattaaagaagcaggagcttctcgaggcactgacaaagcacttccaggactag

SEQ ID NO: 31591 - DNA, 1431 bp, synthetic construct
  misc_feature 1..1431: note = Description of Artificial Sequence: Synthetic coding sequence
  source 1..1431: mol_type = other DNA
atgatgggccatggttccgattattctctgtcggaagtgctgtgggtctgcgcaaacctcttcagcgatgtgcaattcaagatgtcacacaaaagaatcatgctttttacaaatgaagataacccccacggcaacgattccgctaaggcttcacgcgcacggaccaaggccggtgaccttcgagacaccggaatcttcctggacctgatgcacctgaaaaaacccggaggtttcgatatttccctgttctaccgcgacattatttcaatagccgaagacgaggatttgcgtgtccatttcgaagagagttccaagctagaggacctgctacgcaaggtgcgtgctaaggagacccggaaacgggctctgtcccgcctaaagctgaagctgaataaggatattgtgatctctgtcggtatatataacctggtgcaaaaggccctgaaacctcccccaatcaagttatatcgtgaaaccaacgaacccgtcaagactaagacacgcaccttcaatacctccacaggaggattgttgttgcccagtgacactaaaaggagccagatttacggaagcaggcagatcattctggagaaagaggaaacggaagaactgaaaaggttcgacgaccccggattaatgcttatggggttcaagcctctagtcctgctcaaaaagcatcactatctgaggccctcacttttcgtctaccctgaggaatccctcgttatcggctcgtcgacccttttctccgccctgctgataaagtgtctggagaaagaggttgccgctttgtgccggtacacgccacgacgtaacatcccaccctattttgtagccctagttcctcaggaagaagagctcgacgatcagaaaatccaagtaacgccacctggcttccaactagtgtttctgccatttgctgatgataaacggaagatgcctttcactgaaaaaataatggctactcctgaacaggtgggaaaaatgaaagcaatcgtggagaaactgcgatttacgtacagatctgattcattcgagaaccccgtgctgcaacagcatttccgcaatctggaggctctggcgctagacttaatggagcccgagcaagccgtggacttaactctgcccaaagtagaggccatgaataagcggctcggctcccttgtggacgagtttaaagaacttgtgtacccacccgattacaacccggagggcaaggttaccaagagaaagcatgataacgaaggcagcggtagcaaaagaccgaaggtggagtactccgaagaggaactaaaaacccacatttctaaaggcaccctgggcaaattcaccgtgcccatgctgaaagaggcatgccgcgcttatggtttgaaatcaggactgaaaaaacaggaactactcgaagccctcactaagcatttccaggactag

SEQ ID NO: 31592 - DNA, 741 bp, synthetic construct
  misc_feature 1..741: note = Description of Artificial Sequence: Synthetic coding sequence
  source 1..741: mol_type = other DNA
atggccggagctcctgacgaaagacgcaggggtcccgctgcaggggagcagctgcagcagcagcacgtgagctgccaggtgttccctgagcggcttgcccaaggcaatcctcagcagggttttttttcgtcattcttcacatcaaatcaaaagtgccagttgagactgcttaagacactagaaacgaacccctacgttaaattgctgctagatgcaatgaaacactctggttgtgcggtcaataaggaccgccatttcagttgcgaggattgcaatgggaacgtgtctggcggatttgacgcctcgacgagccagattgtgttgtgtcagaataacattcataatcaagctcatatgaatcgtgtggtgacacatgaactcatccatgcctttgaccactgccgcgcacacgtggactggtttacaaacattagacacctcgcctgctcagaagttcgagcagccaacctgagtggtgattgtagcttggtgaacgagatttttaggttacactttggacttaagcaacaccatcagacatgtgtgagagatcgtgccaccttaagtatcctggcagtgcgtaatatctctaaagaggtcgcaaaaaaagccgttgacgaggtcttcgaaagctgttttaacgatcatgaaccgtttggcaggatccctcataataaaacatacgccagatacgcacatcgggatttcgagaatcgcgatagatactattccaatatctag

SEQ ID NO: 31593 - DNA, 1515 bp, synthetic construct
  misc_feature 1..1515: note = Description of Artificial Sequence: Synthetic coding sequence
  source 1..1515: mol_type = other DNA
atggatccaggccaacagcccccacctcaaccagccccacaggggcagggccagccaccttctcaacctccccaagggcaaggcccaccaagcgggccaggacagcctgcccctgccgctacccaggcagcacctcaggcacctcctgcaggacaccagatcgttcatgttaggggcgattccgagaccgaccttgaggctctctttaatgccgtgatgaatccaaagaccgctaacgtcccgcaaacggtgcccatgaggctccgcaagctcccggatagcttttttaagccacccgaacctaaatcccactcccgccaagccagcaccgatgcaggtaccgccggagccctgaccccacagcatgtccgcgcacacagttcaccagcctcacttcagctcggcgcagtctcgccgggtaccctaaccccaacgggagttgtctcaggacctgccgcaactcctactgctcagcacctgcggcagtctagcttcgagattcccgacgacgtgccgttacctgccggttgggagatggcaaaaacttctagcggtcagagatatttcctgaaccacattgatcagacaaccacctggcaggacccccgaaaggccatgctgagccaaatgaacgtcacggcccctacatccccccctgtgcagcagaatatgatgaacagcgcatcaggaccattgcctgatgggtgggagcaggccatgacccaggacggggaaatatactacatcaaccacaaaaacaagacaactagctggctggacccccgtttagatcctcggttcgctatgaatcaacggatcagccagtccgctcccgtcaagcagccccctcctttggccccacagagtccccaggggggtgtgatgggaggctcgaactctaaccagcagcaacagatgcggcttcagcagcttcaaatggaaaaagagagattacgcttgaagcagcaagagctgctgcgtcaagccatgcgtaacatcaacccttctacggccaatagcccgaagtgtcaggagttggctttgaggagccagctgcctaccctagaacaggacggcggaactcagaaccccgtctcttctccaggcatgagccaggagcttagaacaatgacaacaaactccagcgatcccttccttaacagcggaacatatcactcacgagacgaaagcacagattctggactgagcatgagttcctattcggtgccaaggactcccgacgatttcctcaattcagtggatgagatggatactggtgatacgattaatcagtctaccctgccctctcagcagaacaggtttccagactacttagaagctatccccggtactaatgtggatctagggaccctggagggggatggtatgaacatcgagggggaggaattaatgccttctttacaggaagccttgagttcagacatattaaatgatatggagagtgtcctggccgcaaccaagttggacaaggagagcttcctgacgtggctatag

SEQ ID NO: 31594 - DNA, 1365 bp, synthetic construct
  misc_feature 1..1365: note = Description of Artificial Sequence: Synthetic coding sequence
  source 1..1365: mol_type = other DNA
atggacccagggcaacagccaccaccacaaccagccccacagggccagggtcagccacctagtcaacctccccagggtcaaggacccccttccgggcctgggcagcctgcgccagcagctacacaggcagccccacaagcaccacctgctggacaccagattgttcacgtcagaggggattccgaaacagatctcgaggctttatttaatgccgtgatgaatcccaagactgccaatgtgccccagacagtccccatgagactgcggaaacttccagattctttctttaagccgcctgagcctaagagccacagcaggcaggcttctactgacgctggtactgcaggggcactaacgcctcagcacgtgcgggctcacagttcaccagcgagccttcaacttggcgctgttagcccaggtacgctgacccccaccggcgtcgtgagcggcccagccgctaccccaacagctcaacatcttcgccagagctcctttgagatccccgacgatgtgcctctccccgcaggttgggaaatggctaaaacatcctctggacaaagatactttctgaatcatattgaccagaccactacatggcaagatccaagaaaggccatgctctcacaaatgaacgttactgctcctacctcacctccggtgcagcagaacatgatgaacagtgcttctgctatgaaccagcgaatcagccagtccgctccagttaaacagccgccacccctcgcaccacagtctcctcagggaggggttatgggcggaagtaatagcaaccagcagcagcagatgagactgcagcagctccaaatggagaaagagcggttacggctcaagcagcaggagctcctgcggcaagtcaggccccaggaacttgcattgaggtcacagctgccaacgcttgagcaagatggcggaacgcagaaccccgtaagctcccccggaatgtctcaggagctgcggacaatgacgaccaattcttccgatccttttttgaattcaggcacctaccattccagggatgaatccaccgattctgggctgtccatgtcttcttacagtgtgccacgcacccccgatgattttctgaactcggtcgatgagatggacacaggggataccattaatcagagcacactccctagccagcagaatcgcttccccgattatttagaagccattcccggaactaacgtggatcttgggactttggagggcgatggaatgaatattgagggggaagaattgatgccctcactccaggaagcacttagctctgatatcctgaacgacatggagtctgtgctcgcagctaccaagctcgacaaggagagttttctcacatggctgtag

SEQ ID NO: 31595 - DNA, 1266 bp, synthetic construct
  misc_feature 1..1266: note = Description of Artificial Sequence: Synthetic coding sequence
  source 1..1266: mol_type = other DNA
atgcgcctgaggaaattgccagatagctttttcaagccaccagagcccaaatcacattcgcgtcaggccagcactgacgcgggaacagcaggcgctttaacgcctcagcacgtcagggctcactcctctcctgcgagcctccagctgggggcagtttcccccggtactctgacaccaactggcgttgtttcaggcccagctgcaacacctacggcgcagcaccttcgccaatcttcatttgagatcccagacgacgttcccttacctgccggatgggagatggccaagaccagcagcggtcagcgctacttccttaaccacatcgatcagacaacaacatggcaggacccacgaaaagctatgctgagccagatgaacgtgacagcacccacgtctccccctgtgcagcagaacatgatgaactctgcctccggaccgctgcccgacggctgggagcaagcgatgacacaggacggcgaaatatattatattaaccacaagaacaaaacgacatcctggctcgatccccgactcgacccaagatttggcaaggctatgaatcagaggatcagccaaagcgctcccgtgaaacagccaccaccgctggccccacagagccctcaaggtggcgtcatgggtggatccaactccaatcaacaacagcaaatgcgtctgcagcagctgcagatggaaaaagagcgtctgagattgaagcagcaagagctcctccgacaggccatgcgtaatattaacccatccaccgctaatagccctaaatgccaagagcttgcattgaggtcacagctccccaccctggagcaggacggcggaacacaaaacccggtgtcttctccaggaatgagccaggagctgagaacaatgactaccaacagctccgacccctttttgaatagcggtacctatcatagccgggatgagagcaccgactctggactcagcatgagcagttactccgttcccagaacaccagacgacttcctgaattctgtcgatgagatggacacgggagatacgatcaaccagtctactctgccctcgcaacaaaatagattccctgattatctggaggctattccaggcacgaatgtggatctcggcactttggaaggcgacggaatgaacatcgaaggtgaggagctaatgccgtctttgcaggaggccctcagcagtgacattctgaatgacatggagagcgttttagctgcaaccaaacttgacaaggaatcctttctgacatggctttag

SEQ ID NO: 31596 - DNA, 981 bp, synthetic construct
  misc_feature 1..981: note = Description of Artificial Sequence: Synthetic coding sequence
  source 1..981: mol_type = other DNA
atggcgaaaacatctagcggtcagcggtatttcctgaaccacatagatcagaccaccacctggcaggatccgagaaaggctatgctgagccagatgaacgtcactgcccctacttccccccctgtgcagcaaaacatgatgaacagtgcgagtggccctctgcctgatggttgggagcaggccatgacccaagatggcgagatttattacatcaaccataagaacaagaccaccagttggctggatccacgcctagacccccgatttgccatgaatcagagaatctcccaatcagctcctgtcaaacaaccacccccactggcaccccaatcgccgcagggtggcgtcatgggcggtagtaatagtaaccagcagcagcaaatgcgattacaacagctgcagatggaaaaagagagactgagactcaagcagcaagagttactccgacaggccatgagaaatatcaaccccagtactgctaactctcctaaatgccaggaattggcgctcaggagtcagctccccaccttggagcaggacgggggaactcaaaacccagtctcgagcccaggcatgagccaagaattacgcaccatgactaccaatagctccgacccgtttctgaacagcggaacctatcacagtcgggacgagtccacagacagtggtctctccatgtcaagttatagtgtcccacggacaccagacgatttccttaatagcgttgacgagatggacaccggcgatacgataaaccaaagcacactgcctagccagcagaatcgtttcccggactatttggaggcgattcctggaaccaatgtcgacctcggaaccctggagggggacggaatgaacatcgaaggcgaagagctgatgccgtctctgcaggaggccttgagcagcgatatccttaacgatatggaatcagtgttggccgcaacaaagctggataaggagagtttccttacttggctgtag

SEQ ID NO: 31597 - DNA, 1467 bp, synthetic construct
  misc_feature 1..1467: note = Description of Artificial Sequence: Synthetic coding sequence
  source 1..1467: mol_type = other DNA
atggacccaggacagcagcctcccccacaacctgcaccacagggtcagggacagcccccatcccaacctccccagggacaggggccacccagtggcccaggacaacccgctcccgctgcaacccaggccgctcctcaagcgcctcccgctgggcatcagatcgtgcacgtgcgcggtgatagtgagaccgacttggaggccctcttcaatgcggtcatgaaccccaaaacagctaatgtgccccaaactgtgcctatgaggctgagaaagctgcccgatagtttctttaaaccgccagaacctaaaagccactctagacaggcgtccaccgatgccggaacagcgggagctttgacacctcagcatgtgcgggcacattcgagccccgcatccctgcaacttggcgcagtatcaccaggaacgttgaccccaaccggtgtcgttagcggacctgccgcaacgcccactgcgcagcacctgaggcaaagtagcttcgagattcctgacgatgtcccactgccagccggttgggaaatggctaagacttcatccgggcaaagatactttctgaatcacatagaccagaccacaacatggcaagatcctaggaaggcgatgctgtctcagatgaacgtgaccgcacctacaagcccacctgtacagcagaacatgatgaatagcgcctcagggcctctgccagacggatgggaacaggcaatgacacaggatggcgagatctactacataaatcacaaaaacaaaactacaagttggctcgatccaagactcgatccaaggtttgccatgaatcagagaatttcccagtcagcccctgtgaagcagccgcctccactggctcctcagtcaccccagggtggggtcatgggaggcagcaactccaaccaacagcagcagatgaggctccagcagttgcagatggagaaggaaaggctccggctgaaacagcaggagctcctgagacaggagttagctctgagatcccagcttcctactctcgaacaggacggcggaactcagaaccccgtgtcatctccaggcatgtcacaggaattgagaacaatgactacaaatagttcagaccccttcttaaactccgggacatatcacagtcgagacgaatccacggattccggtctcagcatgtcatcatactccgtaccgcgaaccccagacgacttcttaaacagtgtagatgagatggataccggcgacaccattaatcagagcacgttaccctctcagcagaacagatttccagactacctggaggccattccgggaacaaacgtcgacctgggcacactggagggcgatggcatgaatattgagggggaagagctgatgccctcccttcaggaggctctgagttccgacatccttaacgatatggaaagtgtactcgctgccaccaaactggataaggagtcatttttaacttggctatag

SEQ ID NO: 31598 - DNA, 1479 bp, synthetic construct
  misc_feature 1..1479: note = Description of Artificial Sequence: Synthetic coding sequence
  source 1..1479: mol_type = other DNA
atggacccagggcagcagcctcccccacagcctgctcctcagggccagggacagcctcctagccagccccctcaaggacaaggcccaccctccggtccagggcaaccagctccagccgctactcaggcagcccctcaggcaccccctgctggccaccagattgtgcatgtccggggtgacagtgaaacagacttagaggctctgttcaacgctgtcatgaatcctaaaacagccaatgtcccacagactgtgcccatgcgcttgcggaagctgcccgattccttttttaagccacccgaacccaaaagccacagccgccaggcgagcaccgatgcagggacagcaggtgccctaactccgcagcatgtgagagcccacagtagtccagcaagcctgcaattgggcgcagtctcccccggtacactgacaccaaccggagtggttagcggcccagccgctacgccaacagctcagcatctgagacaatccagctttgagatcccagacgatgttccactaccagccggttgggaaatggccaagacctcctccggacaacgatactttctgaaccacatagatcagaccactacgtggcaagatccgcgaaaagccatgctgtctcaaatgaatgttacggctcccacatccccgcctgtgcaacagaatatgatgaatagcgccagcggccctctgcccgacggatgggagcaggccatgacacaggatggcgaaatttactacatcaatcacaagaacaagactaccagttggctggatccacgtcttgatcctaggtttgctatgaatcagcggatatcccagtccgccccagtcaagcagccccctccactcgcccctcaatcgccccagggcggtgtaatggggggaagcaattccaaccagcagcagcagatgcgcctccagcagctgcagatggaaaaggagcgcttacgactcaagcagcaggagttgttacgacaagtgcgacctcaagaactggccttgagaagccaacttcctaccttggagcaggacggcggtacccaaaacccagtgagcagtcctggaatgagccaggagcttaggaccatgacgacgaattcctccgaccctttcctgaattctggcacttaccactccagggatgagtcaacagactcgggcttatccatgtcgtcctactccgtccctcggactccagatgattttctaaactccgtcgacgaaatggacacaggggacaccatcaaccaaagtaccctgccgtctcaacaaaatcgcttccctgattacctggaagccataccgggaactaatgttgacctcggaacattggaaggcgacggcatgaacatagagggagaggagctgatgcctagcctgcaggaggccctgtcttccgatatactgaatgatatggaatccgtcttggctgcaaccaagctagataaggagtccttcctgacgtggctctag

SEQ ID NO: 31599 - DNA, 1353 bp, synthetic construct
  misc_feature 1..1353: note = Description of Artificial Sequence: Synthetic coding sequence
  source 1..1353: mol_type = other DNA
atggatcccggacaacagccacccccacagcctgcaccccagggtcagggtcagcctccaagtcagccccctcaggggcagggcccaccaagcggccctggtcaacctgcccctgccgctactcaagccgctccccaggcccctccagccggtcatcagatagtccatgtgaggggagattcagagaccgacttagaagcgttgtttaatgccgtcatgaacccaaaaaccgccaatgtgccgcagacagtgcccatgagactccgcaagctgcctgattctttcttcaagcctcccgagccaaagagtcactctcggcaggcgagcactgacgcaggcactgcaggcgctcttaccccacaacacgtccgcgctcattccagtccagctagcctgcagctgggggcagtgagtcccggaactctgacccccacaggcgtggtgagtggtcccgctgccacccccactgcccaacacctcagacagtccagcttcgagattcccgatgatgttccgctgcctgctggctgggaaatggcaaagacaagttccgggcagcggtacttcctgaatcacatcgatcaaactacaacgtggcaagacccgcgaaaggccatgttgtcccagatgaatgttaccgcccctacaagcccaccagtgcaacaaaacatgatgaactctgcttcagccatgaaccagaggattagccagagtgccccagtgaagcagccgcctccactcgctccccagtctccacagggcggagtaatgggaggctctaacagcaaccaacaacagcagatgcgactgcagcaactacaaatggaaaaggagcggctgcggttaaagcagcaggaacttttgcgtcaggagttagccctgcggagtcagctccctacgctagagcaagatggaggaacccagaacccggtctccagtcccggtatgagccaggaattgcgaaccatgacaactaattcaagcgatccctttctgaactcgggaacataccattcccgggatgagtccaccgactccggcctgtcaatgagctcctactcagtacccaggactccagacgatttcctcaattccgtggacgagatggacaccggagacactataaatcagtcaacgctccctagccaacaaaataggtttccagactaccttgaagcaatcccgggaaccaatgtagatctcggcacattagagggagatggcatgaacatcgagggcgaggagttgatgcctagcctccaagaggcactctcctcggacatccttaatgatatggagtccgtcctagcagccactaaactggataaagaatctttcctgacgtggctctag

SEQ ID NO: 31600 - DNA, 1860 bp, synthetic construct
  misc_feature 1..1860: note = Description of Artificial Sequence: Synthetic coding sequence
  source 1..1860: mol_type = other DNA
atggctaatgatatcgatgagcttatcgggatcccattccctaatcatagcagcgaggtcctttgctccctgaacgagcagaggcatgatggcctgctgtgtgacgtgctgctggtggttcaggaacaggagtatcgtactcaccggagcgtgctggctgcctgtagcaagtacttcaagaaactttttactgccggaaccctggcctcccagccctatgtgtacgagatagacttcgtgcagccggaagcactagccgctattctagaattcgcgtacacatcgacactgactattaccgccggaaacgtgaagcacattctcaacgctgctaggatgcttgagatacagtgcatcgttaacgtatgccttgagataatggaacccggtggggacggtggggaggaggacgacaaggaggacgatgatgacgatgaggacgacgacgatgaggaggatgaagaagaggaagaggaggaagaggaggatgatgatgacgataccgaagattttgcggaccaggagaacctgccagacccccaggacatatcttgtcatcagagtccgtccaagacagaccacctcacagaaaaagcatactccgatactccacgggatttccctgactcctttcaggccggatctccagggcacttgggagtgatcagggacttctctattgagagcctactccgggaaaacctctatcctaaagctaacataccagatcgtaggccttcgctgagtcccttcgccccagatttcttcccgcatctctggcctggagatttcggtgctttcgcccagctgcctgagcaaccaatggatagcggcccattggatctcgttataaaaaatcgcaaaatcaaggaagaggaaaaagaggagctgccccctcctcctccccctccattccctaacgattttttcaaggacatgtttccagacttacccggagggccacttggccctattaaggcggagaatgactacggtgcttatttgaatttcttgtctgccacgcacctggggggattgtttcccccatggccactggtagaagagcggaagctgaaacccaaggcctcccaacagtgtcccatttgtcacaaggttatcatgggtgctgggaaactgccgcgacacatgcggacacacaccggcgagaagccatatatgtgcaccatttgtgaggtgaggttcacaaggcaggataaattaaaaatccatatgcgtaaacatacaggggagagaccatacctctgcattcattgtaacgccaagtttgtccataattatgacctgaaaaatcatatgagaatccataccggagtccggccataccagtgcgagttctgttacaaaagcttcactcgctcagatcacttgcaccggcatataaagcgacaatcctgtaggatggcccgacccaggcggggaaggaagcctgccgcttggcgcgctgctagccttctgtttgggcctgggggtcctgctccagataaggcagccttcgttatgccaccagcactgggagaggtggggggacacctcggcggagccgcagtgtgtctacccggaccgagtcctgccaagcacttcctggcggctcctaagggcgctctctccttgcaagagctggagcggcaatttgaggaaacccagatgaaattattcgggcgtgcccagctggaggccgagcggaacgccggtggtctcctggctttcgccctagcagagaacgtggcagctgcaaggccgtactttcctctaccagacccctgggccgctgggcttgccggtctgcctggactagcaggcctcaaccatgttgcttctatgtctgaagccaacaactag

SEQ ID NO: 31601 - DNA, 1860 bp, synthetic construct
  misc_feature 1..1860: note = Description of Artificial Sequence: Synthetic coding sequence
  source 1..1860: mol_type = other DNA
atggccaacgatattgacgaactgattggtataccgtttcctaatcattcatccgaggtgttgtgtagcctcaatgagcaaagacacgacggcttgctgtgcgacgtccttttggttgtacaggaacaggaataccggacacaccgatccgtactggccgcatgttctaagtactttaagaaattgtttaccgcaggcactctggctagtcagccttacgtttacgagatcgatttcgtgcagccggaagccctggccgcaattctggaattcgcttacacctccacacttaccatcacagccggaaacgttaaacacatcctgaatgctgctcgaatgttggaaatccagtgcattgtgaatgtttgtctcgaaattatggagccaggcggagacggaggcgaagaagatgacaaggaagacgacgatgatgacgaggacgacgacgacgaggaagacgaggaagaggaagaagaagaggaagaagatgatgacgacgacactgaggactttgccgatcaggaaaatcttcccgacccccaggacatctcctgtcaccaatctcctagcaagaccgaccacttaactgaaaaggcctacagtgacacaccaagagattttcccgacagcttccaagctggctccccaggccacctcggtgtcatccgcgatttctccattgagtcattgttgcgcgaaaatctctatcctaaggcaaacatacctgacagacgcccatcactatccccgtttgcaccagacttcttcccccacctttggcccggagacttcggcgcatttgctcagttgcccgaacaacccatggattctggtcctctagatctggttatcaaaaaccggaagatcaaagaagaagaaaaggaggagctcccacccccaccacccccaccttttccaaacgatttctttaaagacatgttcccagatcttccaggcggtcccctcggccctattaaggcagaaaacgactatggtgcgtatctgaacttcctcagcgccacccacctcgggggtctgttccccccttggcccctggtcgaggagagaaagttgaaacccaaggccagtcagcagtgcccaatctgccataaggtcattatgggagcaggtaagttgccaaggcatatgcgcacccatactggcgagaaaccttacatgtgtaccatatgcgaagtcaggtttaccagacaggataagcttaaaatccatatgagaaaacacacaggggaaaggccttatttatgtatacactgcaatgctaaatttgttcacaactatgacctcaaaaaccacatgcggatccatactggcgttcgcccatatcagtgtgagttctgttacaagtctttcacgcgctccgaccacttgcataggcatatcaaaagacaatcttgtcgcatggccaggcccaggaggggcagaaaacctgccgcttggagagccgctagtttgctcttcggacctggaggcccagcgccagataaggcagctttcgtgatgccacccgcattgggggaggtgggaggtcatcttggaggagccgcagtctgtctccccggaccctcccccgctaaacatttcttggcagcaccaaagggagccctctcactgcaggagctggaaaggcagttcgaagagacacagatgaagctgttcggacgagcccagttagaggcggagaggaatgcagggggattgctggcctttgccctggcagaaaatgttgctgctgccagaccgtatttccccctgccagatccttgggctgctggcttggccggactaccaggactggctgggctgaatcacgtagccagtatgtcagaggccaacaattag

SEQ ID NO: 31602 - DNA, 78 bp, synthetic construct
  misc_feature 1..78: note = Description of Artificial Sequence: Synthetic coding sequence
  source 1..78: mol_type = other DNA
atggcaaacgatattgatgaactcattgggatcccatttccaaatcacagtagcgaagtactctgttctttaaattag

SEQ ID NO: 31603 - DNA, 57 bp, synthetic construct
  misc_feature 1..57: note = Description of Artificial Sequence: Synthetic coding sequence
  source 1..57: mol_type = other DNA
atggctaatgatattgacgagctgatcgggattcccttcccaaatcattcctcgtag

SEQ ID NO: 31604 - DNA, 3375 bp, synthetic construct
  misc_feature 1..3375: note = Description of Artificial Sequence: Synthetic coding sequence
  source 1..3375: mol_type = other DNA
atggctgacggaccacgttgcaagaggagaaaacaggccaatcccaggagaaacaatgtgaccaactacaacaccgtggtggagactaattcagactctgatgatgaagataagctacatattgtagaagaagagagtgtcacagacgccgcagactgtgaaggagtgcccgaggatgatctccccacagatcaaacagttctgcccggtcgctcatccgaacgcgagggcaacgcaaaaaattgttgggaggacgacagaaaggagggtcaggaaattctcggccctgaggcacaagccgacgaggcaggctgtaccgtgaaggacgacgaatgcgaaagtgatgctgaaaacgagcaaaaccatgacccaaatgtggaagagttcctacagcagcaggacaccgccgtcatttttcccgaggcccctgaagaggaccagagacagggtacgcctgaagccagcggacacgatgagaacgggacgcctgatgcattctcccaacttttaacatgtccctattgtgatcgtggatataagcggttcacgtctcttaaagaacatatcaagtaccgacacgaaaagaatgaagataactttagttgcagcctctgctcgtacacattcgcgtatagaacccagttggagcgccacatgactagccataagagcggaagagaccagagacatgtgacccaaagtggatgtaatcggaagttcaagtgcacagaatgcggtaaggcttttaagtacaagcaccacttgaaggagcacctgcggattcacagcggcgagaaaccttacgagtgccctaactgtaaaaaaaggttctctcattccgggtcctattccagtcacattagtagcaagaagtgcatcagtctgataccggtcaacgggagaccgcgtaccggcctcaaaaccagccaatgcagctcaccttccctgagtgccagcccaggcagccctaccaggccacaaatccgacaaaagatcgagaataagcctctgcaagaacagctttcagtcaaccaaataaagaccgagccagtggattacgaattcaaacccatcgtggtggcctctggaattaattgtagcactccattgcagaacggcgtctttacagggggaggaccccttcaggccacgagttccccccaaggcatggtacaggcagtcgtgctcccgactgttggcctcgtttctcctattagtataaacctgtctgatattcagaacgtgctcaaggtcgccgttgacggaaatgtaataagacaggtcttggaaaataaccaggccaatttagcatccaaagaacaagaaaccatcaatgccagccccattcagcaggggggacattctgtaatttctgccatcagtttgcctcttgtcgaccaggacggtacaactaagatcattatcaactacagtctggagcagcccagtcaactccaagtggtcccccagaatttgaagaaggagaaccctgttgctactaactcatgcaagagcgaaaaactaccggaggaccttacagtgaagagcgagaaggataaatcgttcgagggaggggtcaatgactccacatgccttctatgtgatgactgccccggagatatcaacgcacttccagaactgaagcattacgatctgaagcagcctacgcaacccccaccactaccagcggctgaagccgagaaaccagaatcctcagtctcctccgctacaggcgacggaaacctgtcccctagccaacctccgctgaagaatctcctcagcctgttaaaggcatactatgcactgaatgcacaaccctcggcagaggagctgtcaaaaatcgccgatagtgtgaacttaccgctggacgtagtcaagaagtggtttgaaaaaatgcaggctggacagatcagcgtccagagcagtgagccttcatctccagagcccggaaaagtgaatattcccgcaaaaaacaatgaccagccccagtctgccaatgctaacgagcctcaggactccacggtgaatctgcagagtccccttaagatgacaaactctccagtactccccgttggaagcactactaatggctctcggagtagtactccctcacccagtccccttaatctgtcctcttctagaaacactcaaggttatctctataccgccgaaggggctcaggaagaacctcaggtggagccattggatctcagcctgccaaagcagcagggagagctcctcgaacgttctaccattacttctgtgtaccagaactccgtatacagcgtgcaggaagaaccacttaacctgtcctgcgccaaaaaggaaccccagaaggactcttgtgtcacagatagcgagcctgtggtgaacgtcattccgccttctgccaaccctatcaacatcgcaattcctacggtgacagctcaactgcctaccatagtggctatagcggaccaaaattctgtgccctgcctccgcgcattagcagctaataagcagaccattctcataccccaagttgcctacacttattccactaccgtctctcccgcagtgcaggaacctcctctaaaggtgatacaaccaaacgggaatcaggatgagaggcaggacacaagttctgaaggggtcagcaacgtcgaggatcagaacgactccgacagcacacccccaaagaaaaagatgagaaaaactgaaaatgggatgtacgcatgtgacttgtgtgataagatcttccagaaaagttcatccctgctgaggcataagtacgaacacaccggtaagagaccccatgagtgcgggatttgcaagaaggcttttaagcacaaacatcatttgatagagcatatgcggctgcatagcggagagaagccctaccagtgcgataagtgtggaaagaggttttcacacagtggcagctatagtcaacacatgaatcataggtacagttattgcaaaagagaagccgaggagagagattccaccgagcaggaggaagcagggccagagatattgtcaaacgaacacgttggtgcgcgtgcctcgccttctcaaggagatagcgatgaaagagagtcactcacacgggaggaagatgaggatagtgaaaaggaggaagaggaagaagataaggagatggaggaactgcaagaagaaaaggagtgtgaaaagcctcagggagacgaagaggaagaagaggaagaagaggaggtggaggaggaggaagttgaggaggccgaaaacgaaggagaggaagcaaagactgaggggctgatgaaggacgaccgagccgaatcccaggcaagttctctcgggcaaaaagtgggggagtcctccgagcaagtgagcgaggaaaaaactaatgaagcttag

SEQ ID NO: 31605 - DNA, 3378 bp, synthetic construct
  misc_feature 1..3378: note = Description of Artificial Sequence: Synthetic coding sequence
  source 1..3378: mol_type = other DNA
atggcagatggtcctagatgtaaacgtcgcaagcaagcaaaccctcgaagaaacaatgtgacaaactacaataccgtggtggagaccaattcagatagtgatgatgaggataagctgcatatcgtggaagaggaaagcgtcacagatgccgctgactgtgaaggcgtgcctgaagatgacctgccaactgaccaaacagttttgcccggacggtctagcgaacgcgagggcaatgcaaaaaattgttgggaggacgataccgggaaagaaggacaggagattctgggacctgaagctcaggccgacgaggcaggttgtactgttaaggacgacgaatgcgagagtgacgccgagaatgagcaaaaccacgatccgaacgtggaagagtttctgcagcaacaggatacagctgtgatatttccagaggcaccggaggaggaccagaggcagggaactcccgaagcatccggacatgatgagaacggtacgccagacgcgttcagccagcttctcacatgcccatattgcgacagaggctacaagaggttcacctcccttaaggaacacattaagtatagacacgaaaaaaatgaggataatttttcctgctccctgtgttcctacacgttcgcttatagaacccagttagagaggcatatgaccagccataagtctgggcgagatcagcgacatgtcacccagagcggttgcaatcgcaagtttaagtgcaccgaatgtggcaaggctttcaaatacaaacatcacctaaaggagcacctgcgaattcacagcggagaaaagccgtacgagtgcccaaactgcaagaaaagatttagccactctggttcatatagttcccacatttcctctaagaagtgtattagtctcatcccagtcaatggtagacccaggactgggttgaagacctctcagtgtagcagtcccagcctgtctgccagtcccggaagcccgaccaggcctcagattcgacagaaaatcgagaacaagccattgcaggaacagctgtctgtaaatcagatcaagactgaaccagtggattatgaattcaaacccattgtagtggcaagtggcatcaattgctctacaccactgcagaacggagtctttaccggtggagggccacttcaggcaacgagcagtccacagggaatggtacaggccgtggtactgcccacggtggggctggtgagcccaatctcaatcaacctttcagacatacagaacgttctcaaggtcgctgtcgatgggaacgtgattcggcaagtccttgaaaacaaccaggcaaatctggcctccaaagaacaagagaccataaacgccagccctatccaacaggggggtcactctgttatctctgctatttctctgccccttgtagatcaggatgggaccactaagattatcataaattacagcctcgagcagccgagtcaactccaagttgttcctcagaatttgaagaaggagaaccctgtggcgactaattcttgcaagtccgagaagctgcctgaagatctgactgtcaagtccgaaaaagataaatctttcgaaggtggggtaaatgatagcacatgtttactgtgcgacgactgtcccggagatatcaacgcattacctgagctaaagcattacgatctgaaacagccaacgcaaccacctcctctgcctgcagccgaagccgagaagcctgagtcaagcgtctcctccgccaccggggatggtaatctgagtccttctcaacctccactgaagaacctactgagtctgctgaaggcttactatgcgctgaatgcccagcctagcgcagaagaactttccaaaattgccgacagcgtgaacctgccactggacgttgttaagaaatggttcgagaagatgcaggccggtcagatcagcgttcaaagcagcgaaccttcatctccagaacccggaaaggttaacatccctgccaagaacaatgatcagcctcagagcgccaatgccaacgagccacaggactccaccgtcaatttacagtccccactgaaaatgactaatagcccagtgctgcctgtcggttctactacaaatggttcccggagctccacaccttctcccagccccctgaatttgagttcttctcggaacacccaggggtatttgtacaccgctgaaggtgctcaggaggaaccccaggttgaaccccttgacttgagtctgcccaaacagcagggtgagctgctggaacgaagcaccatcactagcgtgtatcagaattctgtctactccgtgcaagaagaaccgctcaacctttcctgtgccaaaaaggagcctcagaaagactcatgtgtcactgacagcgagcctgtggtgaatgtgatacccccatctgctaatccgattaacattgctattcccaccgtgaccgctcaactaccaacgatcgttgctatcgccgaccaaaactccgtgccgtgcctgagggccctggccgcaaataaacaaaccattctcattcctcaagtagcatatacctatagcactaccgtgagtccggcagtacaagagcctccactgaaggtgatccaaccgaatggaaaccaggacgagcgccaagatactagtagcgaaggtgtaagcaacgttgaggaccaaaatgattctgactccactcctcccaagaaaaaaatgaggaagactgagaatggtatgtatgcatgtgacctgtgcgataaaatttttcagaagagctccagcttactgcgccataaatacgaacataccggcaagcgtccacacgagtgtggaatctgcaagaaggctttcaagcataaacatcatctgatcgagcatatgaggctgcatagcggggagaagccttaccagtgcgacaagtgtggaaagcgtttttcgcacagcgggtcgtattctcagcacatgaaccatcgctactcatactgcaagagagaggctgaagaacgagacagcacagagcaggaagaagcaggcccagagattctaagtaacgaacacgttggcgctcgcgctagcccaagtcaaggcgacagcgacgagcgggagagtcttacacgggaggaggacgaggattctgaaaaagaggaggaggaggaggacaaagagatggaggagctgcaggaggaaaaagagtgcgaaaaacctcagggggatgaggaagaagaggaagaggaggaggaagtcgaagaggaagaggttgaagaagcagaaaacgagggagaggaggcgaaaacggaggggctgatgaaggacgaccgggctgaatcccaggcgagtagccttggacagaaggtcggagagtcttctgagcaggtaagcgaagaaaaaacaaatgaggcatag

SEQ ID NO: 31606 - DNA, 870 bp, synthetic construct
  misc_feature 1..870: note = Description of Artificial Sequence: Synthetic coding sequence
  source 1..870: mol_type = other DNA
atggcagatggtccacggtgtaaaaggaggaagcaggcgaaccccaggagaaataatgtcaccaactataatactgtcgtggagacaaattcagactcagatgatgaggataagctccatatcgtcgaggaagagagtgtaacagacgcggctgactgtgagggtgtgcccgaagatgacttacctactgaccagactgtcctacctggccgatcttcagagagagaagggaacgctaagaactgctgggaggatgatacggggaaagaggggcaggagatcctgggtcccgaggcccaggccgatgaggcagggtgcactgtgaaggatgatgaatgcgagtccgatgcggaaaatgagcagaaccatgatccaaatgtggaggagttccttcagcagcaggacacggccgtgatttttcccgaagcacctgaagaagaccagcgacaaggaacccctgaagcttctggacatgatgagaatgggactccagacgcttttagccagcttttaacttgcccttattgcgaccggggttacaagcggtttacatctctcaaagagcacattaagtacaggcacgagaaaaatgaggataacttttcctgcagtctgtgcagttacacatttgcctatagaacacagctggagcgccatatgactagccataaaagcggcagagaccagcgccacgttacccagtcagggtgtaataggaagtttaagtgcacagagtgtggtaaggcattcaagtataagcaccacctaaaagaacacctgcgtattcacagcggcgaaaaaccctacgaatgcccgaactgcaagaagcgattctcccattctgggtcttactcgagtcacatcagttag

SEQ ID NO: 31607 - DNA, 2721 bp, synthetic construct
  misc_feature 1..2721: note = Description of Artificial Sequence: Synthetic coding sequence
  source 1..2721: mol_type = other DNA
atgacaagccacaagtccggacgagaccagcgccatgttactcagtccggctgcaaccgcaagtttaagtgcacagagtgcggtaaggctttcaagtataagcaccacctgaaggaacacctccgtatccatagcggggaaaagccgtacgaatgtccgaattgtaaaaagagatttagccactccggatcctatagtagccacatctcctctaaaaagtgtattagtctgatccccgtcaatggacgtccgaggacggggctgaaaacaagtcagtgttctagcccttcgttatctgcgagtccagggagcccgacgaggccccaaatccgccagaaaatcgagaacaagcctcttcaagagcagttaagcgtgaatcagatcaagaccgaaccagttgactacgaatttaaacccatagtagtcgcatctggaatcaattgtagtacccctctccagaatggcgtctttaccgggggaggacccctgcaagccacatccagtccacaaggtatggtacaggctgtcgtcctcccgaccgttgggctggttagccctatcagcattaatctatccgacatccagaacgttctcaaggttgcagtggatggcaatgtaattagacaggtgttggaaaataaccaggctaacctagccagcaaagagcaggaaactataaacgcatctcctatacagcaggggggacacagcgtgatcagcgccatctcgctgcctctcgttgatcaggacggcacaacaaaaattattataaactacagcctcgaacagccaagtcagcttcaagttgtgccccagaacctgaaaaaggagaaccccgtcgccacaaactcgtgcaagtccgagaagctcccggaggacctgacagttaaaagcgaaaaagacaaatcatttgaggggggagttaacgactccacgtgcctcttgtgcgacgattgcccaggtgacataaacgctttgccggagctgaagcattatgacctgaagcagccaacacagcccccaccccttccagcagccgaagctgagaagccagagtcttcagtgtcaagcgctactggcgacggcaatttaagtcctagtcagcctccccttaagaacctcctctccctgctgaaggcctactacgctctaaatgcacagccatccgcagaagaactctctaagatagccgactctgtcaacctgccactggacgtggtgaaaaaatggttcgaaaaaatgcaggctggccagatctcagtgcagtcatccgagccctccagtccagaacccggaaaggtcaacatacctgctaaaaataacgatcagcctcaatccgctaacgcaaacgaaccacaagattcaactgttaatctccagtccccactcaaaatgactaatagtcctgtgcttccagttggcagcactactaacggatctcggtcttctactccctccccctcacctcttaacctgtcgagctctcgcaatactcagggctatctgtacacagcagagggcgctcaggaggagcctcaagttgagcccctcgacctgtcgttaccaaagcagcagggcgaactcctcgagcggagtactatcacaagtgtctatcaaaattcggtgtattccgtgcaggaggagcccctcaacctgtcatgcgcgaagaaggagccacagaaggattcttgcgtcaccgatagcgaacctgtcgtaaacgtgatcccgcctagcgccaatcccatcaatattgccatccctacagtaactgcccagctaccaactatagtggctattgctgaccagaatagtgtcccatgcctccgtgctctggccgcaaacaaacagaccattttaataccccaggtggcttatacttacagcactaccgtcagccctgccgtgcaggagcccccacttaaagtgatccagccaaacggcaaccaggacgaaaggcaggatacgagcagcgaaggcgttagcaatgtagaggatcaaaatgactctgactccactccaccgaagaagaaaatgcggaagacagagaatggaatgtatgcctgtgacctgtgcgacaaaattttccagaagtcctcttccctcctgcggcacaagtacgagcacaccggaaaaagacctcatgagtgcggcatatgcaagaaagcttttaaacacaagcaccacctgattgaacatatgaggctgcatagcggggaaaaaccctaccagtgtgataaatgcggaaaacgttttagccacagtggatcgtattcgcaacatatgaaccacagatattcatactgcaagcgtgaggccgaagagagagatagcactgaacaagaggaggccggtccagagatactgtccaacgaacatgtgggcgctagggcgagtcctagtcagggcgattcagatgagagagagtcccttactagggaagaggacgaagactctgaaaaggaagaggaggaggaggacaaggaaatggaggaactgcaagaggaaaaggagtgcgaaaaaccgcagggtgatgaagaggaagaagaggaggaggaagaagttgaggaagaggaagtggaagaagccgagaacgaaggagaggaagcaaagacagagggactgatgaaagatgaccgagcagagagtcaggcatcgtccctgggccagaaggtgggggagtcttcagagcaggtatcagaagagaagaccaatgaagcctag

SEQ ID NO: 31608 - DNA, 3327 bp, synthetic construct
  misc_feature 1..3327: note = Description of Artificial Sequence: Synthetic coding sequence
  source 1..3327: mol_type = other DNA
atgaaggtgaccaattacaacactgtcgtggaaactaactcagatagtgacgacgaggacaagcttcacattgtcgaggaggagtctgtaaccgatgcagctgattgcgagggagtacccgaggatgacctcccaaccgaccagactgtccttccaggaagatccagcgagagagaggggaacgcgaagaattgctgggaggacgacacaggcaaggaagggcaggagatcctggggcctgaggcccaagcagacgaggccggttgtactgtgaaagacgacgaatgcgagagtgatgcggagaatgagcagaaccatgatcctaacgtggaggagtttctccagcagcaggacacggctgtcatcttccctgaggcacctgaggaggatcaacgccagggaacgccagaggcatcagggcacgatgaaaacggcactcctgatgcattcagccaactcctgacatgcccctactgtgaccgtgggtacaagcgttttacaagcctgaaggagcacatcaagtacaggcacgagaagaacgaagacaatttctcctgcagcctgtgttcttacacattcgcctacaggacccagttagagcgtcacatgacctcccataagagtggcagagaccagcggcacgtgacgcagagtggttgcaacagaaagttcaagtgcacagagtgtgggaaggctttcaaatataaacaccatctgaaggaacacctgagaatacatagcggcgagaagccttacgaatgtcccaactgcaaaaagcgcttctcccactccggttcttatagctcacacatctctagcaagaagtgcatttccttaattccagtgaacggacggccaagaaccggtctgaagacatcccaatgctctagcccgtcactgagtgcttctcctgggtcgcctactaggccccaaattcggcagaaaatagagaataagccacttcaggaacagctctccgtgaaccagatcaagacagagccagtcgattacgagtttaagccaattgtggtggcctccgggatcaattgctctactcctttgcaaaacggcgtgttcacaggtgggggaccccttcaggcaacctcctcacctcagggcatggtgcaggcagtagtgctccccaccgtggggctggtgtcacctatcagcattaacctgtcggatatccaaaacgtgctaaaggtggccgtggatggcaatgtgattagacaggtgctggagaataatcaggcaaatctcgcttcgaaagagcaggaaactatcaacgccagccccatacagcaggggggacattccgtgatttcagcgatatctctgccgctggtcgaccaggatggaaccacaaaaataatcattaattactccctggagcaaccctcacaattacaggtcgtcccgcagaacctaaagaaagaaaatccagtagccacaaattcttgtaagagcgagaaactaccagaggatctgacagttaaatcagagaaagataagtcatttgaaggaggagtcaacgattctacttgcttactctgcgacgactgccctggggacataaacgcactgcccgaactcaagcattatgacctgaaacagcccacgcaaccacccccactgcccgcagccgaggctgagaagccagaatctagtgtgagcagtgcaacaggggacgggaacctgtccccgtctcagccccctttgaagaaccttctaagtttgctcaaagcatactatgctctcaacgcccagccaagtgccgaagagctctctaagattgccgacagcgtcaacttacctctcgacgtggttaaaaagtggttcgaaaaaatgcaagccggacagatatccgttcagtcttctgagccctcaagtcccgaacccggaaaggtcaacattccagctaagaacaatgaccaaccccagagcgccaatgcaaacgaaccccaggactcgacggttaatttgcaaagtcctctgaaaatgaccaatagtccggtgttgcccgtcgggtccaccaccaacggctctcgctccagcacaccaagccccagcccactgaacctttccagcagcagaaacacacagggctacctatacaccgccgagggggctcaggaggagccacaggtggaaccgctggatctgagcctgcctaaacagcaaggggagctcctagagcggagcaccattaccagcgtgtaccaaaattccgtctacagcgtgcaggaggaaccgctgaacttgagctgcgcaaagaaggagcctcaaaaagatagctgtgtgaccgactccgagcccgtggtaaacgtgatccccccttctgcaaacccaatcaacattgccatcccgaccgtaactgcccagctaccaaccatcgtggctatcgccgaccaaaattcagtaccatgtcttagggcgcttgccgcaaataagcaaaccatcctgataccccaggtagcatacacgtactcgacaacggtatcacctgccgtgcaggagccgcctctgaaggtgattcaaccaaatgggaatcaagacgaacgacaggataccagttccgaaggagtttcaaatgtagaggatcagaacgactctgactccacacccccaaagaaaaagatgagaaagactgagaatggtatgtatgcctgcgatctgtgcgataagatctttcagaagtccagttccctgctgcgccataagtacgagcacacaggcaagaggcctcacgagtgcggcatttgcaaaaaggccttcaagcacaaacaccatcttattgagcacatgcgccttcacagcggggagaaaccctatcagtgcgacaaatgcggaaagcggttttcgcacagtggcagttactcccagcacatgaaccatagatatagctattgcaagagggaggcagaggaacgcgacagtaccgagcaagaggaagccggtcctgaaatcctctccaacgagcatgtgggtgcacgggctagcccaagccagggggactccgatgagcgggagtctttaacgcgcgaagaagacgaggactctgagaaagaggaagaggaggaagacaaagagatggaggaactgcaggaagaaaaagagtgtgaaaagcctcagggcgatgaagaagaggaagaggaggaggaggaggtggaggaggaggaagttgaggaagctgaaaatgagggagaggaggcaaagaccgagggccttatgaaggacgatcgcgctgagtctcaagccagcagtcttggacagaaagtgggcgagagcagcgagcaggtaagtgaagagaagacaaatgaagcctag

SEQ ID NO: 31609 - DNA, 3180 bp, synthetic construct
  misc_feature 1..3180: note = Description of Artificial Sequence: Synthetic coding sequence
  source 1..3180: mol_type = other DNA
atggcagatggtccgaggtgcaaaagacgcaaacaagccaatccacgcaggaacaatgtgactaactataacactgttgtggaaactaattctgattctgatgatgaagataagctgcatatcgtggaagaggagtcggtgacagacgctgctgattgcgagggagtcccagaggacgacttacctaccgaccagacagtgcttccaggccgatcatccgagagggaaggtaatgctaagaactgttgggaggatgaccggaaagaggggcaggagatccttgggccagaggcccaggctgacgaagcagggtgcaccgttaaagatgatgaatgcgaatcagacgcagaaaacgagcagaaccatgaccccaacgttgaggaatttctgcagcagcaggataccgctgtgatattcccagaggcaccagaagaggatcagcgacaagggacgccggaggcatcgggccacgacgagaatggaactccggacgctttcagccagctgcttacatgtccctactgcgacagagggtataagaggtttactagcctgaaggagcacattaagtaccggcatgagaagaatgaggacaatttctcctgcagcttgtgctcatatacttttgcgtaccgcacgcagctagagcggcacatgacaagtcacaaaagcggcagagaccagcgccatgtgacacaatctggctgtaacaggaagtttaaatgtaccgaatgcgggaaagccttcaagtataagcaccacctaaaagaacacctgcgaattcacagcggcgaaaagccctatgagtgtcctaactgcaagaagcggttcagccatagcggatcatattcgtctcatattagcagcaagaaatgcatttctctcataccagtgaatggaagacctcggacagggctcaagacaagccagtgctctagcccaagtctttcagcatctcccggatcaccaacacggccacaaattcggcagaaaattgaaaacaagcctctacaggagcagctgagtgtgaaccaaattaaaactgaaccagtcgactatgagtttaagcctatcgtcgtggcatctgggatcaactgctcgactcccctgcagaatggggtgtttaccggaggcggacctctgcaggccacatcgagtccgcaagggatggtgcaggctgtggttcttcccaccgttggcctagtatcacctatctccatcaacctaagcgacatacagaatgtgctcaaggtcgccgtggacggaaatgtgattaggcaggttctcgagaacaaccaggctaacttggcaagcaaggaacaggaaacaatcaatgcttcaccaattcagcaagggggacacagtgtgatcagcgcaatatctcttccactggttgatcaggatggtaccacaaagatcattatcaactactccctggagcagccatctcagttacaggtagtgccacagaatctgaaaaaggagaatcctgtggccacaaatagctgtaagagtgagaagttaccagaagacctgacagtgaagagtgagaaggataaaagcttcgagggcggtgttaatgacagtacctgtttgttgtgcgacgattgccccggagatattaacgcactccctgagctaaaacattacgacttaaaacagcccacccagcctccacccttacccgcagcagaggccgaaaaaccagagtcaagcgtcagctctgcgacgggggacgggaacttgagtccctctcagcctcctctgaaaaacttactgtccctgcttaaggcatattatgctctgaacgcgcagccctccgctgaagagctgtccaaaatcgcggatagcgtgaaccttcctctggacgtagtcaagaaatggttcgaaaagatgcaggctggacagatcagtgttcagtcatctgagcctagctctccagagccaggcaaggtgaacataccagctaaaaacaatgaccagccgcaaagcgcaaatgcaaacgagccacaggatagcacggtgaacctacaatctcccctaaaaatgaccaacagcccggttctccccgtggggtcgaccactaatgggtccagatcgagcacaccaagtccctctcccctgaatctctctagtagtcggaacacacaagggtacctgtatactgcggagggcgctcaggaggaaccacaggtggagcctctggatctctccttgcctaagcaacagggtgagctgctggagaggtcgacaatcacctccgtgtaccaaaattccgtgtacagcgtgcaagaagaacccctgaatttgtcttgtgctaaaaaggaaccccagaaggacagctgtgttaccgattcagagcctgtggttaatgtgattcctccaagtgcaaacccaattaatatcgcaatccctaccgtaacggctcaattgccgactatcgttgccattgccgaccagaactcagttccgtgccttcgagccttggctgcaaacaaacagaccatcctcattccccaagtcgcatacacatattcgaccacggtatcccctgctgtacaagagccacccctaaaagtaatccagccgaacggcaaccaagatgagaggcaagacacaagctctgagggtgttagtaatgtggaagaccaaaacgacagcgactccacccctcccaagaaaaagatgcggaaaactgagaacggcatgtatgcgtgtgacttgtgcgacaaaatctttcaaaagtcttcatctttgcttaggcacaaatacgaacacacaggcaaacgccctcacgaatgcgggatttgcaaaaaagcctttaaacacaaacaccatcttatcgaacatatgagactgcactccggtgagaagccataccagtgtgacaaatgtggaaagagatttagtcatagtgggagttattcccagcatatgaaccatcgctacagctactgtaaaagagaagctgaagagcgcgatagcacagaacaggaggaagcaggccctgaaatcctcagcaacgagcacgtcggcgcaagagcaagtcctagccagggtgactctgatgagagagagagcctaaccagagaagaggatgaggatagcgagaaggaggaagaagaagaagataaggagatggaagaacttcaagaagagaagcacaaaaaaaaaaagtag

SEQ ID NO: 31610 - DNA, 1932 bp, synthetic construct
  misc_feature 1..1932: note = Description of Artificial Sequence: Synthetic coding sequence
  source 1..1932: mol_type = other DNA
atggcagatggaccacgttgcaagcgtcgcaaacaggccaatcctaggaggaacaatggaacaccggacgccttttcccagttactgacatgcccgtattgcgaccgaggatataaacggttcacatctctgaaggaacacattaagtaccgccatgagaagaacgaggacaatttcagttgttccctgtgctcatacacattcgcttatcgaactcagctagaaagacacatgacaagccacaagtccggccgtgaccaacgtcacgtcactcaatcaggatgcaaccggaagttcaagtgtaccgagtgtggcaaagcttttaagtacaaacatcacttaaaggagcacttgcgtattcactcaggggaaaaaccatacgaatgccccaattgtaagaaacgcttctcacattccggatcttattcctcacatatttctagcaaaaaatgtatcagcttgattccagttaatggaaggcccagaacaggcttaaagacgtcacagtgctcctctcccagcctgtcggccagccctggatcccccactcgaccccagattcgccagaagatcgaaaacaaaccccttcaggagcagctctccgtgaatcagattaaaaccgaaccagttgattatgagtttaagccgatagtagtggcctctggcattaattgcagcacccctctgcaaaacggcgttttcacgggcggagggccactacaagccaccagttcgcctcaagggatggtgcaggccgtggtgctgcctacagttgggttggtaagtccgatcagcattaacctgagtgacatccagaatgttttaaaggtggctgtcgacggcaatgtgattaggcaggtgctggagaataaccaggcaaatctagcctcaaaggaacaagaaacaattaatgcatctcctattcagcaaggcggacacagcgtcatctccgccatttccctgcccctcgtcgaccaggacggaactactaaaatcatcatcaattattccctggaacagcctagccagcttcaggtcgtgccacagaacttgaaaaaggagaatcctgtggcgactaatagttgcaagtcggaaaaactacctgaggaccttaccgttaagtccgagaaggacaagagcttcgagggaggagtgaatgactctacctgccttctgtgtgacgattgtcccggtgacattaacgccctgcctgagttaaagcactacgatttaaagcagcctactcaacctccgcctctgcctgccgctgaagccgaaaagccagagagcagcgtgagctctgccactggagacgggaatttgagcccatcacagcccccacttaagaatctgctgagcctcctcaaggcttattacgccctgaacgcccaaccttccgctgaggaattgagcaagatcgccgacagtgtgaatctgccactggacgtggtgaagaagtggtttgagaagatgcaggccggtcagatctccgtgcagtcatccgagccttcgagtcccgagcctggcaaagttaacatcccagcaaagaataacgaccaaccccagtcagcaaatgcaaatgagccacaggacagtacagtaaacctgcagtcgcccttgaaaatgaccaactccccagtcctgcccgtcgggtctaccacaaacggctcacgatctagtacgccttctcccagtcctttaaatctcagcagttcaaggaacacccaggggtacctgtatacagcggagggggcacaggaggaaccccaggtcgagcctcttgatctgtcgctcccgaaacaacaaggcgaggaggcaaaaaccgaaggcctgatgaaagacgaccgcgcagagtcgcaggcgagcagcctgggtcaaaaggtgggtgagagtagtgagcaggtgagcgaggagaaaaccaacgaggcctag

SEQ ID NO: 31611 - DNA, 3174 bp, synthetic construct
  misc_feature 1..3174: note = Description of Artificial Sequence: Synthetic coding sequence
  source 1..3174: mol_type = other DNA
atggcagacggcccacgctgcaagaggcgcaagcaagccaacccccgaaggaataatgggaaggagggtcaggagatcctcggtcccgaagctcaggccgatgaggccggatgcaccgtgaaggatgatgaatgtgaatccgacgcggagaatgaacagaaccacgacccgaatgtcgaggaatttttgcagcagcaggacacagctgtcatcttccccgaagcccctgaggaagaccagcgccaggggacaccagaagcgtccggccatgatgaaaacggcactcctgatgccttctctcaactactaacttgtccctactgcgaccggggatacaaacgcttcacatccttaaaggaacacattaaataccgccacgagaaaaatgaggacaatttctcctgcagtttgtgttcctacactttcgcttacagaacacagctggagaggcatatgacatcacacaagtcaggccgtgatcagcgtcatgtcacccagagcggttgtaacagaaaatttaagtgcaccgagtgcggtaaggcctttaagtataaacaccatctgaaggagcacctccggattcactctggggaaaagccctatgagtgccctaactgtaagaaacgcttttctcacagtggtagttatagttcccacatttcctctaagaagtgcatcagtttgattcccgtcaacgggcgaccgaggaccggcctgaaaacctcccagtgtagcagtccaagtctcagcgcttctccaggtagtcccacccgccctcagatccgacagaagatcgagaataagccactgcaagagcagttgtctgtaaaccagataaaaacagagcctgtggattacgaatttaagccaatcgttgttgcgtctggcataaattgctccactcccttgcaaaacggcgtgttcactgggggagggccactccaggccacgtcgtccccacagggcatggttcaggccgtggtgctgcccacagttggactcgtgtcccctatctccatcaatttgagcgatattcagaacgtattgaaagtggcagtcgacggcaacgtaattcgccaggtgctggagaacaatcaggcgaatctagcttccaaagaacaggaaaccattaacgcttcccccatccaacaaggtgggcactcagtcatcagtgccatctccctgcccctcgtggatcaggacgggaccaccaagataattatcaattatagcctggagcagcctagccaattgcaggtggtcccccaaaacctgaaaaaagagaatcccgtggctactaatagttgcaagtctgaaaagctcccggaagacctcaccgttaagagcgaaaaagataaaagtttcgagggcggtgtaaacgactcgacctgcttattgtgcgatgattgccctggcgatatcaatgcactgccggagctgaaacattatgacttaaagcagcctacccagccccctcctctgcccgcagctgaggccgagaagcctgaatcaagcgtctcaagtgccacaggtgatggtaatttgtctccaagccaaccaccactgaagaacttgctcagcctcctgaaggcctattacgcgttgaatgcccaaccttctgcagaagaactgtcaaagatcgctgacagcgttaatttgcccctcgatgtggttaaaaagtggtttgaaaagatgcaggctgggcagatttcagtacagagctctgagccctcctctcccgagcctgggaaggtaaatattcccgctaagaataatgaccagccacagtccgccaatgctaacgagccccaggattcaactgtgaacctgcaatcccccctcaaaatgacgaacagccctgtcctccccgtgggatccacaaccaatggatcccggagcagcacccccagcccctctcccctgaatctgtcatcaagccggaacacacaaggttacctgtatacggccgaaggggctcaggaggagccccaggtcgagccgctggaccttagcttacctaaacagcagggtgagttgctggagcggagcaccatcaccagcgtttatcagaattccgtctattcggtgcaggaggaacctctgaatctcagctgcgccaaaaaggagccccaaaaggatagctgcgttacagactctgagccagtggtgaacgtgatcccgccatccgccaatccgatcaacatcgctatccctaccgtgacagcccagctccccacaatcgtcgccatcgccgaccagaattcagtcccttgcctgcgcgcactagccgctaacaaacaaactattctgatcccgcaagtggcttacacgtatagcactaccgttagccctgccgtgcaggaacctcccttgaaagtgatccagcctaacggaaatcaggacgagcggcaggacacaagctctgaaggggtcagtaacgtggaggaccaaaatgacagtgatagtacgccaccaaagaaaaaaatgagaaagaccgaaaatggaatgtatgcatgcgatctatgtgataaaatttttcagaagtcctcaagcctgctgagacataagtatgaacacacagggaaacgcccacacgaatgcggcatttgtaaaaaggcgtttaaacacaagcatcatctgattgagcacatgcggctacattctggcgagaagccctaccagtgtgataagtgcggcaagagattttcgcatagcggatcatattcccagcatatgaatcatagatattcctattgcaaacgcgaggcggaagagagggacagtacagagcaggaggaggcaggccctgagatactttcaaatgaacatgtgggcgcacgggcttctcctagccagggcgactcagatgagagagagtctttaactagagaggaagatgaggatagcgagaaggaggaagaagaggaagacaaggaaatggaggagctgcaagaggaaaaggagtgtgagaaaccacagggcgatgaagaggaggaggaagaagaggaggaagtggaggaggaagaagtagaagaggccgaaaatgaaggagaagaggcaaagacagaaggtttgatgaaagatgacagagccgagagtcaggcttcctctctcggacagaaggtgggagaatcatccgaacaggtatccgaggaaaaaactaatgaagcttag

SEQ ID NO: 31612 - DNA, 3048 bp, synthetic construct
  misc_feature 1..3048: note = Description of Artificial Sequence: Synthetic coding sequence
  source 1..3048: mol_type = other DNA
atgatgaacgccagtcagatgcagaaaatgagcaagaccatgatcctgatgctgaaaagcttttataataacaagactctgctttcgttcttcctgaggcatcttaaacgcacccgcggacgtgcccaccagaagccagtcgtgatgatgaaaatggagcatcagatgcatttccacaactattctccagtgcatatagtgataggctacaagaggttcacctccttgaaagagcacatcaagtacaggcatgagaagaacgaagacaacttcagctgcagcttatgtagctatacgtttgcttatagaacccagcttgagcggcatatgacatcccataaaagtggtagagaccaacgtcacgttacccagtctggctgtaaccgaaagttcaagtgtaccgagtgtggaaaggccttcaagtataaacaccacctgaaggaacacctgagaatccatagtggggagaaaccatacgagtgccccaattgcaaaaaaagattttctcactccgggtcttatagttcccacataagctctaagaagtgcatttccctgatacctgtaaatgggagaccgaggactgggctaaaaacttctcagtgctcaagcccttctctcagtgccagtcctggcagccctactaggcctcagattagacagaaaatcgagaacaagcctctccaggagcagctgtctgtgaatcaaattaaaactgagccggtcgactatgagttcaagcccattgtggtagcatcaggcattaactgttccactccccttcaaaatggagtgttcaccggcggaggtcccttgcaggctaccagctcccctcaggggatggttcaagcggtagtgctcccgactgtgggactcgtaagtcccatcagcatcaatctatctgatattcagaatgtgctgaaggtcgccgtggacggtaacgtcatccgccaagtccttgagaataatcaggcaaatcttgcctctaaagaacaggagaccattaacgcgtcacccatccagcagggaggccactcagtgatttctgccatctcactaccactcgttgaccaggacggcactaccaagataataattaactacagcctagagcagccgagccagctgcaggtggtaccccaaaacctcaagaaggagaatccggtggccacaaacagctgcaaaagtgagaaactgccagaggatctgacggttaagtcggagaaagataagtcgttcgaggggggagttaacgactccacctgtctgctttgcgacgactgtcccggagacattaatgctcttccagagctgaagcactatgacttaaagcaacctacgcagcctccacccctaccggcagcagaggctgagaagcccgaatctagcgtgtctagcgctactggagacggcaatttaagtcccagtcagcctccgctgaaaaatctgctttcacttcttaaagcctattacgccctcaatgcccagccctcagccgaggagttaagtaaaattgcggatagcgttaatctccccctggacgtggtgaaaaagtggttcgagaaaatgcaagccggacaaatttccgttcagtcctccgaaccttcttctccagagccgggtaaggtcaacataccggctaaaaataatgaccagccacagagtgcaaatgccaatgaaccacaggattctactgtcaacctgcagtctccactgaagatgaccaactctcctgtactgcctgtgggcagtacaaccaatggcagtagatcgtccacaccttcaccttcacccttgaacctctcatcatccaggaacacccagggttatttatacacagctgaaggggcacaggaagaaccgcaagtggagccactggatctctctctgcccaagcagcagggtgaactgcttgagcgtagcaccatcacatctgtctatcagaattccgtgtactctgtacaggaggagcctctgaacctctcctgcgctaaaaaggagccccaaaaggatagctgcgtgacagacagcgaacccgtggtcaacgtgatacccccatcagctaaccccatcaatatcgctattccaacagtaacagcacaactgcctaccatcgtcgcaatagccgatcagaacagtgttccttgccttagagccctggctgcgaataagcagactattttaatcccccaggttgcatatacttatagtacaacggtatcaccagcggtccaagaacctcctctcaaggtaattcagcccaacggtaatcaggatgagcgccaagacacttctagcgaaggggttagtaatgttgaggaccaaaatgattccgactctacgcctccaaaaaagaaaatgcggaaaaccgagaacggcatgtacgcctgcgacctgtgtgataaaatctttcagaaaagcagttcactgctgaggcacaagtatgaacatacgggaaaacggccacatgagtgcggaatatgcaagaaggctttcaagcacaaacatcatctcattgaacatatgaggctgcactccggagaaaaaccataccagtgtgacaaatgcggaaagaggttcagtcatagtggatcctactctcagcacatgaatcacaggtactcgtattgcaagagggaggccgaagagcgagattctacagaacaggaggaggctggtccggaaatactatcgaacgaacacgtcggtgcacgcgcaagccctagccaaggggatagcgacgagcgagagtccctcacaagagaagaagacgaagacagcgaaaaggaggaggaggaagaggacaaagagatggaagagctgcaggaggaaaaagaatgcgaaaagccccagggtgacgaggaggaagaagaggaagaggaagaagttgaggaagaggaggttgaggaagccgagaacgagggcgaagaggcaaaaacagaggggctgatgaaggatgaccgagccgagagccaggcaagttccctcggccaaaaggtgggagaatctagtgagcaggtctcagaggaaaagacaaatgaagcgtag

SEQ ID NO: 31613 - DNA, 3360 bp, synthetic construct
  misc_feature 1..3360: note = Description of Artificial Sequence: Synthetic coding sequence
  source 1..3360: mol_type = other DNA
atggccgatggacccagatgtaaacggcgtaaacaagccaatccacgcagaaataacgttactaattacaatactgttgtggagactaatagcgattctgatgatgaggataagctgcatatagttgaggaggagtccgtcacggacgcagctgattgcgagggagtgcccgaagatgacctgcccacagaccagacagtgctgcctggccgttcttccgaacgtgagggtaacgccaaaaactgttgggaggatgatagaaaagagggtcaggaaatccttggaccagaggcacaggctgacgaggcaggctgcaccgtcaaggacgatgagtgtgaaagcgatgccgaaaacgagcaaaaccatgaccccaatgtggaagaattcctacagcaacaggacactgctgtgatattccccgaggcgccagaagaggaccaaaggcagggaacacctgaggcaagcggtcacgacgagaatggtaccccagacgcttttagccagctgctgacctgtccatattgcgatcgtggctacaaacgatttacttccttaaaggagcatatcaaatatcggcacgagaaaaatgaggacaattttagctgcagcctgtgcagctacaccttcgcgtatcggacccaattagaaagacatatgactagccacaaaagcgggcgagatcagcggcacgtaacacagtcggggtgcaaccggaaattcaagtgcactgagtgcgggaaggctttcaaatacaagcatcacttgaaggaacaccttcgaattcactctggtgaaaaaccatacgaatgtccgaattgcaaaaagaggttcagccactccggaagctacagttcccatattagcagcaaaaagtgtatcagtctgatccccgtcaatggaagaccacggacgggtctgaagacatcccaatgttctagcccaagcctgagcgcctccccaggctcccccaccagaccacaaattcgacaaaagattgaaaacaaaccccttcaggaacagctttccgtgaaccaaattaagactgaacccgtagattatgagtttaaaccaattgtggtagcaagcggcattaactgtagcacacctctacaaaatggtgttttcactggcggtggacccctccaggccacaagcagcccccagggaatggtgcaggcggtggtgttgcccaccgttgggctcgtcagccctatatcaatcaatttaagtgacattcaaaacgtgctgaaggtcgccgtggacggcaatgttattagacaggtgttagaaaacaaccaagctaacttggcttcaaaagagcaggagactatcaatgcctcccccattcaacagggagggcatagcgtgatctccgctattagcttaccactcgttgaccaggacggcactacaaagatcattatcaattactctttggagcaaccttcacagctgcaagttgtacctcagaacctcaagaaggagaacccggtggccacaaatagctgtaagtcggagaaactgcctgaggacctgactgttaagagtgaaaaggacaagtcttttgagggtggcgttaacgactcaacgtgtttattgtgcgatgattgtcccggagatattaatgccctaccagaattgaagcattatgacctgaaacagcctacacaaccacctcccctgcccgcagctgaagccgaaaagcccgagagctctgtaagttcggcaaccggggatggcaacctgtcacctagtcagccaccactgaaaaatctcctaagcttgttgaaagcttattatgcactcaacgctcagccctctgcagaagagctctccaaaatcgccgactccgtcaatctgcccctcgatgttgttaagaagtggttcgagaagatgcaggccggtcagatatcagtacaaagttcagaaccatcgagccccgaacccggaaaggttaatattccggcaaaaaataacgaccagccccaatctgctaatgcaaatgagcctcaagattcaactgtgaaccttcaaagcccattgaagatgacaaatagcccagtgctgccagtagggagcactactaacggcagccggtctagcactccaagcccttcccctttgaatctctccagtagtagaaacactcagggatatctatatactgctgagggcgctcaggaggagccgcaggttgaaccccttgacttgagtctgccaaagcagcagggtgagctactcgagcgttcttctctgcctgagcagtgtctgttctgtccaggccgtaccctggaactggttctgaaaaaggagcctcagaaggattcctgcgtgaccgactccgaaccggtagtgaacgtaatcccaccctccgccaaccctatcaatatcgcaatccccaccgtgactgcccaactgcctaccattgtggcaatagctgatcagaatagtgtcccttgcctgcgcgctttggctgcgaataagcagaccattcttatacctcaggtcgcatatacatatagcaccacggtgtctcctgctgtccaggaaccaccactaaaggtgatccagcccaacggcaatcaggacgagcgacaagacacctcatccgagggcgtttccaatgtggaggatcagaacgattcagattccactcccccaaagaagaagatgagaaagaccgaaaacgggatgtacgcttgcgatctgtgtgacaagatctttcagaaaagctcctccctccttagacacaagtatgagcataccggcaaacggccacatgaatgtggtatatgcaagaaagcctttaaacacaaacatcatctcattgaacacatgcggctgcactccggagaaaaaccgtatcagtgtgacaagtgtggaaagaggttcagtcattctggaagctactctcagcatatgaatcatagatactcgtactgtaagagggaagctgaggagcgcgattcaacagagcaggaggaggccggtccggagattctttccaacgaacatgtgggtgctagagcctcaccctcacagggagattcagacgaacgagagtccttgacacgcgaggaggatgaggattccgagaaagaagaagaagaagaagataaggaaatggaggaacttcaggaggaaaaggagtgcgagaaacctcagggtgatgaggaggaagaggaggaggaagaggaggtggaagaagaggaggtggaagaggcagagaatgagggcgaagaagccaagaccgagggtttaatgaaggacgacagagcggagagtcaggctagttccctgggacaaaaggtgggcgagagttctgaacaggtctctgaagaaaagactaatgaggcctag

SEQ ID NO: 31614 - DNA, 834 bp, synthetic construct
  misc_feature 1..834: note = Description of Artificial Sequence: Synthetic coding sequence
  source 1..834: mol_type = other DNA
atgaaagtcaccaactataatacagtagtggaaactaactctgattcggacgacgaagacaaattgcacattgtagaagaggagagtgttacagacgccgcagactgtgagggcgtgcctgaagacgacctcccaaccgaccagactgtcctaccaggacgcagctccgagagggagggcaatgctaaaaactgttgggaagatgatactggcaaagagggtcaggagattttgggcccagaggcccaggctgacgaagccggttgcactgtaaaagacgacgagtgtgagtccgacgccgagaatgaacaaaatcatgatccaaatgtcgaagaattcttgcagcagcaggacaccgccgtcattttccctgaagccccagaggaggaccagaggcagggcaccccagaagcaagtggtcatgatgagaacgggacacccgacgccttctcccagctgcttacatgcccctactgcgacagggggtataaacgtttcacgtctctgaaggaacatattaaataccggcacgaaaagaacgaagataacttctcctgctccttgtgctcttacaccttcgcgtataggacacaacttgaaagacacatgaccagccacaaaagcggaagggaccagcgacatgtgactcagtccggctgtaatcggaagttcaaatgcaccgagtgtggaaaagcattcaaatataagcatcatcttaaggagcacctccggatccattccggagaaaagccttacgagtgccctaactgtaagaagaggttcagccactccggaagctattcttcccatatctcatccaaaaagtgcatctag

SEQ ID NO: 31615 - DNA, 3315 bp, synthetic construct
  misc_feature 1..3315: note = Description of Artificial Sequence: Synthetic coding sequence
  source 1..3315: mol_type = other DNA
atggcagatggcccacggtgcaagcgcagaaagcaggcaaaccctcgccgaaataacgttaccaactacaacacggtggtcgaaacaaactccgactctgatgatgaggacaagctacacattgtggaggaagagagcgttactgacgccgctgattgtgagggtgtaccagaagacgatctgcccaccgaccagacagtgctgccagggaggagctctgagagagaggggaatgccaagaattgctgggaagacgacattaaggatgacgagtgtgaaagtgacgccgaaaacgaacagaatcatgatcccaatgtggaggaattcctgcagcagcaagataccgccgtgatcttccccgaggcacccgaggaggatcagcgccaggggacgccagaggccagcggacacgatgagaacggcacccccgacgccttcagtcaattgctgacctgcccatactgcgacagaggatacaagagatttacctcactcaaagagcatattaagtatcggcatgagaagaatgaggataacttttcctgtagcctgtgtagctatacgttcgcctatcggactcagctggagaggcacatgacctcccacaagagtgggagagatcagaggcatgtgacacagagcggctgtaaccgcaagttcaagtgcactgagtgcgggaaagcttttaagtacaagcaccatttaaaagaacatttgaggattcattctggcgaaaaaccttacgagtgtccaaactgtaagaagagatttagtcactcaggatcatattcctctcacatctctagcaagaagtgtataagtctgattcccgttaacggaaggcccagaaccggactcaaaactagccaatgttctagccctagcctatccgcctcaccaggctcccccaccagaccccaaattcgtcagaagattgagaacaaaccattgcaagaacagctatctgtgaatcagatcaaaaccgagccagttgactacgagttcaagcctattgtcgtggctagcggcataaattgcagcactcctctgcaaaacggggtctttacaggaggagggccattgcaggccacgtccagcccccagggaatggtacaggccgtggtgctgccaacagtcggattagtgtccccaatcagcatcaacctgagcgacattcagaatgtgttaaaggttgctgtcgatggcaacgtcatcaggcaagtgcttgagaacaatcaggccaacctggcgagtaaggagcaggagaccatcaatgccagccccatccagcaaggcggacattcagtgatcagcgccatctctctgcctttggtggaccaagacggcaccacaaagattattatcaactatagcttagaacagccttcccagctacaggtagtgccccagaatttgaaaaaagaaaatcctgtcgccacgaactcttgtaaatccgaaaaacttccggaggacctgactgttaaaagtgaaaaggacaagtcttttgagggaggcgtaaatgacagcacctgcctactctgcgacgactgtcctggagacattaacgctctgcccgagctcaaacactacgacctgaaacagcccacacagccccctcccctgccagctgccgaggcagagaagccagagagctccgtctccagtgctacaggcgatggaaatctgtccccttctcagcccccactgaaaaatcttctgtccctacttaaagcttactacgcactgaacgcccagccctcagcagaggaattgtctaagatcgccgattccgtgaacctgcccctcgatgtcgtgaagaagtggttcgaaaagatgcaagctgggcaaatatcagtgcagtcctcagagccttcctcgccagagccagggaaagtgaatattcctgctaagaataatgaccaaccgcagtccgccaacgctaatgagcctcaggacagcaccgtgaatctgcagtctccactaaaaatgactaattcaccagttctgcctgtcggctctactaccaacggctccaggagcagcactccaagtccctcccctttgaatctctcttcttccaggaacactcagggatacctgtatacggctgagggtgcccaggaggaaccccaggtcgaacctctcgatcttagccttcccaaacagcagggagagctgctcgagcgttcgacgatcacaagtgtctaccaaaacagcgtctattctgtgcaggaagagccactcaacctctcttgcgcgaagaaggagccacagaaggacagctgcgttactgactcagagccagtggtgaacgtgatccctccatcagcaaacccgattaatattgccataccaacagtgactgcacagctgccgaccattgttgctatcgccgatcagaactccgtgccatgtctgagggccctggccgcaaacaaacaaactattctgattccccaggtagcttatacctacagcacaactgtgtcccctgcggtccaggagccgccactgaaggtaattcagccaaacggcaatcaggacgagcgccaggataccagctctgagggtgtgtccaacgttgaggaccagaacgacagcgactccacaccacctaaaaagaaaatgaggaaaacagaaaatggtatgtacgcgtgcgacctgtgcgacaaaatattccagaagtctagctctctcctgcgacataagtacgaacatacaggaaagagacctcatgaatgcggaatatgcaagaaggcttttaaacataagcatcacttgatcgagcacatgcgactccattccggggagaagccttatcaatgtgataagtgtggaaaacggtttagtcactctggaagttatagtcagcacatgaaccaccgctactcttactgcaagcgcgaggcagaggagcgggacagcactgaacaggaggaagccggtcctgagatcctgagcaacgagcacgttggggctcgcgcatcaccgtctcaaggggactcagacgaacgcgaatcgctgactcgggaggaagacgaggactctgagaaagaagaagaggaagaggataaggagatggaagagttgcaagaagagaaggagtgtgagaagccacagggtgacgaggaggaagaggaggaagaagaagaagttgaagaggaggaggtggaggaggctgagaatgagggcgaggaggccaaaaccgagggcctcatgaaagatgatagggctgagagtcaggcctcgtctctgggccaaaaggtgggggagtcatctgagcaggtgtctgaggaaaagacaaatgaggcctag

SEQ ID NO: 31616 - DNA, 3645 bp, synthetic construct
  misc_feature 1..3645: note = Description of Artificial Sequence: Synthetic coding sequence
  source 1..3645: mol_type = other DNA
atgaagcaaccgattatggccgacggcccacggtgtaaaaggagaaaacaggccaatccacgcagaaaaaatgtagtgaactatgataacgtcgtggacaccggctcagaaacagatgaagaggacaagcttcacattgccgaagatgacggaatcgcgaatccgttggaccaggagacgtcacccgcttcggtccccaaccatgagagctcaccacacgtttctcaggcactgctgcctagagaggaagaggaagatgagatcagggaagggggagtagaacacccatggcataacaacgagatcctacaggcttccgtggacggcccagaagagatgaaggaggactacgacaccatgggtccggaggctaccatacagactgccatcaataatggaactgtcaaaaacgccaattgcacgtcagacttcgaggagtacttcgcaaaacgaaagctcgaggaacgggatggacacgcggtctccatagaggagtatctccagaggtcagatactgccatcatctacccagaggccccagaagagttgtcccgcctcggtaccccggaggcaaacgggcaggaagaaaacgatttgccacctggaacacccgatgccttcgcacaacttttgacctgcccctactgtgatagggggtataaacgtctgacctctttgaaggagcatatcaagtacaggcatgaaaaaaatgaggaaaactttagctgtcccctgtgctcctatacctttgcctatcggactcagctggaaaggcatatggtgacgcacaaaccgggaacagatcagcaccaaatgctgacgcagggagccggtaacaggaaattcaagtgcaccgagtgtggtaaagccttcaaatataagcatcacctaaaggagcaccttagaatccactctggggaaaaaccgtacgagtgcccaaactgcaagaagcggttcagccattcaggctcttactcctcccacatatctagcaaaaaatgcataggtctgatcagtgtaaacggacgaatgaggaacaatatcaaaaccggttccagcccaaatagcgtctctagttctcccactaactccgctattacgcagctgcggaacaaattggagaatgggaaacccctatctatgtctgagcaaacaggcttgctcaagatcaaaacggaacccttggatttcaatgattacaaggtccttatggctacccatggcttcagtggaacttcaccatttatgaacgggggactgggggctacaagccccctgggagtccacccctctgctcaatcccctatgcaacatctgggagttggaatggaagccccactcttaggattccctactatgaacagtaatctcagcgaggttcagaaggtgcttcagattgtcgacaatacggtgtcccggcagaagatggactgtaaagcagaagaaatctcaaaactgaaaggatatcatatgaaggatccgtgttctcagcctgaagaacagggcgtcacttcaccaaacattccacctgtcggactgcccgtggttagtcataatggagcaaccaaatccatcattgactataccttagagaaggtaaacgaagcaaaggcgtgtctgcagagtctgaccacagactcaagaaggcagatcagcaatatcaagaaggaaaaactaagaacgctgatcgatctggttacggatgataagatgattgaaaatcacaacatatcaacacctttcagttgccaattttgtaaggagtctttcccaggcccaatacctctccaccaacatgaaaggtatctatgtaaaatgaacgaggaaattaaggcagtactgcagcctcatgaaaacatagtgcctaacaaagccggtgtcttcgttgacaacaaagcactcctcttaagcagcgttctgagtgagaaaggcatgacaagtccaattaatccctacaaggatcacatgtctgtactcaaggcctactatgcaatgaacatggagcccaattctgacgagttgcttaaaatcagcatagctgtcggtttacctcaggagttcgttaaagaatggtttgaacagagaaaggtgtaccaatactcgaatagccgctccccgtccttggagcgtagctcgaagcctcttgcaccaaacagcaaccctcccaccaaggactctctgctcccacgaagtccagtgaaacccatggactccataaccagcccctccattgccgaactgcataatagcgtgactaactgtgatccacccctgcgactgactaaaccgtcgcacttcactaacatcaagccggtcgagaagctggatcattcaagaagcaataccccatctccgctgaatttgagctcaacaagttctaaaaacagtcatagtagttcctacacccctaacagtttctccagcgaagaattacaggccgaacctcttgaccttagtctgcccaaacaaatgaaagaacctaaaagtataatagccacaaagaacaagaccaaggccagtagcatctccctggatcacaatagcgtttcttcatccagtgagaactccgacgagccactgaatctaaccttcataaagaaagagttttctaacagcaacaaccttgacaacaagtctacgaaccctgtattttccatgaacccattttccgcaaaaccactgtacacagcgcttcccccacagtctgcattcccgcctgccactttcatgccaccggtgcaaacgtcgatccccggactgcgtccttaccctgggctcgatcagatgtcgtttttaccccatatggcctacacctatcctacaggagccgcaaccttcgcagatatgcagcaacgccgaaagtaccaaagaaagcagggttttcagggcgaattgttagacggcgcacaggattatatgtctggtctcgatgatatgaccgactctgattcctgcctgtccagaaagaaaattaagaaaacggagagcggaatgtatgcatgcgacctgtgcgacaagacgttccagaagagcagttctctgttgcggcacaagtatgagcacacgggcaaacgccctcaccagtgccagatctgtaaaaaggccttcaaacataagcaccatttaatagagcatagtcggctgcattcaggcgagaagccttatcagtgtgacaagtgcggaaaacgcttctcacactcggggagctactctcaacacatgaatcacaggtactcatattgtaaaagagaggctgaggaaagagaagctgcagagcgagaggcaagggagaagggccaccttgagcccacagagctcttgatgaaccgcgcatacctacagagtattacccctcagggctactccgattctgaagagcgtgagagcatgccgagagatggggagagcgagaaagaacacgaaaaggagggtgaagatgggtatgggaaacttgggagacaggatggcgacgaggagtttgaggaggaagaagaggagtctgaaaataaaagtatggataccgatcccgaaaccattcgcgatgaggaggagacaggcgaccactccatggacgattccagcgaagatggcaagatggaaacaaagtctgaccatgaagaggacaatatggaagatggcatgtag

SEQ ID NO: 31617 - DNA, 1275 bp, synthetic construct
  misc_feature 1..1275: note = Description of Artificial Sequence: Synthetic coding sequence
  source 1..1275: mol_type = other DNA
atggcagatggacctaggtgcaaacgtagaaaacaagccaatccacgcagaaaaaatgtggtcaattatgacaacgtggtggacaccggctccgagaccgatgaagaggacaaattgcatatcgccgaagacgacggaatcgctaacccgctagaccaggaaacttcccccgcttcggtccccaatcatgagagctcaccacatgtcagtcaagccctgctgccgagggaggaggaagaggatgagatcagggaaggaggagtggagcatccatggcacaataacgagatcctccaggcatctgtggacggtcctgaggagatgaaggaggattacgataccatgggcccagaagctacaattcagaccgccatcaataatgggactgtgaagaacgcgaactgtacaagcgattttgaagagtactttgccaagcgtaagcttgaagagagggatggccacgcagtctctatcgaagaatacctacagagatcagataccgccatcatttaccccgaggcacctgaagagctcagccggttgggcacacccgaggccaacggccaggaggaaaatgacttgcccccaggaactcctgacgcatttgctcagcttctgacatgtccctactgtgatagagggtacaaacgtcttaccagcctgaaggaacacattaaataccgtcatgagaaaaacgaggagaatttcagttgtcctttgtgttcctatactttcgcctataggactcagctggaacggcatatggttacacataagccagggactgatcaacatcaaatgctcacccaaggtgccggaaatcggaaatttaaatgcacagagtgcgggaaagcatttaagtacaagcaccatttgaaagagcatcttcgaatccactccggagagaaaccttacgaatgcccgaattgcaagaagcggttctcacacagtggctcctactcaagccacatctcatccaaaaagtgcattggacttatctccgtcaatggacgaatgaggaataatatcaaaacagggagctcccctaactcagtgagctcaagtcccacgaactccgctataacacagctacggaacaagctggaaaacggtaagccactgtcaatgtccgagcaaaccgggttactgaagtccgggcgtgcccagtggctgacgcctctgatccccgcactgctcgaggccgaagtggggaggtcacgtggacagaagatagagactctactcgccaatatggttgagcccagactgtattag

SEQ ID NO: 31618 - DNA, 1320 bp, synthetic construct
  misc_feature 1..1320: note = Description of Artificial Sequence: Synthetic coding sequence
  source 1..1320: mol_type = other DNA
atgaagcagcccatcatggcagatggaccacgatgcaaacggagaaaacaggccaaccccagacgtaagaatgtggtgaactatgacaatgtggtggacactgggagtgagacggacgaagaggacaagcttcatatcgccgaagatgatggcattgctaatccattggaccaagaaacgtccccagcatccgtcccaaatcatgagtcaagcccccacgtgagtcaggccctgctgccacgtgaagaagaagaggatgaaatcagggaggggggagtggaacacccatggcataataatgagatccttcaagcttcagttgacggaccagaggagatgaaggaagattacgacacaatggggccagaggccactatacagacggcaataaataatggcacagtcaagaacgccaactgcacatcagacttcgaagagtacttcgctaagagaaaactagaagaaagagatggccacgcggtctctatcgaggaatacctgcagagatctgacacagcaattatctacccagaagctcccgaagagttgagcaggctgggaacccctgaagccaacggtcaggaggagaatgacctgccacccggaaccccagacgcatttgctcaactgctcacttgtccttattgcgataggggctacaagcggctgaccagccttaaagagcacatcaagtacaggcacgagaagaatgaagaaaacttctcctgtcccctctgctcctatacctttgcctaccgcacccaactggagagacacatggttactcacaaaccgggaacagatcagcatcagatgctgacccagggtgctgggaatcgcaagttcaaatgcacagagtgcggaaaggccttcaaatataaacaccatctcaaggagcatctgagaatccattctggagagaagccctatgaatgtccaaattgtaagaaacggttttcacactcgggatcttattcctcacatatctcctcaaaaaaatgtatcggtctgatcagtgttaacgggcgaatgcgtaataatatcaaaactggctcttcgcccaatagtgtctcatccagtccaacaaacagtgctattacgcagctgaggaacaagcttgagaatggcaagcccttaagcatgtctgagcagacaggcctgctgaagatcaagaccgagcctctagattttaacgactacaaagtcctgatggctacccacggatttagcgggacatctccattcatgaacgggggattaggggctacttcccccctgggagtacatccttcagctcagtcgcctatgcagcacctgtag

SEQ ID NO: 31619 - DNA, 408 bp, synthetic construct
  misc_feature 1..408: note = Description of Artificial Sequence: Synthetic coding sequence
  source 1..408: mol_type = other DNA
atgaaacagcctattatggctgacgggcctcggtgcaaaaggaggaagcaggccaacccaaggagaaagaacgtggtgaactatgacaacgtagtggacaccggaagtgagaccgatgaggaggataagctgcacattgccgaagatgacgggatcgctaatcctttagaccaagagacttcacctgctagtgttccaaatcatgagagttccccacacgtcagccaggccttgctccctcgagaggaagaggaagatgagattagggagggcggagttgagcacccctggcataacaacgagattttgcaagcttccgtggacggccctgaagagatgaaagaagactacgacacaatgggacctgaggccacaatacagacagccatcaacaatggtacagggtag

SEQ ID NO: 31620 - DNA, 3645 bp, synthetic construct
  misc_feature 1..3645: note = Description of Artificial Sequence: Synthetic coding sequence
  source 1..3645: mol_type = other DNA
atgaagcagccaatcatggctgacggtccacgttgtaaacgcagaaagcaggcaaacccacgccgaaaaaacgtggtgaactacgataatgttgtggatacagggtcggagaccgacgaagaagacaaactgcacatcgccgaggacgacggaatagccaacccgttggatcaggagacctctcccgcttctgtccctaaccacgaatcatcgcctcatgtatcacaggctctgctgccacgcgaggaggaggaggatgagatacgcgagggtggcgtggagcatccttggcataacaatgaaatcctgcaggcctctgttgacggcccagaggagatgaaagaggattacgatacaatggggccagaagcgaccattcagacagccatcaataacggcaccgtgaagaatgcgaactgcacgagcgattttgaagagtatttcgctaaaagaaaactggaggagagggatggccatgccgtgagcattgaggagtacttgcaaagaagtgacacggcaatcatttatccagaggcaccggaagagttaagcagactgggcacgcctgaggcaaacggccaagaagagaacgatctcccgcctggcacccccgatgccttcgcacagctgcttacgtgcccatactgcgatagaggctataagaggcttaccagtctaaaggagcacatcaagtaccgacacgaaaagaacgaagaaaacttctcctgccccttatgcagctatactttcgcttaccgcacacagctggaacgccacatggtcacccataaacccggtactgaccagcatcagatgctgacccaaggtgccggaaatcggaaattcaaatgcacagagtgcgggaaagcttttaagtataaacatcacttgaaagagcatcttcgcatccactctggagagaagccttatgagtgccctaactgtaagaaacgcttctctcatagtggatcttatagctcgcatatttcttctaagaaatgtatcggactgatctcggttaatggcagaatgcggaacaatataaagacaggcagctcccctaactccgttagttcctcccctactaatagcgccatcacacaacttaggaataaactcgaaaacggcaagcccctgtctatgtccgagcaaaccggccttctgaagattaaaacggaaccgctagattttaatgactacaaagtcctgatggcgactcatggcttttccgggacgtctccctttatgaatggaggtctgggagccacgtcgcccctgggagtgcaccctagcgcacagagcccaatgcaacaccttggggtgggtatggaagcccctttgctcgggttcccaacgatgaactctaacctcagcgaagtccagaaggttctgcagatcgtggataacaccgtcagtagacagaaaatggattgcaaagctgaggaaatctcaaagcttaaggggtaccacatgaaagatccttgctcacaacctgaggaacaaggggtgacttccccaaatatacccccagtgggattgcccgtggtcagccataacggggcaaccaagagcataattgattataccctcgagaaagttaatgaagcgaaggcctgcttacaaagtctgacaaccgatagccgacgacaaatttctaatatcaagaaggaaaagctccggacacttatagatttagtcaccgacgataagatgatcgaaaatcacaacatcagcactccattttcctgccaattctgtaaggaatccttccctggtccaatcccactgcatcagcacgagcgctacctgtgcaagatgaacgaagagataaaggcagtgctgcagccacacgagaatatcgtgccaaacaaggctggtgttttcgtcgataataaggcacttctcctgagctcagttctctccgaaaaggggatgacgagcccaattaatccgtataaagaccacatgagcgttctaaaagcctattatgccatgaatatggaacctaactctgatgaactactgaaaatctctatcgctgtgggcttgccccaggagttcgtcaaagagtggttcgagcagagaaaggtgtaccagtattccaactccagatctccttcactcgagcgttcttctaagcccttggctccgaatagcaatccacctactaaggacagcctactccctaggagtcccgtgaagccaatggactcaataaccagtccgagtatagctgagctgcataactctgttaccaattgtgaccctcccctgcgcctgactaagccttcccattttactaatattaagccggtcgagaagcttgaccactcaagaagcaatactcccagccccttgaaccttagctccacatccagcaagaacagtcatagtagttcctacacgccaaactccttcagctcagaggaacttcaggccgaaccactggacctgagtctgcccaaacagatgaaagagccgaaatcaataatagccaccaagaataagacaaaggcttcgagtatctctctggaccataatagtgtgtccagctcctcggagaattcagacgagcctctgaacctgacatttatcaaaaaagaattctctaattccaataaccttgacaacaagtcaacaaatcctgtgttttccatgaaccctttttcagcgaaacccttgtacacggccctgcctcctcaaagtgcattcccccctgccacattcatgcctccagttcagacatctatcccaggcctgcgtccataccctggacttgatcagatgtcttttctgccccatatggcatacacatatccgaccggtgccgctacttttgcagacatgcagcagagacgcaaatatcagcgtaagcagggttttcagggagagctgctggacggggcacaggattatatgtctggacttgatgatatgaccgatagtgactcttgtctgagccgaaagaaaataaagaagactgaaagtggcatgtacgcgtgcgacttatgcgacaaaaccttccagaagagcagctctttactgagacacaaatacgagcacactggtaaacgtccccaccagtgtcagatttgcaagaaagcgtttaagcacaaacaccatttgatagagcacagcagacttcatagcggagaaaagccatatcagtgtgacaaatgcggcaaaagatttagccactcgggctcttacagccagcacatgaatcaccgctatagttactgtaagcgggaagcggaagagagagaggcggcagagagggaggcccgagaaaagggccatctggagcccaccgagctccttatgaatcgggcttatttgcagtccatcacgccccaaggctacagcgactctgaggaacgcgagtccatgcctcgtgacggcgagagcgaaaaggaacacgaaaaagaaggtgaggacggctatggcaagttgggcagacaggacggagacgaggagttcgaggaagaggaggaggagagtgagaacaaaagtatggacaccgatcctgagaccattagagatgaggaggagacgggagaccactctatggacgactctagcgaagacggtaaaatggagaccaaatctgaccacgaagaggataatatggaagacggtatgtag

SEQ ID NO: 31621 - DNA, 2109 bp, synthetic construct
  misc_feature 1..2109: note = Description of Artificial Sequence: Synthetic coding sequence
  source 1..2109: mol_type = other DNA
atgaagcagcctattatggcggatggacctcgctgtaaaaggagaaaacaggccaatcctagaagaaagaatgtcgtaaactatgacaatgtggtcgacactggctccgagacagatgaggaggacaaactgcacatcgccgaagatgacggcatcgcgaatccgctagatcaggaaacctccccagcaagcgtccctaatcacgagtcttccccccacgtctctcaggctcttctccctcgagaagaggaggaggatgaaattcgggaggggggtgtggaacatccttggcataacaacgagatccttcaagcatccgtggacggcccagaggaaatgaaggaagattatgacacaatgggtcccgaggcaaccattcagaccgccatcaataacggcaccgtcaaaaacgccaactgtaccagcgattttgaggagtacttcgctaagcgtaagctggaggagcgggacgggcacgctgtgtcaatcgaggaataccttcaacgatccgataccgcaatcatctatcccgaggctcctgaggaactgagtaggctcgggacacctgaggctaacggccaagaagagaacgatctgcccccaggcacacctgatgctttcgctcaactgctgacgtgcccatactgtgatcgcggttacaaaaggctgacgagcctgaaagagcatattaagtaccgccacgagaagaatgaagagaacttcagctgccccctctgtagttatacattcgcgtaccgcacgcaattggagcggcacatggttacacataaaccgggaaccgaccagcatcagatgcttacccagggcgcagggaacagaaagtttaaatgtaccgagtgtgggaaagctttcaagtataaacatcacctgaaggagcatttacggatacacagtggggagaaaccttatgagtgtcccaactgtaaaaaacgcttttcccattctgggagctactcaagccatatctcgagcaagaagtgtatcggcctgataagtgtgaacggcagaatgaggaacaatattaaaaccggatcgtctccgaattctgttagctcatcacctaccaacagcgccatcactcagctgaggaacaagcttgagaacggcaagcccctgtcgatgtctgagcaaaccgggctcctgaaaatcaagacggagcccctcgatttcaatgactacaaagttcttatggccacccacggattctctggcacgagcccattcatgaacggcggattaggcgctacgagcccactgggtgttcatccctcagcccagagtccgatgcaacatctgggtgttggaatggaggctcctcttctgggctttcccacaatgaattccaatcttagtgaggtgcagaaagtgctgcagattgtggataataccgtgagccgacagaagatggactgcaaggcggaagagatctccaagctcaagggctatcacatgaaggacccttgttcacaacccgaggagcagggtgtgacatccccgaatatcccccctgttggactcccagtggtgtcacacaacggagcaactaaatccattatcgactatactctcgaaaaggtgaacgaggctaaagcctgcctgcagtcactaaccacagatagtcggaggcaaatttcaaacatcaaaaaggagaagcttcgtaccttaatcgacctggtgacagatgataaaatgatcgagaatcacaacatttctacaccgttttcctgccaattctgcaaagagtcttttccaggaccaatcccacttcaccagcatgagcgttacttatgcaaaatgaatgaagagataaaagccgttctgcagccacacgagaatatagtacctaacaaggccggagtgttcgtcgacaataaggctttgctgctcagttcagtgctgtctgagaagggcatgacttcacctattaacccatataaggaccacatgtcggttttgaaggcttactatgctatgaacatggagccaaatagcgacgaactcctcaaaatctctatagcagttggtctgccccaggagttcgttaaggaatggttcgagcaacgtaaggtataccagtattcaaactag

SEQ ID NO: 31622 - DNA, 276 bp, synthetic construct
  misc_feature 1..276: note = Description of Artificial Sequence: Synthetic coding sequence
  source 1..276: mol_type = other DNA
atgaagcaaccaatcatggcagatgggcctcggtgtaaacgaagaaaacaagcgaaccccaggagaaaaaatgtggtgaactacgataatgtagtggacacaggtagcgagactgatgaggaagataagctacacattgccgaggacgatggcattgctaaccccctggaccaggaaacatctcccgcatctgtccccaaccatgaatcttcacctcatgtcagtcaggcactgctgcccagagaggaggaggaagatgagatccgtgagggttag

SEQ ID NO: 31623 - DNA, 192 bp, synthetic construct
  misc_feature 1..192: note = Description of Artificial Sequence: Synthetic coding sequence
  source 1..192: mol_type = other DNA
atgaaacagcctatcatggcagatggccctcgttgcaaacgaaggaagcaggccaacccgagacggaagaacgtggtaaactacgataatgtggtggataccgggtctgaaactgatgaggaagataagctgcacatagccgaagatgatggaattgccaacccactcgaccaagagacatctcccgcttag

SEQ ID NO: 31624 - DNA, 3573 bp, synthetic construct
  misc_feature 1..3573: note = Description of Artificial Sequence: Synthetic coding sequence
  source 1..3573: mol_type = other DNA
atgaagcagcctatcatggctgacggaccacggtgcaagcgaagaaagcaggccaaccctcggcgtaagaacgttgtaaattacgacaacgtggtggacactggctctgagactgatgaggaggacaaactacatatagccgaggacgacggcattgccaacccccttgatcaggagacatccccagccagcgtacctaatcacgagtcatctcctcatgtaagtcaggccttgctgccaagggaggaggaagaggacgaaatacgcgaaggcggagtcgaacacccttggcataataatgaaatcttgcaagcctcggtcgatgggcctgtgaaaaatgccaattgtacgtcagacttcgaagagtatttcgcaaagcggaagttagaagagcgcgatgggcacgccgtctccattgaggagtacttgcagagatccgacaccgccataatctatcctgaggcacctgaggaactatccaggctcggcacccccgaagcgaatggacaggaggagaacgacttacctcccggtacgccagatgcattcgctcagctgctcacatgtccctactgtgaccggggttacaagagattgacatctctgaaggagcacatcaaatataggcacgaaaaaaatgaggaaaactttagttgccccctttgctcttacactttcgcatacagaacccaactggaaagacacatggtgactcacaaaccaggaaccgaccagcaccagatgctgacccaaggagcagggaacagaaagttcaagtgcactgagtgcggcaaggcctttaagtacaaacaccaccttaaagaacatctaagaatccacagtggagaaaagccgtatgagtgccctaactgtaaaaaaaggttttctcattctggcagttactcatcacatatctcaagtaagaaatgtatcgggctgatcagtgttaatggaagaatgagaaacaatattaagacgggctcgtccccgaatagcgtttcaagttctccaacaaatagtgctataacccagttgcgcaacaagctcgaaaacgggaaacctttatctatgtctgagcagacaggattattgaagatcaaaaccgagcctctggattttaatgactataaagtgctaatggctactcatgggtttagcgggacatctccctttatgaacggtggactgggcgcaacatcgccactaggtgtgcatccttctgctcagagccctatgcagcatctcggcgttggtatggaggctcctttgctgggttttccaacgatgaactccaatctgtcagaggtgcaaaaggtgctccagattgtggacaatactgtaagtcgccagaagatggactgcaaggctgaagagattagcaagctgaagggctatcatatgaaggacccatgcagccagccggaggaacaaggtgtcacatctccaaatatccctcccgtgggtttgcccgtagtttcccacaatggcgctaccaagtccataatcgactatacgctagaaaaggtgaacgaggccaaagcatgtctccaaagtttgaccaccgattcaaggcgccagatctcgaacattaaaaaagaaaaactgcgcactttgatcgatttagtcacagacgataagatgatcgagaaccacaatatctcgacaccattttcttgccagttctgcaaggagtcttttccagggccaatcccattgcatcaacatgagcgatacctctgcaaaatgaacgaagagattaaagccgtgcttcagccacacgaaaatatcgtgccaaacaaggcgggagtctttgtagacaacaaggctctcctgctctcctctgtcctaagcgagaaaggtatgactagtcctatcaacccatacaaagaccatatgagcgtgttgaaggcttactacgccatgaacatggaacccaatagtgatgaactgttaaaaatttccattgccgttggcctgccccaggagttcgtgaaggagtggttcgagcagcgcaaggtgtaccaatacagcaacagtcgctcaccttcacttgaaaggtcctctaagcctttggctcccaatagcaaccctcccaccaaggactctttacttccgagatcgcccgtcaaaccaatggacagcatcacttccccttctattgccgagctccataacagtgtcacaaactgtgatccacccctgaggttaaccaagccgtcccactttaccaacattaagccagtcgaaaaacttgatcacagccgatcaaacaccccaagccctctgaacctctcctctaccagctcaaagaattcgcactcctcaagttatactccaaacagcttttctagcgaagagctacaggctgagccgctggacctcagcttgccaaagcaaatgaaggagcctaaaagcattattgctaccaaaaataagaccaaggcatcttctatctccctggaccacaattccgtctccagtagctctgagaattccgacgaacctctgaacttgaccttcatcaagaaggagttctccaacagcaataacctggataacaagagcacaaacccggtcttttccatgaaccctttttccgcaaagccactgtacaccgcccttcctccgcagtcagcatttccaccggcaacattcatgcccccagtccaaacgagcattcctgggttgcgaccttatcccggtctcgatcagatgtcttttcttccccacatggcatacacctatccaaccggagccgctaccttcgcagatatgcaacaaaggcgcaaatatcagagaaaacagggcttccagggtgaactgctcgacggtgcacaggattacatgtctgggcttgatgacatgaccgattccgactcatgcttgagcaggaaaaaaatcaaaaaaacagagagtggaatgtacgcatgcgacttgtgcgacaagacgtttcagaaatccagttcacttctgcgacataaatacgaacatactggaaagaggcctcatcaatgtcagatttgtaaaaaagcatttaagcacaagcatcacctcattgaacacagccgtctgcactctggagaaaagccttatcaatgcgacaagtgtgggaagaggttctcccattcaggttcatactctcagcacatgaaccaccgctatagctactgcaaaagagaagcagaagagagagaggcagcagaacgggaagcacgcgagaaaggtcaccttgagccaacagagctcctgatgaatcgcgcttacctccagtccataaccccacagggctacagtgactcagaagagcgcgagtccatgccccgtgacggagagtctgagaaagagcacgagaaagagggtgaggacggatacgggaaactgggccgacaagacggagatgaggaattcgaggaagaagaggaagaaagtgagaacaagagcatggacaccgaccccgaaacgattagggatgaagaagagacaggggatcatagcatggacgatagttcagaagatggtaagatggaaaccaagagcgaccatgaagaagataacatggaagacggcatgtag

SEQ ID NO: 31625 - DNA, 3645 bp, synthetic construct
  misc_feature 1..3645: note = Description of Artificial Sequence: Synthetic coding sequence
  source 1..3645: mol_type = other DNA
atgaagcaacctatcatggcagacggcccaaggtgtaagcgcaggaagcaggctaacccaaggcggaaaaatgttgttaattatgataatgtggtcgatactgggtctgagactgacgaggaggacaagctccacattgccgaagatgacggtatagctaatcccctggaccaggaaacctctcctgcaagcgtgcccaatcacgaatccagtcctcacgtgtcgcaggctctgttacctcgtgaggaagaagaagacgaaatccgtgaaggtggggtggaacacccttggcacaataatgaaatccttcaggcatctgtcgatggcccagaagaaatgaaggaggactatgacactatggggcctgaagccaccattcaaactgccatcaataacggcaccgtcaaaaacgcaaattgtacaagcgactttgaagagtatttcgccaaaaggaagcttgaggagcgggacggccacgctgtgagcatagaggagtacttacagaggtccgacaccgctattatatatcccgaagcccctgaggagctgtccaggcttgggacgcccgaggccaatgggcaggaggagaacgacttgcctcctggcactccagatgcctttgcccagctgctgacatgcccatactgtgaccgcggttacaagcgcctgacatccttgaaggagcatattaaatatagacatgagaagaatgaggaaaacttctcctgtcccctgtgttcatatacatttgcttacaggacacaattggagagacacatggtgacgcataaaccgggtacggatcagcaccagatgcttactcaaggggctggaaatcggaaattcaagtgcactgagtgcggaaaggcctttaaatataaacaccaccttaaagaacacttacggatccatagtggggaaaagccttacgagtgcccaaactgcaaaaagcgcttttctcactctggatcctatagttcgcacatcagctctaaaaagtgtatcggactgattagtgtcaatgggagaatgcgtaacaatatcaaaactggcagcagcccaaatagtgtcagctcgtccccaactaattccgcaattacacagctaagaaacaaactcgaaaacggtaagccacttagcatgagcgagcagaccggtctcctgaagatcaaaaccgagcctctagacttcaatgattacaaagtgctgatggctacccatggattttcaggcacgtccccattcatgaacggtggcctcggcgcaacgagtccactcggcgtgcaccctagcgcccaatccccgatgcagcatctcggagtcggcatggaggcccctcttctgggcttccctacaatgaactcgaatctgtctgaggtccaaaaagtgctgcagatcgttgataacactgtgagtcggcagaagatggactgtaaagcagaggaaatctcaaagttaaaaggctaccacatgaaggacccttgctctcagcctgaagaacagggcgtgacctcccctaatatcccccctgtcgggctccctgtcgttagccataacggggcaactaagagcattattgattacactttggagaaggttaatgaggccaaggcgtgtttgcaatccttgactacagacagcagaagacaaattagcaacataaagaaggagaagttgagaaccctgatcgacctagtcacagatgacaagatgatagagaaccataatattagcacaccatttagctgtcagttttgcaaggagtcctttcccggtccgattccactgcatcaacatgaaagatacctttgcaagatgaatgaagaaattaaggcggtgctgcagccccacgaaaatattgtgccaaataaagccggagtatttgtcgataataaggccttgctcctcagcagcgttcttagcgagaagggtatgacatcgccgattaatccttacaaagatcatatgagtgtgttgaaggcctactatgccatgaacatggaacccaattctgacgagctgctcaagatttcaatcgccgttggcctgcctcaggagttcgttaaagagtggttcgagcaaaggaaagtgtaccagtacagtaattctcggtcccccagcctcgaacgctcaagcaaacccctggcccctaactccaatccacccaccaaagacagtctgttgccacgaagcccagtcaagcccatggactcaatcacctcgccatccatcgccgagctgcacaatagcgtgaccaactgcgatcctcctctacgcctgactaagccaagccatttcactaacataaaacccgtggagaagctcgaccatagcagaagtaacacaccatcccctctgaacttgagctccacgagctccaaaaacagtcactctagctcctacactcctaactcattttcgtctgaggaattacaggcggaaccgttagacctgagcttgcctaagcagatgaaagagccaaaaagtatcatagccacgaagaacaagaccaaagcgtcttccatttctctagaccacaatagtgtgtcttcctcctcagagaactctgacgagcctctgaacctcacctttattaaaaaggaatttagtaattccaataatcttgacaacaagtcaacaaatcccgtcttctctatgaacccttttagcgccaaacctctgtacacagcactgccacctcagagcgcatttcccccagccacttttatgcctcccgttcaaaccagcatccccggactcagaccttaccctggcttggatcagatgagctttctgccgcacatggcctacacttaccctactggcgctgcaacttttgctgatatgcaacaacggaggaagtatcaaaggaaacagggtttccagggagaacttctcgatggcgctcaggattatatgtcggggctggatgacatgactgactcagattcttgtctgtcccgaaagaagatcaaaaaaacagagagcggaatgtacgcctgtgatctgtgtgacaagactttccagaagagttcgtccctcctgcgccataagtacgagcatacaggtaaacgtccccaccagtgtcagatctgtaagaaagcattcaaacataaacaccacctgatcgaacacagtcgcctgcacagcggagagaagccctatcaatgtgataaatgtgggaagcgtttctcccatagtgggtcttactcccaacatatgaatcaccggtattcctattgtaagcgggaagcagaggagagggaggctgccgaaagagaagccagagagaagggtcatcttgaaccaaccgaattgctgatgaatcgggcatacctccagtcaataaccccacagggctattccgactctgaagagcgggagagcatgccccgagatggtgaatcagagaaggaacacgagaaggagggcgaagatggatatgggaaacttggaagacaggacggcgacgaggagtttgaagaggaggaggaggagtcggagaataaatccatggacaccgaccccgagaccattcgggatgaagaggagaccggagatcatagtatggacgactcttctgaggacggtaaaatggagaccaagagcgaccacgaagaagacaacatggaagatggtatgtag

SEQ ID NO: 31626 - DNA, 1893 bp, synthetic construct
  misc_feature 1..1893: note = Description of Artificial Sequence: Synthetic coding sequence
  source 1..1893: mol_type = other DNA
atgagcatcagcgcactaggcggtcgcacaaagggcaaacccctgccacccggagaggaggagagaaataatgtccttaaacagatgaaggtgcggaccaccctgaagggagataagtcgtggatcaccaagcaggacgagtccgagggaaggaccattgagctgccttccggcagatcccgtgccacttctttcagctccgctggcgaggtccctaaaccaaggcctccaagcacccgtgctccaaccggttacatcatcagaggggtctttacaaagcctatcgatagcagcagccagcctcagcagcagtttcctaaagctaacgggacccccaagtctgccgcttcactcgtcaggaccgctaacgctggtcccccacgaccctcatcgagtgggtataaaatgaccactgaagattacaaaaagctcgccccatacaatatacgcagaagttcaacttcaggagatacagaggaagaggaagaagaggaagttgtccccttttctagtgatgagcagaagcgacggtccgaggcagctagcggtgtgctgcgacggacagcacctcgggaacattcatacgtcctgagcgccgcaaaaaaaagcaccggccctacccaagaaacacaagcccctttcattgcgaagcgggtagaagtagttgaggaagatggaccaagcgaaaagtctcaggacccgccagcccttgcacgcagtacccccggtagcaaccgctcaagcccaggcaataaagacaaagaggcaccttgttccagggaactgcagagggacttagcgggtgaagaagcctttagagccccaaataccgacgcggctcggtcttcagcccagctctcagatggcaatgtgggctcaggcgctactggatctagacccgaaggcctcgctgctgtggatatcggttcagagagaggctccagctccgccacgagcgtctctgccgtgcctgccgaccgcaaaagtaactccaccgccgctcaggaggatgccaaagccgatcccaaaggtgccctggctgattacgagggcaaagatgtggccaccagagtcggtgaggcttggcaggagcgacccggagcacctcggggtggacagggcgatcccgctgtccccgcacagcagcccgctgacccctctactcctgaacgacagtcatctccaagtggctctgaacagctggtgaggagagaatcttgcggcagttctgtgttgacggactttgagggtaaggacgtggctaccaaagttggggaagcatggcaagaccgaccaggcgcaccccgaggaggccaaggagatcccgcagtccctacccaacagccagctgatccctccacccccgaacagcagaattcgccttcagggtctgagcaattcgtgcggagggaaagctgtacaagtcgcgtaagatctcccagctcctgtatggtgacagtgaccgtgaccgcgacgtcggaacagccccatatctacattcccgctccagcatcagagttagacagcagcagcaccacaaaaggcattctgtttgtgaaggagtatgtcaatgccagcgaggtcagctcaggcaaaccagtctctgccaggtattccaatgtgtcctcgatcgaggatagctttgccatggagaagaagcctccctgcggatccaccccttacagcgagaggacaactgggggaatttgtacctactgcaacagggagattcgggactgtccaaaaatcacactcgaacacctggggatctgttgccatgagtactgtttcaaatgcggaatatgctccaaaccgatgggcgaccttcttgaccagatcttcattcacagggacacaatccattgcggtaagtgctacgaaaagctcttttag

SEQ ID NO: 31627 - DNA, 1407 bp, synthetic construct
  misc_feature 1..1407: note = Description of Artificial Sequence: Synthetic coding sequence
  source 1..1407: mol_type = other DNA
atgacgaccgaggactacaaaaaactcgcaccatacaatatccgtcgatcatcaacctccggtgatacagaagaggaggaggaagaggaagtggtcccttttagttcagacgaacagaagaggtcatccccgacgcaggagacacaagcaccatttatagctaaaagggtcgaggtggttgaggaagacgggccaagcgaaaaatctcaggacccgcctgcactagcccgtagcactcccggtagcaatcggtctagtccgggtaataaggataaagaagcaccttgttccagggagttgcagcgcgatctggcgggagaggaggctttcagagctccaaatactgatgcggcacgctccagcgcacaactcagcgacgggaacgtgggcagcggagcgacaggctctaggcccgagggcctagccgcagttgatatcgggtccgaaagggggtcctcttccgctacttctgtatctgccgtgcccgcagaccggaagtctaacagcaccgcagcacaggaagacgcaaaggccgacccaaaaggggctttggctgactatgaagggaaagacgttgctaccagggtgggagaggcctggcaagaacggccaggcgcaccacgtggcggtcagggagatcccgctgtccccgctcagcagcctgcggaccccagtaccccagaaagacaatctagcccttcaggtagcgagcaacttgtgcgacgcgagagctgcgggtcttctgtactgactgatttcgaggggaaggatgtggccacgaaagtcggtgaggcctggcaagatagacccggagctcctcgaggaggccagggagacccagctgtacccactcaacagcctgcagatccatctaccccggaacagcaaaacagcccttccgggtctgagcaatttgtccggcgagagtcatgcacctccagggtgcggtctccttcatcctgtatggtaacagtgactgttacagcaacttccgagcagccccacatctatatcccagcacccgcttccgagctggattcatcctcaacgactaagggaatccttttcgtaaaggagtacgtgaacgccagtgaagtttcttcaggaaagccagtttctgcaaggtatagtaatgtctcttctattgaggactcttttgctatggaaaaaaagcctccctgcgggtccacaccatatagtgaacgaacaacaggcggtatctgcacctattgcaacagggagatcagagattgtcccaaaatcacgcttgagcacctgggcatttgctgccatgagtattgctttaagtgcggaatttgttctaaacctatgggcgatctccttgaccagattttcatccatagggacaccattcactgcggcaagtgttatgagaaactgttttag

SEQ ID NO: 31628 - DNA, 1374 bp, synthetic construct
  misc_feature 1..1374: note = Description of Artificial Sequence: Synthetic coding sequence
  source 1..1374: mol_type = other DNA
atgacaaccgaagattataagaaattggcaccatacaacattagaaggtcttccacaagcggcgacaccgaggaggaagaagaagaggaagtggtgccgttttcctctgatgagcagaaacgccgttcggaggccgcttcaggcgtgctccggaggactgccccaagagagcactcctacgttctatctgccgcaaaaaaaagcactggtagccccacacaggaaacccaggccccattcatagcaaagcgtgttgaggtcgtcgaagaggatggccctagcgaaaagagccaggatccacctgccctcgccagatccacgcccggatcaaactcttctcgcggagaagagatcgttcggctccaaatcctgacacctcgggcagggctgcggctggttgcccctgacgtagaggggatgtcctcttctgcaacatctgtgtcggcggttcctgctgataggaagtcaaacagcactgctgcccaggaggacgccaaggccgatccaaagggcgcactggcagactacgaagggaaggatgtggcaacccgggttggggaagcgtggcaggagaggccgggagcccctcgcggaggacagggagatcctgctgttcccgcacagcaacccgcagaccctagcacacctgaacggcaatccagcccatccggatcggagcagctggtaaggcgggaaagttgtggatcaagcgtcctgaccgatttcgaggggaaggacgtggccaccaaggtgggggaggcctggcaggatcgtcctggagcgccaaggggcggacaaggagaccctgccgtccccacgcagcaacccgcagacccctccacccctgaacagcagaattctccctcaggctctgaacagtttgtgagaagagagtcctgtacctcacgagtcaggagcccctcatcttgcatggttaccgttacggtgactgcaacgtccgaacagccccatatctacatcccagcccctgccagtgaactggacagttcatctacaacaaaagggatcttgttcgtgaaggagtacgtgaacgcctccgaagtgagttccggcaaacccgtgagcgctagatacagcaacgtaagctcaattgaagacagcttcgccatggagaagaaaccaccatgcgggagtactccgtacagcgaaagaacaaccggtggaatctgtacatattgcaatagggagattagagactgccccaagatcacactggagcatttgggcatctgttgccatgaatactgctttaagtgtgggatttgcagcaaaccgatgggcgacctcctagaccagattttcattcatagggacactattcactgtggaaaatgctatgaaaagctgttctag

SEQ ID NO: 31629 - DNA, 2070 bp, synthetic construct
  misc_feature 1..2070: note = Description of Artificial Sequence: Synthetic coding sequence
  source 1..2070: mol_type = other DNA
atgtcaataagtgcactagggggtcgcactaaaggaaaacccctcccgccaggcgaggaagagagaaacaacgtgctaaaacaaatgaaagttaggaccactttgaaaggtgataaaagttggattaccaaacaggatgagtccgaaggacggacaattgaactcccgtcggggagatctcgggctacttcttttagctccgcaggagaggtgccaaaacccagacctcctagtacgagggcccctaccggctatattatcagaggtgtcttcaccaaacccatcgacagctctagtcagccccagcagcaattccctaaagccaacggcacccctaaaagcgccgctagcctggttaggaccgcaaacgcagggcctcctcgacccagctctagtggatataagatgaccacggaggactacaagaaactggcgccatacaatatccggcgatcttccaccagcggcgacaccgaagaggaggaggaggaggaagtagtgccctttagtagcgacgagcagaagagaaggagtgaggcggcaagcggcgtgttgagacggaccgctccgagggagcactcatatgttctgtcagctgctaagaaatccacagggcctacgcaagagactcaggccccttttatcgctaagcgggtggaagtcgtggaagaggatgggccatccgagaagtcccaagacccaccggcacttgcacgaagtactccagggtccaacagtgcggacgggggtcggacaaaggccagtagagcgatctggatagaatgtctcccttccatgccctccccagctgggtctcaggagctatccagcagaggcgaagaaattgtcagactgcagatcctcacacccagagccggactccgacttgtggctccagatgtcgaagggatgcgcagcagtccaggcaacaaagacaaagaagccccttgcagcagggaactccaacgggacctggccggtgaagaggcattcagggctcctaacaccgatgccgcacgctcctcggctcagttgagcgatggaaacgtgggcagcggagcaactggaagcagacccgaggggctggctgctgttgacattggtagcgagcggggatctagcagcgctacaagtgtatccgccgtgccagcagacagaaaatcaaatagcacagccgcacaggaagatgcaaaggccgacccaaaaggcgcattggccgactatgaaggcaaggatgtggccaccagggtgggagaagcgtggcaggaaagacccggtgcccctaggggcggacagggcgatccagcggttcctgcacagcagcccgcagacccctcaacccccgaacgacagagctcgccaagcggaagcgagcagctagttcgcagggaaagctgcgggtccagcgtgttgactgacttcgaaggcaaagacgttgctacaaaggtcggggaagcctggcaggacaggcccggtgccccaaggggcggtcagggagatccagccgtacctacccagcagcctgccgatccttccactcctgaacagcagaacagcccatcagggagtgagcaattcgtcaggagggagtcgtgtacctctagggttagatcaccgtcctcatgtatggtcaccgtgactgtgacagccacgagcgagcagcctcacatctacatcccagcccctgcttcagaattagactcaagttccacgactaaaggtatcctcttcgttaaagaatacgtcaacgcgagcgaggtttcaagcggaaagcccgtttccgcaagatactcaaatgtgtcttccatcgaagactcatttgccatggagaaaaagcctccctgcggttccacgccctactctgaaaggaccacagggggaatttgtacatactgtaacagggagattagggactgtcctaaaatcaccctcgagcatctgggaatctgctgtcatgagtattgttttaagtgcggaatctgttctaaaccaatgggcgatctgctcgaccaaatctttatccaccgggataccattcactgtggcaagtgttacgaaaagttattttag

SEQ ID NO: 31630 - DNA, 1359 bp, synthetic construct
  misc_feature 1..1359: note = Description of Artificial Sequence: Synthetic coding sequence
  source 1..1359: mol_type = other DNA
atgcaacgccaggctccttataacattcgaagaagttcaacatctggcgacaccgaagaggaagaggaggaggaggtggtaccattctcatccgacgaacaaaagcgaagaagtgaggcagctagcggtgttctgcgtcggaccgccccacgggaacattcttatgtgctttccgcagccaagaagtcaaccgggagtcctacccaagagacccaggctcctttcatcgccaagagagtggaagtggtagaagaagatgggccttccgagaaatcccaggaccctccagctctggcacgaagcactccgggaagtaatagctcccgcggagaagagattgtaaggttgcagatcttgactcctagggctggcctccggctggtggccccagacgtggaaggaatgagctcctctgcaacctccgtgagcgccgtgcctgcggatagaaagtcaaattccacagctgcccaggaggacgcgaaggcagaccctaagggcgcacttgcagattacgaagggaaggatgtggctacacgtgttggtgaagcctggcaggagaggccgggagctccaagaggcggacagggagatcccgctgtgcccgctcagcagccggctgaccccagcactccagagcgtcaatcaagcccttcaggttctgaacagctggtcaggagagagtcatgcggctcatcggtgctgactgacttcgaaggcaaagacgttgccaccaaagtgggagaggcctggcaagataggccgggagctccacggggaggacagggcgatcctgcagttcctacccaacaacccgctgacccaagcacacctgagcagcagaacagtcctagtggctcagagcagtttgtaagaagagaatcctgtacctcacgggttcggtcacccagtagttgcatggtcaccgtcactgttacggcaaccagtgaacagccgcatatatacatacctgcgcctgcgtcagaactcgattccagctccacaactaaagggatcctatttgttaaagagtatgtgaatgccagcgaggtgtcaagtggcaagcctgtgagcgcacggtatagtaacgtgagctcaatcgaggactcctttgccatggagaagaaacctccctgcggtagcaccccttatagcgaaagaaccaccggaggtatctgtacatactgcaacagagagatccgagactgtccaaagatcactcttgaacacttggggatatgctgccacgagtactgtttcaaatgtgggatatgctcaaagcccatgggggaccttctggatcaaattttcatacatcgtgacacaattcactgtggtaagtgctatgagaaactattctag

SEQ ID NO: 31631 - DNA, 1428 bp, synthetic construct
  misc_feature 1..1428: note = Description of Artificial Sequence: Synthetic coding sequence
  source 1..1428: mol_type = other DNA
tgaaggtcatccacctccggtgacaccgaggaggaggaggaggaggaggtagtgccgtttagttccgatgagcaaaaacggagccttaggaggacagcgcctagggagcatagttatgtgctgagtgcagctaagaaaagtaccggctcccctacccaagagacacaggctccattcatagcgaaacgcgtggaggtagtcgaagaggacgggccatccgaaaaatctcaggatccccctgccttggccaggtccacgcccggaagcaatcggtcctcaccgggaaacaaagataaggaagcaccttgcagccgagagttacagcgcgatctcgccggagaggaagcatttcgcgcaccaaacactgacgctgcacggtctagcgcccagctctcggatgggaatgttgggtctggcgcaaccggcagccggccagaaggactcgctgccgtggacataggctcggaaagggggagctcgagcgcaacctcagtgtctgctgtgccggctgatcgcaagagcaactccaccgctgcccaagaagatgctaaggccgatccgaaaggagctctcgcagactatgagggaaaagatgtggcaacccgcgtaggtgaagcctggcaggagcggcctggggcacctcgtggcggacagggggaccccgctgtacctgcacaacagcctgcggatcctagcacacctgaacgtcagtcctccccttccggaagcgagcaattagtgcggagggagtcttgcggcagctcagtcctgacggatttcgagggaaaggacgtcgccactaaggtcggtgaggcctggcaggaccgtccaggggctccaaggggcggacagggcgatcctgctgtgcccacgcagcagcctgccgacccgtccacccccgaacagcagaatagccctagcgggagcgagcagtttgttcgccgtgaatcctgtacttcccgggtgcgcagtccatcctcttgcatggtgaccgtgactgtaacggctactagcgagcaacctcacatttacattccagcacccgctagcgaactcgatagtagttccacaacgaaaggcattttatttgtcaaggagtatgtaaatgcaagtgaggtgtcttccggcaagccagtgagcgctagatactcaaatgtatccagcattgaggatagcttcgctatggaaaagaaacctccttgtggaagtacgccgtactcagaacggactacaggcggtatttgcacatattgcaatagagagatccgggactgtccaaagatcaccctggagcaccttgggatttgctgccatgaatattgtttcaaatgcggcatctgtagcaagcccatgggtgatttgctcgaccaaatatttatacacagagacaccatccattgcggaaagtgctacgaaaaactcttttag

SEQ ID NO: 31632 - DNA, 1146 bp, synthetic construct
  misc_feature 1..1146: note = Description of Artificial Sequence: Synthetic coding sequence
  source 1..1146: mol_type = other DNA
atgactacagaagactataagaagttggctccttacaatataagacgttcgtcgacatcaggggacaccgaggaggaggaagaggaagaagtggtaccttttagtagtgatgagcagaaacggaggtccgaggcggcatctggcgtgcttcgcaggaccgctcctcgagagcattcttacgtgctaagtgccgctaaaaaaagtaccgggtcacccactcaagaaacgcaggctccctttattgccaagcgggtagaggtggtggaagaggacggcccaagtgagaagtctcaggatcctcctgccctcgccaggagtacacctggatctaactctgctgacgggggtcgaaccaaggcctccagagcaatctggatcgagtgtctgccctctatgccctcaccagccggttcacaggaactttcaagcagaggcgaggaaatcgtgaggttgcaaattctgacaccaagggctggtcttcgactcgtggcacccgacgtcgaaggcatgcgctcctcccctggcaacaaagacaaagaggcgccttgttcacgggagctgcagagggacctggcaggtgaagaagctttccgagctccaaacactgatgcagcacggtccagcgcacaactgagcgacggaaacgtggggtccggcgctactggatcgaggccagagggcctggctgctgtggatatcggttctgagcgaggttcaagcagtgcaactagtgtgtctgccgttcccgctgataggaaaagcaattcgacagctgcccaggaggacgcgaaagccgaccccaagggtgcattggccgattatgagggaaaggacgtggccacccgcgtgggggaggcatggcaggagagacctggagcacctcgaggtggtcagggcgaccccgctgtgcctgcccagcagccggcagatccgtccaccccagagcgccaatcctcaccctccggcagcgagcagctggtgcggagggaatcatgtggctcttcagtgctgaccgacttcgaagggaaagatgtcgccaccaaagtgggcgaggcatggcaggaccgtccgggtcctagttgcacgcactcagccacctgcagatcccagtatcccagaaccgctgagcagccgcagcgtatctag

SEQ ID NO: 31633 - DNA, 636 bp, synthetic construct
  misc_feature 1..636: note = Description of Artificial Sequence: Synthetic coding sequence
  source 1..636: mol_type = other DNA
gaggaggcgtttagggcccctaataccgacgccgctcggtcctccgcccagctgtcagacggaaacgtcggctccggagctaccgggagtcggcctgaaggcctcgctgctgtagacatcggcagtgagagggggagactctgtgccgctgcctcctttgcctctttcctggaagaccaggatggccactcggccaatagccaaagctgtaagcctagacctgctgcaatctcctcttcagccacgtcagtgtcagccgtgcctgcagacagaaagtccaacagcaccgctgcacaggaggatgcaaaggcagatccaaaaggagccctggccgattacgagggtaaggacgtcgctacccgagtgggtgaggcatggcaggagaggccgggtgctccacgagggggacagggcgacccggcagtgccagcccagcagccggcagacccatccacacccgagagacagtcttcaccatctgggtctgagcagctcgtgcggagagaatcctgcggaagctcagtgttgaccgattttgaaggcaaagacgtggcaacaaaggtcggagaagcctggcaggataggcctggcgctcctcggggaggccaaggagaccctgctgtacccacccaatag

SEQ ID NO: 31634 - DNA, 666 bp, synthetic construct
  misc_feature 1..666: note = Description of Artificial Sequence: Synthetic coding sequence
  source 1..666: mol_type = other DNA
tgattgcgccgaacagcacccagagaacactcttacgtgttatccgctgcaaagaagtccactggatcccccacgcaggaaacgcaggccccttttatagctaaacgcgtggaagtagtggaggaggatgggccaagcgagaagagtcaggacccaccggcactggctcggtcaacccccggttcaaatagcgccgatggagggcgaaccaaagcctcaagagccatctggattgaatgcctgcccagcatgccgtctcctgccggaagtcaggagttgtcctcgcgaggagaggaaatcgtgcggctgcagatccttactccgcgagccggactaaggctggtcgcacccgacgtggagggcatgaggagttccccaggcaataaggacaaagaggccccttgcagtcgtgaactgcagcgagacttagctggcgaggaggcctttcgggcacccaacaccgacgccgctagaagtagcgcccagctgagcgatgggaatgtaggaagcggcgcaaccggcagccggcctgagggactggcagccgtggatatcggctcagagcgagggtcttctagtgccacctcagtgtcggccgttcccgctgatcggaaatccaactctaccgccgcacaggaggacgccaaagctgacccaaaaggctag

SEQ ID NO: 31635 - DNA, 414 bp, synthetic construct
  misc_feature 1..414: note = Description of Artificial Sequence: Synthetic coding sequence
  source 1..414: mol_type = other DNA
tgagttcttccgcgacgccatcgacatcggctgagcagaagaggctggcggtggtggaagcggaccggactcttgcgaagagccagaactcatctgctgtggcaggatccccttttagcccaaacagtcagaatggaggccggaccaaagaggctaggtcaatttggcagctcagcatgtcaagtgtgtctggcaccacttggggcaaggtcttcgggcctgccgcaggcaaccaagactcgaagacccccagctcctgaaagctcaagaggaacctggttagtacggcgtctgagcggaccccctactcagatgcttcaggcgcctgtgcccctgcagtccctgctgtccttactgataggacgcgctaccgcgcagcagcctcgtcgcatgcagaggcagacacagagatag

SEQ ID NO: 31636 - DNA, 2073 bp, synthetic construct
  misc_feature 1..2073: note = Description of Artificial Sequence: Synthetic coding sequence
  source 1..2073: mol_type = other DNA
atgtccatcagcgcactaggcggtcgtactaagggcaagcctctgcctcccggagaggaagaaaggaacaacgttttaaaacagatgaaggtgaggacaaccttgaagggtgacaaatcatggattactaagcaagacgagtcggaaggacgtacgatagaactgccatcgggcagaagtagagctaccagtttcagcagcgcaggcgaggttcccaagcctcgacctccctcgacaagagccccaacgggctacataattcgcggagtttttacaaagcccattgatagtagctcccagccccagcaacaattccctaaggccaacggtacccctaagtcagccgcttcgttggtgcgaacagcgaatgcgggtcctcccaggccatccagctccggctataagatgaccaccgaagattataagaagcttgcaccttacaatatccgaaggtcttcaacaagcggggacaccgaggaggaggaagaggaggaggtcgtgccattttcaagtgatgagcaaaagagaagaagcgaggcagcatccggggtgctgcgcagaactgcccctcgggagcacagttatgtattatcagccgctaaaaagagtacggggtcaccaacacaggagacacaggctccgtttatcgctaaacgggttgaggtggtggaagaggatggccctagtgagaagtcacaggatccacccgcactggcacgctctacacccggaagcaactctgctgatgggggaaggaccaaagcaagtcgcgctatttggattgagtgtctaccttcaatgccctcccctgcgggatcgcaagaactgagtagccgaggcgaagaaatcgtccgcctgcagatcctaactcctagagcaggcttacgccttgtggcccctgacgttgagggaatgaggtcatcaccaggcaataaggataaagaggccccttgttctagggaactacaacgcgatttggctggggaggaagctttccgggctccaaacacggatgccgctcggtcttccgcacagctctcagacgggaacgtcggctcgggggcaaccggctctagacccgaggggctggcggctgtcgacattggaagtgaacgaggtagcagcagcgctacttctgtttctgcagtgcctgccgaccgcaagtctaactctacagcggcacaggaggacgcgaaggcggacccaaagggcgctctcgcggactacgagggtaaagacgttgctacgagggtcggcgaggcctggcaggaaagacctggggcacctcgcggtggtcagggcgatcccgcagtccccgctcagcagcctgccgacccatccacacccgagagacaatcttccccaagcgggagcgagcagctagtgcgacgcgagtcatgcggctcatctgtgcttaccgacttcgaaggcaaggatgttgctaccaaggtgggcgaggcatggcaggatagaccaggtgccccaagaggcggacagggggatcccgcagtgccaactcaacagcctgcagaccccagcacccccgaacagcaaaattcgccttctggttccgagcagttcgtgcggagggagagctgcaccagccgcgtccgctccccgtcatcatgcatggtgacggtaactgtaacggcaacaagcgaacagccccatatatatatccccgctccagcctccgagcttgactcatcctcaactaccaaaggtattctattcgtcaaggagtacgtgaatgctagcgaggtgagctccgggaaacccgtctctgcaagatatagcaatgtttcgtctattgaggattccttcgcaatggagaagaaacctccctgtgggtcaactccctacagtgaacgaacgaccggcggaatatgcacttattgtaatcgtgagattagggattgccctaagatcactctcgagcacttggggatctgctgccatgaatactgtttcaaatgtggaatatgcagtaaacccatgggagacctactggatcagatattcatccatcgggacacgatccactgtgggaagtgctatgagaaattgttctag

SEQ ID NO: 31637 - DNA, 993 bp, synthetic construct
  misc_feature 1..993: note = Description of Artificial Sequence: Synthetic coding sequence
  source 1..993: mol_type = other DNA
tagagtgaaatggccgcacgggacgagctcgggcttgggggtgactctctggaggctatgcccgtgcccgcagcacgtgggagacctcgtatcactaatgggccagaggagttggccgcacctagtcccgctgccctcgcggattatgaggggaaagatgtggcaaccagggtgggtgaagcctggcaggaacgccctggagccccaagagggggacagggcgatccagcagtgccagcccagcaacctgctgatccttcaacaccagagagacagagcagcccatccggatcggaacaactggtccggagagaatcctgtgggtctagcgtcctgactgacttcgagggcaaagatgttgccacaaaagtcggtgaagcgtggcaggacagacccggtgcccctaggggcggacaaggagatcctgctgtgcccacacagcagcctgctgatccaagcaccccagaacaacaaaatagcccctcaggaagtgagcagttcgttagacgtgaaagttgcacatccagagttagatctccatccagctgtatggtgaccgtcacggtaactgcaacgagtgagcagccccacatttatatccccgcacctgcatcggaacttgatagttcctcaactactaaaggaatactgtttgtcaaagaatatgtcaacgcgagcgaagtctcctctgggaaaccagtgagcgccagatatagcaacgtcagttctatcgaagattcgttcgctatggaaaaaaagcctccatgcggaagcacaccatatagtgaacggaccacaggtggcatctgcacatactgcaacagagaaatcagggactgccctaagattactctcgagcacctaggcatttgctgccatgagtattgcttcaagtgtggcatttgctcaaaaccgatgggagaccttttggatcagatatttatacaccgcgacaccatccactgcggcaaatgttatgagaagctgttctag

SEQ ID NO: 31638 - DNA, 1575 bp, synthetic construct
  misc_feature 1..1575: note = Description of Artificial Sequence: Synthetic coding sequence
  source 1..1575: mol_type = other DNA
atgacgacagaagattataagaaactggccccttataatataaggagatctagcacaagcggtgatacagaagaagaagaggaggaagaggtagtgcctttctcctcagatgagcagaagaggagatcagaagctgcctcaggggttctgcgccgaaccgcccctcgggagcacagctatgttttgtcggcggctaagaaatccacagggcctacacaggaaacgcaggcgccattcatcgccaaacgagtggaggtcgtagaagaggacgggccttccgagaagagtcaagatcctcccgcactcgcacggagtacgcccggaagcaatagcagcaggggcgaggagatcgtcagactccagatactgacacctcgagcgggtttgaggctggtcgctcctgatgtagagggaatgaggtcgagtcctggcaataaagacaaagaagccccatgttcgagggaacttcagcgggatctggccggagaagaggcctttcgcgcacctaacacagatgccgctcgctcttccgcacagctgtcagatgggaacgtgggcagcggcgctaccggatcccgtcctgaggggttagccgctgtggacattggcagcgagcgcggaagttccagcgctacctcagtgagtgcagttcctgcagacaggaagtcaaattccactgcagcccaggaagacgccaaggcagaccctaaaggggctctggccgattacgaaggcaaggatgtggctaccagagtcggggaggcatggcaggaacgcccaggtgccccacggggaggccagggcgaccccgctgtccccgcacagcagcccgctgatccaagtaccccagaaagacagtcatctccatccggaagcgagcagttggtaaggagggagagctgcggtagttccgtgcttaccgactttgagggaaaagacgtggccaccaaagtgggggaggcgtggcaggatcggcctggcgctcctcggggtgggcagggagatcctgccgtgcctactcagcagcctgcggacccatccactcctgagcagcagaactctccctcagggtcggaacagtttgtgcgcagagagagctgcactagtcgagtcaggagcccatctagttgcatggtgactgtcacggttactgctacatcggagcaaccccatatctatattcctgccccagccagcgagcttgactccagctcgaccacaaaaggcattctctttgtaaaggagtacgtaaacgctagcgaggtgtcctcagggaagccagtctctgccagatattcgaacgtgagtagcatcgaggattccttcgcgatggaaaaaaagcccccttgtggtagtacgccctacagcgagaggaccacgggcggtatatgtacgtattgtaaccgggagattcgcgattgccccaaaattacactggagcatctgggtatttgctgtcatgaatattgtttcaaatgtgggatctgttccaaaccaatgggcgatttgttggatcagatctttattcatagggatacaatacactgtggcaaatgttatgagaagctcttctag

SEQ ID NO: 31639 - DNA, 2166 bp, synthetic construct
  misc_feature 1..2166: note = Description of Artificial Sequence: Synthetic coding sequence
  source 1..2166: mol_type = other DNA
atgagcataagcgcgctggggggacgcactaaggggaagcctctgccaccgggagaagaggaaagaaataacgtcctgaagcagatgaaggttagaaccactctgaagggggataagagttggattacaaaacaggacgagagcgaaggtcgcacaatagagctcccaagcggccgaagccgggcaacaagtttctcaagtgccggagaagtgccaaaacctagacccccatcgacacgggctcctacaggttacatcattcggggtgtgtttaccaagccaatcgactcctcctcacagccgcagcaacagttccctaaggccaacgggacaccgaagagtgcagcctccctcgtccgaacggctaacgctgggccacctcgcccatcatctagcggatataagatgaccactgaagactataaaaagctcgccccatacaacattcggaggtccagcacctcaggcgacacggaggaagaggaggaggaagaggtggtacctttcagttccgacgaacagaagcgaagatccgaagcggcttccggggtgctcagacgaacggctccacgcgaacatagctatgtcttgagcgccgcaaagaagagtactggacctacgcaggaaacccaggcaccgtttattgctaagcgtgtcgaggtcgtcgaggaggatggaccaagcgaaaaatcccaggatcccccagcactggcgaggtccaccccaggatcaaactccgcagacgggggtcgaaccaaagccagtagggcgatctggattgaatgtctcccaagcatgcctagtccggctggatcccaggaattgtctagccgtggggaagaaattgtccgattacagattttgaccccacgggcaggattgcgcctagtggcaccagacgtggaaggtatgagatctagccctggaaacaaggacaaagaagcgccttgttcccgggagcttcagagagatctggccggtgaagaggcatttcgcgctcccaacacagacgctgctcggagcagcgctcaattgtctgacggcaatgtcgggagcggggcaaccggcagtcgccctgaaggactcgctgccgtcgatatcgggagtgaaaggggcagattgtgtgctgccgcaagcttcgcttcattcctggaagaccaagatggacatagcgctaattctcagtcatgcaagcctcgtccagcggctatttcttcaagcgccacgtccgtttcagctgtgcctgccgatcggaaaagcaactccaccgcagcccaagaggacgctaaggccgatcccaaaggggctctggccgattacgaggggaaagatgtggctactcgcgtcggagaggcttggcaagagcggcctggtgcaccgagaggcggacagggcgatccagcagtacccgctcaacagccagctgatccctccaccccagagagacaaagcagcccgagtggaagtgaacaactagtccgcagggagagttgtggctctagtgtcctcacagactttgaaggtaaagatgtcgccaccaaggttggcgaggcttggcaggaccggcctggagcgcctagaggagggcagggcgaccctgcagtgcccacccagcagccagccgacccttcgactccagagcagcagaatagcccatctggatccgagcaatttgtgcgccgtgaaagctgcactagccgggttcggagcccgtccagctgtatggtcactgttactgtgacagccacgtccgagcagcctcatatctacatccctgcgccagctagcgagctcgattccagctcgacgacaaaagggatcctgttcgtgaaagagtatgtcaacgcgtccgaggtgagtagcggtaagccggtaagcgctcgctatagcaatgtgtcctcaattgaggactctttcgccatggaaaagaaaccaccatgcggttcgaccccgtatagcgagcgcactaccggcggaatatgcacttattgtaatcgcgaaatacgcgattgccctaagattacgctggagcaccttggcatctgttgccatgagtattgcttcaagtgcgggatttgttccaagccaatgggggacctactagatcagatttttattcatcgagataccatccactgtggcaagtgttacgagaaactgttttag

SEQ ID NO: 31640 - DNA, 2079 bp, synthetic construct
  misc_feature 1..2079: note = Description of Artificial Sequence: Synthetic coding sequence
  source 1..2079: mol_type = other DNA
atgtcaattagcgccctcggtggcaggacgaaaggcaaacccctacccccaggcgaggaggaaagaaataacgtgctgaaacagatgaaggtgcgcactacattgaagggggataaaagttggatcaccaagcaggatgagtcggaggggagaaccattgaactgccgtccggcagaagccgggcaacatcctttagttcagccggtgaggtgcccaagcccagacctccatccactcgggctccaactggatacattattcggggagtgttcactaagcccatcgactctagctcccagccccaacagcagttcccgaaggccaatggtacaccaaagagcgccgcatcgctcgtgagaactgcaaatgccggacccccaagacctagctcctctggctataagatgactacggaggattacaaaaaattggccccttataatataaggcgctcgtccaccagcggtgacactgaagaggaagaggaggaggaggtggttccctttagctccgacgagcagaaacgcaggtccgaagcggcatcaggcgtgctacggcgaactgccccacgtgagcactcctatgtcctgagcgccgctaaaaagtccaccgggcctacacaggaaactcaggctccctttattgcaaagagggtggaagtggtagaagaggatggtccctccgaaaagagtcaggaccccccagcccttgccaggtccacacccggatcaaattccgcagatgggggaagaaccaaggcttcccgggctatttggatcgagtgtctgcccagtatgccgtcccccgcagggtctcaagagcttcgctcgagccccggaaacaaggacaaggaggctccctgttcaagagagttgcagagagacctagcgggtgaagaggcatttcgtgctccaaacaccgatgctgctagatcgagcgcccagctctccgatggcaatgtaggatccggggcaactggctcacgacccgaggggctggccgcagtggatatagggagcgagagaggcaggctgtgtgccgctgcctcgtttgcatccttcctggaagaccaggatggccatagcgctaatagccagagctgtaaacccagacccgctgcaatctcttcctctgctactagtgtttctgccgtcccagccgacaggaaaagtaattcgactgcggctcaagaagacgctaaagcagatccgaaaggggcactcgctgactacgaggggaaggatgtggctacaagggttggggaggcatggcaagaaagacctggcgctcccagagggggacagggtgacccagcggttcctgcccagcaacccgctgatcctagcacgcccgagcgccagagttcgccgagtggctctgagcaactggtccggcgtgaatcgtgtgggagcagcgtactgacagatttcgagggcaaggatgtcgctaccaaagtcggcgaagcctggcaagataggcccggtgcccctagagggggacagggcgatccagccgtgcccacccaacagcccgctgatccttcgacccccgaacaacagaatagcccgagcggttcggaacagtttgtgaggcgcgaaagctgtacgagccgagttcggtctccatcctcttgtatggtcaccgtgacagtgacggccacttccgagcagccacacatctacattcccgcaccggcatcggagcttgattcctcatcgaccaccaaagggattcttttcgtcaaagaatacgtgaatgcaagtgaggtcagtagcggtaaaccagttagcgccaggtactcaaacgtgtcctcaattgaagactcattcgccatggagaagaaaccaccatgcggctctacgccctactctgaaaggacgacaggtgggatttgtacatattgtaacagggagattagggattgcccaaagataaccctagaacacctcgggatctgctgccacgaatattgtttcaagtgtggtatttgctcgaagccaatgggtgatcttcttgatcagatattcatacacagggacactatccattgcggcaaatgttatgagaaactgttctag

SEQ ID NO: 31641 - DNA, 1899 bp, synthetic construct
  misc_feature 1..1899: note = Description of Artificial Sequence: Synthetic coding sequence
  source 1..1899: mol_type = other DNA
atgcagcgggaagagggattcaacaccaagatggcagacggccctgacgagtacgataccgaagcagggtgcgtccccttgttgcatccggaagaaataaagccgcaaagtcactataaccatggctacggagaaccgctgggaagaaagactcatatcgacgattattcaacttgggatatcgtgaaggctacccagtatgggatttacgagcgttgcagggagttggtcgaggcaggttatgatgtgagacagcctgacaaggaaaacgtcaccttgttgcattgggccgctattaataacaggattgatctggttaagtattatatatctaaaggagccattgtcgaccagttgggaggcgacctgaattccacacctctccattgggccacacggcaaggccatttgtccatggttgtgcagttgatgaaatacggagctgacccatctctcattgacggcgagggctgttcctgtattcacctggccgcacagttcggtcatacatctatcgtcgcctatttgattgcaaaaggccaggacgtcgatatgatggatcagaacgggatgactcctcttatgtgggccgcatataggacccactctgtcgatcccactcggctcctgttgaccttcaacgttagcgtgaatctgggtgacaagtatcataagaataccgccctgcattgggctgtgctcgctgggaacaccaccgtgatctctctcctgctggaggcgggagccaatgtcgatgctcagaatatcaagggcgagagtgcattggacctggctaaacagcgcaagaacgtgtggatgatcaatcatttgcaggaggcaaggcaggccaaaggctatgacaaccctagtttccttcggaaattgaaagctgataaggagtttcgacagaaagttatgctgggtactccattcctcgtcatttggttggtgggattcatcgcagatctcaatatagactcctggttaattaagggactgatgtacgggggagtgtgggcgaccgtgcagttcttatccaaaagtttttttgatcactcgatgcattccgctcttcctctgggtatatatctcgctaccaagttttggatgtatgtgacctggtttttttggttttggaacgatctcaactttctatttatccatttgcccttccttgccaactctgtggcattgttctataacttcggcaaatcttggaaaagtgacccaggtattataaaagcaaccgaggagcagaaaaagaagaccattgtggaactcgccgaaaccggaagccttgatctatcaattttctgctccacttgcctgatcaggaagcctgtaaggagcaagcattgcggcgtttgcaaccgctgtatagcaaagtttgaccaccattgtccttgggtgggcaattgtgtgggagctggaaatcataggtacttcatgggttatttgttctttctgctttttatgatttgctggatgatctatggatgtatctcttattggggtcttcattgcgagaccacatacaccaaagatggcttttggacttacataacccagatcgcaacgtgctccccgtggatgttttggatgttccttaatagcgtgtttcacttcatgtgggtggcggttctcttgatgtgtcaaatgtaccagatctcctgtctaggaattaccacaaacgagagaatgaacgcgaggcgctataagcactttaaggttaccactacgagtattgagagcccattcaatcacggatgtgtgaggaatatcatcgatttcttcgagttcaggtgttgcggcctgttccgcccagtgatcgtggactggacaaggcagtataccatagagtatgaccagatctcaggaagtggctaccaattggtctag

SEQ ID NO: 31642 - DNA, 651 bp, synthetic construct
  misc_feature 1..651: note = Description of Artificial Sequence: Synthetic coding sequence
  source 1..651: mol_type = other DNA
atgagcacaatccctaagagagctgtgtgtccattttccacccagagatatggaatttatgaaagatgtagagaattggtagaggccggttacgacgtccggcagcctgacaaggagaatgtcacactgttgcactgggctgccattaacaacagaatcgacctggtgaagtattacatctctaaaggtgctatcgtcgaccagctaggcggagacctgaacagcacacccctgcattgggccactcggcaagggcacctgtctatggttgtccagctgatgaagtatggggctgacccctcattgatagacggcgaaggatgtagctgtatccacctggcagcccagttcggccacacctctatcgtcgcgtacctgatcgctaaaggacaggacgtcgatatgatggatcagaacgggatgactcctctaatgtgggctgcttacaggacacatagcgtggaccccactcgcctgttattgactttcaacgtaagcgtgaacctgggggacaagtaccacaagaacaccgccctccattgggccgtcctggcgggaaacacgaccgtaattagcctgctcctagaagccggagccaatgtagacgcccagaacataaaagccatattgaggtgtcatatggctctctag

SEQ ID NO: 31643 - DNA, 1899 bp, synthetic construct
  misc_feature 1..1899: note = Description of Artificial Sequence: Synthetic coding sequence
  source 1..1899: mol_type = other DNA
atgcaaagggaggagggctttaacactaagatggctgacggtcctgatgagtacgatactgaagcgggttgcgtgccccttctgcatcccgaggaaatcaagccacagagccattataaccacggatacggcgagccgcttggacgaaagacacatattgacgactactctacatgggatattgtgaaggccacccagtacggcatctatgaacgatgccgagagctggtggaagcaggatatgatgtgcggcaaccagataaggagaacgtgactttgctgcactgggcggctataaataaccggattgacctcgtcaagtactacatctcaaaaggagctattgtggaccagttaggcggagacctgaacagtaccccactccactgggcaaccaggcagggacatttaagcatggtagtacagctcatgaagtacggggctgaccctagtctgattgacggggaagggtgctcatgtatccacttagccgcacaattcggacacacatcaatagtggcctacttgattgccaagggccaggatgtggacatgatggaccaaaatggaatgaccccacttatgtgggccgcttaccgcacccactccgttgacccgacacggctgctgttgacctttaatgtcagcgtgaacttgggggataagtaccacaagaacaccgcactccactgggctgtgctcgcaggtaacaccaccgttatctcgctgctcctggaagcaggcgcaaatgtcgacgctcaaaacattaagggcgagagcgcactggacttagcaaagcagaggaaaaatgtctggatgatcaatcacctccaagaggcgagacaagccaaaggttatgataacccgtccttcctgaggaagttgaaggctgacaaagagttccggcagaaagtaatgttaggcacacccttccttgtgatctggcttgttggatttatcgctgatcttaacatcgatagttggctgatcaagggcctgatgtacgggggtgtttgggctaccgttcagttcctttctaagagcttcttcgatcattcaatgcacagcgcgcttcctcttggaatctacctagctaccaaattctggatgtatgttacctggttcttttggttttggaatgatctcaattttctcttcatccatctgccattcctggctaactctgttgccctgttttacaactttggtaaatcttggaagtctgaccccggtatcataaaagccacagaagaacagaaaaaaaaaacaattgtcgagctcgccgaaactggaagcctggatctgagtatattctgttcaacctgccttatcagaaagcccgttcgctcgaaacactgtggcgtgtgcaaccgatgcattgccaagttcgaccatcattgcccctgggtggggaattgcgtgggcgcaggaaaccacagatacttcatggggtatctgttctttttactgttcatgatttgttggatgatctacggctgcatctcatactggggactgcattgtgagactacctacactaaggacggcttctggacctacatcacccagatcgcgacatgctccccctggatgttctggatgtttctaaactccgtgttccattttatgtgggttgcggtccttctgatgtgtcaaatgtaccagatttcatgcttggggatcactactaatgagcgcatgaatgccaggaggtataaacattttaaagtcacaacgaccagcatcgagagccccttcaatcacggatgtgtccgtaatattatcgatttctttgagtttcgatgctgtggccttttcaggccggtcatcgttgactggacaaggcaatataccatcgaatacgaccagatcagcgggagcggatatcaactggtctag

SEQ ID NO: 31644 - RNA, 1494 nt, synthetic construct
  misc_feature 1..1494: note = Description of Artificial Sequence: Synthetic coding sequence
  source 1..1494: mol_type = other RNA
atgacagtctttctgagtttcgcctttctggctgccatcctcacacacatcggctgtagcaaccagagacggagtccggagaactctggcaggaggtacaatcgcattcagcacggtcaatgtgcttacacctttattctccccgaacacgatggcaattgtagggaatcaaccacagaccagtacaacacgaatgccttacagcgggatgcccctcatgtggagccagatttctcctcccagaagctgcagcaccttgaacatgtgatggaaaactatacacaatggttgcaaaagctggaaaattacattgtggagaatatgaaatcagaaatggcccagatccagcaaaatgccgtccagaaccacacagccacaatgctggaaattggaacttccctcttgtcacagaccgctgagcagaccagaaaactaactgacgttgaaactcaggtgctgaatcagaccagcagacttgagatccaactgctcgaaaatagcttgagtacctacaaattggaaaaacagctccttcaacagaccaatgaaatccttaagatacatgagaagaactcgctgctcgagcacaaaatcctcgagatggagggcaagcacaaagaagagttggatactttaaaagaagaaaaagagaacctgcaagggttggttacacgtcagacatacattattcaggaattggaaaaacagctaaatagggccaccacaaacaactcagtcctgcagaagcaacaactggagttaatggacactgttcataacctggtaaatctgtgcacaaaagaggtcttactgaagggaggcaaaagagaagaggagaagccttttagagactgcgctgatgtctatcaagcgggatttaacaaaagcggaatatacactatctacatcaacaacatgcccgagcctaagaaggtgttctgcaatatggacgtaaacggggggggttggacagtgattcaacacagggaggacgggtcactcgactttcagcgaggatggaaggagtacaaaatgggttttggaaatcctagcggcgaatattggctaggaaatgaatttatttttgctatcactagccaacgacagtacatgttacggatagagctgatggactgggaagggaaccgggcatactcacagtatgataggtttcatattgggaacgagaaacagaattataggctgtacctcaaaggacacacaggcacggctggaaaacaatcatctttaattctgcacggagccgatttcagcaccaaggacgccgataatgacaactgcatgtgcaaatgcgccttaatgctcactgggggctggtggttcgacgcctgcggcccatcaaatttaaacggaatgttttacacagcgggacagaaccatggcaagctgaatgggattaaatggcattatttcaagggcccttcctactccctgcgctcaactactatgatgattcggccactggacttttag

SEQ ID NO: 31645 - RNA, 459 nt, synthetic construct
  misc_feature 1..459: note = Description of Artificial Sequence: Synthetic coding sequence
  source 1..459: mol_type = other RNA
acagtgagtaatcttctggagcacaagattctcgagatggagggcaagcataaagaggagttagataccctgaaagaagagaaggagaacttgcagggcctggtaacaaggcagacctacatcatacaagaactggagaaacagttgaatcgggctactacaaataacagtgtcttacagaaacagcagctagagctcatggacactgtacacaatttggtcaatctgtgtacaaaggaaggcgtactgctgaaggggggtaagagggaagaggagaaaccatttagggattgtgcagatgtctaccaggcagggttcaataaatccggaatctatactatatacataaacaacatgcccgagcccaagaaggtattctgtaacatggacgtgaatggcggcggatggactgtgatacagcaccgagaggacggcagtctggatttccagcgtggttag

SEQ ID NO: 31646 - RNA, 1497 nt, synthetic construct
  misc_feature 1..1497: note = Description of Artificial Sequence: Synthetic coding sequence
  source 1..1497: mol_type = other RNA
atgacagtttttctatcgtttgcgttcctggccgccatcctcacacatattggatgctcgaaccagcgacggagccccgaaaactcaggaaggcggtataatagaatccaacacgggcagtgcgcatatacatttatactacccgaacatgatggaaactgccgcgaatctaccactgatcagtataatacaaacgctcttcagcgggacgccccccacgtggaacccgatttcagttcgcaaaaattacagcatctggagcacgtgatggaaaattacacacagtggcttcaaaagctcgagaattatatagtggagaatatgaagagtgagatggcacagatacaacaaaatgcagtgcagaaccacacagcaaccatgctcgagattggcacctccctgctcagtcagactgccgagcagacccggaagctgacggacgtggagactcaggtgcttaatcagactagccgattagagatccagctcctggaaaacagtttaagcacctataagctcgagaaacagctcctccaacagactaatgaaatattaaagatccacgaaaagaattcgcttctcgagcacaagattttggagatggagggtaagcacaaggaggagttggacaccttgaaagaggaaaaagagaatctgcaggggctcgtgacacgtcagacctacattatccaagaactggaaaaacaactcaatcgcgccactacaaataactcagtattgcagaaacaacagctggaattaatggacactgtgcataatttagtcaatttgtgcaccaaggaaggggtgttgctgaaaggcgggaaacgggaggaggagaagccatttcgcgattgcgccgacgtttaccaagccggattcaataagtccggaatctatacgatctacattaacaatatgcccgaacccaaaaaagttttttgcaatatggatgtgaacggtggtggatggacagtgatacagcaccgtgaggacggctcactagattttcagcggggctggaaagagtataagatgggcttcggcaatccgtccggtgaatattggttgggaaacgaatttatttttgctatcacttcgcaacgtcagtatatgctcaggattgaactgatggattgggagggaaaccgggcctatagccagtacgatagatttcatatcggcaacgaaaaacagaactatcggctttatttgaaaggtcacaccggtactgccggaaaacaatcttcactcattcttcacggcgccgactttagcacaaaagacgcggacaatgataattgcatgtgcaagtgcgcacttatgttaacagggggatggtggtttgatgcctgtggcccatccaacctcaatggtatgttctacacagccggacagaaccacggtaaactgaacggtataaaatggcattacttcaaagggccttcctattcattacgctccactacgatgatgattaggccactggatttctag

SEQ ID NO: 31647 - RNA, 894 nt, synthetic construct
  misc_feature 1..894: note = Description of Artificial Sequence: Synthetic coding sequence
  source 1..894: mol_type = other RNA
atggaaggtaagcacaaagaggaactggatacactgaaggaggaaaaggagaacttgcaagggctagtgacaagacagacctatatcatacaggaattagaaaagcagttgaatcgtgccaccaccaacaactctgttcttcagaaacagcagctggagcttatggacacagttcacaaccttgttaacctctgcacaaaggaagttctgctgaaaggcggcaagagggaggaagagaagcctttccgggactgcgccgacgtgtatcaggctggattcaataaaagtggcatttatactatatatattaataacatgccagagccgaagaaagtgttttgtaacatggacgtaaacggcggcggatggacggtcatacagcatcgtgaggacggttccctcgattttcagagagggtggaaagagtacaaaatgggcttcggaaatccatccggggaatactggctcgggaatgagtttatctttgctatcacatcccaaaggcaatacatgcttcgcatcgagctgatggattgggaaggaaatcgagcatatagccagtacgatcgcttccacatcggaaatgaaaaacaaaactaccggctctaccttaaagggcacactggtacagcaggtaagcagtccagcctcattctgcacggggccgatttttccaccaaagacgccgataatgacaactgcatgtgtaaatgtgccttgatgttgaccgggggctggtggttcgatgcctgtggacctagcaatttgaatggaatgttctacactgcaggccagaatcacggaaagttaaacggcataaagtggcactacttcaagggcccctcctattcactgcgaagtacaacgatgatgatccgaccactggatttctag

SEQ ID NO: 31648 - RNA, 897 nt, synthetic construct
  misc_feature 1..897: note = Description of Artificial Sequence: Synthetic coding sequence
  source 1..897: mol_type = other RNA
atggagggaaaacataaagaagaactagatacattgaaggaggagaaagagaacctgcaaggattggtcacaaggcagacttatattattcaggagctagaaaagcagctaaatcgggcaacgacaaataattctgtgctccagaagcagcagctggaactgatggataccgtccacaatctcgttaatctgtgtacgaaggaaggcgtgctgcttaagggggggaaaagggaagaggagaaaccgttccgcgactgtgcggacgtgtatcaggccgggtttaataagtcaggcatttacacgatttacatcaacaacatgcctgagcccaaaaaagtgttctgtaacatggacgtgaacggaggcggctggaccgtgattcagcaccgtgaggatggcagtttggacttccaaagaggctggaaagaatacaaaatgggtttcgggaatccgtccggcgagtattggctcggaaatgaattcatcttcgctattacaagccaacgccaatatatgttacgcattgaactaatggactgggaggggaaccgcgcatattcacaatacgatagattccacataggcaacgaaaagcagaactatcgcctctatctgaagggccacacaggaacagcaggaaaacagagctctctcattctgcacggagccgacttctctaccaaagatgctgacaatgataactgcatgtgtaaatgcgctctcatgttgactggcggctggtggttcgacgcatgtggccctagtaatctgaatgggatgttttatacagccggacaaaatcacggcaagttgaacgggattaagtggcactacttcaaaggtccttcttacagtcttcgatcaactaccatgatgatccgacccctggatttctag

SEQ ID NO: 31649 - RNA, 720 nt, synthetic construct
  misc_feature 1..720: note = Description of Artificial Sequence: Synthetic coding sequence
  source 1..720: mol_type = other RNA
atggctcacgccggtaggacgggatacgataacagggagatcgtgatgaaatacatacactataagctctcccagaggggctatgaatgggacgccggagatgtgggtgctgcgccgccgggagctgccccagcccctggaatcttttcttctcaacccggccacactccgcaccccgctgcctctcgcgatcccgttgcaagaacgagccctcttcaaactccagccgcccccggagccgccgcgggtccagccctgtcaccggttccgcccgtagttcatttaacactgagacaggcaggagatgatttttcaagaagatacagacgggattttgcagagatgagcagccaattgcacttaaccccattcacggccaggggcagatttgctacagtggtagaagagttgttccgagacggcgttaactggggaaggattgtcgcattcttcgagttcggtggagtgatgtgcgttgaatccgttaatcgtgaaatgtcacccctcgtagacaatatcgctctgtggatgaccgaatacttgaatagacatctgcacacctggattcaggataacgggggatgggacgcctttgtggagttatacggacccagcatgagacccctgtttgacttttcttggttgagcttgaagaccctactttctcttgcccttgtgggggcctgcatcactctgggcgcctatttggggcacaagtag

SEQ ID NO: 31650 - RNA, 720 nt, synthetic construct
  misc_feature 1..720: note = Description of Artificial Sequence: Synthetic coding sequence
  source 1..720: mol_type = other RNA
atggcacatgccggccgaacaggttatgacaatcgcgagattgtgatgaaatacattcattacaaattgtctcagcggggctatgagtgggatgcaggcgacgttggtgccgctcccccgggcgcagctcccgcccccgggatattctcatcacagccgggccataccccccacccagcagcttctagagatcccgttgctcgcactagcccattacagactcccgcggcccccggagcggccgccggccccgccctgtcccccgtgccccccgtggttcacctgactctcagacaggctggggacgacttctctcgccgttatagacgcgacttcgccgagatgtcctctcagctccacttaacaccctttacagcacgcggacggttcgccaccgtcgtggaagaactgttcagagatggtgtcaactggggacgtatagtggcattttttgaatttggaggggttatgtgtgtcgaaagtgtgaaccgagaaatgagcccgctcgtcgataatatagccctgtggatgaccgaatacctaaaccgtcatctccacacctggatccaagacaacggcggatgggacgccttcgtggaattatacggaccaagcatgcggcctctgtttgatttcagttggttgagcctgaaaacgctgctctccttagcgctggtaggcgcttgcatcacccttggggcctacttagggcataagtag

SEQ ID NO: 31651 - RNA, 618 nt, synthetic construct
  misc_feature 1..618: note = Description of Artificial Sequence: Synthetic coding sequence
  source 1..618: mol_type = other RNA
atggcacacgcagggcggacagggtacgacaacagagagatagtgatgaagtatatccattataagctgtcacaacgtggatatgaatgggatgctggcgacgtcggagctgcacctcccggcgcagcacccgcacccggaatattttcgagccaaccagggcatacccctcatcctgcagcgagccgggacccagtagctcgcacctccccactgcaaacacccgcggcaccaggagccgcggctggaccggcactgagccccgttcctcccgtggtacacttgaccctcaggcaggccggggatgatttcagccgccgctataggagggatttcgccgagatgtcttcacagttacacctgacaccttttaccgcccggggccgtttcgcaacggttgtcgaagaactgtttcgcgatggggtgaactggggacgcatagtggccttcttcgagtttggaggagttatgtgtgtggaatctgtaaatcgcgaaatgtcaccgctggtagataacatcgccttatggatgacggagtatctgaataggcatcttcacacctggatccaagataacggaggctgggttggcgcactaggtgatgtgtcccttggctag

SEQ ID NO: 31652 - RNA, 939 nt, synthetic construct
  misc_feature 1..939: note = Description of Artificial Sequence: Synthetic coding sequence
  source 1..939: mol_type = other RNA
atggctaaagtgttttcttttatactggtcacgacggctctgactatggggcgggagatttctgccctggaagattgtgcacaggaacagatgaggcttcgtgcccaagttcgcttacttgaaactcgtgtcaaacagcagcaagtgaagatcaagcagcttcttcaggaaaacgaagtgcaattccttgataagggagacgaaaacaccgtgattgatctgggctctaagcggcagtacgccgattgctctgaaatttttaacgatggatataagctgtctggtttttacaaaatcaaaccactccagtctcccgcagaattttcggtttattgcgacatgagcgacgggggaggatggacagttatccaaagacggagcgacggctccgaaaattttaatcgaggctggaaagactacgaaaatggctttggaaattttgtgcagaaacacggggagtactggctgggcaacaagaacctgcacttcctgactacgcaagaagattatactttaaaaatagacctagctgactttgaaaagaacagccgttacgcccagtataaaaattttaaggtgggagatgagaagaacttttatgaactgaatattggggaatactcgggaaccgccggcgacagcttagctggtaactttcatcctgaagtccaatggtgggcctcacatcagcgtatgaagttctctacatgggaccgggaccacgacaattacgaaggaaactgcgccgaagaggaccagtcagggtggtggttcaacagatgccatagcgctaatctaaacggtgtctactattccggtccctatacagctaagacagacaatggcatagtatggtacacttggcacggttggtggtattccctgaagtctgtggtcatgaaaatccgacccaacgactttatcccgaacgtgatctag

SEQ ID NO: 31653 - RNA, 702 nt, synthetic construct
  misc_feature 1..702: note = Description of Artificial Sequence: Synthetic coding sequence
  source 1..702: mol_type = other RNA
atgtcccagtcgaacagagaactcgtggtcgactttctcagctacaaactttctcagaaaggatattcgtggtcccaattctctgatgttgaagaaaataggactgaagcccccgaaggaaccgagagtgaaatggagactcctagcgcgatcaacggcaacccaagctggcatctggcagacagtcccgcggtcaacggcgccaccgggcattcctcgtctcttgacgctcgagaagttatccctatggccgctgtgaaacaagccctgagggaagccggcgacgagttcgaactccggtaccggagagctttttctgatctgacttcacagttgcatattacgccaggcacagcttaccagtcttttgagcaagttgtaaatgaattgttcagagatggcgtaaactggggaagaatcgtagcctttttttcatttggtggcgctctgtgcgtcgaaagcgttgacaaggaaatgcaagtgcttgtgtctcgaattgcagcctggatggctacataccttaatgaccacctcgaaccatggattcaggagaatggcggttgggatacatttgttgaactatacgggaataacgccgctgctgaatcacgtaaaggccaggaacggttcaatcggtggtttcttacaggcatgactgttgctggggtcgttctgctcggctcactgttctcgcgcaaatag

SEQ ID NO: 31654 - RNA, 513 nt, synthetic construct
  misc_feature 1..513: note = Description of Artificial Sequence: Synthetic coding sequence
  source 1..513: mol_type = other RNA
atgtcgcagagcaaccgagaactcgtcgttgactttctgtcctacaagcttagtcagaaaggctactcctggtcacagttctccgatgtggaggaaaacagaaccgaagcccctgagggtaccgagagtgagatggagactccctcagcaatcaacggaaatcccagctggcatttggccgactcccccgctgtaaacggcgctaccggacattcatcatctcttgacgctcgcgaagtcattcctatggctgccgtcaaacaagccctgagagaggcaggcgacgagtttgaactgagatatagaagagcttttagcgatttgacatcacaacttcatatcacccccggaacagcttatcagtcctttgaacaagacacttttgtggagctgtacgggaacaacgcagcagcagagagcaggaaggggcaggagcgatttaaccgctggtttctcactggcatgacagtggccggagtcgtcctactaggttccctgtttagtaggaaatag

SEQ ID NO: 31655 - RNA, 702 nt, synthetic construct
  misc_feature 1..702: note = Description of Artificial Sequence: Synthetic coding sequence
  source 1..702: mol_type = other RNA
atgtctcagtctaatcgcgagctcgttgtggactttctctcgtacaaattatcgcagaagggttatagctggagccagtttagcgatgttgaggaaaatcgaaccgaggctcccgagggaactgaatcagagatggaaacaccatctgcaatcaatggtaacccatcatggcacttagcagactctcccgctgtcaatggagctacgggccactcctcaagcctcgatgctcgggaggtgatacccatggctgccgtcaaacaagcattgcgcgaggctggcgatgaattcgaattaagataccgtcgggccttcagtgacctgacctcccaactgcatatcactcctggaaccgcataccaaagttttgaacaggttgttaacgagctcttcagagatggcgtcaactggggcagaattgtagccttctttagcttcgggggggccctgtgtgtggaaagcgtggacaaggaaatgcaggtcctcgttagccggatcgccgcctggatggctacatatttaaacgatcacttggaaccctggattcaggagaacgggggttgggatactttcgtggaactttacggaaacaatgcggcggccgaatcacgaaaggggcaggaacgcttcaaccgctggttcctgaccggtatgacggtcgcgggggttgtattattgggctcactattcagcaggaaatag

SEQ ID NO: 31656 - RNA, 567 nt, synthetic construct
  misc_feature 1..567: note = Description of Artificial Sequence: Synthetic coding sequence
  source 1..567: mol_type = other RNA
atgtcacaatcaaatcgcgaactggtcgtggattttctgagctataaattaagtcagaagggctacagctggtcacaattcagcgacgtagaggaaaataggactgaagcgcccgagggaacggaatcagagatggagactccctccgctattaatgggaacccatcctggcatctggcagacagccccgctgttaacggagcgaccggacatagctctagtttggacgctagagaagtaattcctatggccgcagtcaagcaggccttaagagaagccggagatgagtttgaactgagatatcggcgtgcttttagcgacctgactagccaactgcatatcacacccggcacagcataccaaagctttgaacaggttgtgaatgaactcttcagagatggcgtgaattgggggagaattgtcgccttttttagttttggcggcgccctttgcgtggaatccgtggacaaggaaatgcaggtgctggtgagtagaatcgccgcttggatggccacctacctaaacgaccacctcgagccctggattcaggagaacggcggatggtag

SEQ ID NO: 31657 - RNA, 702 nt, synthetic construct
  misc_feature 1..702: note = Description of Artificial Sequence: Synthetic coding sequence
  source 1..702: mol_type = other RNA
atgtctcagagcaaccgcgaactggtggtcgacttcttatcctataagttatcacagaagggatacagctggtctcaattcagcgacgtggaggagaaccgcaccgaagcccccgagggcacagaatcagagatggaaacgcccagtgccatcaatggcaacccaagctggcatctcgccgattctcccgcggttaatggggccaccggccactcttccagcctcgatgcccgggaagttatccccatggctgcagtaaaacaggcactcagggaagcaggggatgagttcgagctgagatatcgccgagctttctcagatttgacatctcagctgcacattacgccaggaacagcctaccagtctttcgaacaggttgtgaacgagctatttagggatggcgtcaattggggccgcatcgtagctttcttctcttttggaggagccctgtgtgtcgagtccgttgacaaagaaatgcaagtcctcgtgtcccgtatcgctgcatggatggctacctacctaaacgaccacttggagccttggattcaggagaacggcggctgggacactttcgtggagctatatggcaataacgcggcagccgagtctagaaagggccaggaaaggtttaatcgatggttcctgacgggcatgactgttgccggtgtcgtactgctgggatctctcttttcccgcaaatag

SEQ ID NO: 31658 - RNA, 567 nt, synthetic construct
  misc_feature 1..567: note = Description of Artificial Sequence: Synthetic coding sequence
  source 1..567: mol_type = other RNA
atgtctcagagtaaccgagagcttgttgtggattttttgagctacaaacttagccagaaagggtattcatggtcccagttttcggacgttgaggaaaacaggaccgaagcaccagaagggacggagtcggagatggaaacccccagcgccatcaacggaaatccctcttggcacctggccgacagccccgcggtgaacggcgcaaccggtcatagctcttcccttgatgcccgcgaagtgatcccgatggctgctgtgaaacaggctctgcgggaggccggagatgaattcgaactacgttacaggagggctttctcagatctcacatctcagttgcatatcacacccgggaccgcataccaaagctttgaacaagtagtcaatgagctcttccgcgacggagttaactggggccgcattgtggcctttttttcattcgggggtgcgctgtgcgtggaatcagtggataaggagatgcaggtactcgtttccagaatcgccgcttggatggctacatatctaaatgatcacctagaaccttggatccaggaaaacgggggttggtag

SEQ ID NO: 31659 - RNA, 147 nt, synthetic construct
  misc_feature 1..147: note = Description of Artificial Sequence: Synthetic coding sequence
  source 1..147: mol_type = other RNA
atgtcacaatcaaacagagaactcgtggtggattttctctcttacaaactctcgcaaaagggatattcatggagccagttctcagacgtggaagagaacagaactgaggcccctgaaggaacagaaagcgaaatggagaccccctag

SEQ ID NO: 31660 - RNA, 546 nt, synthetic construct
  misc_feature 1..546: note = Description of Artificial Sequence: Synthetic coding sequence
  source 1..546: mol_type = other RNA
atgagtcagtctaacagagagctcgttgtggatttccttagctacaaactatcccagaaaggctattcttggagccaattcagtgacgtcgaagaaaatcgcactgaggcacccgaaggtactgagtctgagatggagactccttccgccatcaatggtaacccatcttggcacctcgcagacagtcctgcagtcaatggcgccacaggacactcctcttctttagacgctagggaggtcatccccatggcagcagtgaagcaagcactcagggaagcaggtgacgaattcgaacttaggtatcggagggcattcagtgatctgacctcacagctgcatataactcctggcactgcataccagagcttcgagcaggtcgtcaatgaattatttagagacggggttaactggggacggatcgtggctttcttttccttcggaggtgctctctgtgttgaatctgtagacaaggaaatgcaggtccttgtgtctcgcattgctgcctggatggcaacttacctgaacgatcacctggagccatggtag

SEQ ID NO: 31661 - RNA, 618 nt, synthetic construct
  misc_feature 1..618: note = Description of Artificial Sequence: Synthetic coding sequence
  source 1..618: mol_type = other RNA
atgtctcaatcaaacagagaattggtggtagactttctgagttacaagttatcccaaaaaggttactcttggtcccagttcagtgatgtcgaggaaaatagaaccgaagctcccgaagggaccgaaagcgagatggagacaccatcagctattaatgggaatccctcgtggcatctcgcagacagccctgctgtaaatggcgcaacaggacacagctccagcctggacgctcgagaagttatccctatggccgccgtgaagcaggcgcttcgtgaggctggcgacgagtttgagctcagatacaggagggcattcagcgatttgaccagtcagctacacattacccccggaactgcctaccagtcgttcgaacaagtggtgaatgaactcttcagagacggcgtaaactggggccgcatcgtggcatttttcagctttggaggtgctctgtgcgttgagtccgtggataaggaaatgcaggttcttgtaagtcgtattgctgcatggatggctacctaccttaacgaccacttagagccttggattcaggaaaacggcggttgggacacctttgtggaattatacggaaataatgctgccgccgagtcccgaaaatag

SEQ ID NO: 31662 - RNA, 567 nt, synthetic construct
  misc_feature 1..567: note = Description of Artificial Sequence: Synthetic coding sequence
  source 1..567: mol_type = other RNA
atgagccagagtaacagagaactggtggtggactttctctcctataagctctcacagaagggctattcctggagtcaatttagcgatgtagaggagaaccgaacagaggcccccgaaggcacagagtccgagatggagaccccttcggcaattaacggtaatccatcttggcatttggctgatagtcctgcagttaatggggcaaccggacacagttcctccttggatgcacgggaggttatacccatggccgccgtaaagcaagccctccgagaggccggcgatgaattcgagctgaggtatagacgagcattcagcgatcttacctcccaactgcacattactccagggactgcatatcagtcatttgaacaggtggttaacgagctattccgcgatggcgtgaactgggggagaattgtcgcttttttttcatttggcggtgctctgtgtgtggaatcagttgacaaagaaatgcaagttctggttagccggatcgccgcgtggatggctacctacttaaacgatcacctcgaaccctggatacaagagaacggaggctggtag

SEQ ID NO: 31663 - RNA, 2613 nt, synthetic construct
  misc_feature 1..2613: note = Description of Artificial Sequence: Synthetic coding sequence
  source 1..2613: mol_type = other RNA
atgaatcacttgaatgtgctggctaaggccctctacgataatgtggcagaatcgcccgatgagttatcttttcgcaaaggagatataatgaccgttctcgagcaggacacccaagggttagacggatggtggctttgctcccttcatggaaggcagggaatcgtcccaggaaatcgtttaaagattctagtgggcatgtatgataagaagcctgccgggccgggaccaggtccacccgccaccccagctcaaccacaacccggcctccacgcgcccgcgcctcccgctagtcagtatactccaatgctccccaacacataccaaccccagcctgattctgtatatctggtcccaacccccagcaaggctcaacagggcctttatcaggtccctggtccgagtccccagtttcagtctccaccggctaaacaaacatctactttctctaaacagaccccacatcatccattcccctcgcccgcaactgacctgtatcaagtcccaccagggcctggaggaccagctcaggatatatatcaggtaccaccatctgccgggatgggccatgacatctaccaggtccctccgagcatggacactcgatcttgggaagggacaaagccacctgcaaaggtggtcgtacccaccagggtggggcaagggtatgtttatgaggctgcccagcccgaacaggatgaatacgacatccctcgtcacttactggctccaggcccacaggatatatacgacgtgcctcccgtacgcggactcctcccctcccaatacgggcaggaagtgtacgataccccaccaatggcagtgaaagggcctaacggtcgggaccccctactggaggtctatgacgtcccaccctcagtggagaaaggcttaccaccctccaaccaccacgctgtgtacgacgtacccccctcagtgtctaaagatgtccctgatggaccgctgctgagggaggaaacttacgacgttcctcccgccttcgctaaggctaagccatttgaccccgccaggacacccctcgtccttgctgcccctcctcccgactctcccccagcagaggatgtctacgacgttcccccgcctgcgccggacctctatgatgtgccccccgggcttaggcgcccgggccccggcactctgtatgacgtgcctcgtgagcgcgtcttgccacctgaagtagcagacggcggcgtggttgactctggtgtctatgctgtccctcctcccgctgaaagagaggccccagcagagggcaaaaggctgtccgcctcatctacgggcagtacccgatcatctcaatccgcctcttctcttgaagtggcagggccaggacgggaaccactcgaattggaggtggccgtggaggcccttgcccggctgcagcagggggtgtcagctacagtggctcatctactggatctagccggtagtgccggagcaaccggaagctggaggtctccctctgaacctcaggagccactggttcaagacttgcaggctgccgtcgccgctgtccagagtgccgttcacgaactgttagagtttgcacgatcggccgtgggaaacgcagcacacaccagtgatagggccttgcatgctaagctttctcgacaactccagaaaatggaagacgtccaccagaccttggtagcccatggacaggctttggatgctgggcggggtggtagtggggcaacccttgaagaccttgaccggttggtagcttgcagtcgggccgtcccggaagacgccaagcaactggcgagttttctgcacggcaacgcaagcctactattcagacggactaaagctacagcaccaggcccggagggaggtggaactctccatcctaatccgactgacaaaacttcctcaattcaatctagaccactgccttctccccctaagtttacatctcaggatagtcccgatggtcagtacgagaatagcgaaggaggttggatggaggattacgattatgtgcacctgcagggcaaggaagaattcgagaagacccagaaagagctgctggagaaaggaagtatcacccgacaaggtaagagtcagttagaactgcagcagttaaaacagtttgagagattggaacaggaagtatctaggcctattgaccacgacttggcgaattggacaccggcgcagccattggcacccgggcgtactggcggcctcggcccttcagataggcagctgctactgttttacctcgaacaatgcgaggctaatttgacaaccctaactaatgccgtcgatgcattcttcacggccgtggcaactaaccagccacctaaaatcttcgtggcacactcgaagtttgtaattctgtcagcccataaactggtgtttatcggggacaccctctctaggcaagcaaaggctgccgacgtccgttcccaagtaacacactatagcaacctcttgtgcgatctacttcgtggcatagtagctactacgaaagctgccgcgcttcagtaccccagtccaagcgccgcgcaagatatggtagagcgtgttaaggaactggggcactcaactcaacaatttaggcgcgtgttgggccaactggctgcagcctag

SEQ ID NO: 31664 - RNA, 1563 nt, synthetic construct
  misc_feature 1..1563: note = Description of Artificial Sequence: Synthetic coding sequence
  source 1..1563: mol_type = other RNA
atggaaggagggcccgccgtatgttgtcaggacccccgcgccgagctggtggaaagggttgccgcaatagatgtgacccatttggaggaggcggacggtggccccgagccaacccgaaatggtgttgatcctcccccccgagcccgggctgccagcgtgatccctgggagtacctcaaggcttttgccggctagaccaagtctgtctgccaggaagctgagcctgcaggagcgtccagctggaagttacctcgaggcacaggccggcccttatgcaactggcccagctagccacatttcacctcgcgcgtggagacggcccaccatcgaatctcatcatgtggctattagcgacgcagaagactgtgtgcagcttaatcagtacaagcttcagagcgagattgggaaaggcgcctatggcgtggttcgactcgcctataacgaatctgaggacagacattacgcaatgaaagttctatctaaaaagaaactacttaagcaatatggattcccccgccgcccgcccccacgtggctcccaggctgcccaggggggacctgctaagcagctcctaccgctggagagggtgtatcaggaaatcgccatccttaaaaaactcgatcatgtgaatgtcgtgaagctcatcgaagtgctggacgacccagctgaagacaacctgtatttggctctgcagaaccaggctcagaatatacagctggactccacgaatatcgcaaagcctcatagtcttttaccttcggagcagcaggactcaggtagcacctgggcagcacgcagtgtgttcgacctacttagaaaaggacctgttatggaggtgccttgcgacaagcctttcagcgaggagcaggctaggctttatctcagggacgtgatactcgggcttgagtacctacactgtcagaaaattgttcaccgagatattaagccaagtaacctcctcctcggggatgatgggcacgtaaaaattgcagatttcggcgtctcaaatcaattcgaaggtaacgatgctcagctctcctcaacagccggtactcctgctttcatggcgcctgaggccatatcagacagtggacaatcattctccggaaaagctctggatgtctgggctaccggcgtgaccttgtattgtttcgtgtacggaaaatgcccctttatagacgacttcatactggctttgcaccgaaagatcaagaatgagcctgtggtgtttccagaagaacctgagattagcgaggaattgaaggacctgatcctgaagatgctggataaaaaccctgagactagaatcggcgtgcccgacatcaagctccacccctgggtgactaaaaacggtgaggaaccactcccaagtgaggaagagcattgcagtgtggtcgaagtgacggaagaggaggtcaagaatagtgtccggcttataccaagctggactacggtgattctggtaaaaagcatgcttagaaagcgcagcttcggcaatccatttgagcctcaggcgcgaagagaagaacggtcgatgagcgcccccgggaatctacttgtatag

SEQ ID NO: 31665 - RNA, 1020 nt, synthetic construct
  misc_feature 1..1020: note = Description of Artificial Sequence: Synthetic coding sequence
  source 1..1020: mol_type = other RNA
atgtggcagctgtgggcaagcctctgttgcctgctggtgcttgcaaacgcccggagcagaccatcgtttcaccctctttccgacgagctcgttaactacgtgaacaaaagaaacacaacttggcaggccggacataatttttacaacgtcgatatgtcatacctcaaaaggctgtgcggtacttttttagggggaccaaagccccctcagcgtgtcatgtttacagaggaccttaagctgccagcttcttttgatgctagagaacaatggccccaatgtccaacaattaaagagattagagaccagggcagctgtggcagttgttgggcatttggagctgtggaggcaatcagtgatagaatctgcatccacaccaatgcacacgtttcagtagaagtgagtgctgaagaccttctgacatgctgtggaagtatgtgtggcgacggctgtaacggcggttacccagcagaagcatggaacttttggaccaggaagggtttggttagcggcggcttgtatgagagccatgttggttgccgcccttactccatacctccttgcgagcaccacgtcaatggctcaagacccccctgcacaggcgagggggataccccaaaatgtagcaaaatctgcgaaccgggctactcccctacatataaacaagacaaacattatggttataacagctattcagtctctaattccgagaaagacatcatggccgagatctacaagaacggacctgttgagggagcattttctgtgtacagtgacttccttctgtataaatctggtgtgtaccaacacgtcacaggagagatgatgggcggccatgccatcaggatcctgggatggggagtggagaatgggaccccatactggctggtagctaatagctggaatacagattggggggacaacggatttttcaagattcttcggggccaagatcactgcggcatcgagtccgaagtcgtggccggaatacctaggaccgaccagtactgggagaagatatag

SEQ ID NO: 31666 - RNA, 1020 nt, synthetic construct
  misc_feature 1..1020: note = Description of Artificial Sequence: Synthetic coding sequence
  source 1..1020: mol_type = other RNA
atgtggcagctctgggcctctctgtgctgccttctggtgctggccaatgccagaagtcgcccatcttttcaccccctctctgatgagctggtaaattacgttaacaagcgaaacacaacatggcaggccggccacaacttttataatgttgacatgagctatttaaagaggctttgcggcactttccttggcggacccaaacctccccagcgcgttatgttcaccgaagatctaaaacttccggcttcttttgacgcccgggaacagtggccccagtgtccaaccattaaggagatccgggaccagggatcctgtggatcatgctgggccttcggcgccgtagaagctatatccgatcgtatttgcatccacaccaatgctcatgtatcagtggaagtctctgccgaagacctgctcacctgctgtgggtctatgtgcggcgacgggtgtaatggtgggtacccagctgaagcgtggaacttttggacccggaagggtcttgtgtctggaggcctgtacgagtctcacgtcggctgtagaccttactcaatccctccatgtgagcaccatgtgaatggtagccgccccccgtgtacaggagaaggggacacacccaaatgctcaaagatttgtgaacctggatactcacccacatataaacaagacaagcactacggctacaacagttattctgtgtctaactcagaaaaagatatcatggctgagatctataagaatggaccggtggaaggcgccttttcagtgtacagtgacttcctcttatacaagtccggagtgtatcagcacgtgactggcgaaatgatgggtgggcatgctattcgaatcctcggctggggcgtagaaaacggcacaccctattggctggtcgccaattcttggaacaccgattggggcgataatggtttttttaaaatcctgcgcggacaggaccattgcggtatcgaatccgaagtggtagccggaatccctagaaccgaccagtactgggagaagatctag

SEQ ID NO: 31667 - RNA, 333 nt, synthetic construct
  misc_feature 1..333: note = Description of Artificial Sequence: Synthetic coding sequence
  source 1..333: mol_type = other RNA
atgtggcaactttgggcttcattatgctgtcttctagttctggctaatgcgcgctcccgcccttccttccatcctctgtccgacgagctggtgaactacgtcaataagcgcaacactacatggcaggccggacacaacttctataatgtagatatgagttacctaaagagactctgcggaacctttttgggcggaccaaagcctccacaacgcgtaatgtttactgaggatctgaagttacctgcctccttcgacgcacgcgaacagtggccacagtgccctaccatcaaagaaatcagagatcaagggtcctgcggttcttgctggctctag

SEQ ID NO: 31668 - RNA, 1020 nt, synthetic construct
  misc_feature 1..1020: note = Description of Artificial Sequence: Synthetic coding sequence
  source 1..1020: mol_type = other RNA
atgtggcagctttgggcctccctctgctgcttactggttttggctaatgcccgatctcgcccatccttccaccccctgtccgacgagctggttaactacgtcaataaaagaaacaccacttggcaggccgggcataatttttacaacgttgacatgagttatcttaaacgcctctgtggtacgtttctgggcggacctaaaccacctcagcgcgtgatgtttaccgaagacctgaagctccccgcctcattcgatgctcgtgaacaatggcctcagtgccccacaattaaggaaatcagagaccaaggctcctgcggaagttgttgggccttcggagccgtggaagccatttctgatcgcatctgcatacacaccaacgctcacgtctccgttgaggtttcggccgaggacttgttgacgtgttgcgggtccatgtgcggcgacggttgtaatgggggatacccagcagaagcgtggaatttttggacaaggaaaggactggtgagtggagggctgtatgagtcacatgttggctgtaggccttattctatccctccatgtgaacaccatgtgaatggatctcgacctccctgtactggagagggtgatacccctaagtgtagtaagatctgcgagcccgggtattctcccacatataaacaggacaagcactatggttacaactcctacagtgtgtcaaattctgagaaggatattatggccgagatctataaaaacggccctgtagaaggcgccttttccgtctactctgacttcctgctgtataagtctggagtgtaccaacacgtgacaggcgaaatgatgggcggccacgctataaggattctgggctggggagtcgaaaacggaaccccatactggctcgtggctaacagctggaatacagattggggagataacggattcttcaagatcctgcgagggcaagaccattgtggaattgagtcagaagtggtcgctggtatccctaggacagatcaatactgggagaagatctag

SEQ ID NO: 31669 - RNA, 1020 nt, synthetic construct
  misc_feature 1..1020: note = Description of Artificial Sequence: Synthetic coding sequence
  source 1..1020: mol_type = other RNA
atgtggcaactttgggcttccttgtgttgcctgttagtgctagccaacgcgcggtcaaggccatcttttcaccctctgtctgacgaactggtcaactacgtaaacaaaaggaataccacctggcaagctggccataacttctataacgtcgatatgtcttacttaaaacgactttgcgggacattcttgggaggacctaaacctccccagagagtaatgttcaccgaagacctgaaactcccagctagctttgatgcacgggagcagtggcctcagtgccctacaataaaagagataagggatcagggttcttgcggcagctgctgggcgttcggggccgtggaggccattagcgatcgaatttgcattcataccaacgctcacgtgtctgttgaagtgtcagcggaagacttgctcacttgttgcggtagcatgtgcggcgatggatgcaacggaggttatccagctgaggcctggaacttttggaccaggaaaggtctggtttctggtggtctgtacgaatcccacgtaggttgccggccttactccattccaccctgcgagcatcatgtcaacgggagcagaccaccttgtacaggagagggcgataccccgaaatgtagcaaaatttgtgagcccggctactcccccacatacaagcaagataagcactacgggtacaactcatatagcgtatctaactctgagaaggacatcatggctgagatctataaaaacgggcccgtcgaaggagctttctcagtgtactccgacttcctattatacaaatctggggtgtatcagcatgtcactggtgagatgatggggggtcatgccattcggattctgggttggggggtcgagaacggcacgccatactggttagtggctaactcctggaacaccgactggggggataacggtttctttaaaatcctgcgcggtcaggatcactgcggcattgaaagcgaagttgttgcaggcatccctagaactgaccaatactgggagaagatttag

SEQ ID NO: 31670 - RNA, 1020 nt, synthetic construct
  misc_feature 1..1020: note = Description of Artificial Sequence: Synthetic coding sequence
  source 1..1020: mol_type = other RNA
atgtggcaactttgggcatccctttgttgcctccttgttttagctaacgccaggtcccgcccgtcgttccatcccttatccgatgaactcgtgaattacgtaaataagagaaacactacgtggcaggcaggtcataatttttacaacgtagacatgtcttacttgaagcgactgtgtggtacctttttgggaggaccaaaaccgccccagcgagtcatgttcactgaggaccttaaactccctgcaagctttgatgcgcgcgagcaatggcctcagtgccccactataaaggagataagagatcaggggtcgtgcggctcatgttgggcattcggcgctgtggaggccatctcggacaggatctgcatccataccaacgcacacgttagtgtcgaggttagcgcggaagatctgctaacatgctgcggcagtatgtgcggagacggctgcaacggtggttatccagcggaagcatggaacttctggacaaggaaaggccttgtgagtggtggactttacgagtctcacgtcggctgtcgcccctacagtatcccgccgtgtgagcatcacgtgaatggttccagacctccttgcaccggcgaaggcgacaccccaaagtgttcaaagatctgtgagcccggctactccccaacatacaaacaggataagcattatgggtataactcttacagtgtcagtaacagcgagaaagatataatggcagaaatatacaaaaatggaccagtcgaaggagccttttcagtgtacagcgattttctcctgtacaagtccggcgtgtatcagcatgtaaccggtgagatgatgggggggcacgcaattaggatccttggttggggcgtggagaacgggactccttactggctcgtggctaacagctggaacactgattggggggataacggtttctttaaaattttgagggggcaggaccactgcggcatagaaagcgaagtcgtcgcaggcataccaagaacagaccagtactgggagaaaatttag

SEQ ID NO: 31671 - RNA, 1020 nt, synthetic construct
  misc_feature 1..1020: note = Description of Artificial Sequence: Synthetic coding sequence
  source 1..1020: mol_type = other RNA
atgtggcaactgtgggctagcctctgttgcttattagtcctcgctaatgcacgatcgcgcccaagcttccatccattgtcagacgaattagtaaattacgttaataaaaggaatacgacctggcaagctgggcacaacttctacaatgttgacatgagctatctcaagagactctgcgggacattccttggcgggcctaagccaccacagagagtgatgttcacggaggacctgaaactaccagcatcattcgatgctcgggaacagtggcctcagtgccctaccataaaggagatacgagaccaaggcagttgcggatcttgctgggcgttcggggcagtagaagcgatttccgatagaatctgtatacacactaatgcacacgtttccgtggaagtctctgccgaggacctgcttacctgctgtggaagcatgtgtggtgatggctgcaacggcgggtacccggcagaagcatggaacttctggactcggaaaggtctcgtgagcggcggcctctacgaaagtcatgtaggatgtcgaccatacagcatcccaccctgcgaacatcatgtcaacggcagccgacctccttgcacaggtgaaggggatacccctaaatgtagcaaaatctgtgagcccggatattctcccacctacaaacaggacaaacactacggctataattcttacagcgtgtccaactctgaaaaagatatcatggccgaaatatacaaaaacggtcccgtggagggagccttctctgtctacagcgattttctcctgtataagagcggcgtgtatcaacatgttaccggcgaaatgatgggggggcacgcaatacgcatcctgggttggggcgtggagaatgggaccccctactggctggtcgctaattcttggaacactgattggggggataatggtttcttcaaaatcctgcgggggcaggatcactgtgggatcgaatcggaagtagtggccggaatccctagaacagaccagtattgggagaaaatttag

SEQ ID NO: 31672 - RNA, 1020 nt, synthetic construct
  misc_feature 1..1020: note = Description of Artificial Sequence: Synthetic coding sequence
  source 1..1020: mol_type = other RNA
atgtggcagctctgggcctctctctgctgcctgctggtgctcgccaatgccaggagtagaccctccttccatcctctgtccgacgaactggtgaactacgtgaacaaacggaacacaacatggcaagcagggcataatttctacaatgtcgatatgtcatatctgaaacggctctgtgggacatttcttggaggacccaaaccaccacagcgggtcatgttcaccgaagacctcaaactgccagcttcctttgacgcacgagaacagtggccccaatgtccgactattaaagaaataagagaccagggatcatgcgggagctgttgggcctttggagccgtggaggctataagtgacagaatctgtatccacacaaacgcccacgtaagcgtcgaagtctctgctgaagacctgctcacatgctgcggatcaatgtgcggagacgggtgcaacggcgggtaccctgccgaggcatggaacttctggactcggaagggcctggtgtcgggcggactgtatgagtctcacgtgggatgtcgaccctattcaatccctccttgcgaacaccatgtcaatggtagccgccctccttgcactggcgagggggatactccaaaatgctccaagatctgcgagccaggatactcccctacatacaaacaggataagcattacggatataacagctattccgtgtccaattctgagaaagatattatggctgagatttacaagaatggcccggttgagggtgcatttagcgtgtattctgacttcctgctatacaaatccggagtataccaacatgttaccggcgaaatgatgggtggacatgccatacgcatcctgggatggggcgtggagaatggaactccttattggctggttgctaacagctggaataccgactggggcgataacggttttttcaaaatcctgaggggacaggaccactgtggtattgagtctgaagttgtggcaggcatcccccggaccgatcaatattgggagaagatatag

SEQ ID NO: 31673 - RNA, 1020 nt, synthetic construct
  misc_feature 1..1020: note = Description of Artificial Sequence: Synthetic coding sequence
  source 1..1020: mol_type = other RNA
atgtggcagctgtgggcatccctttgttgcctcctggtgttggccaatgcccgctcccgaccttctttccatccgttaagtgacgaactggttaattacgtgaacaagcggaacactacttggcaggccggtcacaatttctataatgtagacatgtcatacctgaagaggctgtgtggtaccttcctaggcggcccaaagcccccgcaacgcgtgatgtttactgaggacctcaagctccctgccagttttgacgcccgtgagcagtggccccaatgccccaccattaaagaaatccgagatcaaggtagctgcggctcgtgctgggcatttggcgccgtggaggctatatcagacagaatttgcatacacactaacgcacatgtctccgtcgaggtttccgctgaagatctgctgacatgttgtgggtctatgtgtggcgatggttgcaatggaggctatcccgcggaggcctggaatttttggacacggaagggcttggtgagcggggggttgtacgaatcccacgtcgggtgtcgtccgtattccattccgccgtgtgagcaccacgtcaatggctcaagaccaccctgcactggcgaaggcgatacccccaaatgctctaaaatctgcgagcccggttactcaccaacctacaagcaggataagcattacgggtataatagttactccgtgtctaattcggaaaaggacatcatggccgaaatatataaaaatggacccgtggagggtgctttctccgtatactctgacttccttctctataagtctggagtatatcagcacgtaactggagaaatgatgggcggccacgccattaggattctgggatggggagtggagaatggcacaccctactggctggtggcaaatagttggaatacagattggggagataatgggttctttaaaattctgaggggtcaagatcattgcggcattgaatctgaggtcgtcgccggcattcctcgaaccgaccagtactgggagaaaatttag

SEQ ID NO: 31674 - RNA, 831 nt, synthetic construct
  misc_feature 1..831: note = Description of Artificial Sequence: Synthetic coding sequence
  source 1..831: mol_type = other RNA
atggatatgaaccgccgcgcctcttgtctcttgcccgatctgtgtgggcagggctgggggtggcgcctcttccccgcaagctgtgcctacctcggcagtgtgccatggcgagtgtggggcctagggggattgcttgcacctctggccgccgccggcgggggcagcacctccggattggggcaccttggtagtacgcaatggtcgggcgagctcgttgtactcttgagtgaagtattcattagaggatgtcttttctcttgcaatggaggctatccagctgaggcctggaacttctggacccgcaagggcctggtttcaggaggcctttacgaatctcacgttggttgccgaccctactctatcccaccctgcgagcaccatgtcaatggctccagacccccctgcaccggtgaaggcgatactccaaaatgctcaaaaatctgtgaaccaggatacagccccacgtacaaacaggacaagcattatggttacaatagttattcagtttctaactccgaaaaagatattatggcagaaatctacaaaaatggtcctgttgaaggagcatttagcgtttacagcgacttcctactttataaatctggagtttaccagcatgtgacaggggagatgatgggcggccacgcgatcaggattctagggtggggggtggagaacggtactccatactggttagttgctaactcatggaacacagactggggggataacggtttcttcaagattttaagaggccaggatcattgcgggatcgagtcagaggtcgttgctgggataccgaggaccgatcagtattgggagaagatttag

SEQ ID NO: 31675 - RNA, 738 nt, synthetic construct
  misc_feature 1..738: note = Description of Artificial Sequence: Synthetic coding sequence
  source 1..738: mol_type = other RNA
atgcctggggccggccccctctccatcccatgtcgcatgtcgtgggccttcggggcagtggaggcaatcagtgacagaatttgcatccatacaaacgctcacgtatcagtcgaggtgtctgcggaagacctgttaacttgttgcggaagtatgtgcggggatggttgtaatggtgggtatcccgcagaagcctggaatttctggaccagaaagggcctggtcagcggaggcttgtatgagtcacatgttggttgtaggccttatagcattccgccttgtgaacaccacgttaacggcagtagacctccatgcaccggcgagggcgacacccctaagtgttccaagatttgtgagcctggctattcacctacttataaacaggataagcactacggatataacagctacagcgttagtaacagtgagaaggacatcatggcagaaatttataagaatgggcccgtcgaaggagctttcagtgtgtattcggacttcctgttgtacaagtctggagtgtatcagcacgtgaccggagaaatgatgggcggccacgcaatccgaatcctcggctggggagtggaaaacggcacaccatattggctcgtcgcaaattcctggaataccgattggggcgataacggttttttcaagattctcagaggacaggatcactgcggtatcgagagcgaagtggtcgctggcataccacgtacagaccaatattgggaaaaaatatag

SEQ ID NO: 31676 - RNA, 1002 nt, synthetic construct
  misc_feature 1..1002: note = Description of Artificial Sequence: Synthetic coding sequence
  source 1..1002: mol_type = other RNA
atgaaccctactctgattctagccgctttctgtcttggcatagcttctgcaacactgacgttcgaccacagtcttgaggcccaatggactaaatggaaggctatgcataacaggctctatggaatgaacgaggaagggtggcgccgcgccgtttgggagaagaacatgaagatgatcgaacttcacaaccaggaatacagagagggaaagcactcttttactatggcaatgaacgcatttggggatatgacaagcgaggaattccgacaggtgatgaacggcttccagaacagaaaaccccgcaagggaaaggtgtttcaggaacctttgttctacgaagcccctcgatcagtagactggcgcgaaaaaggttacgtcacacccgtgaagaatcaggggcagtgtgggtcttgttgggcttttagcgccacaggcgccctggaaggccagatgtttaggaaaactggaagactgatttcacttagtgagcaaaatctcgtggattgctccggcccacaggggaatgaaggctgtaacgggggcctgatggactacgcttttcaatatgtccaagacaatggggggcttgattccgaggaatcatacccctatgaagctactgaggagtcctgtaagtacaaccctaagtattccgttgctaacgacaccggctttgtggacatccctaagcaagaaaaggcattaatgaaagctgtggcaactgttggcccaatatccgtggccatcgacgctggccacgaatcttttctattctacaaggaagggatctacttcgagccagactgttcaagtgaagacatggatcacggtgtgctggtcgtggggtatggatttgagtccaccgagtccgataataataagtattggttggtcaagaactcctggggagaggagtggggcatgggggggtacgtgaaaatggcgaaggataggcggaatcattgtggcatagcatcagcagcctcctacccaacggtctag

SEQ ID NO: 31677 - RNA, 678 nt, synthetic construct
  misc_feature 1..678: note = Description of Artificial Sequence: Synthetic coding sequence
  source 1..678: mol_type = other RNA
atgaatccaaccctgatattagccgctttttgcctcggaattgcaagcgccactctaacgttcgatcattctttggaggcccaatggacaaagtggaaagctatgcacaatcgtctgtacggcatgaatgaggaaggctggaggcgagccgtgtgggaaaagaacatgaaaatgattgaattacacaaccaggaatacagagaaggaaaacacagctttacaatggcgatgaacgctttcggagacatgacaagtgaagaatttagacaggtgatgaatggtttccagaatagaaaaccccgcaaaggcaaggtgtttcaagagccactcttctacgaagccccgcgctccgtcgattggagggagaaggggtatgtgacacccgtaaaaaaccagggtcagtgcggtagttgctgggccttttcagccaccggagcactagaggggcagatgttcaggaaaacaggcaggctcatttcactgagtgaacaaaacctggtagattgcagtggtccacaggggaacgaaggatgtaatggcggactaatggattacgctttccagtacgtgcaggacaacggtggactggactctgaggaaagctatccatatgaggcaactgtgtccggagctccatgccatcactcttcatccgccttcggacgttggaccctctag

SEQ ID NO: 31678 - RNA, 1002 nt, synthetic construct
  misc_feature 1..1002: note = Description of Artificial Sequence: Synthetic coding sequence
  source 1..1002: mol_type = other RNA
atgaatccgaccctcatcctcgcagccttttgtttaggtatcgcaagcgccaccctaacctttgaccactctctagaggcacagtggacgaaatggaaagctatgcataacaggttatatggaatgaacgaggaaggttggcgccgcgcggtgtgggagaagaatatgaagatgatcgagctgcacaatcaggagtacagggaaggcaagcactcctttacaatggcaatgaatgcatttggagatatgacttccgaagaattccgccaggtcatgaacggatttcaaaaccgcaaaccccgaaaaggcaaggttttccaggagccacttttttacgaagctcctagatctgttgattggcgcgagaaaggctacgtgaccccagtaaaaaaccagggacagtgtggaagttgttgggcattttccgccacgggagctctcgaaggacaaatgtttagaaagactggccgcttaatttctttaagtgaacaaaacctcgtcgattgctccggtcctcagggcaatgaaggatgcaatggtggactcatggactatgcatttcagtacgtccaggacaatgggggactcgacagcgaggagagctatccatatgaggccaccgaagagtcatgtaaatataatcctaaatacagcgtggctaacgacaccggattcgttgacattccaaaacaggagaaagccctcatgaaggctgtggccactgtgggcccaatcagcgtcgcaatagatgctgggcatgaatcttttctcttctacaaggaaggcatttatttcgaacctgactgcagctccgaggacatggatcatggcgtgttggtagtcgggtatgggtttgagtcaacagagtctgacaacaacaaatattggttggttaaaaactcatggggggaggagtggggtatggggggctatgtgaaaatggccaaagatagaaggaaccattgtgggatcgctagcgcggcctcgtacccaactgtttag

SEQ ID NO: 31679 - RNA, 120 nt, synthetic construct
  misc_feature 1..120: note = Description of Artificial Sequence: Synthetic coding sequence
  source 1..120: mol_type = other RNA
atgaaccccactctgattttagccgctttctgtcttggtatagctagcgcaacattaacatttgatcactcactggaggcccaatggacaaaatggaaagctatgcacaaccgactctag

SEQ ID NO: 31680 - RNA, 2544 nt, synthetic construct
  misc_feature 1..2544: note = Description of Artificial Sequence: Synthetic coding sequence
  source 1..2544: mol_type = other RNA
atgcacctacttggcccttggttactactcctcgtgctcgagtacctcgcatttagtgattctagcaaatgggtattcgaacacccagaaacactatatgcctgggagggcgcctgtgtatggatcccgtgtacatatcgagctttagatggcgatctagagagttttattttattccacaatccagagtacaacaagaataccagcaaatttgacggcacccggctttacgagtcaacaaaggacggcaaggttcccagtgagcagaagcgcgtccagttcttgggagacaagaacaaaaactgcactctgtcaatccaccccgtccatctgaacgactcagggcagctaggacttcggatggagagtaaaaccgagaaatggatggagcgcatccaccttaatgtttcagaaaggccttttccccctcatattcagcttccccccgaaatacaggagtctcaggaggtcaccttgacctgcctgctcaactttagctgttacggctatccgatccagttacagtggctcctggaaggtgtccctatgagacaggccgccgtgacgtcgacttcacttacgataaaatccgtgttcacccgaagcgaactgaagttctccccacagtggtcacaccatggcaagatcgttacctgtcagcttcaggatgccgacggcaagtttttgtccaatgataccgttcagctgaacgtcaaacatacccctaagctcgagattaaagtaaccccttcagatgccatcgtgagggagggagatagtgtaactatgacatgcgaagtctcatcctccaaccccgaatacaccacggtctcttggcttaaagacggaacttcactcaagaagcagaatacctttaccctgaatctccgagaggttactaaggatcaatctggaaagtactgctgccaggtttccaatgacgtcggtcccggtagatccgaggaggtcttcttgcaggtgcagtacgcgcccgagccatctacagtccaaatccttcatagtccagccgtggaggggtctcaggtcgaatttttatgcatgtccttggccaacccactgcctaccaattacacctggtaccataacggaaaagagatgcagggccggacagaagagaaagtgcatataccaaaaattttgccctggcacgccgggacgtattcctgcgttgccgaaaacatcctggggactggtcagaggggcccgggggccgaactggatgtgcagtacccaccgaaaaaagtgactacagtcattcagaatccgatgccgatccgagaaggagacactgttaccttgtcttgcaactacaactcctcaaacccctccgtcacccggtacgagtggaagccgcatggcgcatgggaagagccctccctgggagttctgaagatccaaaatgtggggtgggataacactactatcgcctgcgccgcatgtaacagctggtgctcgtgggcctctcccgtggctctgaacgtgcagtatgccccccgggacgtgagagtgagaaagatcaagcccctttcagagattcactccggcaactccgtgtccttacagtgtgacttttcaagctctcatccgaaggaagtgcaattcttttgggagaagaatggacggttattgggaaaggaatcccaacttaattttgattctatatctcctgaggatgcaggcagttacagctgctgggtgaacaattcaatagggcaaacagcgagtaaggcctggactctggaagtactgtatgcaccaagacgactgcgagtgtcaatgtccccaggggatcaagtcatggagggaaagtcagccacgctaacgtgcgaatcagatgcaaacccgccagtttcccattatacctggtttgattggaacaatcagagcctgccttaccacagccagaaactgaggttggaaccggtgaaagtccagcattccggtgcctactggtgccagggcactaacagtgttggcaaaggacggtcccccctgagcaccctgaccgtatattacagccctgagactatcggccggcgcgtggccgtgggactgggctcctgcctggccattcttatcttggctatctgtggtctcaagcttcagaggaggtggaaacgcacgcagtctcaacagggtctgcaagaaaattccagtggacagtctttctttgtgagaaacaagaaggtacgcagggcgccactgtccgagggtccgcactcccttggctgctacaaccccatgatggaagacggtattagttatacgacattaagattccctgagatgaatattcctcgaacaggtgatgccgaaagcagcgaaatgcaaaggccaccgcctgattgcgatgacaccgttacgtactccgcactccacaagaggcaagttggagattatgagaatgtgattcctgatttccccgaggatgagggtattcactatagcgagctcatccagttcggcgtaggggagagaccacaagctcaggaaaacgttgactacgtcattctcaagcactag

SEQ ID NO: 31681 - RNA, 1377 nt, synthetic construct
  misc_feature 1..1377: note = Description of Artificial Sequence: Synthetic coding sequence
  source 1..1377: mol_type = other RNA
atgaaccgaggcgtgccctttcgccaccttttgctagttctgcagctggcactgctgcctgctgcgactcagggtaaaaaagtagttttgggaaagaagggagacactgttgaactcacctgcaccgctagtcagaagaagtccatccagttccactggaaaaactcaaatcaaattaaaattctcggaaatcagggcagttttctcacaaagggtccctcgaagttgaatgatagggccgatagccggagatcactctgggaccaagggaactttcccctgatcatcaagaatcttaagatagaagacagcgacacatacatctgcgaggtcgaggaccaaaaagaggaagttcaactcctggtatttggactcaccgctaactcggatacacatttactgcaggggcagtctctgaccttaaccttggaatcccctccaggcagttcgccatccgtgcaatgtcggtccccgcgaggaaagaacattcagggcggcaagacactgagcgtgagccaattggagcttcaagatagtggtacatggacctgtactgtcttgcaaaatcagaagaaggtggaatttaaaatcgacattgtagtgctagcatttcagaaagcatcgagcattgtttacaaaaaagagggggagcaagttgaatttagcttccccctcgcgtttaccgtcgaaaaattgactggatcaggagaactatggtggcaggctgaacgagccagttcaagcaagtcatggattacatttgatcttaagaataaagaagtgtcagtgaaaagagtgacacaggatccgaagctgcagatggggaagaaactgccccttcacctcactctcccccaagctctcccccagtacgcaggcagcggaaacctgacactagctctggaagcaaagaccggaaagctgcatcaggaggtcaacctggttgttatgcgggccactcaactgcagaaaaatctaacctgtgaggtctggggacccacaagccccaagctaatgttatctttgaagctggagaataaggaggcgaaggtttctaagagagagaaggctgtttgggtgctaaacccagaagccggcatgtggcaatgtctgttgtctgattctggccaggtcctgttagagtccaatatcaaggtcttacccacttggagtaccccagtgcaaccaatggctcttatcgtcctggggggggtagcaggcctacttcttttcattggcttaggcatcttcttttgtgtcagatgccgccatcggaggaggcaggcggagcgaatgagtcagataaaaagactactgagcgaaaagaagacctgtcagtgcccacaccgcttccaaaaaacatgctctcctatatag

SEQ ID NO: 31682 - RNA, 276 nt, synthetic construct
  misc_feature 1..276: note = Description of Artificial Sequence: Synthetic coding sequence
  source 1..276: mol_type = other RNA
atgaaagtgtccgccgccgccctggctgttatcctgattgccaccgccctgtgcgcccctgcctcggcctctccttacagttccgatacaaccccttgttgctttgcctacattgcccggccccttccccgtgcccacattaaggaatatttctatacgtccggaaaatgttcaaatcccgcagtggtattcgttaccaggaagaaccgacaagtctgtgccaatcccgagaagaaatgggtgagagaatacataaactctctcgaaatgtcctag

SEQ ID NO: 31683 - RNA, 276 nt, synthetic construct
  misc_feature 1..276: note = Description of Artificial Sequence: Synthetic coding sequence
  source 1..276: mol_type = other RNA
atgaaagtttctgctgcagccttggccgtaatcctaattgctacagccctgtgcgcccctgcttccgcatcgccctactcatcagatactacaccctgctgtttcgcttacatcgcgcgacccttaccacgtgcgcacattaaagaatacttctatacttctggcaaatgctcgaatcccgccgttgtatttgttacaagaaagaacaggcaggtatgcgccaaccctgagaagaagtgggttcgagaatatatcaactcactagagatgagttag

SEQ ID NO: 31684 - RNA, 270 nt, synthetic construct
  misc_feature 1..270: note = Description of Artificial Sequence: Synthetic coding sequence
  source 1..270: mol_type = other RNA
atgaatgctaaagtcgtggtagttttagttttggttttaacagccctttgtcttagcgatggcaaacccgtgagcctctcctaccgatgcccatgtaggttcttcgagtcccacgtggcccgcgcgaacgttaagcacctgaagatcctcaatacccctaactgtgctttgcaaattgtggcgagacttaagaataacaaccggcaagtgtgtatcgaccccaaactcaagtggattcaggagtatttagagaaggccttgaacaaatag

SEQ ID NO: 31685 - RNA, 360 nt, synthetic construct
  misc_feature 1..360: note = Description of Artificial Sequence: Synthetic coding sequence
  source 1..360: mol_type = other RNA
atgaatgccaaagtggtcgtggtcttggtgctcgtactcacagctctgtgtctctcggatggcaagccagtgtctttgtcttacaggtgcccttgtcgcttttttgaatcccacgtggccagagcaaatgtgaaacatcttaagatcttaaatacaccgaactgtgcactacaaatcgtcgcacgattgaagaacaacaatcgacaagtatgtatcgatcccaagttaaagtggatccaagagtacctagaaaaagccctgaacaaggggaggcgcgaagaaaaagtaggaaagaaggagaaaattggcaagaagaaacgccagaaaaaaaggaaagcagcccagaagaggaagaattag

SEQ ID NO: 31686 - RNA, 282 nt, synthetic construct
  misc_feature 1..282: note = Description of Artificial Sequence: Synthetic coding sequence
  source 1..282: mol_type = other RNA
atgaatgcaaaggttgtggtagttctcgtcctggtgcttacggctttatgcctatctgatggtaagccagtgtccctttcctacagatgcccttgcaggtttttcgagtcacatgtcgctagggccaacgtgaaacatctaaaaattctcaatacaccaaattgcgcattacagatcgtggcaaggctgaaaaataataacaggcaggtttgtatcgatcctaagctgaaatggattcaggagtatctcgaaaaagcacttaataaacgcttcaagatgtag

SEQ ID NO: 31687 - RNA, 423 nt, synthetic construct
  misc_feature 1..423: note = Description of Artificial Sequence: Synthetic coding sequence
  source 1..423: mol_type = other RNA
atgaacgctaaggttgttgtggtcctcgttcttgttctaaccgccctttgtctctcagatggtaagcctgtttcccttagttaccgctgtccatgtagattctttgagtcccatgtagcccgagccaacgtcaaacatctgaaaatacttaacaccccaaactgcgcccttcagatagttgctagacttaagaataataatcgccaagtttgtattgatccaaagctgaaatggatacaagaatatctcgagaaagccctcaataatctcatcagcgcggcacctgctggaaagcgtgttatcgctggagcaagggcattgcatcctagtccccccagagcgtgtccaacggcaagggctctgtgcgagattcgattgtggcccccaccagaatggtcctggccatctccaggtgatgtctag

SEQ ID NO: 31688 - RNA, 273 nt, synthetic construct
  misc_feature 1..273: note = Description of Artificial Sequence: Synthetic coding sequence
  source 1..273: mol_type = other RNA
atgaacgccaaagtcgtggtcgtgctagtgctggtcctcaccgctctttgtctttctgacggtaaaccagtctccctttcgtatcggtgcccttgcagattcttcgagagccacgtcgcacgagccaatgttaaacacctgaagatcctaaacaccccgaattgcgccttacaaatagtggccaggttaaaaaataataacagacaggtttgtatcgatccaaaattgaaatggatccaagaatatttggaaaaggccctgaacaactgctag

SEQ ID NO: 31689 - RNA, 4101 nt, synthetic construct
  misc_feature 1..4101: note = Description of Artificial Sequence: Synthetic coding sequence
  source 1..4101: mol_type = other RNA
atgctgtcctttgtcgatactaggacattgctactactggccgtgacattgtgtctggctacatgtcaatctttgcaagaggagactgtgagaaaggggcccgctggcgaccgtgggccccggggagaaagggggccccctggacctccaggcagagatggagaagatggccccaccgggcctcccggtcccccgggcccaccaggccctcctggtctcggaggtaacttcgcagcccagtacgatggcaagggcgtggggctcggtcccggacctatggggctgatggggccacgcgggccgccaggggctgctggcgcgccgggcccccaagggttccaaggccccgctggggagcccggagaaccaggccaaacagggcctgctggagcaagaggccctgcgggacctcctgggaaggctggagaggacgggcacccaggcaagcctgggcggcccggggagcgaggcgtcgtggggccccaaggagccagaggttttcccggtacacccggccttcctggatttaaaggcataaggggtcacaatggacttgacgggttgaaagggcaaccgggcgcaccgggagtgaaaggcgaacccggtgctccaggggagaatggaacgccaggtcagacaggcgccaggggactgccaggggaacgtggaagggtgggagcacccgggcccgccggagccagaggttcagatgggagtgtcggaccagtaggtccggccggccccatcggatcagcaggccctccaggctttccgggagcccctgggcccaaaggcgaaattggagctgtgggcaacgctggaccagccgggcccgctggtccccgtggagaggtaggtcttcctgggttgtcagggcctgtaggtccaccgggcaatcccggcgctaacggtctgaccggcgccaaaggcgcagctgggctgcctggggttgctggggcacccggactgcccggaccccgaggtatccctgggccggtgggtgcggctggcgcgacaggcgccaggggactagttggtgaacccggcccagcgggctccaagggcgagtctggcaataaaggcgaaccagggagcgcggggccacagggcccgcccggccccagcggggaggagggtaagcgtggaccgaatggagaagcgggatcagcaggaccccctggcccccctggactcaggggatctcctggcagcagggggctgcctggggccgatggtagggcaggggttatgggcccaccaggcagtaggggcgcatccggccccgcgggggtccgcggacctaacggtgatgctggacggcccggtgaaccagggctcatgggccctagaggcttacctggcagcccaggcaatattggacctgccggcaaagagggccccgtcgggctaccaggtattgatggacgccccggtccaataggtccagcaggcgcaaggggcgagcctggtaacatcggatttcccggtcccaaaggccccactggggatccaggtaagaacggcgacaagggacacgctggcttggccggagcacgcggagcaccaggtccggatggcaacaacggcgcacagggtccaccagggcctcagggcgtgcagggaggaaaaggagaacaggggccgccaggtcctcccggatttcagggactcccaggcccctcgggaccagctggagaggttggcaaacccggtgaaagaggacttcacggcgaatttggcttacccggtcctgcgggcccccgcggagaacgggggcctcctggtgaaagtggagcagcaggccccactggccccattggcagcagagggcccagcggcccccctggtcccgatgggaataagggcgagccgggggttgtgggcgctgtgggaacagcaggtccgagcggccctagcggcctcccaggcgaacggggagcagcaggaataccgggaggtaaaggggagaagggtgagcctggcctgcgtggcgagatcgggaaccccggacgagatggcgcgcggggggcgcctggagctgtgggagctcccggacccgccggggccaccggagacagaggagaagcaggagctgccggccctgcaggcccagctggtccaaggggcagcccgggcgaacgaggcgaagttggacctgccggccccaacggattcgcaggcccagcaggagccgccgggcagcctggcgccaaaggagaaagaggagctaagggaccaaaaggcgagaatggggtagtgggccccactggtcctgttggggcagcgggcccagccgggcctaacggaccacctggacccgctgggtcccgaggcgacggcggaccccccggaatgacagggttccccggtgccgccggaagaaccggtccacctggtccttctggcattagcgggccacctgggccgcccggaccggccggcaaagaagggctccggggccctcgaggggaccagggtcctgtcgggagaactggagaggtaggggctgtagggcctccaggctttgctggcgagaagggcccaagcggcgaggctggtactgctgggccccccggaacaccagggccacaagggctactgggagccccaggcatcctggggttacctggctcccggggtgagagagggctacctggagttgctggagccgtgggagagcccggccctctcggcatcgccggtccaccaggcgccagaggtccccctggcgccgtgggaagccccggggttaacggagcacctggcgaagcaggacgcgacgggaacccaggaaatgatggtccacccggccgggacggtcaacccgggcataaaggagaaagaggctaccccggcaacataggcccagtgggtgcagcaggagcaccaggccctcatggccctgtgggccccgccggtaaacatggcaaccgcggtgaaaccggcccatctggcccagtgggccccgccggtgcagtcggcccccgcgggccctccggtcctcaaggaatcaggggggataaaggggagccgggagagaaaggacctaggggtctccccggcctcaaaggacataatgggctgcaaggcctgcccggaattgcaggccaccacggagatcaaggggccccaggtagcgtcggtcccgcggggccccgtggccccgccgggccaagcgggcctgccggaaaagatggtcggaccgggcatcctggcaccgtaggaccagctggaatcaggggtccccaaggccatcaaggccccgccggtccacctggccctcccggaccgcctggccctcctggggtctcaggaggcggatatgattttggatacgacggcgatttttaccgggcagatcagcctcggagcgcacctagtttgcggcccaaagattatgaagttgacgccacactgaaaagcctgaataaccagatcgagacgctcctcactccagaaggtagcaggaagaaccctgccaggacatgcagggatcttagactgtcccaccctgaatggtcctccgggtattattggatcgatcccaaccaggggtgcacaatggacgcgatcaaagtctactgtgactttagtacaggtgagacatgcatccgagcacagccagaaaacatccccgccaaaaattggtaccgatccagtaaagataaaaagcatgtctggctgggagagacaataaatgccggatcacaatttgagtacaatgttgaaggcgtcacctcaaaggagatggcaacccaactggcgtttatgagactactggcgaattacgcatcacagaacatcacatatcattgcaagaactccatcgcttatatggacgaagagaccggcaatctgaaaaaggctgttatcctgcagggttcgaacgacgtcgaactcgtggccgaggggaatagtcgttttacatacaccgtcctggtggatggatgctccaagaagaccaatgagtggggtaagactatcatcgaatataaaactaacaagccaagtcgactgcctttcctggacatcgcgccactggatatcggtggcgccgatcaggagtttttcgttgacattggcccagtgtgctttaagtag

SEQ ID NO: 31690 - RNA, 4104 nt, synthetic construct
  misc_feature 1..4104: note = Description of Artificial Sequence: Synthetic coding sequence
  source 1..4104: mol_type = other RNA
atgctctctttcgtggataccaggacactcctgctcctcgccgtgaccctgtgtctagcaacgtgccagtgcacccttggaggacagacattatctaaattcccgccctacctccacattgagagatctgaacagggtccaccaggcccacctgggagagacggagaagacgggccaacaggccccccaggccctcccggtcctcctgggccccccggcctgggcggaaacttcgctgcacagtatgacggaaaaggagtgggtcttggacctggacctatggggcttatggggcctaggggtccacccggtgccgccggagctcccggcccgcaaggctttcagggccccgctggtgaacccggggaacctggacagaccgggcccgccggcgctcggggaccggccggtccccccggaaaagcgggggaggatggtcatccaggcaagccgggccgtcccggtgaaagaggggtggtagggcctcagggagcgcgcggcttcccgggaacacccggtctgcccgggttcaaaggaatccggggtcacaacggcctagacggccttaaggggcagcctggcgcacctggagttaaaggagaaccaggagctcccggagaaaatggaaccccaggccaaactggcgcccgcggtcttcccggagagcgcggcagggtaggagccccaggacctgccggagcaaggggaagcgacggctctgttggccccgtagggcctgctgggcccattggaagtgcaggaccccccggatttcccggagccccgggtccaaagggcgagatcggggcagtggggaacgcggggccagccggaccagccgggcctagaggagaagttggcctacccggactctccgggcccgtcggcccacccggcaatcctggagccaatggcctgacaggcgcaaaaggagcagctggactcccaggcgtggccggagctcctgggctacctggaccccgcgggatacccggccctgtgggcgctgctggtgcaactggcgcacgaggtctggtgggcgaaccgggacctgcaggttcaaagggggagtctggaaacaagggggagcctggaagcgcagggcctcagggcccaccgggaccgtcaggtgaggaaggaaagcgagggccaaatggagaggctggctcagcggggccacctggaccccccggtctgaggggaagcccaggtagccgcggtctccctggcgccgatggaagggctggggtaatgggcccaccaggcagcagaggagcctcggggcctgcaggagtacggggccccaacggcgacgccggcagaccgggtgagccgggcctgatgggcccccgtggactgcccggttcaccaggcaatattggacctgccgggaaagaaggaccggtcgggcttcctggtatcgacggacgccccggacccattggccccgcaggagcccgaggcgagccaggtaacatcggattccctggccccaagggtccgacaggcgatcctggaaaaaatggagacaagggacacgccggactcgccggagcacgcggagcccctggcccggacggcaataacggagcacagggaccgcctggtccccagggcgtgcagggcggcaaaggagaacagggtcccccagggcccccaggctttcaagggttacccggcccatccggccctgccggggaggtgggcaaacctggggaaagagggctgcatggcgagttcggactccccggccctgccggccctcggggcgaacggggtccgcctggggagagtggagccgccggacctacaggccctataggctcgagagggcctagcggccccccaggtcccgatgggaataaaggagaacccggcgtagtcggcgccgtgggaaccgccgggccttctggaccctctgggttacccggtgagcgcggggccgccggcatacctgggggcaagggagagaagggcgaaccggggctgcgcggggagattgggaatcccggcagagatggggcccgtggagcgcctggtgccgtgggagctccaggcccggcgggcgccaccggcgatcggggagaggcaggcgctgcaggacccgcaggccccgccggacctaggggcagccctggagaaagaggggaagtgggcccggcggggccaaatggatttgccggccccgctggtgccgcaggccagcctggcgctaaaggcgaaagaggtgctaaaggcccaaagggagaaaatggggtagtggggcctacggggccagtgggcgcagctggtccggcaggtccaaatggcccacccggaccagccggaagccgcggggacggagggcctcccggtatgactggatttcccggtgctgccggaaggactgggccacctgggccatctggcatctctggcccacctgggccacccggaccagccggaaaggaaggactccgaggacctagaggagatcaaggccccgtaggccggacaggagaagttggcgccgtggggccccctggtttcgctggggagaaggggccctcgggcgaggcgggtactgcgggtccaccaggtacacccggtcctcaggggcttctcggagcacccggcatcctggggttgcctggaagcaggggagaacgtggcttgcctggggttgcgggagccgtcggagaacccggtcctctcggaattgcagggccacccggcgctcggggcccccctggcgccgtcggcagcccaggcgttaatggcgctcccggggaagccggtcgagatggcaatcccggtaacgatggacctcctggcagggatggccagcctgggcataaaggagagagaggttaccccggaaatatcggacctgttggagctgccggggcacctgggccgcatggtcccgttgggcccgccggcaaacatggcaaccggggagagactggaccctctggcccagtggggcccgcaggcgcagtaggaccgagaggcccctccgggccgcagggaatacgaggcgacaaaggggaacccggagaaaaggggccaagaggcctgccaggcctgaaaggacataacgggttgcagggactaccagggattgccggacatcacggagaccagggcgctcccggctccgtggggccagctggcccacgcggcccagcaggacccagtggtcccgctggaaaggacggacgtacaggccaccctggcactgtcggccccgccggcatccgcggtccgcaggggcaccagggccctgccggcccgcctggtcctcctggcccgcccggacctccaggcgtgtctggtgggggatacgacttcggctacgatggcgatttttatagggctgaccaaccccgaagtgccccatcactgcgccccaaagactatgaggtggatgcaaccttaaaatccctcaataaccagatcgaaaccctgctaacccctgaggggtcgaggaagaaccccgcacgaacctgtcgggacctccgcctaagccacccagagtggtcctccggatactattggattgatcccaaccagggatgtactatggacgctattaaggtgtactgcgatttttctaccggagaaacctgtataagagctcagccggagaatattccggcgaagaactggtatagatcttccaaagataaaaaacacgtgtggttaggtgaaacaattaatgccgggtcccagtttgaatacaacgttgaaggtgtgacatctaaagaaatggctacacagctcgcgttcatgcggctgttagcaaattacgcctcccaaaatatcacttatcactgcaaaaactccatagcgtatatggacgaagagaccggcaacttgaagaaggcggtgatacttcaggggtcgaacgacgtggaactggtggccgagggcaatagcagattcacttatacagtgctagtggacgggtgctctaagaagacgaatgaatgggggaagacaatcatagaatacaaaaccaataagccctccaggcttcccttccttgatattgcccctttggatattggcggcgccgaccaagaattttttgtggacatcggtcctgtttgtttcaaatag

SEQ ID NO: 31691 - RNA, 5304 nt, synthetic construct
  misc_feature 1..5304: note = Description of Artificial Sequence: Synthetic coding sequence
  source 1..5304: mol_type = other RNA
atggagccctggtcgagtagatggaagaccaagagatggctgtgggatttcaccgtgaccaccctggcactgacttttctgtttcaggcacgtgaggtgaggggcgctgcaccagttgatgtactcaaggccctcgatttccacaacagtccagagggcatatcaaagacgactgggttctgtactaacaggaagaattccaaaggatctgacactgcatatcgggtttcaaaacaggctcagctcagcgcccctaccaaacaactgtttccgggtgggacattccccgaggacttttcaatactgttcacagtgaaacctaaaaaaggcatccaatcctttcttttgtcaatctataatgaacacggaatccagcaaataggagttgaggtgggaagaagtcccgtttttctttttgaagaccacactggaaagcccgctccagaggactacccactgttccgcaccgttaatattgctgacggcaagtggcatagagtggccattagcgtggagaaaaaaacggtgacgatgatagtcgattgcaagaaaaagacaactaaacctctggatcgatctgaaagagccatcgtggacaccaacggcatcacggtctttggcacccggatccttgatgaagaagtgtttgagggcgacattcagcagttcttgatcacaggcgatcctaaggcggcatacgactactgcgagcactactctccagattgtgacagctcagctccgaaagctgcacaggcacaggaaccccagatcgacgaggctaacattgttgacgacttccaggagtacaactacggcacaatggagtcttatcagacagaagctcctagacatgtctccggaacaaacgaaccaaatccagtcgaggagatcttcacggaggagtatctcacaggagaggactatgattcacaacggaaaaattccgaagataccctgtacgaaaacaaggaaatcgacggcagggactcggacctgttggtcgatggcgaccttggagaatacgatttctacgagtacaaggaatacgaagataaacccaccagcccacctaatgaagagtttggaccgggcgtgcccgccgaaactgacatcaccgagacatccatcaacgggcacggcgcttatggcgaaaaggggcaaaaaggcgaaccagccgtagtggagccaggtatgcttgttgagggcccaccagggcccgctggtccagccggcattatgggcccccctggcctccagggcccaaccgggcctcccggcgacccgggcgatagaggtccaccgggccgaccaggactcccgggagcagatgggctaccgggcccccccggtacaatgctcatgctgccgtttcggtacggcggcgacggaagcaagggtccgacaatctctgcgcaagaggcccaggctcaagctatcctccagcaggcacgcattgcgcttcgtggtccccctggacctatggggctcacaggtcgccccggtccagtgggcgggccaggatccagcggcgcaaaaggcgaatcaggtgatcccggtccacagggacctcgaggggtgcaaggtccaccggggccgactggtaagcctggtaaaagagggcggccaggcgccgacggcggacgcggcatgccgggcgaaccaggcgccaagggagatagaggtttcgacggtctgccaggattgcctggagacaaagggcacaggggcgagagaggcccacaaggaccaccggggcccccaggggatgatggaatgcggggtgaggacggggagataggtcctcgcggtctgccgggcgaggctggcccccggggcctgttagggcctcgggggactcccggtgccccaggccagcccggcatggcaggtgtcgacggtccccccggccccaaaggcaacatgggacctcagggagaaccagggccaccaggccaacaggggaacccagggcctcagggcctccccggacctcagggccccataggaccacctggcgaaaaaggaccacagggtaaaccgggtctcgccggcttgcctggagccgatggcccaccaggccacccgggtaaagaggggcagtcgggtgagaagggagccctaggaccgcccggccctcaaggtccgattggataccctggtccacgcggtgtgaaaggcgccgatggggtcaggggcctcaagggtagcaagggcgagaaaggcgaagacgggttccccggattcaaaggtgacatgggattgaagggggataggggggaagttggccagattggtcctcgaggcgaggatggtcccgagggtccaaagggacgggccggtcccacgggtgaccctggacccagcggacaggcaggagagaagggcaagctcggtgtgccgggcctgcctggatatcccggacgtcagggtcctaagggatcaacagggtttccaggcttcccaggtgccaatggcgaaaagggtgccagaggcgtggcgggtaaaccaggtccgagagggcagagagggcctactggtccaagaggctcccggggcgctaggggccccaccggaaagccgggcccaaagggtaccagcgggggcgacggaccgccagggcctccaggagaaaggggtccacagggtccccaaggacccgttggttttccagggcccaaggggcctcccggacctcccgggaaagatgggcttccagggcatccaggccaaagaggagaaacagggtttcaaggtaagacaggtccccctggacctggcggcgtcgtgggacctcaggggcctactggtgagacaggccccataggcgagaggggtcacccagggccccccggtccccccggggaacaaggcttacctggtgccgctggcaaggaaggagccaagggagatcctggaccccaggggatatccggaaaagatggacctgctggactccgcggctttcccggcgagaggggattgccaggcgcccaaggcgcaccaggcctgaagggaggtgagggaccacaggggcccccgggccctgtcggttcgcctggcgaacgcggatccgctggaacagccggccctatcggtcttccgggtcgacctggaccacagggtccccctggcccagctggcgaaaagggggctccaggagaaaagggcccccaggggccagccggccgggatggtgtgcaaggccctgttggtctgcccggtccggctggtccagccgggtccccaggagaagatggggataagggagaaattggggagcctggccagaaaggctcaaagggagataaaggtgaaaatggccctccgggcccacccggactgcaagggcctgtgggcgctcctgggatagcaggtggtgatggagagcctggtccgagggggcagcaaggaatgttcggccagaaaggggatgagggcgcgcgcggattcccagggccacccggccccatcggactgcaagggttgccgggccccccgggtgagaagggtgagaacggcgatgttggacctatgggtcctccaggccctcccggtccaaggggccctcagggacccaatggtgccgacggaccccaagggcctcccgggagtgttgggtcagtaggaggagtgggtgaaaaaggggaacctggggaggccggaaatcctggccccccaggggaagcgggtgtcggcggacctaagggcgagagaggcgaaaagggcgaggctggacccccgggagccgccggcccgccgggggcgaagggacctcctggggacgacggcccaaagggcaatcccggaccagtaggcttcccaggcgaccccggtccacccggggagcccggcccggctggtcaggatggcgttggcggagacaaaggggaagatggagatccaggacagcctggacccccaggcccgtcgggggaggctggaccaccaggaccccctggcaagcggggacctcctggcgccgccggggctgaaggaagacagggcgaaaagggcgcgaagggcgaagcaggagcagagggtcctccagggaagaccgggcctgttggtccacaaggacccgccggcaagccaggacctgaaggcctccgtggcattcccggaccagtcggtgagcagggcctccctggtgccgcaggacaggacggccctcccggcccaatggggcccccaggactgccgggtttgaaaggggaccccggctccaaaggcgagaaggggcaccctggcctcataggcctgattggcccgccaggtgaacagggcgagaaaggagacaggggcctgccagggacccagggctctccaggcgcgaaaggcgacgggggtatcccaggacctgcaggcccactaggcccgcctggacctcctgggctcccgggtccccagggaccaaaaggcaataaggggtctaccggacctgctggacagaagggagatagtgggctccccggcccaccaggatcccccggacctccaggcgaggtaatccaaccacttccaatcttgtcctctaaaaagactcgcagacatacagagggaatgcaggccgatgctgacgataatattctagactactccgatggcatggaggagatttttggctcccttaattctctcaagcaagatatcgagcacatgaagtttcccatgggcacacagaccaatcccgcgcggacatgtaaggaccttcagctatcccacccagatttccccgatggggagtactggattgatcccaaccagggatgttccggcgatagtttcaaagtttattgtaattttacctcagggggcgagacttgtatttatcctgacaaaaagagcgagggggtgcgtataagttcatggccgaaggagaaaccagggtcttggttttcagagttcaagcgaggaaaacttctgtcatatctagatgtggagggtaattccattaacatggtgcaaatgaccttcctgaaacttctcacagcaagtgcaagacaaaacttcacataccactgtcaccagtcggcagcttggtatgatgtgtcatccggctcatatgataaggctttgcggttcttaggctctaatgacgaggaaatgagctacgacaacaatccattcatcaaaactctgtatgatggttgtgccagccggaaaggttacgagaagactgtcatagaaatcaatacgccaaaaattgatcaggtacctatagtcgacgtgatgattaacgacttcggggaccagaatcagaaattcggattcgaagtcggtcctgtgtgttttctgggatag

SEQ ID NO: 31692 - RNA, 5457 nt, synthetic construct
  misc_feature 1..5457: note = Description of Artificial Sequence: Synthetic coding sequence
  source 1..5457: mol_type = other RNA
atggaaccctggagcagtagatggaagaccaagcgatggctatgggattttaccgttacgactctggctcttactttcttatttcaggcccgagaagtcaggggagcggcccctgtggatgtgctcaaagctttagactttcacaatagccctgagggcatctcaaaaacaaccggtttctgcacaaatcgcaaaaattctaagggatctgacaccgcgtatagggtgagcaaacaggcccaactttcggcacctaccaagcagctcttccccgggggaacctttcccgaagatttctccatattatttacagtaaaacccaagaagggtatacagtcttttcttttgagtatatacaatgaacacggcatccagcaaatcggggtggaggtgggccgctcacctgtgttcctgtttgaggatcacaccgggaagcccgcccccgaggactacccgctctttcgcactgtcaatatagcggacggcaagtggcatcgggttgctataagcgtcgaaaagaagaccgtgacgatgatcgtagactgcaaaaaaaaaacaacaaaacctctggatagaagtgagagggcaatcgtggacaccaacgggattactgtgtttggtactaggatcctcgatgaagaagtctttgagggagacatccagcagttcctgattaccggagatccgaaggctgcttatgactactgtgaacattactcacctgattgcgacagctcagcccccaaggccgctcaggcacaggaaccccaaatagacgaaaagaaaaagtcgaacttcaaaaaaaaaatgaggacagttgctaccaagagcaaagagaaatccaaaaaatttacacctccaaaaagcgaaaaattctctagcaagaaaaaaaagtcttaccaggcatcagcaaaagcaaaactcggagttaaggctaacattgtggacgactttcaggagtacaattatggcaccatggagtcctatcagactgaagcacctcgccatgtcagtgggacaaatgagccgaaccctgtggaagaaattttcaccgaggagtacctgacaggcgaagattacgatagccagcgcaagaatagtgaggatactctctatgaaaataaggagattgacggtcgagactctgacttgttggtggatggtgatctgggcgaatatgatttctatgagtataaagagtacgaagacaagcccacgtcgcccccaaatgaggaatttggacctggtgtgccagccgagactgatatcacggagacctctataaacggtcatggcgcatacggagagaagggccaaaagggggaacctgcagttgtggagccaggtatgctcgtcgaaggaccaccaggtcccgctggccccgcaggcatcatgggaccgcccgggctacagggcccaactggtcccccaggagatcccggagatagagggccccctggacggcccggcttgccaggggcagatggactgccaggaccaccgggaacaatgctcatgctccctttccgctacggaggagatggctccaaaggccctacgatcagcgcacaggaagcacaggcacaggcgattctgcagcaggccaggatcgccctgcggggcccgcccggacccatgggattgaccggccggcccggaccagttggaggcccagggtcctctggagcaaaaggagagtccggagaccctgggccccagggaccacgtggcgtgcaaggcccaccaggtcccaccggtaaacctgggaaacggggcagaccaggagccgatggcggaagaggcatgccaggcgagccgggagctaagggagaccgaggctttgacggccttccaggccttccgggagacaaagggcaccgaggtgagagaggccctcagggcccgcctgggcccccaggggacgacggcatgcgaggggaggacggagagattggaccacggggactgccgggcgaagccgggccccgagggctgctcgggccaagagggactcctggagctccaggccagcccgggatggcaggagtagatggtcctcctgggcctaaaggtaatatgggtcctcagggtgagcctggcccccctggacagcaaggcaaccccggaccacaaggcctcccaggtccccagggacccattggcccccccggtgagaagggaccgcaagggaagccggggctggctgggctccccggcgcagacggccctcccggtcacccgggcaaagaagggcagtccggagaaaaaggcgctctgggccctcctgggccccagggtcccatcgggtaccccggtcctaggggggtgaaaggcgccgacggcgttaggggcctgaagggctccaaaggcgagaagggcgaggacggattccccgggttcaaaggagatatggggctgaaaggcgacagaggagaggtcggacagattgggccaaggggggaggacggaccagaggggcctaaaggccgtgccggccctaccggcgatcccggtccatccggtcaggcaggagagaaagggaagcttggggtgcctgggcttcctggataccccggacggcagggtccaaaaggaagcacaggcttccccgggttcccaggcgctaatggagaaaagggagctaggggggtcgccggaaaacccgggcctagaggccagcgaggccccaccggccctcgcggcagtcgcggagctcggggacccacaggcaagcccggtccaaagggaacctcgggtggagatggcccaccaggacctccgggtgaacgcggaccgcaggggccccagggcccagtagggtttcctggacctaaagggcctcccggcccccctggcaaagacggcctcccaggacaccccgggcagaggggggagacaggctttcagggcaagaccggaccacctggaccaggcggcgtggtgggcccacaaggacccacgggagagacgggcccaatcggagaacggggccatccaggtcctccagggcctcccggtgagcaggggcttcctggagctgccgggaaagaaggcgccaaaggagaccctgggccccaggggatcagcggtaaggacggccctgcaggtctgagggggttccccggcgagcgggggctccccggtgcacagggggctccaggcctgaaaggcggcgagggccctcagggtcctcctggaccagtgggctccccaggagagcgtggctcagcgggcactgccgggcctattggattgcccggtcgacctggacctcagggccccccaggaccagccggcgagaagggtgccccaggtgagaaaggaccccaaggaccagctggtcgcgacggtgtgcaggggccggttgggttgcccggccccgccggaccggctggctcacctggcgaggacggcgacaagggggagatcggagagcctggtcagaagggaagcaaaggagataaaggagagaacgggccacccggcccccccggattgcaaggtccggtaggcgctcctgggatcgctggcggagacggggagcctgggcccagaggccagcaaggcatgtttggacagaagggtgatgagggcgctaggggttttcccggaccccctggccctattgggctccaaggcctaccaggcccaccaggcgaaaaaggggaaaacggtgatgtgggacctatgggcccgcccggccctcctggaccacgcggtccacaaggtcctaacggtgctgatgggccacagggaccaccaggatctgtcggctctgtggggggcgttggagagaagggcgagccaggcgaagctggaaatccgggtcctcccggcgaggcaggtgtgggaggacctaaaggggaacgcggagaaaaaggcgaggccggccctcccggcgcagccggcccaccgggagcaaaaggcccacctggcgatgacggacccaaagggaatcccggaccagtgggttttccgggtgatcctggtcccccaggcgagcccggcccagctggccaggatggtgtcggcggcgacaagggggaggatggggatccaggccagcctggacccccgggaccctctggtgaagctgggccaccaggtcccccagggaagcggggcccacctggtgcggctggcgcagaaggcaggcaaggggaaaagggcgctaaaggcgaagcaggcgccgagggcccccccggcaagaccggtccagtgggtccccagggccccgcaggtaagccaggccccgaagggctgcgcgggatcccgggtcctgtcggcgagcagggactccccggtgccgcaggccaggatggcccccctggtccgatgggtccaccgggtttgcccggccttaagggcgatcccggatctaaaggggagaaaggtcacccaggcttaataggcctgattgggccacctggagagcagggagaaaagggagatcgagggctccctggcacccagggatcccccggggccaagggtgatggaggtatccccgggcccgctggacccctgggtccccccggacctcctggcctgcccggtccacagggccccaaaggcaacaaagggtcaactgggccagccgggcagaagggagactcagggctgcccgggccccctggcagccccgggcccccaggcgaagtgattcaaccgctgcctattctcagctctaaaaagacaagacggcataccgagggcatgcaggccgacgcagacgacaatatccttgactactcagacggtatggaagaaatcttcggatccctcaacagtctgaaacaagatatcgaacacatgaagttccccatggggacgcagacaaatcctgctcggacatgcaaggaccttcaactcagccatcccgactttcctgacggagagtactggattgacccaaatcagggctgcagtggcgacagtttcaaggtttactgtaattttacctctgggggtgagacatgtatctatcctgataagaagtctgagggggtgcgcattagctcctggcccaaggagaagcctggaagttggttcagcgaattcaagagaggcaagctcctgtcttacctggatgtggagggcaattccataaatatggtccagatgactttcctcaaactgctgaccgcctccgctagacaaaacttcacgtaccattgtcaccaaagcgccgcttggtacgatgtaagttctggcagctacgacaaggcactccggtttttgggctccaacgacgaggagatgtcttatgacaataaccctttcatcaagacattatacgatggttgtgctagtagaaagggctacgaaaagaccgtgattgagataaacacaccaaagatcgaccaggtccctatagtggacgtcatgatcaatgactttggcgaccaaaatcaaaagtttggatttgaagtgggacccgtgtgcttcctgggatag

SEQ ID NO: 31693 - RNA, 3081 nt, synthetic construct
  misc_feature 1..3081: note = Description of Artificial Sequence: Synthetic coding sequence
  source 1..3081: mol_type = other RNA
atggtatccgaggtgagccgggacctaaaggtcaagcgcgagaaactggtaaagttggcccaggaagggaaaatggcccttaaggacccaaaggtggaacaggcccaactggagacccaggtcttacaggtgaagcaggagaagcgcgaaaatttagaattccaggattatcaagatatccaagaggataaagtgcagaggatcagcgatgtgattggatcaacagggttcccaggatttcccggagcaaatggagagaagggagcgaggggtgtcgctggcaagcctgggcctagagggcagagggggcctaccggtccacgcggaagtagaggcgcacgcggaccgaccggcaagccaggcccaaaagggacgtcgggaggcgacgggccgccaggacctccaggagaacgtggaccccaggggccgcaggggccggttggctttcccgggccaaaggggcctccgggccctccagggaaagacgggctccccggacacccaggacaaagaggggagacgggatttcagggtaagacaggacctccagggccaggtggagtggtcggtccacagggccccaccggggaaacagggcctataggtgaacggggccaccccggtccacccgggccgccgggcgaacagggcctcccgggcgccgctggaaaagaaggtgctaaaggcgatccaggcccacaagggatttcaggcaaggacgggccagcaggactccgcggtttcccaggagagagaggtctgcccggtgctcagggagctccaggtcttaagggtggcgagggcccacagggacctcctgggccagttggcagtcccggagagagagggagtgccggaactgcaggtccaatcggccttccagggcggcccggcccccagggcccccccgggcctgccggtgaaaaaggggcccccggtgaaaagggacctcaaggccccgcaggacgggacggggtgcagggccctgtgggcttgcccggtccagccgggcccgctgggtctcccggcgaggacggggacaaaggcgaaatcggtgaacccgggcagaaaggttccaaaggcgataagggcgagaacggtcctcccggaccacctgggctacagggcccagttggagccccaggtatagccgggggtgacggcgaaccagggcctaggggtcagcaaggtatgttcgggcagaagggcgacgagggggcccggggcttccctggacctcctggccccattggactacagggtctgcctggtccacctggtgaaaagggcgagaatggcgacgtgggcccgatggggccccctggcccccccgggccaagggggccccagggacctaacggtgccgacggcccacagggcccacctgggagtgtcggatctgtgggcggcgtcggggagaagggcgaacccggcgaagcgggtaacccgggacccccgggggaagccggggtgggaggacccaaaggagaaagaggagaaaaaggggaagctggtcctccaggagccgctggaccacccggggcgaagggaccacccggcgacgatggaccaaaaggtaacccagggcccgtggggttccccggcgaccctggccctccaggcgaaccgggtcctgcaggccaggacggagtaggaggtgataagggagaggacggtgacccaggacaacctggaccccctggaccttcgggggaagcaggaccaccgggaccacccggtaaaagaggaccaccaggtgcagctggcgccgaaggcaggcagggtgagaaaggcgctaaaggggaagctggcgctgaaggtccaccagggaaaacagggccggtgggtccacagggccccgctgggaaacccgggcccgaaggtctgcgaggaatacctggccccgtgggcgagcaggggctcccgggagcagcaggccaggacggtccgcccgggccgatgggccctcctggcctccctggattaaagggagaccctggtagcaaaggagagaagggccatcctggcctgattgggctgatcggacctcctggagaacagggtgagaagggagatcgagggctgcccggaacgcagggtagccccggcgccaaaggcgatggcggtattcctgggcccgcgggccccttgggacctcctggcccccccggcctgcccggacctcaggggcctaagggcaataaagggagcactggaccagccggccagaaaggtgactcgggcttacccggtccgcctggctctccggggcctccgggtgaagtaatacagccactcccaattctgagctcaaaaaagacgcgacggcacactgaggggatgcaggccgacgccgatgacaatatcctcgattactccgatgggatggaagaaattttcggaagcctgaatagtctgaagcaggacatcgaacatatgaagttccctatgggaacgcagaccaatccagcccggacctgtaaagatctgcagctgtcacaccccgatttccctgatggcgaatactggatcgatcctaaccagggttgttcaggtgattcttttaaggtctattgtaactttaccagcgggggtgagacctgcatctacccagataaaaaaagtgagggagttagaattagctcgtggcccaaagagaaacctggttcatggttttcagagttcaagaggggcaagttgcttagttacctcgacgtagaggggaactccatcaatatggtacagatgacattcctgaagctgctgaccgcttccgccagacagaatttcacataccactgccatcagagcgccgcatggtacgatgttagttccggtagttacgacaaagccttacggtttcttggatcaaacgacgaagagatgagctacgacaataatccattcataaagaccctgtacgacggctgcgcttctcgcaagggttatgagaaaactgtcattgaaatcaataccccaaagatcgaccaagttccaattgtggacgtcatgatcaacgattttggagaccagaaccagaagttcggttttgaagtgggccctgtttgttttttgggctag

SEQ ID NO: 31694 - RNA, 5421 nt, synthetic construct
  misc_feature 1..5421: note = Description of Artificial Sequence: Synthetic coding sequence
  source 1..5421: mol_type = other RNA
atggaaccttggtcaagccggtggaagacaaagcgctggctatgggactttactgttacgaccctcgccctgacatttttattccaagccagagaggtcagaggggccgcgcctgttgacgttctcaaggcactggatttccataactcaccagagggaatcagcaagaccactggattttgcacaaatagaaaaaactccaaaggatccgacaccgcttatcgagttagcaaacaggctcagctaagcgcccctaccaagcagcttttcccaggcgggacgtttcctgaggatttcagtattctatttactgtgaaacccaagaagggtatccagtcttttctcctgtccatatataatgagcacggcatacagcagattggcgtcgaggtcggacgctcacccgtctttctgtttgaggatcacacaggtaagcccgcaccagaggattaccccctgttcagaactgttaacatagccgatggcaagtggcatagggtggcaatttctgtggagaaaaaaacagtcaccatgatcgtggactgcaagaaaaagacaactaagccactggacaggtccgaaagggctatagtcgacacgaatggaattacggtgttcggtacaaggatcttggacgaagaggtgttcgagggcgacattcagcagtttctgatcaccggtgaccccaaggccgcctacgattactgtgagcattactctcccgattgcgactcatccgctcccaaagccgcccaggcccaggagccacaaattgacgaatatgctcccgaagatattattgagtacgactatgagtatggagaagccgaatataaggaagcagaaagcgttacagaaggccctaccgtcaccgaagagaccatcgcacagaccgaagccaatatcgtcgacgactttcaggagtataattacggaaccatggagagttatcagaccgaagcacctcggcatgtgtccggcacaaatgaaccgaaccctgtcgaagaaatttttacagaggaatatctcacgggggaagattatgattctcagaggaagaacagcgaggataccctctacgagaacaaagaaattgatggacgcgattccgacctgttagtggatggcgacttaggcgagtatgacttttacgagtataaggaatacgaggacaagccgactagtccacccaacgaggagttcggacctggggtgccggccgagactgatatcacagaaacttctataaatgggcacggcgcatatggggagaaagggcagaaaggggagcccgcggtcgtggagcctggcatgttagtcgagggcccacctggacccgctgggcccgctggaatcatgggccctccaggcctccagggcccaacagggccacctggcgaccccggcgatagaggacccccaggacggcctggcctcccaggtgcagatggtctccccggcccacccgggacaatgctaatgctgccctttcggtacggtggcgatggtagcaagggtcccacaatctcggctcaggaggctcaggctcaggccatacttcaacaagcgcgaatcgctctccgcggacccccaggccccatgggacttacaggaagaccaggccctgtcggcgggcccggcagcagtggtgcaaaaggcgagtcaggcgatcccgggccacaagggccccgcggcgtccaggggcccccagggcctactggcaaacccggtaaacgaggacgacccggcgctgacggcggcaggggcatgcctggggagccaggagccaaaggcgatagaggcttcgacggattacccggtttacctggggacaaaggacaccggggagagcgcggcccacaaggacccccaggacctccaggagacgatggcatgcggggagaagatggcgaaataggaccaagagggctccccggcgaggccggccctagaggacttcttgggcccaggggaacccccggggctcctggacagcctggaatggcaggagtggatggccccccagggccaaagggtaacatgggaccacagggtgagcccggccccccaggtcagcaggggaaccctggcccgcaaggactgccagggcctcagggcccaatcggtcctcccggcgagaagggcccgcagggtaagccaggcctcgctgggttgccaggcgccgatggccctccaggtcatccgggaaaagaaggtcagagcggcgagaagggcgctttgggaccacccggacctcaaggaccaatcgggtatcctggtccccggggggtaaagggagctgacggcgtaagaggtctgaagggcagtaaaggcgaaaagggcgaggatggcttccctggattcaagggcgatatggggctgaaaggagaccgaggtgaagtgggccagattgggccccggggggaggatggacctgagggaccaaaagggcgggccggaccgacgggggaccccgggccatctgggcaggctggagaaaaaggtaagctgggggttcccggactgcccggctacccaggtaggcagggtcctaagggatctacggggttccctggattccctggcgccaatggcgaaaagggggcccggggcgtggccggaaagcccggaccccggggacaacggggcccaactggacccaggggtagccggggcgcccgcggcccaacaggtaagccaggaccgaaagggacgagcggcggcgacggtccccccggaccccctggagagaggggtccacaaggacctcaggggccagtcggctttcccggcccaaagggcccacccggccccccaggaaaagacggacttcccggacatcccggccaacggggtgagaccgggtttcagggaaaaaccggacctcccgggcctggtggtgttgttggcccccagggaccaaccggcgagacgggaccaatcggtgaacgtggccaccctggacctcctggacccccaggcgaacagggtctaccaggggctgctggaaaagaaggagccaaaggcgaccccggaccacaaggcatctccggcaaggacgggccagctggattgagaggctttccaggggagcgcggactcccgggggctcagggcgctccaggactgaagggaggggagggccctcaaggaccgccaggcccggtgggctcccccggagagagaggctccgccgggactgctggccccatcgggctgcctggccgacccgggcctcagggtccccctggccctgctggggagaaaggagctccaggtgagaaaggtccccagggccctgcaggccgggacggggttcagggccctgtgggattacctggacctgctggccccgctggctccccgggcgaagacggggacaagggagagataggagaacccggacagaagggttctaaaggcgacaaaggcgagaatggcccaccgggaccccccggcctacagggccctgttggcgctccaggaattgctgggggagatggcgagcccggcccacgtggccagcagggcatgttcggccaaaagggcgacgagggtgccaggggattccccggaccaccaggccccattggccttcagggcctaccaggaccccccggagaaaaaggagaaaatggcgatgttggtccgatgggcccccctggccctcccggtccacgtggtccacagggcccaaacggcgccgacgggcctcagggccctccgggctccgtggggagtgtagggggcgttggggagaagggcgagcctggggaggcaggaaatcctggccctccaggagaagctggagttggcggaccaaaaggtgagagaggtgagaagggcgaagccgggccacccggggctgctgggcctccaggggctaagggcccaccaggcgacgacggtccaaaaggcaaccctggaccagttggctttccaggcgaccccgggcccccaggagaaccgggcccggctgggcaagacggcgtgggcggcgataagggagaggatggcgatcccggacagcccggccccccaggccctagcggagaagcagggccacccggacctcctggaaaaaggggaccaccaggagcagccggcgcagaaggcaggcagggggaaaagggcgccaagggtgaggcgggcgctgagggccctcctggaaaaacaggccccgtgggacctcaaggccctgcaggcaaaccaggtcctgagggcttgcgcgggatccccgggcctgtcggcgaacagggcctcccaggcgccgccggacaggacggcccgccgggtcccatgggtccgcccggactgccaggtcttaagggcgatcccggatccaagggagaaaaaggtcaccctgggctgatcggcctcatcggcccgcctggagaacagggcgagaaaggcgacagggggctcccaggcacacagggcagccctggcgctaaaggtgacggcggtataccgggacccgctggacccctcggaccccccggcccacccggtctgcccgggcctcaagggcctaaaggcaacaagggaagtacgggtccagcaggccagaagggagattctggacttcccggcccgcccggatctcccgggccgcctggcgaagtgattcagccgttgcccattctgtcctctaagaagacaaggaggcatactgagggcatgcaggctgatgctgatgataatattctggattactccgacggtatggaagaaatcttcgggtcgcttaactcgttaaagcaggatatcgagcacatgaaattcccgatgggcacacagacaaaccctgcccgtacctgtaaagatctacaattgagccaccccgactttccagacggcgagtactggatcgatccaaatcaggggtgctccggcgatagtttcaaggtgtactgtaatttcacctcaggaggcgaaacatgtatttaccctgacaaaaagagtgagggggtcaggatctcatcatggcccaaggagaaacccggatcctggttcagcgaatttaagaggggcaaacttctctcctatttagatgtcgaaggcaactctattaacatggtgcagatgacctttctcaaactgctgactgcatcggccagacagaacttcacttatcactgtcaccaatctgccgcgtggtatgacgtgtcctcgggtagttacgataaagcactgcgattccttgggagcaacgacgaggagatgtcatatgacaataatcccttcataaagactctttatgatggatgcgcctccagaaagggatacgagaaaactgtaatagagattaacaccccgaaaatcgaccaggtgccaatcgtggatgtgatgatcaatgacttcggagaccagaaccagaagtttgggtttgaagtgggcccagtgtgcttccttggctag

SEQ ID NO: 31695 - RNA, 5073 nt, synthetic construct
  misc_feature 1..5073: note = Description of Artificial Sequence: Synthetic coding sequence
  source 1..5073: mol_type = other RNA
atggaaccttggtcctctcggtggaagactaaacgatggttgtgggattttactgtgacaactttggccctgacttttctgtttcaggcaagggaggtcaggggcgccgctcctgtggatgtgctaaaggctctcgattttcacaattccccagaggggatcagcaagactactggtttttgcactaaccgtaaaaactctaaagggagtgacaccgcatacagggtcagcaagcaagcccaactcagtgccccgactaagcaactgtttccaggcgggacgttcccagaggatttctctatactgttcactgtgaagcctaaaaaaggaatccagagcttcctgctgtctatttacaacgagcacggtatccagcagattggggttgaggtaggtcgctcccctgtgtttttatttgaggaccacaccggaaaaccagcgcctgaagactatcctctcttcagaaccgtcaatattgccgacggcaaatggcaccgcgtggctatctctgtcgagaagaaaacagtgacaatgatcgtggactgcaaaaaaaagaccaccaaacctcttgaccgaagcgagcgggccattgtggatacaaatggcatcacggtttttggtaccaggattctggacgaggaggtctttgagggggacattcagcagtttctgatcaccggagatccgaaagctgcttacgattattgtgagcattattcacccgattgtgactcatccgcgccaaaggccgctcaggcacaggaaccccagatcgacgaatacgctccggaggacatcattgagtatgactatgaatacggcgaggccgagtacaaagaagccgagagtgttactgaaggaccaacagtgacagaggaaactatcgcccagactgaaatcaatgggcacggcgcttacggtgagaagggacagaagggtgagccagctgtggtggaaccggggatgctggtcgaggggccccccggtcctgctggacctgccggcataatggggccccccggtctccaaggccccacaggtccacctggagaccctggtgaccgcgggcctcccgggcgacccggactgcctggcgccgacggtctgcccggacctccgggaacaatgcttatgctgccattcaggtatgggggcgatggatccaaagggcctacgatcagtgctcaggaggcccaggcccaagccattctccagcaggctagaatcgctctccgcggcccgccaggacccatgggcctgaccgggcgccctggccccgtcggcggcccaggttcatcaggcgcgaaaggtgagagcggagatcctggcccccagggtccacggggggttcagggacccccggggccaacagggaaaccgggtaaacgtggccggccaggggctgatggcggtcgcggaatgccaggagaaccgggcgctaagggcgaccgcggcttcgacggacttccaggacttcccggagataagggacacagaggcgagcgaggacctcaggggccccctggtcctccaggcgacgacgggatgcgaggggaggacggcgaaataggtcctcgcggactgcccggagaggcgggacctagaggcctgctgggtcccagaggaacacccggagcacccggacagccggggatggctggagtcgatggccctcccggccctaagggcaacatgggaccccagggggaacctggcccacccggacagcagggcaaccccgggcctcagggcttgcccggaccacaaggtcccataggccctccaggtgagaaaggtccccaggggaaacccggactggccggcctcccaggtgctgacggcccacctggccatcccggaaaagaaggtcagtcaggagaaaaaggtgctctcggaccccctggaccacagggacctattggttatcctggcccacgaggagtgaagggggctgatggggtgcggggccttaagggatccaagggggagaaaggggaagatgggtttcctggattcaaaggcgacatgggtctgaagggggacagaggggaagttggccagatcggaccgaggggcgaggacggccccgagggccctaaaggacgagctgggcctacaggtgaccctggtccctctggccaggctggcgaaaagggtaaactcggggtgcccgggctcccgggctatcctgggaggcagggtccaaagggtagcaccgggtttccaggttttcccggcgcaaatggagaaaagggcgccagaggtgtagccggtaaaccaggcccaagaggccagcggggacctaccggaccgcggggcagcaggggggcgcgggggccgacaggcaagccaggccctaaagggactagcggcggggacggaccccccggacctccgggtgagcgggggccacaaggcccacagggtcctgtagggttcccaggtcctaaggggccccctggcccacctggaaaagacggattgcccggtcatccaggtcaaaggggagagaccgggttccagggaaaaaccggacctccaggacctgggggtgttgtaggaccacaggggccaactggcgagactggacctattggtgaaagaggacaccccgggccaccgggaccacctggcgaacagggattgcctggcgccgcgggcaaggaaggagccaagggtgaccccggcccccaggggatctctggtaaggacggccccgccggtctgcgagggtttcctggagagagaggactcccaggcgcccaaggagctccaggcctgaagggcggagagggcccacagggtccacccggcccagtgggatctcctggagagaggggatccgcggggaccgccggcccaatcggactcccaggccgccccggaccgcaaggacctcccggtcctgcaggcgaaaagggtgcgccaggggaaaaaggcccacaggggcctgccgggcgagatggtgtccagggacccgtcggccttccagggcctgctgggcccgctggctcccctggggaggacggggacaaaggggaaattggggaaccagggcaaaaaggctctaaaggggacaagggcgagaacggacctccaggtccacctggactgcagggacctgttggtgctcctgggattgccggtggcgatggtgaaccgggtcccagaggtcagcagggaatgttcgggcagaagggagacgaaggcgctcgcggatttcccggcccaccaggaccgatcggactgcagggtctgcctgggcctccgggtgagaagggagagaatggagacgtcggaccaatggggcctcctggccccccaggacccaggggcccacagggacccaatggcgcagacggaccccaaggtccacccggctctgttgggagcgtgggtggtgttggagagaaaggagagccaggggaggcaggcaatcctggcccccctggagaggccggggtagggggtcccaaaggagaacgtggagagaagggggaggctggaccgcccggggccgctgggcctcctggcgcgaagggaccacccggagacgacgggcccaagggaaatccagggccagtggggttccccggcgaccctgggcctcccggggagccaggccctgcaggacaagacggcgtgggaggcgacaaaggtgaggacggggacccaggtcaacctgggccgccaggcccatcaggagaagccggccctccagggccaccagggaagagggggccacccggcgcagctggggcagagggtcgtcagggcgaaaagggcgccaaaggcgaagccggagcggaaggcccacccggcaaaaccggcccagtaggaccccaaggaccagctggaaagccgggcccagaaggtctgagaggcatccctggtccggtgggcgagcagggcctgcctggcgctgctggtcaagacgggcctcccggtccaatgggacctcccggcctgcctgggctcaaaggagatccagggtctaaaggggagaagggacaccccggtctcatagggctcataggaccacctggagaacagggggagaagggggacagggggttgcctggtactcagggaagccctggggccaagggggacggcggcattcccggacccgctggccctctggggccaccaggaccccccggtttgccgggcccccagggtcctaaaggaaataagggatccactggcccagccgggcagaaaggtgatagtggtctccccggaccaccggggagccccggtccaccaggagaggttatccagcccttgcctatcctcagctccaagaagacgcgtagacatacagagggcatgcaggctgacgctgacgacaatatcttggattactctgacggcatggaggagatttttgggtccttaaattccttaaagcaggatatcgaacatatgaagtttcccatgggaacacagacaaaccctgcccgcacttgcaaagatctacagctgagccatcctgattttcccgatggcgagtactggatagaccctaatcaaggatgttctggtgactccttcaaggtttactgcaattttacctctggcggcgaaacatgtatctaccctgacaagaagtctgagggggtacggattagctcctggccaaaagagaagcccggctcttggttcagtgaattcaaacgcggcaagctcctttcttacttagatgtcgagggcaatagtattaatatggtgcaaatgactttcttgaagctgttaacagccagcgcccgacagaactttacatatcactgtcaccagtccgcggcctggtatgatgtgagttccggaagctatgataaggctctgcgttttctgggaagtaacgacgaggagatgagctacgataacaacccctttataaagaccctttacgacggctgtgcatctaggaaagggtatgagaagacagttattgagatcaataccccaaagatcgaccaggtgccaatcgttgatgttatgataaacgacttcggagatcagaaccagaagtttggcttcgaggtgggccccgtctgctttcttggatag

SEQ ID NO: 31696 - RNA, 1761 nt, synthetic construct
  misc_feature 1..1761: note = Description of Artificial Sequence: Synthetic coding sequence
  source 1..1761: mol_type = other RNA
atgggcgtcaacgctgtgcactggtttcggaaggggctcaggcttcacgataatccagctcttaaagaatgcattcagggagctgatacaatccgctgtgtgtatatccttgacccatggttcgcagggtcttcgaacgtgggtattaaccgatggaggtttctcctgcagtgcctggaagacctggatgcaaatctgcggaaactgaactcccggctgttcgttatccggggccaaccagcagacgtctttcctcgactgtttaaagaatggaatatcacgaaactcagcatcgaatacgactcggaacccttcgggaaagagcgggacgccgcaatcaaaaagctcgccactgaggctggggtcgaggtcatcgtgaggatttcccatacactgtacgatctggacaagatcattgagctgaacggaggccagccacccctgacgtacaaacgttttcagacgctcatttcaaagatggaacctttggaaatccccgttgaaaccattaccagcgaagtgatagaaaagtgcaccactccactgagcgacgatcacgacgagaaatacggggtgccctccctggaggaacttgggtttgacaccgacggcctgtcgtccgccgtgtggccaggaggggaaactgaggccctcacacgcctggagcgccatttagagaggaaggcttgggttgctaacttcgaacgccctcgtatgaacgccaattctctgctcgctagccccaccggactttcgccctatctgcgattcggttgcctaagttgtaggctgttttatttcaaactgactgacttatacaaaaaggtgaagaagaattcgagcccacccctttccctctatggacagctcttatggagagagtttttctataccgccgccaccaacaatccaaggtttgataagatggaaggaaacccaatctgcgtccagatcccatgggataagaacccagaggctctggcaaaatgggctgaaggccgcaccggatttccatggattgacgcgatcatgactcaattgaggcaggaggggtggattcatcatctagcacggcatgcggtagcctgctttttgacgaggggagatctgtggatcagctgggaggaaggcatgaaggtgtttgaagaactacttttggatgccgattggagtatcaatgctgggagttggatgtggctctcttgtagttctttctttcaacagttttttcactgctattgccctgtcggatttggaaggcgcaccgaccctaatggggattatatcaggcggtatctgcctgtactgagagggtttccggctaagtacatttacgatccatggaatgcgcctgagggaatacaaaaagtggcaaagtgcctgattggcgtcaattaccctaagccaatggtgaatcatgcagaagcgagcagactgaacatcgagcggatgaaacagatttaccagcagttgagtaggtatcggggcctgggtctgcttgccagtgttccttccaaccccaacggcaatgggggattcatgggatatagcgccgagaacatacctggatgcagtagcagcggctcgtgttcccaaggttcaggtatcctacactacgcccacggagacagccagcaaacccacctgctcaagcaaggtagaagctcaatgggcactgggctcagtggcggtaaacgcccgtcacaggaggaggatactcagtctatcggtcctaaagtgcagagacagagtacgaactag

SEQ ID NO: 31697 - RNA, 504 nt, synthetic construct
  misc_feature 1..504: note = Description of Artificial Sequence: Synthetic coding sequence
  source 1..504: mol_type = other RNA
atgctgccagaaaaagccctccacggacaccctcagcttcctcgcaccgtcccaactcgtgccgcaatgcgcgctgccggaacccttctcgccttttgctgtctggtattatcaaccaccggcggacctagccctgatacctgtagccaggacctgaactcaagagtgaaacccggcttccctaagacgataaaaactaacgatccaggcgtgctgcaagctgcgcgatacagcgttgagaaattcaataactgtactaacgacatgtttttatttaaggagtctcggatcactcgcgcgctggtgcagattgtgaagggcctaaaatatatgcttgaggtagaaattgggcgtacgacttgcaaaaaaaatcagcacctccgactggatgattgcgactttcagacaaaccatacgttgaaacagacactctcttgctacagcgaagtgtgggtggttccctggctacagcatttcgaagtgccagtactccgctgtcattag

SEQ ID NO: 31698 - RNA, 438 nt, synthetic construct
  misc_feature 1..438: note = Description of Artificial Sequence: Synthetic coding sequence
  source 1..438: mol_type = other RNA
atgcgtgccgcaggaaccttactagctttctgttgcctcgtgctcagtactacaggcggcccttcaccagacacttgctcccaagacttgaacagtcgtgtcaaaccaggattccctaagaccattaagacaaacgaccctggcgtgttgcaggcagcccggtatagtgtggagaaattcaataattgtacaaatgatatgttccttttcaaagaatctcggataaccagagccctagtgcagatagtgaaaggattaaagtacatgttggaggtagaaataggaagaaccacctgtaaaaaaaaccagcatcttaggctcgacgattgcgattttcaaacaaatcacaccctgaagcagacactgtcatgttacagtgaggtctgggttgtaccctggttacagcattttgaagtgccagtacttagatgccattag

SEQ ID NO: 31699 - RNA, 513 nt, synthetic construct
  misc_feature 1..513: note = Description of Artificial Sequence: Synthetic coding sequence
  source 1..513: mol_type = other RNA
atgtactgtcagttcgcaagcttccaatacacctgtcaaccctgccgcggccagagaatgctatgtacccgcgatagtgagtgctgcggggatcagctttgtgtttggggccactgtacaaaaatggcaaccaggggttccaacggtaccatttgtgacaaccagcgtgactgccagccgggcctgtgctgtgcctttcaacgaggtcttctcttcccagtctgcacaccccttccagtcgagggagagttgtgtcacgacccagcaagtcgactgcttgatctgataacatgggagctggaaccagacggcgccctcgaccgctgcccatgtgcaagtggactgctttgtcaaccgcattctcactctctggtgtatgtgtgcaaacccacatttgttggctctcgggatcaggatggggaaattctgctgcctcgggaagttcctgatgaatatctcgccgccagttggaggagatgtgcccgtagttggcggacttggagaggggcttag

SEQ ID NO: 31700 - RNA, 1053 nt, synthetic construct
  misc_feature 1..1053: note = Description of Artificial Sequence: Synthetic coding sequence
  source 1..1053: mol_type = other RNA
atgcagcgcctgggggccaccttgctctgcctgctgctcgccgccgctgtgcctacagccccagcaccagccccgaccgccactagtgcccccgtgaagccaggacccgctcttagttatccccaggaagaagctacattgaacgagatgttccgggaggtagaggagctcatggaagacacacagcacaagctgcgctccgccgtcgaagaaatggaggccgaggaggccgccgccaaagcctcgagcgaggttaatctcgcaaatttaccgccttcataccataatgagaccaacactgacacaaaggtggggaataataccatacacgttcacagggaaatacacaagatcaccaataaccagaccgggcagatggtattcagtgaaaccgtgattaccagcgtcggcgacgaagaagggagaaggagtcacgaatgcattatagacgaagactgcggcccatcaatgtactgtcaatttgcctcattccagtatacctgccagccttgtcgcgggcaacgtatgttatgcacaagagacagtgaatgttgtggcgaccagctgtgtgtatggggtcactgcaccaagatggccacccgaggttctaatggcactatctgtgataaccaacgagactgccagccaggattgtgctgcgcttttcaacgcggactcctatttccagtctgtacaccgctgcccgtggaaggagagctgtgtcacgatccggcgtccagactgcttgaccttatcacgtgggagttagagcccgatggcgctctggacagatgcccgtgcgcaagcgggctgttatgtcaaccccatagccactctttagtatacgtgtgcaaaccgaccttcgtcggctctagagatcaagacggggagatcctgctgcccagagaggtgccagacgagtacgaggtgggctcttttatggaagaggtgcgccaggagttagaagacctcgaacgatcattaactgaggagatggcactccgtgaacccgccgccgccgctgcagccctcctgggcggtgaagaaatatag

SEQ ID NO: 31701 - RNA, 882 nt, synthetic construct
  misc_feature 1..882: note = Description of Artificial Sequence: Synthetic coding sequence
  source 1..882: mol_type = other RNA
atggaagacactcaacacaagttgcgctctgctgtggaagagatggaagccgaggaagccgctgccaaagcctcctctgaggttaatctcgccaatcttcccccaagttaccacaacgagactaacactgatactaaggttggtaataatacaatccacgttcatagagagatccacaaaatcaccaacaaccagaccggacagatggtgttcagcgaaaccgtcattacatcagttggagatgaggagggtaggcgcagccatgaatgcatcatagacgaagactgcggaccatccatgtattgccagttcgcctcctttcagtacacctgtcagccatgcaggggccagaggatgctttgtacgcgggactcagaatgttgtggagatcaactgtgtgtctggggacattgtactaagatggccaccaggggatctaacgggaccatttgcgacaaccagagagattgtcagccggggctgtgttgtgcctttcagagagggctcttgttccccgtgtgtaccccactgcctgttgagggggagctgtgccatgaccccgctagtcgcctactagacttaatcacatgggaactcgagcctgatggagcgctggatagatgtccttgcgcgtcgggtcttctgtgccagccgcactcccactcactggtttacgtgtgcaagcccacattcgttggctcccgagaccaggatggcgagatcttactcccacgcgaagtgccagacgaatacgaggtgggctctttcatggaagaggtcaggcaggagctggaagaccttgagaggtcattaacggaagagatggcattgcgggagccggccgccgccgcggctgctttactaggcggcgaagagatctag

SEQ ID NO: 31702 - RNA, 1053 nt, synthetic construct
  misc_feature 1..1053: note = Description of Artificial Sequence: Synthetic coding sequence
  source 1..1053: mol_type = other RNA
atgcagagactcggcgcaactcttctgtgccttttgctggctgctgctgtgcctactgcccccgcccctgcacccaccgcgacctcagcaccggtcaagcccggcccagcactgtcttacccccaagaagaagccaccctgaatgaaatgttccgcgaagtcgaggagctcatggaggatactcagcataagctgcggagtgccgttgaagaaatggaggcagaagaagccgcagccaaggccagcagtgaggttaaccttgccaatctccccccttcttatcacaacgagaccaatacagataccaaagtggggaataacaccattcatgttcatcgagaaattcacaaaattactaacaaccaaaccgggcagatggtgtttagcgaaaccgtcattaccagcgtcggagatgaggaaggcagacgttcacacgaatgtattattgacgaagactgcggaccttctatgtattgccaattcgcaagttttcagtacacgtgccagccgtgtcggggacagaggatgctgtgtacccgtgattctgagtgctgtggggaccagttatgcgtatggggtcattgcacaaagatggctacccggggatccaacggcacaatttgtgataaccagcgggactgccagcccggactgtgttgcgcatttcagaggggcttattgtttcccgtctgtacaccccttcctgtggaaggcgaactctgccatgatcctgcctctcggctgctggacctgattacttgggaactcgagccagacggagcactggacaggtgtccctgtgcctccggtttactttgtcagcctcacagccatagccttgtctatgtctgcaaacccacattcgtgggctcccgagatcaagatggcgagatactgctgccccgcgaggtaccagacgagtacgaagttgggtcttttatggaggaagtgcgtcaggaactcgaagatctcgaaaggtccctgactgaggaaatggctttgagggagcctgccgctgccgctgcagcgctcttgggaggagaggagatttag

SEQ ID NO: 31703 - RNA, 969 nt, synthetic construct
  misc_feature 1..969: note = Description of Artificial Sequence: Synthetic coding sequence
  source 1..969: mol_type = other RNA
atgcaacggctgggcgcaactctcctctgtctcctgctggcagctgctgtacctaccgctccagccccagccccaactgcaacaagtgcccctgttaaacccggccccgccctcagttacccccaggaagaggctacattgaatgaaatgttccgggaggtcgaggaactgatggaagacacccagcacaaattgcggagcgcagtggaagaaatggaagcagaggaggctgcagccaaagctagcagtgaggtcaatttggcaaaccttccacccagctatcacaacgagaccaacaccgacacaaaggtgggtaataacactattcatgtccaccgagagatccataaagaatgcattattgacgaggactgtggcccatctatgtattgtcaattcgcctcctttcaatacacatgccaaccctgccgggggcagaggatgctatgcactcgtgatagtgaatgttgtggagatcagctctgtgtgtggggacactgcaccaagatggccaccagagggtcaaacggcacaatctgtgacaatcagcgcgactgccagcctggactgtgttgtgcatttcagagaggcctcctttttcccgtttgcacgccactccctgttgagggagaactgtgtcacgatcccgcaagtcgacttctggatctcatcacttgggagcttgagccagatggagccctcgacagatgtccctgcgcctcaggcttgttatgccaaccccactctcattctttagtgtatgtctgcaaacccacgttcgttgggtcccgcgaccaggatggcgaaattttgctgccgcgggaagtccccgatgagtacgaagtaggatctttcatggaggaagtccgacaggaacttgaggatctggaacggtccctgactgaggagatggcactgcgagaaccagctgccgctgctgctgcccttctggggggagaggaaatctag

SEQ ID NO: 31704 - RNA, 708 nt, synthetic construct
  misc_feature 1..708: note = Description of Artificial Sequence: Synthetic coding sequence
  source 1..708: mol_type = other RNA
atgcaacgactcggtgctactctcctatgcctgctcctggccgccgccgtgcccactgctccggcacctgcgcccaccgcaacctctgcgccggttaagccaggacctgcactgagttatccccaggaagaggccactttgaatgagatgttccgcgaagttgaagaactgatggaagatacccagcataagctgagatccgctgtggaggaaatggaagccgaggaagctgctgctaaggctagctcagaagtgaatcttgccaacctgcctcccagctatcataatgagactaacaccgataccaaggttggaaacaataccattcacgtacacagggagatccacaagataaccaacaatcagaccggacagatggttttttctgaaaccgtgatcacgtctgtgggtgacgaagaaggacgacgctctcacgagtgcatcatcgacgaggactgcgggccatcaatgtattgtcagttcgcttcctttcagtatacctgccagccttgccgcggacaacggatgctatgcaccagagacagcgaatgttgtggcgaccagctctgtgtttggggacactgcactaagatggcaactagaggatccaacggtacaatttgtgataatcaaagagactgccaacctggactgtgctgcgccttccagaggggattactgtttccagtgtgcacgccactgccatag

SEQ ID NO: 31705 - RNA, 972 nt, synthetic construct
  misc_feature 1..972: note = Description of Artificial Sequence: Synthetic coding sequence
  source 1..972: mol_type = other RNA
atggacccggggaaggacaaagagggtgtgccccagccctcaggacctcccgccagaaaaaagttcgttatcccactcgatgaggacgaagtccctccaggcgttgccaaacccttattcagatcgacacagagccttcccactgtggatacttccgcacaagcggcacctcagacctacgccgagtacgcaatctcccagccactggaaggagctggagccacttgccctacaggatcagagccccttgctggggaaacaccaaatcaggcactgaagcctggcgccaaatcgaatagcatcattgtgtcacccaggcaacgcggcaaccccgtgctgaaatttgtacgcaacgtcccctgggagtttggagatgtaataccagattacgtcctcgggcagagcacatgcgcactctttctctccctgcggtaccacaacctgcaccctgactatatccatggccgtctccagtcactcggcaagaacttcgccttacgagtgttacttgtgcaagtggatgttaaagaccctcagcaggcacttaaggaactggcaaagatgtgtattcttgcagactgcacactcattctcgcatggtctcctgaggaagccggcagatacctagagacttataaagcttacgagcagaaacccgccgatctgctcatggagaaactggaacaggatttcgtgagccgcgtgaccgagtgtttgacaactgtgaaaagcgtcaacaagactgatagccagacactgcttactacatttggatccttagaacagctgatcgcagcgtctagagaagacttggcactctgtccaggactcggcccacagaaagtcagagccctcggtaagaacccccgttcctggggaaaggaacgagcgcccaacaagcataacctacgacctcagtcctttaaggtgaaaaaagagccaaaaacacgacattccgggttccgcctgtag

SEQ ID NO: 31706 - RNA, 384 nt, synthetic construct
  misc_feature 1..384: note = Description of Artificial Sequence: Synthetic coding sequence
  source 1..384: mol_type = other RNA
atgcagcagcccttcaactacccctatccccaaatctattgggtagactcatctgcctcctctccatgggcccccccaggcaccgtattgccgtgccctacctccgtacccagacggccagggcagcgacgaccgccaccaccacctcctcctccacctctccccccgccacctcccccacccccacttccacccttacctctaccacctctcaaaaagcgcggaaaccatagcaccggattgtgcctcttagtaatgttctttatggttttagttgcactggtgggtctgggattaggcatgttccagctctttcacctgcagaaggaacttgcagaactccgagaagccacccctgtccatccattgaaaaaacgatcatag

SEQ ID NO: 31707 - RNA, 846 nt, synthetic construct
  misc_feature 1..846: note = Description of Artificial Sequence: Synthetic coding sequence
  source 1..846: mol_type = other RNA
atgcagcagccgttcaactacccgtatccgcaaatttactgggttgacagctcagcatctagcccctgggcccctcctggaaccgttctcccttgtccgacctctgtgccacggagacctggtcaaagaaggccccctcctccacctcccccaccccctctgcctccgccgccacctcctccccctttgcctcctttaccacttccaccactgaaaaaacgagggaaccattctactggcctgtgcttgttggtcatgttctttatggtgctggtggctcttgttgggctgggcctaggaatgttccaattgttccatttacagaaggaactggctgaactgcgagagagtacttcccaaatgcacactgcaagtagcttggagaagcaaattggacacccctcaccccccccagagaagaaagagctcagaaaggttgcccacctgactggcaagagcaactcaaggagtatgccgcttgaatgggaggatacgtacgggatagttctgttatcaggagtgaaatacaaaaagggcgggcttgtgatcaatgaaaccggtctgtacttcgtctatagcaaagtgtacttcagaggccagtcatgcaacaacctgcctctgtcccacaaagtatatatgaggaatagtaagtacccccaggacctggtcatgatggaggggaaaatgatgtcttactgtactactggacagatgtgggccagatcctcttaccttggggccgtcttcaacctcacctcagccgaccatctttatgttaatgtctcagaacttagtttagtgaattttgaggagtctcagaccttcttcggcctgtacaagctgtag

SEQ ID NO: 31708 - RNA, 585 nt, synthetic construct
  misc_feature 1..585: note = Description of Artificial Sequence: Synthetic coding sequence
  source 1..585: mol_type = other RNA
atgcacaagtggatcctgacttggatccttcccactttgttatatcggagctgcttccacattatttgtctggtcggtaccatctcccttgcatgcaacgacatgacccctgaacagatggcaaccaacgtgaactgctctagccccgagagacataccagatcatatgattacatggaggggggcgatatccgcgtgcgacgcctgttttgcagaacccagtggtacctgagaatcgacaaacggggaaaagtaaaaggtactcaagagatgaagaataattacaatatcatggagatacgaacagtggcagtcggcatagtcgctataaagggagtggagtccgaattctatttagccatgaacaaggagggcaagttgtatgccaaaaaggagtgtaatgaagactgtaactttaaggagctaattctcgaaaaccactacaatacctacgctagcgcaaaatggactcataatggaggggaaatgttcgttgccttaaatcaaaaaggcattcctgtcaggggtaaaaaaacaaagaaggaacagaaaactgctcacttcctgcctatggcaataacttag

SEQ ID NO: 31709 - RNA, 585 nt, synthetic construct
  misc_feature 1..585: note = Description of Artificial Sequence: Synthetic coding sequence
  source 1..585: mol_type = other RNA
atgcataaatggatcctcacttggattcttccgactctcctctatagatcttgcttccacattatctgtctagtggggacaatcagtcttgcctgcaacgacatgacccccgagcaaatggcaaccaacgtgaattgttcttcacctgaaaggcacacccgtagttacgactacatggagggaggagatataagagtacgccggctgttttgtagaactcagtggtatttgcgcattgataagagaggaaaggtgaagggaactcaggagatgaaaaataactataatattatggagatacggactgttgccgtgggaatcgtcgcgataaagggagtagagagcgaattttaccttgcaatgaataaagagggaaagctgtatgccaagaaggagtgtaacgaagactgtaattttaaggaacttattttggagaaccactacaacacatacgcctctgccaagtggacacataacgggggagaaatgtttgtggctcttaatcagaagggtatccctgtcagagggaagaaaacaaaaaaggaacagaaaacggcccacttcctcccgatggctattacttag

SEQ ID NO: 31710 - RNA, 7164 nt, synthetic construct
  misc_feature 1..7164: note = Description of Artificial Sequence: Synthetic coding sequence
  source 1..7164: mol_type = other RNA
atgttgcgtggccctggccctggcttgctgctcctggctgtccagtgcttgggcacagccgtgcccagtaccggcgccagcaagtccaaaagacaagcccagcagatggtgcagccccagtctcccgtggccgtctcacaatcgaagcctggctgctacgataacggcaagcactatcagataaaccagcagtgggagagaacgtacctgggaaacgccctggtctgcacctgctacggtggtagcaggggattcaactgcgaatcgaagccggaggccgaggaaacttgctttgacaaatacaccggcaacacgtaccgcgtcggagatacttatgagcgacctaaggactcaatgatctgggattgcacctgcatcggagccgggagggggcgaatttcatgtacgattgcaaaccgctgtcacgagggtggtcagtcttataagattggcgacacatggcgacgtcctcacgagaccggcggctacatgctggaatgcgtgtgcttgggcaacgggaagggggaatggacttgcaagccaattgccgagaaatgttttgaccacgcagccgggaccagctacgtagtaggggagacatgggaaaagccatatcagggctggatgatggtcgactgtacatgtctgggcgaaggatcaggacgcatcacttgcacgtcccggaatcgctgtaatgaccaggacacccggacgtcctatcgaatcggcgatacttggtcgaagaaggataacagggggaacctgcttcagtgtatttgtacaggaaacggtcgcggcgagtggaaatgcgagagacacacgtccgtccagaccacatccagcggctcaggtccgttcacagacgttagggccgctgtctaccagcctcaacctcacccacagcccccgccctatggacactgtgttacagattcaggggtggtgtacagcgtcgggatgcagtggctgaaaactcaaggaaataaacaaatgctgtgtacctgtctcggtaacggcgtctcttgccaggaaacggccgtgacccagacctatggtggcaatagtaatggggaaccttgcgtcttacccttcacctataatgggcggactttttactcttgtaccaccgaaggacgtcaggatggccatttgtggtgtagcacaacgtccaactatgagcaggatcagaagtactcattttgcactgaccacaccgtattagtccagacccgggggggcaactctaacggcgcactctgccattttccattcttatacaacaaccataattacaccgactgcacctccgagggccgcagagataatatgaagtggtgcggaactactcagaactatgatgcagaccagaagttcggattttgccccatggctgcccatgaggaaatctgcaccaccaatgagggggtcatgtataggatcggcgatcagtgggacaaacagcatgatatggggcacatgatgcggtgcacatgtgttgggaacggaaggggcgagtggacatgtattgcctatagtcagctgcgggaccagtgtatagtggacgacataacttataacgttaatgacaccttccataaacgacatgaggaaggacacatgctcaactgtacatgtttcggccagggacgtggacgttggaagtgcgaccctgtcgatcagtgccaggactcagagactgggactttctatcagatcggcgactcatgggaaaaatacgtccacggggtcagatatcaatgctactgctacgggagagggatcggagagtggcactgccagcctctccagacctatccctcatccagtgggcctgtggaggtttttatcaccgaaacccccagtcagcccaactctcacccgatccagtggaacgccccacaaccctcccacatctcgaaatacatcctgcgttggcgccccaagaactccgtaggacggtggaaagaagccactattccaggccaccttaactcctacaccatcaagggacttaagccaggagtagtgtatgagggccagctgatcagtattcagcaatacgggcaccaagaagttacaaggtttgattttacaactacctctacctcaacaccagttaccagcaatacagtcaccggagagaccacacctttctccccactggtggctacctctgagtctgtgacagaaataacagcatcatcatttgttgtgtcctgggtgagtgcctcagacactgtgagtgggttccgcgtggaatacgagctctctgaggagggagatgagccacaatacctggatctgcccagcacggcaacatcagtcaatattccggatttgctgccagggcggaagtatattgtcaatgtgtaccagatttccgaagacggcgagcagagcctgatactctccactagccagaccacagccccagacgcaccgccggacacaactgtcgatcaggtggacgatacttccatcgtcgtgcgttggtcccgtccccaggcacctatcaccggctacagaatcgtgtatagcccgtcagtcgaaggttcatccaccgagctgaacctgccggagaccgcgaatagtgttacactctccgacctacagcccggagtccagtacaatatcacaatctatgcagtagaagaaaaccaggaaagtactccagtcgtcattcaacaggaaacaacgggaaccccgcggtccgacaccgtgccatcaccacgagaccttcagttcgtcgaagttacagatgttaaggtcacaatcatgtggacaccaccagaaagcgccgtcacaggatacagagtcgacgtcatcccagttaatttacctggagaacacggtcagcgactgcctattagcaggaatacctttgctgaggttaccggcctaagccccggcgtgacttattacttcaaagtgtttgctgtctcccatggaagggagtccaagccattaaccgcccagcagacgactaaactggacgccccgacgaatctccagttcgtgaacgaaactgattccaccgttctcgtgagatggactcctccccgagcacaaatcacaggatacaggctcacagtcggcctcacccggagagggcagcctcggcaatataatgtgggcccttctgtgtctaaatatccactgcgtaatctgcagcccgcctccgagtataccgtctccctagttgctattaaaggaaatcaggaaagccctaaggccaccggcgttttcaccacattgcagccagggtcatcaatcccgccttataataccgaagtgaccgagacaactatcgtcatcacttggaccccagcacctagaatcgggttcaagctcggcgtgcgccccagtcagggcggcgaggcccccagggaagtgacatcggacagcgggagcatcgtggtgtcaggtctgactccaggcgtggaatacgtgtacactattcaggtcctaagggacggacaggagagagacgctcccatagtgaacaaggtggtaacacccctgagtcctcccaccaacttacacctcgaagctaatccggataccggcgttctgacagtgtcttgggaacgcagcaccactcccgacatcacaggatacagaatcaccaccacccctacaaacggtcagcaggggaactctctcgaggaagttgtgcatgccgatcaatctagctgtacgttcgacaatctgagcccaggacttgaatacaatgtatccgtgtatacagtcaaggatgataaggagtcagtacctattagcgacaccatcatcccagaggtcccccaactgactgatctgagctttgtcgacatcaccgatagctccataggcttgaggtggaccccactaaattcctcaactatcatagggtaccggatcaccgtggtggctgcaggcgagggaattcccatctttgaagattttgttgactccagcgtgggctactacaccgtgaccggtctggagcccggcatcgactacgatatctctgtgattaccctgattaatgggggcgagtcagccccgaccacattgactcaacagacagctgttccccctccaactgaccttcggttcttttctgatattaccgcgaactcttttacagtgcattggatcgcgcctcgggccacaatcaccggctacagaatcagacatcacccagaacacttctcaggtcggccccgggaagacagagttcctcacagcagaaactctatcacactgactaacctgactccagggacggaatatgtggtgtcgatcgtggccctcaatgggcgggaagagagtcccttactgatcgggcagcaaagtacagtgagcgatgtgccaagggacctcgaggtggtcgcggcgacacctactagcttattgatttcatgggatgctcctgctgtgactgtacggtactatcgcatcacatacggcgaaaccggcggtaacagcccggtgcaagaattcaccgtacccggctcaaaaagcaccgctacgatatccggcctgaaaccaggcgtggactacacaattaccgtatacgcagtgaccggacggggtgatagcccagcaagctccaagcctatttcaatcaactatcgaacagagattgataaaccctcccagatgcaagttaccgatgtgcaggacaactccatcagtgtgaagtggttgccctcatcctcaccagttaccggataccgcgtcactacaaccccaaaaaacggtccaggcccaacaaaaactaagacggcggggccagaccagacagagatgaccattgaaggattacagcccaccgttgaatacgtcgtgtcagtgtatgcacaaaatccaagcggcgaatctcagcctttggtccaaacagcggtgacaaatatcgataggcccaagggccttgccttcacggacgtggacgtagattctattaaaatcgcgtgggagagcccccagggccaggtttcaagatatcgcgtgacatatagctctcctgaggacggaatacatgaactcttccctgcccccgacggtgaggaggacaccgccgagctccaaggcttacggcccgggagcgaatacaccgtaagcgtcgtggccttacatgatgacatggaatcgcagccactaatcggaacccaatctactgccattccagcgccaacagacctgaagtttacacaggttactcccacaagcttgtccgctcagtggacaccacctaatgtgcagctcaccgggtaccgagtcagagttacacccaaggaaaaaactggacccatgaaggaaataaacctggctcctgacagcagctcggtagtggtcagcggtctgatggtcgccaccaaatacgaggtctctgtttatgccttaaaagacacattgactagtaggccggctcaaggtgttgtgacgacactggaaaatgtgagtccccctcgcagggcgagagttacggacgccacagaaaccactatcacgatcagttggcgcacgaagaccgagacaatcactggatttcaggtggacgccgtgcctgctaacggccaaactccgatacagcgcactattaagccagatgtccggtcctataccattactggattgcagcctgggacagactacaagatctacctctacacactgaacgataacgctaggagctcccccgtggtcatcgatgccagcactgcgattgatgcaccctctaatctgcgctttctcgcaaccacccccaatagcctgcttgtttcctggcaaccgccccgcgccagaatcaccggctatattattaagtatgagaaacccggatctccccctcgcgaagtggtcccccgtccacgtccgggcgttactgaggcaactataaccggtctggaaccgggaaccgagtacaccatatatgtcatagcattgaagaataaccagaaatcggagcccctgattgggcgcaagaagacagatgagctgccgcagttagtgaccctgccccaccctaatctgcacgggccagaaatactggatgtcccctcaacggtccagaaaactccttttgtcacacaccccggatatgatactggaaacgggattcagttacccggcacatcagggcagcagccttcagtcggacagcagatgatcttcgaggagcatggatttagacgcaccaccccgccaactaccgccaccccaattcgccataggccacgcccatacccccccaacgtgggggaggagattcagatcggacatattccccgagaggacgtagattatcacctctacccccatggacctggattgaacccaaacgcctcaaccggtcaggaggctttgagccaaactactatttcatgggctccgtttcaagatacaagtgaatacattatttcttgccacccagtcgggacagacgaagagcccctgcagttccgggtgcctggtacatccacctccgccacactgaccggcctcacaaggggcgccacctataatgtgatcgtcgaggctctgaaagaccagcagaggcacaaagtgcgggaggaagttgtgactgtggggaatagcgtaaatgaagggcttaatcagcctactgacgactcctgcttcgacccatatactgtttctcactacgccgtgggcgatgagtgggagcgtatgtcagaaagtggcttcaagctgctttgtcaatgtctcggtttcggaagcggtcacttcaggtgcgattcaagcaggtggtgtcatgataacggggtgaattacaaaatcggggagaagtgggacaggcagggcgagaacggacagatgatgtcttgtacatgcttagggaatgggaaaggtgagttcaagtgcgacccccacgaggcgacttgctacgatgacgggaagacctaccatgtcggtgagcagtggcagaaagagtatctgggagctatctgttcctgtacctgtttcggagggcagcgcggatggcgatgtgataactgtcgcaggcctggaggcgaaccttccccagagggtactacgggtcaaagttacaaccaatatagtcaaaggtatcaccaacgaaccaatacgaatgttaattgccccatagaatgttttatgcccctggacgtgcaggcagatagagaggatagtcgagagtag

SEQ ID NO: 31711 - RNA, 7341 nt, synthetic construct
  misc_feature 1..7341: note = Description of Artificial Sequence: Synthetic coding sequence
  source 1..7341: mol_type = other RNA
atgctgagggggccaggacctggcttgctcctattggccgtgcagtgcttgggcaccgctgttccctcgactggagccagcaaaagcaagaggcaagcacagcagatggtacagccccagtctccagtagctgtgagtcagagcaagcccgggtgctatgacaatggcaaacactaccaaatcaatcagcagtgggaacgaacctatctgggtaacgctcttgtctgcacctgttatggaggatcccgaggcttcaactgtgagagcaaaccggaggctgaagagacgtgcttcgacaagtacactggcaatacctatagggttggagatacatacgagagaccgaaggactcaatgatatgggactgtacatgtatcggcgccggccgcgggcgcatctcctgtacaatagccaacagatgccatgagggcggtcagagttacaagattggcgacacctggcggcggcctcatgaaaccggtggttacatgctggagtgcgtgtgtcttggcaacggcaagggcgagtggacttgtaaacctatcgctgagaagtgctttgaccatgctgctggaacctcctatgtcgtgggagagacatgggaaaagccctaccagggatggatgatggtggattgtacttgcctcggagagggtagcggccggataacttgtacttccaggaatcggtgcaatgaccaggataccagaacatcttatcgaattggcgatacctggtccaagaaggacaatcgaggtaacttgttgcaatgtatttgcacaggcaatggaagaggcgaatggaagtgtgagagacatacctccgtccagacaacctctagtggatccggaccctttaccgacgtgagagccgctgtctatcagccccaaccccatccacagccaccaccttatggacactgcgttaccgatagcggagtggtttattccgtgggcatgcaatggctgaaaacccaggggaacaaacagatgctgtgtacatgtttaggaaatggagtcagttgccaggaaaccgcggtcacacaaacctatggaggaaattcaaatggcgagccttgtgtgctgcctttcacttataatggaaggaccttttacagctgtaccactgagggccgccaggacgggcacctctggtgttcaacaactagcaactacgagcaggatcaaaagtatagcttctgcaccgatcataccgtgctagtgcaaactcgaggaggaaactctaacggagcactctgccattttcccttcttgtataacaaccataattacactgattgcacatccgaaggcagacgcgataatatgaaatggtgtggcaccactcagaattatgatgcagatcaaaaattcggcttctgccctatggccgcacacgaagagatctgcacaacaaatgaaggagtcatgtatcgtatcggagaccagtgggataaacagcacgatatggggcacatgatgcgctgcacctgtgtcggtaatggtcgcggggaatggacatgtattgcatactctcagctccgagaccagtgtatagtggatgatattacttataatgtcaatgacacattccacaagagacatgaggaagggcatatgctcaactgcacgtgttttggccaagggagaggtagatggaaatgtgatcccgtagatcagtgccaagatagtgagaccggcaccttctatcagattggggacagctgggaaaaatacgtgcacggcgttagataccagtgctattgttacgggagaggaataggagaatggcactgtcagcctctgcagacgtatccttcatcaagtgggcctgtggaggtgttcatcacggaaactccaagccaacctaactcacatcccattcaatggaatgcccctcaaccaagccacatttctaaatatatccttagatggagacccaagaactctgtggggcgatggaaagaagcgacaatccccggacacttgaactcctatacaatcaagggcctgaaaccaggcgtcgtttacgagggccagttaatcagcattcagcagtacgggcaccaggaggtcacacggttcgacttcacgaccacgtccacatcaacacccgttacttcaaacacagtgacgggggagaccactccattctctcccttagtagccacttccgaaagcgttacagagatcacagcgagcagcttcgtggtgtcgtgggtctctgcatccgacacggtgtccgggttcagggtggaatacgaactttccgaggaaggcgacgaacctcaatatttggacttaccctctacagcaacatcagtaaacatccctgacctgttgcctgggaggaagtatatcgtcaatgtgtatcaaattagcgaggacggtgaacagagtctcatcctgtccacatcacagaccaccgctcccgatgcccctcccgacactaccgtcgatcaggtggatgacaccagtattgtagtgcggtggtcccggccacaggcaccgattactggctatcggattgtctactccccttccgtagaggggtcgagcaccgagttgaacttacctgagacggctaacagcgtgacactctcagatttgcagcccggcgtgcagtacaacattaccatttatgccgtggaggagaatcaggagtcaacgcccgtggtgatacagcaagagacaaccggaactccgcggagtgatacggtcccctctccccgggacctacagttcgtcgaggtgactgacgtgaaagttacaattatgtggacgcctccggaatccgcagtgaccggttaccgggttgacgtgatccccgtgaacctccccggtgagcatggacagaggttgcccatttctcgtaacacattcgcagaagtcacagggcttagccctggggtcacatactacttcaaggtgtttgcagtaagtcatggtagggaatcaaagcctctgaccgcccagcagaccacaaagctcgatgcaccaaccaacctacagttcgtcaacgaaaccgattccactgtcttagtgcgatggacaccacccagggcccagatcaccggctatcggttaaccgttggcctcacgagacgcggacagccaaggcagtataacgtcggtcccagcgttagtaaatatcccctccggaaccttcagccggcaagcgaatatactgtttccttagtcgctatcaagggcaatcaagagagcccaaaggccaccggagtgtttaccacactccagccgggatcaagcatcccaccttacaataccgaggtaacagagaccactattgtcattacctggacacccgcaccaaggatcggttttaagctcggggtgcgccccagccagggtggggaggcacctagggaagtgacatctgactctgggagcattgtagtctccggacttacccctggggtggaatacgtttatactatccaagtgttacgagatggccaggagcgggacgcccccatcgttaacaaagtcgtcaccccgctttcccccccaactaatctgcacttggaggccaatccggatacaggagtgctgactgtgagctgggagagaagcactacacccgacattaccggataccgcatcactactacacctaccaacggacagcagggcaattcactcgaggaagtggtacatgcagatcaatcatcctgcacgttcgataacctgtctcctggcttagagtacaatgtctctgtgtacaccgtgaaagacgacaaagagagcgtccctattagcgacactataatccctgaggttccgcaattgaccgatctgagtttcgtggacatcaccgactcttccatagggttgcgctggactccactaaacagttcaaccattataggataccggattacagtggtcgcagcaggtgagggaattccaatttttgaagattttgtggactcgtcggtgggatattacaccgtgaccggccttgagccaggtatagactatgatatctctgttataacgctgatcaatggcggcgagtctgccccaacaactctaacacaacagaccgctgtgcctccgccaacagacctgcgttttacaaatatcgggcctgacaccatgcgggttacttgggcccccccgccctctatcgacctaacaaattttctggtgaggtatagccccgttaagaacgaagaagacgtggccgagctttccatttctccaagcgataacgccgtggtgcttaccaacctactgcctgggaccgaatacgtagtgtcagtgtccagcgtttatgaacaacacgaatctactccgcttagagggcgccaaaaaactggcctagattcgcctacaggcatcgactttagtgatataaccgcaaacagttttactgtgcactggattgccccgagagctacgattaccggctaccggatacggcaccatcccgaacacttctcaggaagaccccgtgaggatcgagtgcctcactcacgcaatagcattaccctgaccaacctgactcctggcaccgagtacgtggtgtcaatagttgctttgaacgggagggaagaaagccccctattaatcggtcagcaatcaacagtcagtgatgtgccgcgggacctggaggttgtcgcagccacacctacttcgctgcttatctcttgggacgcgcctgccgtgacggtgaggtattacagaatcacatacggagaaacaggcggaaatagtcccgttcaagaattcaccgtgcccgggtctaaatcaacggctactatttcaggcctgaaacccggcgtggattatacgataacggtgtacgctgtcacaggacgcggcgattcccccgcatcctctaaaccaatctctatcaactacaggaccgagatcgacaagcccagccagatgcaggtcactgatgttcaggataacagtatctccgtgaagtggctgccatcatcatctcccgtcactggttatcgcgttaccacgaccccaaaaaatggcccagggccaaccaaaaccaagacagcgggtccagatcagaccgagatgaccatcgaaggcctgcagccaaccgtggaatacgtggtcagtgtgtacgcacagaacccctccggggaaagtcaaccactggtccaaactgcagtaactaatatcgacaggcccaagggactggcatttactgacgtggatgtagattccatcaaaatcgcgtgggagtctccccaaggccaggtgagtaggtacagggtcacctattcctcacctgaagacggtatccacgaacttttccccgcccccgatggcgaagaggacaccgctgaactccaaggtctgagacctgggtctgaatacaccgtgagcgtagttgctctccatgatgacatggaatcccagccacttatcggaactcaaagcacggcaatcccagcccctactgatttgaaatttactcaagttacccctactagtttaagcgcacagtggacgccccctaacgtccagttgacaggctatagggttcgcgtaacacccaaagagaagactggacccatgaaggagatcaacctcgctcccgatagctcctctgtcgtggtctcaggattgatggtcgctacaaagtacgaggtcagtgtctatgctcttaaagataccctgacaagcaggcctgcacagggggttgtgaccacgttagagaatgtctcccctcccaggcgagcacgagtcaccgacgcaactgagacaaccatcactatcagctggcgtacaaaaacagaaacaatcaccggtttccaggtcgacgctgtccccgccaatggccagacccctatccagagaactattaaacccgatgtgcgcagctatactatcactggtctgcagcctggcaccgactacaagatctacctgtacacacttaatgacaatgcgaggtcctcccccgtagttatcgatgctagcactgctattgatgcccctagtaaccttaggtttcttgctaccacccccaacagcctcctggtctcttggcagcccccccgggcccgtattactggttatatcattaagtacgagaaaccgggctctccccccagagaggtggttccgaggccccggcctggtgtaactgaagccactatcacaggactagaacccggaaccgaatacaccatatatgtaatcgccctgaagaacaatcagaaatccgaaccacttattggtcggaaaaaaactgatgagctcccccagttggtcactctgcctcaccctaacttacacggacctgagatactggatgtgccatctacggtccagaaaaccccatttgtgacccacccgggctacgacacaggtaatgggattcaattacccgggacttcgggccagcagccctcagtaggccaacagatgatcttcgaggagcacgggtttcgcaggaccactcctcctacaacagctacacccatcagacataggccccggccctatccccccaatgtcgggcaggaggctttatcacaaaccacgatatcttgggctccctttcaggacacgtctgagtacattattagctgccatccagtgggcaccgatgaggaaccactccagtttcgagtgccaggaaccagcacaagcgctacattgactggcctcacacgcggcgcgacctacaacgtgattgtggaagccctcaaagaccagcagcgtcataaggtgcgcgaggaggtggtgactgttggaaatagtgtcaatgagggactaaatcaacctaccgacgacagttgtttcgatccttatacggtcagccattacgccgtgggggacgaatgggagcgaatgtcagaaagcggctttaagctcctgtgtcaatgtctgggctttggcagcggccatttcagatgtgatagcagccggtggtgccacgacaatggcgtgaattacaagatcggcgaaaagtgggacaggcagggcgagaacggtcagatgatgtcctgcacctgcctgggcaatgggaagggcgagtttaaatgcgatcctcatgaggcaacatgttacgatgatggtaagacttatcacgtgggcgaacaatggcagaaagagtacctgggtgctatctgctcatgcacctgctttggcggccagaggggatggcggtgtgataattgtaggagaccaggcggagagccttcaccagagggcacaactgggcagtcatacaatcagtattctcagcgttatcatcagcgaaccaatacaaatgttaattgccctatcgaatgtttcatgcccctggatgtgcaggccgatcgtgaggattcacgcgagtag

SEQ ID NO: 31712 - RNA, 7068 nt, synthetic construct
  misc_feature 1..7068: note = Description of Artificial Sequence: Synthetic coding sequence
  source 1..7068: mol_type = other RNA
atgctccggggcccaggtcccggactgctgctgctggcagtgcagtgtcttgggacagccgttccttcaaccggggcttccaagtccaaacggcaggcacagcagatggtgcaaccccagagccctgtcgcagtatcacagagcaagcctgggtgctacgacaacggtaaacattatcagataaaccagcagtgggaacgaacctacttgggcaatgcacttgtctgtacgtgttacggaggcagccgcggtttcaactgtgagtcaaaacccgaggcggaagagacatgtttcgacaaatatacaggcaacacatacagagtgggggatacttacgagcgaccaaaggactccatgatctgggactgcacgtgcatcggcgcagggcgcgggaggatttcatgtacaatcgcaaatcgctgccacgagggcggccagagctataagatcggagatacctggcggcggccacacgagacaggaggctacatgctggaatgcgtctgtctgggaaatggcaaaggagagtggacttgcaagcccatcgccgaaaagtgcttcgaccatgccgcagggacatcctatgtggtaggcgagacttgggagaagccttatcagggatggatgatggttgactgtacctgtctgggcgaaggatcagggaggatcacatgcactagccgcaatcgatgtaatgatcaggatacccgcacgagctatagaataggggacacatggtcgaagaaagacaatcgagggaacctcctgcaatgtatttgtacaggcaacggacgcggtgaatggaaatgtgagagacatactagcgtccagacgactagcagcggaagtggcccatttacagatgtgcgggctgcagtttatcaacctcagccacaccctcaacctcctccatacgggcactgtgtgactgacagcggggtggtgtatagtgtcgggatgcagtggcttaagacccagggcaataagcaaatgctgtgcacgtgcttgggaaacggggtgagctgccaagaaacagccgtgacccagacgtatgggggaaactctaatggtgagccttgcgtgcttccattcacctacaacggaagaacattttattcttgtaccaccgagggccgccaagacgggcatctctggtgctccactactagcaactatgagcaggaccagaagtatagtttttgcacagatcacaccgtacttgttcaaaccaggggcggaaatagtaacggggctctgtgccatttcccctttctttacaacaatcacaactatactgattgtacttccgaaggacgcagggacaatatgaaatggtgtggcactacccaaaactacgatgccgatcagaaatttggcttttgtccaatggccgcacacgaagagatttgtacaaccaacgagggcgtgatgtatcgtatcggtgaccaatgggacaagcaacacgacatgggccatatgatgaggtgtacctgcgtgggcaatggccgcggagagtggacctgtattgcttactcccagctaagggatcagtgcatagttgatgacattacttataacgttaatgatacttttcacaaacggcacgaagaaggccacatgcttaactgtacttgctttggacagggacgtggtaggtggaaatgcgacccagtcgatcaatgccaggacagcgaaaccggaacgttctatcagatcggtgattcctgggagaagtacgtccatggggtgcggtaccaatgctactgttatggtaggggaatcggggagtggcattgccagccccttcagacttatccaagcagctccggaccggtggaagttttcattacagagaccccctcgcagcctaactcgcacccaattcagtggaacgcgcctcagccctcccacatcagcaagtatatcctgcgctggcgacctaagaactcagtagggaggtggaaagaagctaccataccaggacacctcaatagttatacaatcaaaggactcaaacctggagtcgtctatgaaggccagttgatttcaatccagcagtacggacaccaggaggtaactagatttgattttaccaccacttccacatccacaccagtcactagcaatactgtaaccggcgagaccaccccttttagccccttggtcgctaccagtgaatctgttacagagatcactgcttcaagtttcgtggtcagctgggtgtctgcatccgacaccgtctccggatttagagtcgaatatgagttgagcgaggagggcgatgagccacaatacttggacctgcctagcaccgctacctctgtcaacatcccagatttactgccaggacgtaaatacattgtaaacgtgtaccagatctcagaggacggtgaacaatcgttaattctttccacttcccaaacaaccgcacctgacgcgccacccgacacgacagtggaccaggtggatgataccagcatagtggtccgatggtccagaccgcaggcgccaatcaccggctatcgtatagtgtacagtccttccgtagaaggctcctcgactgagctcaacctgccagagacggcaaacagtgtgaccctaagcgacctgcagcctggtgtgcagtataatatcactatttatgctgtggaagaaaaccaagagagcacccccgtagtgattcagcaagagacaactgggacccctcgcagcgatacagtacccagccctcgagaccttcagtttgttgaggttaccgatgtgaaagttacaatcatgtggaccccccccgagagtgcagttactggttatagggtcgatgtgatccctgtgaatcttcctggggagcatggacagaggctcccgataagcaggaacacatttgctgaagtgactggactaagcccgggcgtgacttattacttcaaagtttttgcagtgagccatggacgagaaagcaagcctctaacagcccaacagactacaaagttggatgcccccaccaatctgcagtttgtcaacgaaaccgactccactgtgctggtgaggtggaccccccccagggcccaaattactgggtatcgtttaaccgttggtttaacgagacggggacagccgcgccagtataatgtgggaccatctgtgtccaagtatcccttgagaaatttacaaccagcgagtgagtacaccgtctccctggtggcaattaagggcaaccaagaatcccccaaagcgaccggagtcttcaccacgctgcagccaggctcgagcattcccccatataatactgaggttacagaaacaacaattgtgattacctggacccccgcaccaagaatcgggtttaagctgggcgtaaggcccagccagggtggagaagctccccgagaagtcaccagtgattcgggatctatagttgtctcgggattgacacctggagttgagtatgtatatacaattcaggtccttagagacgggcaagaacgggacgccccaattgtcaataaagtggtaactccgttgagtcccccaacgaatttgcacctggaggcaaatcccgataccggagtgctgactgtgtcatgggaaagatccacaactccagacatcactggctatagaattactactactcccacaaatggccagcagggaaactcactagaggaggttgttcacgctgaccagagctcatgtacgtttgacaaccttagtccaggcctggagtataatgtgagcgtgtataccgttaaggatgataaagaaagcgtccctatctctgacactattatccccgctgtccctcccccaacagacctgaggttcaccaatattggcccagataccatgcgcgttacttgggcaccacctccttccattgacctgacaaactttttggtgagatatagccctgttaagaacgaggaagatgtggcagagctgtctatttccccatccgacaatgctgtggttttgaccaaccttctgcccggcactgagtacgtagtttccgtttcttccgtgtacgagcagcacgagtcgactcccctgagggggagacagaagacgggactggactctcctacaggaattgatttcagcgatatcaccgcaaacagcttcacagtgcactggatcgccccacgggctaccatcactggctatcggatccggcaccacccggagcatttctcaggccgacctagggaggatcgggttccccacagtagaaactctattacattgacaaaccttacccccgggacagaatatgtagtgtctattgtggcactgaatggccgcgaagagtccccactgctaattggacaacagtccaccgtttctgatgtaccccgggacttagaggtggtggccgccacacctacctcactgctgatctcctgggacgcacctgcagtgacagttagatattatcgcattacctacggtgagaccgggggaaacagcccagttcaggagttcacggtgccggggagtaaatccaccgcaaccatttcaggtctgaagcccggggtggattacactatcacagtctacgcagttactggccgcggtgacagtcccgcaagcagtaaacccatctcaatcaattaccgaaccgagatagacaagcccagccagatgcaggtgaccgacgtgcaggacaatagtattagtgttaaatggcttcctagtagctcacctgtcaccggctatagggttacaaccacccctaagaacggtcctgggcccacaaagaccaagacagctgggccagatcagactgagatgacgatcgagggactccagcctaccgtggaatatgttgtgtccgtatacgcacagaacccaagtggagagtctcagcctttggtgcagaccgcagtaaccaacatagatcggcccaaaggcttggcatttacagacgtggacgtcgattcaatcaagattgcgtgggaaagtcctcagggacaggtttcacgttaccgcgtgacctatagtagtccagaagacggtattcacgagcttttcccagctccggatggggaagaagatacagccgaactccaagggttacggccagggagtgaatacactgtaagcgtggtagccctccatgacgacatggagtcgcagcctctcatcggaacgcagtctaccgccatacctgcccccacagacctgaaatttacccaggtgactccaacctctctatctgcgcagtggactcctccaaacgtccagttaactggttatagggtaagggttactccaaaagagaagacagggccaatgaaagagatcaacctagcccctgattcttcttctgtcgttgtcagtggcctgatggttgcgactaagtatgaagtgagtgtctatgcccttaaagatactctcacgagccggccagcacagggcgtagtaactacactcgagaatgtttcaccacctcgtcgcgcacgcgtcacagacgcaactgagacgacaattactatatcatggagaacaaagacagagaccatcaccgggttccaggtcgatgccgtaccagccaacggtcaaactcctatccaacggaccatcaaacccgatgtccgctcttatacaatcaccggactgcagcctggaactgattataagatttacctgtataccctgaacgataatgcccggagttcccccgtagtcatcgacgctagtaccgccattgacgctccaagtaatctacggtttctagcgacgacaccaaattccctgctggtgagctggcagcctccccgggcacggattactggatacattattaagtatgagaaaccaggctctccacccagggaggttgtgccacgcccaaggcccggcgttacggaagccacgatcactggtctggagcccgggacagagtataccatatacgtgatcgcactcaaaaacaaccagaagtccgaacctctcattggccgcaaaaaaaccgatgaactgccacaactagttactttgccccaccccaatctgcacggtcccgagattctggatgtgccctccacagtgcagaaaacacccttcgtgacacatccaggctatgatactggcaacggcatccagctgcccgggaccagtgggcagcagccttccgtcgggcagcagatgattttcgaagagcacggcttcagaagaacaactccccctacgacagcgacccctattcgtcatcgaccaagaccttacccaccaaatgtaggccaggaggccctttcccagactacaatcagctgggccccctttcaggatacctccgaatacattatatcatgccaccccgtgggcaccgacgaggagcccctccagtttagggtccctggaaccagtacatcagctactctgacaggattgacccgcggagcaacgtacaacgtgatcgtggaggcattgaaggaccagcaaaggcacaaggtgagagaggaggtagtgacggtcggaaactctgttaatgagggtctgaaccaacccactgatgattcctgcttcgatccatacaccgtgtcacactacgctgtgggagatgaatgggaaagaatgagcgaatccggtttcaaattactatgccagtgtctgggtttcggttctgggcatttccgatgtgattctagcaggtggtgtcacgacaatggagtgaactacaaaatcggagaaaagtgggatcggcagggagagaacggccagatgatgagctgtacttgtcttggcaacggaaagggtgagttcaagtgcgacccacacgaggcgacttgctacgacgatggcaagacataccacgtaggagagcagtggcagaaggaatatctgggcgcaatttgttcttgcacatgcttcggcggccagaggggatggcggtgcgataactgtaggaggccaggcggggagccctcacccgaggggacgacaggtcagtcctacaatcagtattctcagaggtaccaccagagaactaacactaatgtgaactgtcccattgagtgcttcatgcccctggacgtgcaggccgacagggaagacagccgcgagtag

SEQ ID NO: 31713 - RNA, 6555 nt, synthetic construct
  misc_feature 1..6555: note = Description of Artificial Sequence: Synthetic coding sequence
  source 1..6555: mol_type = other RNA
atgctgcggggccccggtcctggcttgttgctcttggccgtgcaatgtctcgggacagcagtaccatctacaggtgcctccaagtctaagcgccaggctcagcagatggtgcagccgcagagtcctgttgccgtgtcccaatcgaaaccaggctgctatgacaacggcaagcactatcaaatcaaccaacagtgggagcggacctacctgggcaacgcactagtgtgcacatgctacggaggttccagagggttcaactgtgagtctaaacccgaagctgaagaaacgtgcttcgacaagtacactggtaatacctatagagtgggtgatacctatgaacgacccaaagattctatgatctgggattgtacctgcatcggagccgggaggggccgtatatcttgtactatcgccaaccgttgccacgagggaggtcaaagctacaagataggggacacatggcggaggccacatgagacaggtggatacatgctcgagtgtgtgtgcctgggtaacgggaagggcgagtggacctgcaagccaatcgcagagaagtgttttgaccacgctgctggcacaagctatgtggtaggagagacatgggagaagccataccaaggctggatgatggttgactgtacgtgcctaggcgaaggctccggtcgtattacctgtaccagtagaaatcggtgcaatgaccaagatacccgcacatcttatcgcattggggatacgtggtctaaaaaggataataggggtaacttacttcaatgtatctgcaccggcaacggccgcggcgagtggaagtgtgaacgacacacctcagtgcagactaccagctctggatctggacccttcaccgacgtacgcgctgccgtataccagccacaacctcatcctcagcctcccccctatgggcattgtgtgacagactcaggtgtagtgtacagcgtggggatgcagtggctcaaaacccaggggaacaagcagatgctgtgcacctgcctggggaacggcgtgtcctgtcaggaaacagcagtgacacagacatatggtggcaactctaacggtgagccatgtgtgttaccttttacctacaacggacgaacgttttattcctgtaccactgagggcaggcaagacggccatctctggtgtagtaccacttcaaattacgaacaagatcaaaaatacagtttttgcacggaccacactgtgcttgtccagacacggggcgggaatagtaacggggccttgtgccactttccctttctctataacaatcacaactataccgactgtacctctgaaggccgtagagacaacatgaagtggtgtggaaccacacagaattacgacgcagatcagaagttcggtttctgtccaatggccgctcacgaagagatctgtacaacaaacgagggcgttatgtaccgaattggggatcaatgggataaacagcacgatatgggacacatgatgcggtgtacatgcgttggcaacggaaggggcgagtggacatgtatcgcctactcacagcttagggaccagtgcatcgtagacgatattacgtacaatgtcaacgatactttccataagcgccatgaagaggggcacatgctgaattgtacttgcttcggccagggacgcggtcgatggaagtgtgaccccgtggaccaatgccaagattccgagactgggacattctaccagattggcgatagctgggagaaatacgtgcatggtgtgcgatatcagtgctactgctatgggcgtggcatcggcgagtggcattgccagcctctgcagacctacccgtccagctccgggccagtggaagtgtttattacagagactcccagtcaaccaaatagccacccaattcaatggaatgcacctcaacccagtcacattagtaagtacatcttaaggtggcgtcccaaaaactccgttggacgatggaaggaggccaccatccccggccacctgaacagctacaccataaagggcctgaaacccggtgtagtgtacgaaggccagctcatatccatacagcagtatggacaccaagaagtgacgcggtttgactttacaacaacttccacgtctacccccgtcacttccaacactgtgactggagaaacgaccccattttcacccttggtcgccaccagtgagtctgtgacagagattacagcttcctcattcgtggtttcttgggtgagtgcctccgacactgtttccggtttccgggttgaatatgaactgtcagaggaaggtgacgagccccagtatctagatttgccctcaaccgcaacctctgtgaatatccctgatcttttgcccggacggaaatatattgtaaacgtgtaccaaatatcagaagatggagagcaaagcctgattttgtcgacctcccaaacgaccgcacccgacgctcccccagacactaccgtggatcaggtggatgatacttcaatagttgtccgatggtcccggcctcaagcccccatcaccggttatcgtatagtttactcacctagtgtcgaaggttcttcaacagaactcaatctgccagaaacggcgaattcggtgaccctgtctgaccttcaaccgggagtgcagtacaacattaccatatacgccgtggaggagaatcaggagagcacaccagtagttatccagcaggaaaccacaggcactcctaggtctgataccgtaccatcccctcgagatctacagttcgtagaagttaccgacgtgaaggtgaccatcatgtggacaccgccagagagcgccgtgacgggctatagagtggacgtcatccccgtgaatttgcccggagaacacggccagcggttgcccatttcgaggaacacatttgctgaggtcactggactgtcccctggggtgacgtattatttcaaggtgttcgctgtgtctcatgggagggaatccaagcctctgactgcccagcaaactactaaattagacgctcctactaacttgcagtttgtcaatgaaactgacagcaccgtgctggtgcgatggacacctccacgtgctcagattaccgggtatcggttaacagtaggactcacccgccgcggtcaaccacgccagtataatgttggtccatctgtaagtaagtaccccttaagaaacctacagcctgcctcagagtataccgtctccctcgtcgctatcaaagggaatcaagagtcccccaaggcaaccggagtgttcaccacattgcagccaggctcctctatcccaccctataacacagaagttactgaaacaactatagtaataacttggacccctgcgccacgcattggctttaagctgggggtaagacccagtcagggaggggaagcacctagggaagtgaccagtgactcaggctccatagtcgtgtccgggcttactcccggagtagagtacgtttacactatacaggtgctcagagacggacaggaacgagatgcaccgatagtaaataaggtcgtcactcctctttcccctcccacaaacctccacctcgaggctaatccagatactggtgtccttaccgtcagctgggagagaagcaccacccctgacatcacaggttatcggatcaccacaactcccactaacggacagcagggcaatagtctggaggaggtcgttcatgcggaccagtcttcttgcacgttcgacaatctgagccctggcctcgaatacaatgttagtgtgtatacagtgaaggacgacaaagagagcgtgcccatctcagataccatcatccccgccgtgccaccacccactgacctgagatttacaaacatcggtcccgataccatgcgggtaacttgggcgcccccaccgagcatcgacctaactaatttcctcgtgaggtactcccctgtcaagaacgaggaggacgtggctgaactgagtatctccccgagtgacaacgccgtggtcttgaccaacctgctacctggcacggagtacgtggtgtctgtctctagcgtttacgagcaacacgagagcactcctttgcgaggccggcagaagacaggcctcgactcaccgactggcattgattttagcgatattacagccaacagcttcaccgtgcactggattgccccccgggccactattacaggataccgcatcagacaccatccagaacacttctcgggtaggccccgcgaggaccgggtaccccactcaagaaattcaatcacccttaccaacttaactcccggcactgagtatgttgtgagtattgttgctctcaacgggcgcgaggaatctcccctcctcatcggccagcagtccacagtaagcgacgtgccacgcgacttagaagtggtcgcagccactccgacatcactcttaatttcctgggatgctcctgcggtgacagtgagatactatagaattacctacggcgagaccggtggaaatagccccgtacaggagttcacagtgcctgggtccaaatcaacagctactatctccggcctcaaacccggagttgactataccatcaccgtgtatgccgtgactgggcggggcgattcaccggcatcaagcaaacctatctccatcaactaccgcaccgaaatcgataaaccgagccagatgcaagtgaccgacgtgcaggacaattccatcagtgtgaagtggctgccttcgagtagccctgtcacaggttatcgcgtaaccaccactcccaaaaatggtcccggtccaactaaaacaaaaacagccgggccagaccagaccgaaatgactatcgaaggtttacagcctaccgtcgaatacgtggtgagcgtctacgcccagaatccgagcggcgagtctcagccactggttcagaccgctgttaccaacatcgacaggcccaaaggattggcttttaccgacgttgatgtggatagcattaagatcgcatgggagagtccacaaggccaggtgagtagataccgcgtgacttacagctccccagaggatgggattcatgaattatttccagcacctgatggagaggaagacacagcggaacttcaaggcctgcgaccaggaagcgaatacaccgtatctgttgtcgcccttcatgacgacatggagagtcagcctctaatcgggacccagagtaccgcaatccccgcacctacagatctaaaatttactcaggttactcctacttccctcagcgcccagtggactccccccaatgtgcagctgactgggtatcgagttagggtaacaccgaaggagaaaaccggaccgatgaaagagatcaacctggctcccgactcatcgtccgtagtggtcagcggccttatggtcgcaaccaaatacgaggtcagtgtgtacgcattgaaggacaccctcacctcaagaccagcccagggcgtggtgacaacgctggagaacgtctcaccccccagaagagcccgcgtgactgacgccacagaaacaaccattaccattagctggcggactaaaacagagactatcactggcttccaggtggatgctgtgcccgccaatggccagacccccatccagcgcacgattaagccagacgttcggagttataccataactgggttacagcccggaaccgattacaagatctacctttacactctgaacgacaacgcccggagcagtccagtggtcatcgacgcctctacagcgatcgacgccccatccaatcttaggttcctcgcaaccacgccgaactctttactggttagctggcaacccccacgggctcgcataactggctacattatcaagtacgagaagccaggatctcccccccgcgaagtcgtcccgcgccctcgccctggcgtgaccgaggctaccattacagggctcgagcctggcaccgaatacactatttacgtgattgccttgaagaataaccagaaaagcgagcccttaataggaaggaagaagacagtcaatgaggggttaaatcagcccacagatgattcttgtttcgacccctacacagtatcccattacgcagttggagacgaatgggaacgaatgagtgagtccggctttaagctcctgtgccagtgcctcggctttggctctggccactttaggtgtgattcctccagatggtgccacgataatggagtgaactataagatcggcgaaaagtgggacaggcagggggaaaacggccagatgatgtcgtgtacctgtctcggaaatggcaaaggcgagttcaaatgcgacccgcatgaagccacatgttatgacgacggtaagacatatcatgtcggagagcaatggcagaaagaatacctgggcgcaatctgttcctgtacatgttttggcgggcagcgcggatggaggtgtgacaattgcaggcgacctggaggtgaaccgagcccggagggcacgacaggccaatcctataatcagtattctcagcgctaccaccaaaggaccaacacgaacgtcaattgtccaatagagtgtttcatgccgctcgacgtccaggccgatagagaggattcacgcgaatag

SEQ ID NO: 31714 - RNA, 6636 nt, synthetic construct
  misc_feature 1..6636: note = Description of Artificial Sequence: Synthetic coding sequence
  source 1..6636: mol_type = other RNA
atgctcagaggacccggaccaggcttactactcctggccgtccaatgtctaggaaccgcagtgccaagcacaggcgcaagcaaaagcaaaaggcaggcgcagcaaatggtgcaaccccagtcgccagtggccgtatcacagagcaaaccgggctgttacgacaatggtaaacattaccagattaatcaacagtgggagcgtacgtatctgggcaacgctctggtgtgcacatgctatggaggcagccggggattcaactgtgagagtaagcccgaagcagaagagacctgttttgataaatacacgggcaacacctacagggtgggcgacacctacgagaggcccaaggactccatgatatgggattgcacctgcatcggggccggcagggggcggatttcatgtaccattgccaacaggtgccatgaggggggacagtcatataagatcggggatacgtggcgccgtcctcacgagacagggggttacatgttagaatgcgtctgtctggggaacgggaaaggagaatggacctgcaagccaatcgctgagaagtgctttgaccatgccgccggcacttcgtacgtcgtgggcgaaacatgggaaaaaccataccaaggatggatgatggtcgattgtacctgtcttggagaaggctcaggcagaattacgtgtacaagcaggaatcgttgcaatgatcaagacacacggacctcgtacaggataggagatacatggagtaaaaaagacaataggggtaacctgctgcagtgtatatgtacgggcaatggtcgcggagagtggaaatgcgagcggcacacctccgtgcagaccactagcagtgggtcaggccccttcacggatgtccgggctgcagtttaccagccacaaccgcaccctcagccccctccctacgggcactgcgtgacggactctggtgtggtttactcggttggcatgcagtggctgaagacccaaggaaataaacagatgctctgtacgtgtcttggcaatggtgtgtcttgccaagagacagctgtaacacagacatatggcggcaatagcaacggagagccctgcgtgcttcctttcacctacaatggaaggaccttttattcctgcaccactgagggccgacaggacggacacctgtggtgttcaacgacttccaactacgagcaagatcagaagtactcgttttgtacagatcatacagtcctggttcagacacgcggcgggaacagtaatggggccttgtgccatttcccatttctctacaataaccacaattacaccgactgcaccagtgagggccggcgggacaacatgaaatggtgcgggacgactcagaactacgatgcggatcaaaaattcggattctgcccaatggctgctcatgaagaaatttgtaccaccaatgaaggtgtgatgtatcgtatcggggatcaatgggacaaacagcatgacatgggacacatgatgaggtgcacttgtgtcggcaacggccgcggtgagtggacctgtatcgcctattcgcagctaagagaccaatgcattgtcgacgatatcacatataatgtcaacgatacttttcacaagcgacacgaagaaggccatatgcttaactgcacttgttttggacaaggccgcgggaggtggaaatgcgacccagttgatcaatgccaagacagtgaaaccggcaccttctaccagattggtgattcctgggaaaagtacgtgcacggagttaggtaccagtgctattgctatggtagaggaataggcgagtggcattgccagcccctacaaacttacccctcctcgtcaggtcccgtggaggtatttataacggagactccgtcacaacctaatagccaccctatacagtggaatgccccccagccatcacatatctcaaagtatattctgagatggaggccaaagaatagcgtgggaaggtggaaggaggccacaatccctggccatttgaactcttatactataaaaggtctgaaaccaggagtggtgtacgagggacagcttataagcatccaacaatatggacaccaggaggtcaccaggttcgactttactacaaccagtactagtacccctgtaacttcaaacactgtaaccggggaaacaacaccattttctccccttgttgctacaagcgagtcagttacagaaatcaccgcatcatccttcgtcgtcagttgggtgagcgccagcgatacagtaagtgggttccgtgtggagtacgagttatctgaagagggggacgaaccccagtacttggacttacctagcacagccactagcgtcaacattccggatctcctgccaggtagaaagtacatagtgaacgtttatcaaatttcggaagacggggagcagtctctgattctctctacatctcaaacaacagcccccgacgcacctccagacactactgtcgaccaggtcgacgacacatcaattgtggtaagatggtcccgacctcaggcccctattactgggtatcggatcgtgtatagcccaagcgtggagggatcgagcacggagcttaatttaccggagaccgcaaactcagtgactttaagcgacctacagccaggcgtccagtacaatattactatttacgctgtggaagagaaccaggaaagcaccccagtcgtgattcaacaggagaccactggcacacccagaagtgacaccgttccgagtcccagggatctgcagttcgtggaggttacagacgtgaaggtcaccattatgtggacaccacctgagtcagcggttaccggatatcgggtggacgtgatccccgtaaacctgcccggcgagcatggtcagcggcttcccatatcacgaaatacattcgctgaggtgactggcctgagtcctggcgttacctactatttcaaggtctttgccgtcagtcacggccgggaatcgaaacctctgaccgctcagcaaactaccaaattggacgcccccaccaacctgcagtttgtcaatgagaccgacagcaccgttttagttcgctggacgccgccccgggctcagatcaccggctataggctgaccgtcgggctcacccgcaggggtcagcctagacaatataacgttggtccaagtgtgagcaaatacccccttcgtaacttgcaacctgctagcgagtacactgtaagcttagtcgcaatcaaaggcaatcaggaatctcccaaagcgaccggcgtatttacgacactgcagcccggctcctcgattcccccatacaacactgaagtcactgagacgactatagtcattacatggacccctgcccctcgaattggattcaagttgggcgtgcgcccctcccagggaggagaagcccccagagaggtgacctctgacagcggtagcattgtggtgagcggcctcacgccaggcgtggaatatgtctatactatccaggtgttaagggatgggcaggagagggatgcccccatcgtcaataaagtagtaacacctctaagcccacccacgaacttacatctcgaagcaaacccagataccggggtgctgaccgttagttgggagcggtcgactaccccagacattaccggttaccggatcactactacacccaccaatggccagcagggaaactccctagaggaggttgttcacgctgaccagtcctcttgcacgtttgataacctctcccctggcctggagtataacgttagtgtgtacacagtcaaggatgataaagaatctgtcccaatttctgatactatcattcccgccgtcccccccccaactgatttgagatttacaaacattggaccagataccatgcgagtcacatgggctccacctccgtccattgatctcaccaattttcttgtcagatatagcccggtaaagaacgaagaggacgtcgccgagttgtctatttccccttcagataacgccgtggttctcaccaaccttctgccaggcacagagtacgtggtgtccgtgagcagcgtctacgagcagcatgaatccaccccgctgagagggcgtcaaaagactgggttagacagcccaacaggcattgattttagcgatattactgccaattccttcacggttcactggattgcgcctagagcaactattaccgggtatcgcattagacatcacccagagcatttctccggcagaccgagggaagatcgggtaccccattcccgcaatagcataacgcttaccaacctgacccccggcacagagtatgtggtctccattgtcgccctcaacggacgggaggaaagtccattgctgatcgggcagcagagtaccgtgtccgacgtacccagagaccttgaggtagttgctgctactccgacatccctgctgattagttgggatgctcccgcagtgacagtgcggtactaccggatcacgtacggtgagaccggaggaaactctcctgtccaggagtttacggtgcccggctccaagagcaccgctacgatttcaggactgaaacccggggtggactataccatcactgtctacgctgtaacaggaagaggcgatagtcctgccagttcaaaacctatctccattaattacagaaccgaaattgacaagccatcacaaatgcaagtaacagacgtgcaagacaatagcatatctgtgaagtggcttccctcttcatcacctgtgactgggtaccgcgtcaccacaactcccaagaacggccccggacctactaaaacaaaaactgccgggcccgaccaaaccgagatgaccatcgagggactgcagcccacagttgaatatgtggttagcgtatatgcacaaaacccctcgggcgagtctcagcctctggtgcagactgccgttaccaacatcgaccgtccgaaagggctggctttcaccgatgtggatgtggactcaataaaaattgcatgggagtctccccagggccaggtgagccggtatcgcgtcacctactctagcccagaagatggcatccacgagctttttcccgcacctgacggcgaggaagacaccgccgagttacagggcttgagaccaggcagcgagtataccgtttctgtggtggcactgcatgacgacatggaatcccagccgctcatcggaactcagtcgacggctattcccgcacccacagatttgaagtttacacaggtgacacccacctcactgtcagcgcagtggacaccgcccaacgtccagctgacaggatatcgcgttagagttacccccaaggagaagaccggacccatgaaggagattaatctggccccagacagcagttccgtggtggtcagcggccttatggtggctactaaatatgaagtgagcgtgtacgcgctgaaggatactctgacgtcccgtccggctcagggcgtagtgactactttggaaaatgtgtcccctcctagacgcgcacgcgtaaccgatgctaccgaaactaccatcaccatcagttggagaaccaagacagagactattacaggcttccaagtcgatgcagttcccgcaaatggacagacacctattcagcgcacgattaagcccgacgtgcgatcttatacaatcactgggctgcagcctgggactgattataagatctacttatacacattgaacgacaacgcaagatcctcccccgtcgttatcgacgcttcgactgcaattgatgcgccatcaaatctgcgattccttgcaaccacacctaattccctactcgtgtcgtggcaaccaccacgcgcacgtataacaggatatatcatcaagtacgagaaaccaggctcccctcccagagaggtggtcccacggcctagaccaggggtcacagaagcaaccattacaggcctggaaccaggaaccgagtatactatctatgtaattgccttgaaaaacaaccagaaatccgagccattgattggacggaagaaaaccgggcaggaagctctgtctcagacaacaataagttgggctccctttcaagatacctcagaatacatcatttcttgtcaccctgttggaacagatgaagagccgctgcagttccgcgtacccggcacatcaacatcggccacactgactggcctcacgcgtggcgccacttacaacgtaatagtagaagccctcaaagatcagcagaggcacaaggtacgtgaggaagtcgtcacagtaggtaatagcggctggtgtcacgacaacggagtgaattacaagattggggagaagtgggaccgacagggagagaatggtcagatgatgagctgcacatgcctcggaaatgggaagggagagttcaaatgtgacccgcacgaagcgacatgctatgatgacggtaagacgtaccacgtcggcgagcagtggcagaaagagtatctgggagcgatctgcagttgcacctgttttggaggtcagcgtgggtggcggtgtgacaattgtagacggccgggcggcgagccctcccccgaaggcacgactgggcagtcttataatcaatattcccagaggtaccaccagagaacgaacaccaacgtcaattgcccaatagagtgctttatgccattggatgtgcaggcagacagagaggacagccgtgaatag

SEQ ID NO: 31715 - RNA, 7434 nt, synthetic construct
  misc_feature 1..7434: note = Description of Artificial Sequence: Synthetic coding sequence
  source 1..7434: mol_type = other RNA
atgcttcgcgggccgggacccgggcttctgctgttagctgtccaatgcctagggaccgccgtgccatctacaggagcaagcaaatctaagcggcaggcgcagcagatggtgcagcctcagtctcccgttgccgtgtcacagtctaagccgggctgttacgacaatggcaagcactaccagatcaaccagcaatgggaacgtacttatctgggaaacgcactcgtttgtacatgctatgggggatcccggggcttcaactgtgaatctaaacccgaagcagaagagacatgctttgataaatacaccggaaatacatacagagtcggcgatacttacgagcgccccaaggattctatgatttgggactgtacgtgcattggtgctgggcgcggacggatcagctgcaccatcgccaaccgctgtcatgagggtggacagagctacaaaataggggacacctggcggcggccccatgaaactggcggctacatgcttgaatgcgtctgcttggggaatggcaagggagaatggacatgcaagccgatagcagagaaatgcttcgatcatgcagctgggaccagctacgtggtcggcgaaacttgggagaagccctatcagggctggatgatggtggactgtacatgtctcggtgaggggagtggtagaattacctgcactagccgaaacaggtgcaacgatcaagacacaagaacaagctatcgcatcggtgatacatggtctaagaaagataaccgggggaatctgctccagtgcatctgtaccggaaacggacggggcgaatggaaatgtgaacgccacactagtgtacagacaacatcctcgggttcggggccttttactgacgtgagagctgccgtgtaccagccccagccacaccctcagccccccccttacggccactgtgtgaccgatagtggtgtagtttattctgttggcatgcagtggttaaagacacagggcaataaacagatgttgtgcacatgcctggggaacggggtgtcttgccaagagactgcagtgacccagacctatggcggcaactctaacggcgagccctgcgtactgccctttacctataacgggagaacattctattcctgcacaactgaaggccgacaagatggtcacctgtggtgcagcaccacatccaactatgagcaagaccaaaagtactccttttgtacggatcataccgtcctagtccaaacacgaggtggaaacagtaatggcgctctctgccactttccattcttatacaacaaccataactatactgactgtacctctgaggggaggcgtgataatatgaaatggtgcgggacgactcaaaattatgatgccgatcagaaatttgggttttgtccaatggccgctcatgaagaaatctgtaccactaatgaaggcgtgatgtatcggattggagatcaatgggacaagcaacatgatatgggccacatgatgcgatgtacatgcgtgggcaatggccgcggcgaatggacatgcatcgcctactcacaactgcgcgaccaatgcattgttgacgatatcacgtacaatgtcaacgacacattccataagaggcacgaagagggtcatatgcttaactgtacctgtttcggccagggaaggggcaggtggaagtgcgatcctgtggatcaatgccaagactccgaaaccggcacattctatcagatcggagactcatgggaaaagtacgtgcacggtgtaaggtatcagtgttattgctatggccgcggaatcggggaatggcattgtcagccccttcaaacttacccttcgtcatccggccccgtggaggtgttcattactgagaccccgtcccagcctaactctcatccgatccagtggaacgccccgcagcccagccacatctccaagtacatattacgatggaggccaaagaactccgtaggcagatggaaagaggctacaatccctggccatctgaacagctatacgattaaaggcctcaagccaggcgtggtgtacgagggccagctaatttccatccaacaatacggccaccaagaagtgacacgattcgattttacaactactagcactagcacacctgtcacatccaacacggttaccggcgaaaccactcctttcagtcctctggtggccacatccgagtctgtaaccgaaatcaccgccagctcttttgttgtatcttgggtaagcgcctcggacactgtgtccggatttcgcgtggaatatgagctctctgaagaaggcgatgagccccagtacctagacctgccttctacggcgacatcggtgaatattccagatttgctccccggcaggaagtatatcgtgaacgtgtatcaaattagcgaggatggcgaacagtcattgattctaagcacatcacagactactgcccctgacgccccacccgataccaccgttgaccaggtggacgacacgagtattgtggtccggtggtcccgccctcaggccccaattaccggttaccgcatcgtatatagcccatcggtggaagggtcttccacagaactgaatctgcctgagactgccaacagtgtgaccctttctgatctccagcctggcgttcagtataacataacaatctacgccgtggaagagaaccaggaatccacacccgtggtgatccagcaggagaccaccgggactcctagatccgataccgtgccctccccccgggacctgcagtttgtcgaagtaacagatgtgaaggtgactataatgtggaccccccctgaaagtgccgtcacaggatatcgagtcgatgtgatacccgtgaatctgccaggcgaacacggacaaaggctgcccattagtcgtaatacttttgcggaggtgaccggactgtctcccggcgtgacctactacttcaaggtgttcgcagtgtcccacggaagagagtctaagccactgacagcacagcagacgaccaagctggacgctcccacaaacctccaattcgttaacgaaaccgattctaccgtgctcgtacgatggacccccccccgcgcacaaattaccgggtacagactgacggtgggcttaactcgcaggggacagccaaggcagtacaacgtggggccttctgtaagcaaatacccactacgcaatctacaaccagcatccgagtatacggtaagtctggtagcgatcaaagggaaccaggaaagccccaaagctaccggggttttcactacactgcagccgggctcctctattccaccctacaacacagaggttacagaaaccacaatcgtgattacctggacccctgcccctcgcattggcttcaaacttggcgtgaggcccagccaaggcggggaagctcctagggaagtgacctcagactccggctctatcgtggtttccgggctcacaccaggcgtggagtacgtatatactatccaggtgttacgggatggccaggagagagatgcaccaatcgtgaataaagtggttactcctctctctccacctaccaaccttcatctggaagctaacccagatacaggcgttctcaccgtgtcatgggagcggagcactacgccggatataacaggctacagaattactaccactcccaccaatgggcaacaaggcaattccctggaggaggttgtgcatgccgatcaatccagttgtacgtttgataacctgagccctgggctcgaatacaatgtgagtgtgtacacggtcaaagacgataaggagtccgttccaataagtgacaccattattcctgaggtaccgcagttgactgatctgtccttcgttgatataacagactcctccattggactccgctggactcctctcaattcttcgactatcataggatataggattacggtcgtcgcagcgggcgaaggtatcccaatcttcgaagactttgttgatagcagcgtgggatactatacagtgacaggacttgaacctgggattgattacgacatttccgtcatcactctcatcaatggcggcgaaagcgcacctactacccttactcaacagactgctgtgcccccacctacagatctaaggttcactaacatcggacccgacacaatgcgcgttacctgggcaccacctccctctatcgatctcactaacttccttgtgaggtacagtcccgtgaaaaatgaagaagacgtggccgagctgagtatctctccttccgataacgcggtggtactcactaacttactgccaggtaccgagtatgtggtttctgtcagttccgtatacgaacaacatgagagcacacccctgcgcggccgtcaaaagaccggcctggattccccaacggggattgatttctcagacataacggcgaattccttcaccgtgcattggatagctcccagagcaaccatcacaggataccgtatcagacaccatccggagcattttagtggccggccacgagaggatagagtgccccattcaaggaactctatcactctgactaatttgacgccaggtaccgagtacgtagtgtctatcgtcgctcttaacggaagagaggagtcccctttgctgatcggacaacaaagcacagtctcagatgtccctagggacctggaggtcgttgcggctacgcctacgtcgttattgatctcatgggacgccccggcggtgactgtcagatactataggattacttacggagagactgggggtaatagtcctgttcaagagttcactgtccctggctctaagtctaccgctactataagcggattgaagcccggggttgactacaccatcacagtttacgccgtgacaggaagaggtgattctccggcctcatccaagccaatatctatcaattacaggacagagatcgacaaaccaagccagatgcaagtcacagatgtgcaggataactctatttcagttaaatggttgccctcgtcttcacctgttacagggtatagggtgacaactactcctaagaacggaccaggccctaccaagacgaaaaccgcgggaccagatcagacggagatgacaatcgaggggctgcagccaactgttgagtacgtggtgagcgtttacgcgcaaaacccatcaggtgagtcacagccactggtgcagacagctgtgactaacatcgaccgccccaaaggccttgcatttacagacgtggacgtggacagcatcaagatcgcttgggagagcccacaaggacaggtttctagatatagagtgacatactcttccccagaggatggaatccacgagctgtttcccgcaccagacggagaggaagataccgctgagctgcaggggctgcgtcctggcagtgaatacacagtcagcgtggtcgccctccatgacgatatggaaagtcagcccctgattggtacacagtccacggcgattcccgcccctaccgatctcaagttcactcaggtgactcctacatctctgtccgcgcagtggactcctccaaatgttcagcttaccggataccgggtaagggttacacccaaggagaagaccggacccatgaaggaaattaacctcgctcctgattcaagcagcgtggtcgtttccggcctcatggtcgctaccaagtatgaggtgagtgtgtacgctctgaaagataccctcacctctaggcccgcccagggcgtggtgacgaccctggaaaacgttagtccaccccggcgcgcacgcgtgactgatgcgaccgaaacaacaataactatctcctggagaacgaagaccgaaacgattacaggatttcaggtggatgcagtcccagctaatggtcagactccgatacagcgcacaattaaacccgacgtgcgcagctacactatcaccggtctccaacccgggaccgactacaaaatttatctgtatactcttaacgataacgcccggagctctccagtcgtgatcgatgcgtccactgctatagacgccccctccaaccttagatttcttgctacaacacctaacagcctactagtgtcgtggcagcctcctcgagcacgcattaccggatacattattaaatacgagaaacctggctctcctccccgggaagttgtgccgcgaccaagacccggcgtgaccgaggccacgattaccggtctcgaaccgggtaccgagtacactatttatgtgattgctttaaaaaacaaccagaagagcgagcctctgatcggccggaagaaaacagatgaattaccccaactcgtgaccctgccacatcccaacctccatgggcccgagattcttgacgtccccagtacagtccagaagaccccgttcgtaacacatcccggttatgacaccggcaatggaatacagctgccagggacaagtgggcagcagccatctgtgggtcagcagatgatcttcgaggagcatggcttccggaggacgactccgcctaccacagccactcctatccggcatcggcctagaccatacccacctaacgtgggggaagaaatacagattggccacatccctcgtgaggatgtcgactatcatctgtacccgcatggacccgggctaaacccaaacgcatcaactggacaagaagcactgagccagaccacaattagctgggctccattccaagacactagcgaatatattatctcctgccacccagtcgggaccgatgaggaacctttgcagttcagagtgccaggcaccagcacctccgctactctgactgggttaacccggggcgctacctacaatgtgattgttgaggcactgaaggaccaacagaggcacaaagttcgcgaggaggtcgttacggttggcaatagtgtcaatgaaggacttaaccaacctaccgacgactcgtgtttcgacccatataccgtctcacactatgccgtgggagatgagtgggaaagaatgtccgagtcaggatttaagctgctctgccaatgcttgggcttcggttcggggcattttaggtgcgatagttctagatggtgccacgacaatggggttaattacaaaataggggaaaagtgggatagacagggagagaatgggcagatgatgagctgcacatgcctgggaaatgggaaaggggagtttaaatgtgacccacacgaagccacgtgttatgatgacggcaagacataccacgttggagagcagtggcagaaagagtacctgggcgccatttgtagttgtacatgttttgggggacaacgtggatggcgctgtgataattgtagaagaccaggaggcgagcctagcccagagggcactaccggacagtcttataatcagtatagtcagagataccaccagaggactaatactaacgtcaattgcccgattgaatgctttatgcccttggacgtacaggccgacagggaggattcaagggaatag

SEQ ID NO: 31716 - RNA, 6891 nt, synthetic construct
  misc_feature 1..6891: note = Description of Artificial Sequence: Synthetic coding sequence
  source 1..6891: mol_type = other RNA
atgttaagagggcctggacctgggctgctcctgttggctgtgcagtgcctggggaccgccgtccctagcacgggcgcctcaaagagcaagaggcaagctcagcagatggtacaaccacagtcccctgtcgcagtatcccagagtaagcccggatgctacgataacgggaaacactaccaaatcaaccagcagtgggagaggacctacctcggaaacgcactggtctgcacatgctacgggggaagtaggggcttcaactgtgagagcaaaccggaagccgaggagacgtgtttcgataaatatacaggcaacacataccgcgtcggagacacctatgaacgcccaaaggactctatgatctgggactgtacttgtatcggagcgggcagagggaggataagctgcactatcgctaaccggtgccatgagggcggtcagtcttacaagattggcgacacgtggcggagacctcacgagactgggggttacatgctcgagtgtgtctgtctgggaaacggcaaaggtgaatggacctgcaaacctatcgccgaaaaatgctttgaccatgccgcaggtacctcatatgtggtcggtgagacgtgggaaaagccttatcaaggatggatgatggtagattgtacctgtcttggcgaaggttctgggaggattacttgcacttcacgcaacagatgcaatgaccaggacacaagaacaagttatcgcatcggagacacgtggagcaaaaaggacaatcgcggaaacttgctgcagtgtatctgcacgggcaatggccgcggtgaatggaaatgcgaacggcataccagcgtacaaaccacctcatcggggagcggccctttcacagacgtacgggccgcagtgtatcagcctcagccccatccccagccacctccgtatggtcactgcgttaccgatagcggggtggtctactccgtagggatgcagtggctgaagacccagggcaacaaacagatgctctgtacttgcctagggaatggcgtttcgtgccaggagacagcagtgacgcagacttacggtgggaacagcaacggagagccgtgtgtccttcccttcacatacaatgggaggaccttctacagttgtaccacggaagggagacaggatggccacctgtggtgtagcactacctccaattatgagcaagatcagaaatatagtttttgcaccgaccacaccgtcttggtccagacacgcggcggtaattcaaatggagccctgtgccatttcccctttctctacaataaccacaattatacagactgtacatctgagggtcggcgagacaacatgaaatggtgcggcacgacgcagaactatgatgctgatcagaagtttggattttgtcccatggcggcacatgaggaaatctgcacaactaacgagggtgtgatgtacagaatcggcgaccagtgggataagcagcacgatatgggccacatgatgcgctgtacttgcgtaggcaatggacggggagaatggacctgcatcgcgtattcacaactccgcgaccaatgtattgtggacgacatcacatacaacgtgaatgatacatttcataagaggcatgaggagggtcacatgctgaactgtacctgttttggacagggccgtgggcgctggaaatgcgatcccgtggaccagtgtcaggactccgagaccgggacattttatcagatcggtgacagctgggaaaagtacgtccacggagtaagatatcaatgctactgttacgggagaggtattggcgagtggcactgtcagcccttgcagacatacccttcatctagcggtcctgtggaagtgttcattacagagacgccctcccaacccaactctcaccctatccaatggaacgcccctcagccttcccatatcagcaagtacattctgcggtggagacctaagaatagtgtagggcggtggaaagaagccaccattcccggacacctgaattcatacacaattaagggtctgaagcccggtgttgtgtacgaaggtcaacttatttctatccaacagtacggtcatcaggaagtcacccggtttgacttcactaccacatcaacctccactccggtgacctctaacactgtgactggagaaaccacacctttttctcccctggttgccacatctgaatcagtcacagagataacagcatcaagctttgtggtgagctgggtgtccgctagtgacactgtttcaggctttcgggtggagtacgaactgtccgaagaaggagacgagccacagtatctggacctgccgtcgacagctacctctgtgaatatccccgaccttctaccaggccgtaaatatattgttaacgtgtaccagatcagtgaggacggtgagcagtcccttatcttatctacatcgcaaaccacagcacccgatgccccccccgatactaccgtagatcaggtggatgacacgagcattgtggtacgttggtctagaccccaggcaccaattaccggataccgcatcgtatactctccaagtgtcgaaggcagcagcaccgagctcaatcttccagaaactgccaacagtgtaaccctgagtgacctgcaaccgggtgttcagtacaatataacgatctacgcagttgaggagaatcaagagagcacaccagtggtgatccagcaggagacaacaggcacccccagatcagacaccgtgccaagcccacgggacctgcagtttgtggaagtgaccgacgtgaaagtgaccatcatgtggactcccccagagtcagcagtaactggctatcgagtcgacgtcatacccgttaatctgcctggcgagcacggccagagactccctatctcacgcaacacctttgctgaggtaacgggactgtcccctggcgtcacatactactttaaggtgttcgccgtgtcccacgggagagagagcaaacccctcacggctcagcaaactactaaactggacgctccaacgaaccttcagttcgtcaacgaaaccgactctactgtcctggttagatggacccccccccgggcccaaataaccgggtatcggctgaccgtcggtctgactcgacgcggacaacccagacagtataacgtcgggccgagtgtgtctaagtatcccttacgcaatctccagcccgcctcagagtatacagtcagtttagtcgcaattaaaggcaaccaggagtcccccaaagcaacgggagtgttcacaacactgcaacccggctcttccatccctccctacaacaccgaggtgacggagaccaccatcgtgataacatggactcctgcacccaggatcggcttcaaactcggggtccgaccctcgcaaggaggagaggcccctagagaagtcactagcgacagtggctctatcgtggtttccggcctgactccgggtgtggagtatgtatacacaatacaggtattacgagacggccaggaaagggacgcacccatcgtcaacaaagtggtaacccccttgtccccacctaccaatctgcacttggaggctaatccggacacaggcgtccttacagtcagctgggagcggtccacaacgcccgacatcacgggatatcggattactaccactcctacgaacggccagcagggaaactcactagaggaggtggttcatgccgaccagagctcatgcacgttcgacaaccttagtcccggacttgaatacaacgtgtccgtatacacagtgaaggatgacaaggaaagcgtgcccattagtgatacaataattcccgctgttccaccaccaacagacctgagattcactaacatcggccctgacaccatgcgggtcacctgggctccccccccctccattgatctgaccaatttcctggtacgatactcccccgtaaaaaatgaggaggacgtggctgaactatcaatttccccctcagataacgcagtagtgctcactaatctgttaccgggcacagagtatgttgtatcagttagcagtgtttacgaacagcatgaatctacgccgctcagggggcgacagaagaccggccttgattcccccactgggattgatttctcagacataacagccaattcatttacagtacactggatcgcgccaagagcaacgatcaccggatatcggattcgtcaccacccagaacactttagcgggcgaccccgggaagatagagttccacacagtaggaacagcattaccctgacaaatcttacccctggaacagagtatgtggtatccatcgttgcactgaacgggcgagaagagtcgcctctgctaatcgggcagcagtctacagtcagcgatgtgcctcgtgacctggaagttgtggccgctactcctacctccctcctgatctcctgggatgccccagctgtgactgtacgttactaccgaatcacctatggtgaaacaggaggtaactctcccgtgcaagaattcaccgtgcccgggtctaaaagcacagcaacgatatcgggtctcaaaccaggcgtggattatacgataactgtgtatgcagtcacaggccgaggtgacagccctgcctcctctaagcccatcagtattaactaccgcaccgaaatcgataagccgagccaaatgcaggtaacagatgtgcaagacaactctatttctgtcaagtggctgccttcttcttcccctgtcacaggatatagagtgacaacaacacctaagaacggccccgggccaactaagacaaagactgctggccccgaccagaccgagatgaccattgagggactgcagccgacggtagaatatgtggtgtcagtttatgcccagaatccttccggagagtcccagccccttgtccaaaccgccgtgaccacaatccctgcccccactgatttgaaatttacacaggtgacgccaacaagtctgtctgcccagtggacgccgccgaatgtacagctcacaggctatagggtacgggtcacacctaaagagaaaaccggccccatgaaagaaattaaccttgctcccgactcttcatcagtcgtggtcagcggacttatggtggctactaaatacgaggtgagcgtctatgcactcaaggatacattgacctctcggcccgctcagggcgtggttacaacgctggaaaacgtgtcccctcctaggagagcacgggtgactgacgcaacagagaccaccatcaccattagctggcgaacaaaaacggaaaccattactggctttcaagtcgatgctgtcccagctaatggacagactccaatccaacggactattaagcccgacgtgcgttcctatacaattactggcctccaaccaggcacagactacaaaatttatctgtatactctcaacgacaacgctaggagctctcctgtggtcattgatgcttctactgctattgacgcgcctagcaatctaagatttctggctacaacccccaacagtctgctcgtctcctggcagcccccacgagcaagaattacagggtacatcatcaaatatgagaagcctggatcacctccccgcgaagttgtcccccggccaaggcccggtgttaccgaagccacaataacaggtttggagcctgggacagaatacactatttacgtcatcgctctgaaaaacaaccaaaaaagtgagcctttgatcggtcgaaaaaagaccgatgagctgccgcagctcgtgactctcccccacccaaaccttcacggtccggagatcctagacgtgccttctacagttcaaaagaccccatttgttacgcaccctggttacgacaccggtaacggtatccagctaccaggtacttctgggcagcaaccttccgttgggcagcagatgatctttgaggaacatggatttcggcgaacaaccccacctacgaccgcaaccccaattcgccataggccacgaccatacccacccaatgtcggagaggaaattcagatcggacacatccctagggaggacgtcgactatcacctctatccccacggccctggtctcaatccaaacgcatcaacagggcaggaagccctctcccaaactacaatctcgtgggctcctttccaagacacaagcgagtacattattagctgccaccccgtgggcactgacgaagaacctttacagtttagggtgccaggcacaagcacatcagccacgctaaccggcctgactcgaggggccacctataatgtcattgtcgaagcattgaaggatcagcaaaggcataaagtgcgcgaggaggtagtgacagtgggcaacagtgtgaatgaaggcctcaaccaacctaccgatgattcttgcttcgatccatataccgtgagccactatgctgtaggcgacgagtgggagaggatgagtgagagcgggttcaaactgctgtgccagtgtctgggattcgggagcggtcactttcgctgcgattcatctaggtggtgtcacgataatggggttaattataagattggcgagaagtgggacagacagggggaaaatggacagatgatgagctgtacctgtctcggcaacggcaagggtgaattcaaatgcgatccgcatgaggcgacatgttacgatgatggtaagacataccatgtgggtgagcagtggcaaaaagaatacctcggagccatttgttcgtgcacctgcttcggcgggcagagaggatggagatgcgacaattgccgcagaccaggtggtgaaccctccccagagggcacaaccggccagagctataatcagtactctcagagataccatcagcggacaaatacaaacgtgaactgccctattgagtgcttcatgccccttgacgtgcaggccgatagggaggatagccgcgaatag

SEQ ID NO: 31717 - RNA, 6096 nt, synthetic construct
  misc_feature 1..6096: note = Description of Artificial Sequence: Synthetic coding sequence
  source 1..6096: mol_type = other RNA
atgctgagagggccaggaccgggcctgctgttgctcgccgtgcaatgcctaggaactgccgtgccatccaccggtgccagcaagagcaagagacaagcccagcaaatggtgcaaccccaatccccggttgccgtcagccagtctaaaccggggtgctatgataatggaaaacactatcagatcaaccaacagtgggaaagaacctacttaggaaatgccctggtgtgcacatgttacggcgggtcccggggctttaattgcgaaagcaaaccagaggcagaggagacatgcttcgacaagtacacagggaatacgtatcgcgtcggagatacatatgaacgaccaaaggactctatgatctgggattgtacatgcataggcgccggaaggggaaggatttcgtgcactatcgctaaccgatgtcacgagggaggccagagttacaagatcggtgacacgtggaggcgaccgcacgagacaggaggctacatgctggaatgtgtgtgcctgggaaacggcaagggggaatggacctgtaagcctatagccgagaaatgtttcgatcacgcagctggaacgtcctatgtggtgggcgagacatgggagaaaccttaccagggctggatgatggttgactgtacctgtctgggagaggggtctggaaggattacttgtacatctcgtaatcgctgtaatgatcaagacacgaggacttcgtacagaattggagatacctggtccaagaaggataatcgaggcaacctgctgcaatgcatttgcactgggaatgggcgcggcgaatggaagtgcgagaggcacactagcgttcagaccacgagcagtggatctggcccttttacggacgtccgtgcagctgtctatcagccacaacctcacccacagcctcccccctatggtcactgtgttactgactccggtgtagtctatagcgtaggaatgcagtggctgaaaacccagggaaataaacagatgctgtgcacttgtctgggcaacggcgtatcatgccaggagaccgcagtgactcagacctacggcggcaactctaatggagagccatgtgttctgcccttcacatacaacggccggactttctattcgtgtacgactgaaggccgacaagacggccacttgtggtgttccacaacttccaactacgagcaggaccaaaaatactctttctgcactgatcataccgtgctggtccaaactagaggaggcaatagcaacggggccctgtgccatttcccctttctgtacaacaatcacaactacaccgactgcacatcagaggggaggagagacaacatgaagtggtgtggtaccactcagaactatgatgcagatcaaaagttcggcttctgtccgatggcagcgcacgaagagatttgtactactaacgaaggagttatgtacaggatcggggatcagtgggacaaacagcacgacatgggacacatgatgagatgcacttgtgtgggaaacggtcggggggaatggacgtgtatagcatattcacaactgagggatcagtgcatcgtagacgacataacatataacgtgaatgacacattccacaagagacacgaagaaggtcatatgttgaactgcacgtgttttgggcagggcagaggccgttggaaatgtgaccctgtcgatcagtgtcaggatagcgaaactggcaccttttaccagattggagatagctgggagaagtacgtgcatggagtacgctatcaatgctactgttacggaaggggcatcggggaatggcattgccagccactacagacctacccgagttcgagcgggcccgtggaggtgttcattaccgagacgccaagtcagccaaacagccatcctatccaatggaatgccccgcagcctagtcatatttccaaatatattctcagatggcgtccaaagaattcagtgggccgctggaaggaggccactatccctgggcatttgaacagttatacgattaaggggcttaagcctggtgttgtctacgagggccagctaatttctatccagcaatatggccatcaggaagtaacgaggttcgactttacaacaacctctacctcaacccctgtcaccagtaataccgtaactggtgagacaacaccgttctcaccactcgtggcaaccagtgagagcgtcacagagatcacagcgtcttcctttgtggtctcttgggtttccgctagcgacactgtgagcggatttagagtggaatacgaactttccgaggagggagatgaaccccagtacctcgatctgccatccaccgccacctccgtgaatatccccgacctgctgcccggtcgaaaatacattgtgaacgtgtaccaaattagtgaggatggggagcaaagcctcatactgtccacatcacagacgaccgcaccggacgcacctccagacacaacagtggatcaagtagacgatacctctatagtagttcgatggtcccgtcctcaggcccctatcacaggttaccgcattgtttattccccgtcagtcgagggttcttccaccgaactcaacctgcccgaaactgctaacagtgtcaccttgtctgacctccagccgggagttcagtataatatcacgatatacgccgtagaagagaatcaggaatctactcctgtcgtgattcagcaggagacaacaggaacgccgcggtcggatacagtgcccagccctcgggatttgcagttcgtcgaagttactgatgttaaggtgaccattatgtggaccccccccgagagcgccgttaccggctatcgcgttgacgtcattccagttaatctgcccggagagcatggccagcgcttgccaatctcacgcaatacttttgccgaagttacgggtttatcacccggagtgacctactatttcaaggtattcgccgtatcgcatgggcgtgagagcaagcccttgactgcccagcagaccacaaagctcgatgccccaaccaacctccagtttgtcaacgagaccgattcaacagtactcgtgaggtggacgccacccagggcccagattaccggatatcggttgactgttggcctcacgcggaggggccagccccgccagtataacgtgggcccctcggtttccaaatatcccttgcgaaacttgcagccggcttctgaatacacagtttcgctcgtggcaattaaggggaaccaggagtcaccaaaggctaccggcgtgttcaccacccttcaaccgggctcctctattccaccatataacactgaagtgacagagactaccatcgtgataacttggacacctgcccctagaattggtttcaagctgggagtacgcccatcccaaggaggtgaagcccctcgcgaggttacgtccgatagcgggtctatagtagtctctggtctgactcctggggtggagtacgtgtacaccatacaggttctgcgggacggacaagagcgagacgcaccaattgtgaacaaggtcgtgaccccattaagcccaccaaccaacctgcaccttgaggcgaatcctgataccggcgtgttgactgtttcctgggaacgatcaacaacacccgatattacaggctatcgcatcaccacgacaccgacgaatggccagcaaggcaatagcctcgaagaggtggtccatgctgatcaaagtagctgtacctttgacaacttgtctccaggactcgagtataatgtttcagtgtatacagtgaaggacgataaagagtctgtccccatctccgacactattattccagcagtcccccctccgaccgacctgagattcaccaacatcggcccagacaccatgcgcgttacatgggctccaccccctagcatagatttaactaactttctcgtccgctacagcccagttaaaaatgaagaagatgtggccgagctgtccatttctccctcagacaacgcagtagtgcttactaacctgttaccgggaactgaatatgtcgtttcggtgagttctgtctacgaacagcatgagtctacccctcttcgaggccgtcaaaagactggattagactcaccaacaggcattgacttctctgacattactgctaattcttttacagttcattggattgcccccagggcgacaatcactggctacagaattcggcaccaccctgagcatttttccggcagaccccgggaggatcgagtgccccactctcggaactctattacgctgaccaacctaacacctggaaccgagtatgtggtctccatcgtcgcactgaacggccgggaagaatccccccttcttatcggtcaacaatctaccgtgtccgatgtccctcgggatctagaagtcgttgccgctacaccaacatcactgttaatttcctgggatgcaccagcagtgaccgtgcggtattaccggattacctatggcgaaactggagggaatagtcccgtgcaggagtttacagttcctggttctaagtcaactgctacaatctcaggcctgaagcctggggtggactacaccattacagtctacgccgtaaccggcagaggcgattcaccggcctccagcaagccgataagcatcaactatagaaccgagatcgacaagccgtcccagatgcaagtgacagacgtgcaggacaactccattagtgttaagtggctgccttcgtcctcccccgttactgggtacagggtgactacaacaccgaagaacggaccaggtccaacgaagacaaagactgctgggcccgatcagactgaaatgactatcgagggcttgcagcctacagtcgaatacgtggtaagcgtgtacgctcaaaatccatctggtgagagccaacctctcgtgcaaaccgctgtgaccaacatagacaggcctaaggggctcgcatttacagatgtcgacgttgacagcatcaagatcgcatgggagtcaccccagggacaggtttcccgttaccgtgtgacttacagttccccagaggacggtatccacgagttattcccagcccccgacggtgaggaggacaccgctgaactgcaaggcctgcgcccaggtagtgaatacactgtgagcgtcgtcgcactgcacgacgatatggagagccaacctttgataggaacccagagtacggctatcccagcacccaccgaccttaaatttacacaggttacccctacatctctgtccgctcagtggactcccccaaatgtgcagttgaccggttacagggtccgagtaacccccaaagaaaagacggggcctatgaaagagattaatctggctcctgactcaagtagtgtagtggtgagcggtctgatggtggctaccaaatatgaggtgtccgtctatgctctgaaggacaccctaaccagtaggccggcccagggagtggttaccaccctggagaacgttagccccccccggcgggctcgggtgaccgacgctaccgagactacgattaccatctcttggagaacgaagactgagacaattacgggatttcaggtcgacgctgttccggccaatggtcagactcctattcaaagaacaattaaaccagacgtacgttcttacactatcacgggtctgcagcctggcacagattataagatttacctgtacactctgaatgataacgcccgcagttcccctgtagtaatagatgcctccaccgcaattgacgccccatctaatctccggtttctggccactacacccaattctctcctcgtgtcttggcaaccacccagagcgcgaattacaggctacatcatcaagtacgaaaaaccagggagcccacccagagaggtcgtccctcgcccccggcctggtgttacagaagccactatcaccggcttggagcccgggaccgagtataccatctacgtcatcgcgttgaagaacaatcagaagagcgaacccctaataggcagaaaaaagaccgggcaggaagccctatcccaaacgactattagctgggcacctttccaagatacctctgagtacatcatctcatgccatcccgtgggcaccgacgaggagccgcttcagtctaccaaggcgtag

SEQ ID NO: 31718 - RNA, 6531 nt, synthetic construct
  misc_feature 1..6531: note = Description of Artificial Sequence: Synthetic coding sequence
  source 1..6531: mol_type = other RNA
atgttaagggggccgggccccgggctcttgttactggccgtgcagtgtctgggcactgcagtcccctctaccggcgcatccaagtcaaagcggcaagcccagcagatggtccagccacagtctccagtggccgtgtcgcaaagcaaaccagggtgctacgacaatggcaagcactaccagattaaccagcagtgggagcgaacatatctcgggaatgccctggtctgtacctgttacggtggcagtcgcggtttcaactgcgagtccaagcctgaagccgaggaaacttgctttgacaagtataccggcaatacgtaccgagttggagatacctacgaacggcccaaggacagcatgatctgggactgcacgtgcatcggcgctgggcgcgggcggatttcatgcacaattgcaaataggtgtcacgaaggtggccagagctataagatcggcgacacctggaggagaccccatgaaactggcggctacatgttagaatgtgtttgtcttggaaatggaaagggggaatggacatgcaagcccattgcggaaaaatgctttgatcacgccgccgggacatcttacgtggtgggcgaaacctgggagaagccttatcagggttggatgatggtggactgtacctgcctgggagagggaagcggaaggattacttgcactagccgcaaccgttgcaatgatcaggacacccgcacgtcgtatcggatcggcgacacttggtctaagaaggacaataggggcaacctgttacagtgcatctgcaccggaaatggcagaggagaatggaaatgcgagcgccatacctccgtccagacaacttcaagcggatctgggccatttactgatgtgagagcagctgtctatcaaccccagccacacccacagccaccaccctatggccattgtgttaccgactcgggtgtggtctactcagtcggaatgcagtggttgaaaacccaaggtaacaaacaaatgctctgcacatgtttgggcaatggcgtgtcttgccaagagaccgcggtcactcaaacttatggaggcaatagcaacggcgagccttgcgtacttccttttacctataatggcaggaccttttactcttgcactactgaggggcggcaggacgggcatctttggtgctcaactacctccaactatgaacaagaccagaaatacagcttctgcacggaccataccgtccttgtacagaccagaggcggaaattccaacggagcactgtgccactttccattcctgtataataaccacaattacaccgactgcaccagcgaggggagacgtgataatatgaaatggtgtgggacaactcagaattatgatgcagaccagaagttcggcttctgcccaatggccgcgcatgaagaaatctgtacaaccaacgaaggcgttatgtataggatcggggatcagtgggacaagcagcacgatatggggcacatgatgcgatgtacttgcgttggcaatggaaggggtgaatggacctgtattgcttattcccagctgagagaccagtgcattgtggatgacatcacctacaacgtgaatgacaccttccataaaaggcacgaagaggggcacatgctaaactgcacctgttttggccaggggcgtggaagatggaaatgtgatcctgttgaccagtgtcaagacagtgagacagggacattttatcagatcggcgacagctgggagaagtatgtccatggtgtccggtaccagtgttactgctacgggcggggtattggcgaatggcattgtcagccactgcagacttatccctcgagctccggcccagttgaggtcttcattactgagactccgagccaacccaacagtcaccctatccagtggaatgcgcctcaaccctctcatatctcaaagtacattctcagatggcgacccaaaaactccgtaggccgctggaaagaagccaccattcctggacacctgaactcctataccatcaagggcctgaaacctggcgtcgtgtatgagggacagttaattagtatccaacagtacgggcatcaggaagtgaccagattcgacttcactactacatccacgtccacgcctgtgaccagcaacaccgtgactggagagaccacacctttttcacctcttgtcgcgactagtgagtccgtaactgagattactgccagtagctttgtggttagctgggtctccgcaagcgatactgtctccggcttccgggtggagtacgaactatctgaggaaggtgacgagccccaatacctggatctccctagcacggccactagcgtcaacatcccagatctccttccggggcgaaaatatatagtaaatgtctaccagatcagtgaggatggcgagcaatctctcattctgtctacctctcaaaccaccgccccagacgccccccctgatacaactgttgaccaggtcgatgacacaagcatagtcgtgcgttggtcacgaccgcaggctcctataaccggatataggatcgtctactcgccatctgtcgaaggcagctccacagaactgaatctccccgagaccgccaatagtgtgaccctgtccgacttgcagcccggcgttcagtacaacattacaatctacgccgttgaagagaaccaggagagtactccagtcgtgattcagcaggaaactacaggcactccaaggagcgacaccgtgccgagtcctcgtgacctgcaattcgtggaggtgaccgatgttaaggtgaccatcatgtggactccacctgaatccgctgtgaccggctacagggtcgatgtgattcctgtgaacctgccaggggaacatggacagagactaccgatttcccgtaatacctttgcagaagttaccggcctcagtccaggcgtgacatactactttaaggtttttgctgtatcccacggacgggagagtaaacccctcacggcacaacagaccactaagttagatgccccaacaaatctccagtttgtcaacgagaccgacagcacagttctagtccggtggacaccacctcgcgcgcaaataacagggtaccggctcactgtgggcctgacaagaagaggacagccccgtcagtataatgtagggccttccgtcagtaagtatcccctgaggaatttacagccagcttccgagtatacagtgtctctagtcgcaataaaaggaaaccaagagtcccccaaggctaccggggtgtttacaacactccaacctggctcaagcatacctccgtacaacaccgaggtgactgaaacaactatcgtaattacgtggacccctgctccacgcatcggcttcaaattgggcgtgcgcccgtcgcagggaggcgaggccccccgggaggtgacctctgactctgggtctattgtggtatccggattaacccctggagtcgaatacgtttatacaattcaggtgctccgggacggacaagaaagagacgccccaatcgtaaataaagtcgttacgccgctgtcccctcccactaatttgcatctagaagcaaatcccgacaccggagtgctgacagttagctgggagagatccactacccctgatattacgggttaccggattactacaacgccgaccaatggacagcaaggcaattcactggaggaggttgtccatgccgatcagtcgagctgcaccttcgacaacctgtcaccagggctcgagtataacgtgagtgtctacactgttaaggacgacaaggaaagtgtgccaatctctgatactatcattcctgccgtgccccccccaactgacctgagatttaccaacatcggtccagacaccatgagggtgacctgggccccgccccctagcattgacttaacaaatttcttagtgagatattcccctgtcaaaaacgaggaggatgtggctgaactctcaattagccccagtgataatgcagtggtgctcaccaacttgctcccggggacagagtatgtggtctctgtctcaagtgtctatgagcagcatgaaagtactcccctgcgcggccggcaaaaaactggtctggactcccccacgggcatagacttcagcgatataacggctaatagtttcaccgtgcactggattgccccccgcgccacgataaccgggtatcggatacggcaccaccccgagcactttagcggcagacctcgagaggatagagtgcctcattcccgcaactccatcacattgacaaacctgacccctggaaccgaatatgtcgtatccatcgtggctttgaacggtcgagaggaatctcctctactgattgggcagcagtcgactgttagtgatgtgcccagggacctggaggttgtggctgccactcctacttcactactgatctcctgggatgctccagccgtgaccgtcaggtattacagaataacctacggagagactgggggcaattctcccgtacaggagttcactgtgcccggtagcaaatctaccgcgaccatcagcggcctcaagcctggcgtcgactacacaatcacggtgtatgccgtcaccggacgtggggactcccccgcatcaagcaagcctatttccatcaactatcgcaccgaaatcgacaagccctctcagatgcaggtcaccgatgtccaagataacagtattagcgtgaagtggctgccatcctccagcccagtgactggatatagagtgaccaccacaccgaagaacgggcctggacctactaagacgaagactgctgggcccgaccagacagagatgacgatcgaggggctgcagcctaccgtcgagtacgtggtttcagtgtatgcccagaatcctagtggcgagtcacaaccactcgtccaaaccgcggttacgaccataccggcacccacagacttaaaattcacgcaggtgaccccaacatctctttccgcccagtggactccacctaatgttcaacttaccgggtatcgagtaagggtgaccccgaaggaaaaaacgggaccaatgaaggagataaatcttgcccccgactcgtctagcgtcgtcgtgtccgggctgatggtagctactaagtatgaagtctccgtgtacgcgcttaaagatactttaacttccaggccggcccagggagtagtgactacattagagaatgtgtctccacctaggagagccagggtgacagacgccaccgaaacgacaattactatctcgtggcgtacgaaaacagaaacaattacggggtttcaggtggatgccgtaccagccaacggccagaccccgattcagagaactatcaagcccgacgtgagaagttataccattacaggcctgcagcccggcaccgattataagatttacctttacacactcaacgataacgctcggagttccccagtcgtgatcgacgcttctaccgccattgatgcaccttccaatcttaggttcctcgcaaccacccccaactctctgctggtgagttggcagccaccaagagctagaataaccggctacatcattaagtacgagaaaccagggtcccccccccgcgaggtggtgcccagacccaggcccggcgtcacggaggccaccatcactggcctggaaccaggcactgaatacacaatctatgtcatcgcactgaaaaacaaccagaagagcgagccgctgatcgggaggaagaagactgggcaggaggctctcagccagaccacaatatcatgggccccgttccaagacacctcggagtacattatctcttgtcatcctgttgggacggatgaagaacctttgcagtttcgggtgccaggaacctccactagcgctactctgactggtctgacacgaggagcgacatacaatgtcattgtggaggccttgaaggatcaacagagacacaaagtcagagaggaggtggtaactgtgggcaattctgtgaatgagggtctgaaccagcccacggacgactcctgttttgatccttacacagtgtcacattatgctgtaggtgatgagtgggaaagaatgtccgaatcaggtttcaagctgctctgccagtgtctcggctttggcagcggccatttcaggtgtgattctagtaggtggtgtcacgacaatggggtgaattataaaattggagaaaagtgggacaggcagggagagaacggtcaaatgatgagttgcacctgccttggaaacgggaaaggcgagtttaagtgtgacccacacgaagctacatgttacgatgatggaaaaacatatcacgtgggggagcagtggcagaaggaatatctcggggctatttgtagttgcacctgctttgggggtcaacgtggatggcggtgtgacaactgcagacgccctggcggtgagccatcccctgaagggaccacgggtcaatcatacaatcagtatagccaacgctatcaccaacgaactaacactaacgtgaactgtccaattgagtgtttcatgcctcttgatgtacaggcggaccgcgaagactcccgagagtag

SEQ ID NO: 31719 - RNA, 7161 nt, synthetic construct
  misc_feature 1..7161: note = Description of Artificial Sequence: Synthetic coding sequence
  source 1..7161: mol_type = other RNA
atgctgagagggcccggaccaggcctcctccttctcgccgtccagtgtctgggcaccgccgtgccctcaacgggagcctctaagtccaaacgccaggctcagcaaatggtgcagcctcagagccctgttgcagtttcccaaagcaaaccaggttgttacgacaacggaaagcactaccaaatcaaccagcagtgggaacggacttacctgggcaacgcactcgtatgtacatgctatggtggatctagaggatttaactgcgaatcgaagccagaagctgaagagacatgctttgataagtatacaggcaatacctatcgagtcggcgatacgtacgagagacctaaggacagcatgatctgggactgtacttgcatcggtgccggaagagggcgtatcagttgtactatcgccaatagatgccatgaaggcgggcagtcctacaagatcggagatacatggcgcagacctcacgaaactggcggctacatgctggagtgtgtctgccttgggaacgggaagggggaatggacatgtaagcccatcgcagagaaatgttttgatcatgccgccggtacttcttacgtcgtgggggagacctgggagaagccgtaccaggggtggatgatggtcgactgcacatgtctgggcgaaggctctggcagaatcacctgtacttctcgtaatagatgcaatgaccaggatactagaacttcctacagaatcggggacacttggtccaaaaaagacaatcgcggcaacctcctgcagtgcatttgtactggaaatgggcgaggggaatggaaatgcgagcggcacacttccgttcagaccacctcaagcggttctggcccattcaccgatgtgcgggccgctgtctaccagccacagccacatccgcagcctccgccttacggccactgcgttacggactcaggtgtggtgtactctgttggcatgcagtggttgaagacccaggggaacaagcagatgctgtgcacatgccttggtaatggcgtgagttgccaggaaactgccgttacccagacatatgggggtaacagcaatggggaaccttgcgtgctgccattcacatacaatggccgcaccttttacagttgcaccacagagggtcggcaggatggccacctatggtgtagcaccacttccaattacgagcaggaccagaaatattcgttctgtaccgaccataccgtcctagtgcagacccgagggggcaacagtaatggagccctctgccatttccctttcctgtacaataaccacaactatactgactgtacgagcgaagggcggcgagacaacatgaagtggtgcggaacaacccagaattatgacgctgatcagaaattcggattctgtcccatggctgcacacgaagagatctgtactacaaatgagggtgtcatgtaccgaatcggagaccagtgggataaacaacacgacatggggcacatgatgagatgcacttgtgttggaaacgggaggggagagtggacttgtattgcttatagccagcttagagatcaatgtattgtggacgatatcacctataatgttaacgatacattccacaaaagacatgaggagggccacatgctcaactgcacatgctttggccaggggcgaggcagatggaagtgcgacccagttgaccagtgtcaggacagtgagaccggtactttttatcagattggtgatagttgggagaaatatgtccatggggtacgctaccaatgttactgctacggccgcgggatcggggaatggcattgccagccccttcagacttacccctcttcatccggccctgtggaggtgtttattacagaaactccctctcagcccaactcccaccctatccaatggaatgcccctcagccatcacatatctctaagtacatccttcgttggagacccaaaaatagcgtgggacgctggaaggaagcgacaatcccggggcaccttaactcttatacgattaagggcctgaaacccggcgtcgtgtatgaagggcagttgataagtatccagcaatacggtcaccaggaggtaacacggttcgactttaccacaacatctacatctacacccgtcaccagcaacacggtcacaggagaaacaacccccttctccccattggtagctacctcagagagtgtgacagaaattacagcttcatccttcgtggtaagttgggtcagtgcctctgataccgtgtctggttttcgagtggagtacgagctcagtgaagagggtgatgagccacagtatctggacctgccttccactgccacctctgtgaatatacccgacttactccctgggcggaagtatattgtcaacgtctaccaaatctctgaagatggggagcagtctctgattttatctacttcccaaactacggcacctgatgcaccaccagacaccacagtggatcaggtcgacgacacatccatcgtggtgagatggtctagacctcaggcaccaataacagggtaccgcatcgtgtactccccgtccgtggaaggttccagcacagaattgaatctgccagaaaccgctaattcagtgaccctgtcagacctgcagcccggggtgcagtacaacatcacaatatacgcagtagaagagaatcaagaatccactcccgtcgtgattcaacaagagactaccgggacacctagaagtgacaccgttccatctccacgtgatctgcaattcgttgaggtaacagacgtcaaagtaaccattatgtggacacctcctgagagtgccgtgaccgggtaccgggtggacgtaattccagtaaatttacccggtgagcatggacagcgtctcccaatctctcgtaacactttcgcagaggtgacagggctctcacccggagtgacctattactttaaagtctttgcggtgagccacgggagggagagcaaacctctaacggcgcagcagacaaccaagctcgacgcccccaccaacctgcagtttgtgaatgagactgactccacagtgcttgttcgttggacaccccctcgcgctcaaattacagggtataggctcacagttggactcacccgcaggggacagccaaggcagtacaatgtaggcccctcggtttcaaagtaccccctgagaaatctacagccagctagcgagtataccgtctccctcgtcgccataaaaggcaaccaggagtctcccaaagccactggggtgttcaccactctccagccgggctcctccattccaccgtataacaccgaagttactgagaccactatcgtcataacctggacccctgcccctcgcattggctttaagctaggtgtcaggccctcacagggcggggaagccccaagggaagtgactagtgactctgggagtattgtggtgagcggcttgacccccggtgtggaatatgtgtacacaatccaggtgctccgggatggtcaagaacgggacgcgcctatcgttaataaggttgtgacaccacttagcccccccacaaatctgcacttagaggccaatcccgacacgggcgtcttaacagtaagttgggagcggagcactacacccgatatcaccggataccgaatcactacgactcctacaaatggtcagcaagggaattcacttgaggaggtggttcacgctgaccaatccagctgtacattcgacaatctttcacccggactcgaatacaacgtatcagtatatactgttaaggacgacaaagagtcggtgccgatttcagacactattatccccgctgtgccaccacccacagacctgcgatttacaaacattggacccgataccatgcgcgtgacttgggccccaccaccaagcattgaccttaccaatttcttagtaaggtatagtccagtgaagaatgaggaggacgtcgccgagcttagtatttcaccctctgataacgccgtggtgctcaccaatctgctgccaggaacagaatacgttgtcagcgtgtcttcggtgtatgaacagcatgagtctactcctcttcgcggtcggcagaagaccgggctggactcacctactggcatagactttagcgacatcactgcaaacagctttacggtacattggatcgctccccgggctacaattaccgggtatcgcattcgtcaccaccctgagcatttctctggaagacctagggaagatcgagtgcctcattccaggaattctattactctgaccaatcttactcctggcacagaatacgtggtatccatcgttgctctaaacggaagggaagaaagtcctctacttatcggacagcaatcaacagtttctgatgttccacgagacctggaggttgtcgccgcaacgcctacaagcctgctgataagctgggatgctccggcagtgacagtgaggtactaccggatcacctacggcgaaaccggagggaactctcctgtgcaagaattcacggtgccgggatctaaaagcaccgccacgatcagcgggctgaaacctggggtggattacaccatcacggtctacgcagtgacaggacggggagactcccctgctagcagcaaaccgatttcgatcaactatcgcaccgagatcgataaaccatcccaaatgcaggtgaccgacgtgcaggacaacagcatttctgtgaagtggctgccgtcatcttctcccgtgaccggctatagagtgacgaccacaccgaagaacggcccaggacctacaaaaaccaaaaccgccggaccagatcagacagagatgaccatcgagggccttcagccgaccgtagaatacgtggtcagcgtgtacgctcaaaatccatcaggggagtcacaaccactcgtccagaccgccgtgacgaacatagatcgaccaaaagggctagcatttaccgatgtcgacgtggatagcattaagattgcttgggaatcccctcagggccaggtcagcagatacagagtgacctacagctcccccgaggacggcatccacgaactttttccagcaccggacggtgaagaggatacggccgaattgcagggcctccgtcccggtagcgagtacaccgtgtccgttgttgctctgcacgacgatatggagtctcaacccctgattggcacacagagtactgcaatccctgccccaacggaccttaagttcactcaagtgacccctacttctctttcagcacagtggacgcccccaaacgtgcagcttaccggctatagagtacgtgtgacacctaaggaaaaaactgggcctatgaaagagatcaacctggccccagacagcagttccgtggtcgtctcaggcctcatggtcgctacgaagtacgaagtttcggtctacgccctgaaggacactttgacttcccgccccgcccagggagtcgtcacaacccttgaaaacgtgagccctcctcggagggctcgtgttactgatgccacagagactacaataaccataagctggcggaccaaaacagagacaattaccggctttcaggtagacgcggttcccgctaacgggcaaacgcctatccaaaggaccattaagcccgacgttcgatcctatacaattaccgggctccagcctggcacggactataagatctatctgtacactctcaatgataacgctaggtcaagcccagttgtcatcgatgccagcaccgctatcgacgcaccctcaaacttgaggttcctagctactactccaaatagtttgctggtgtcctggcagcccccccgggcccgcataaccggatacattattaagtatgagaagcctggcagccctccgagagaggtagtgccccgcccccgtcccggagtcacagaagctaccatcaccggactcgagccaggaaccgaatacactatatacgtgatcgccctgaaaaataatcagaagtccgagccactcatcgggcgcaagaaaacagacgagcttccccagctggtcaccctgccgcatccgaatcttcatggtcccgagatcctggatgtgccgagcaccgtgcagaaaacaccatttgtgacccaccctggatacgatacaggaaatggaatacagcttcctggtacctcaggtcaacagccctcagttggacaacagatgatcttcgaagaacacggctttcggcggaccaccccacctaccactgcgactccaattcggcatcgcccccggccgtacccaccaaacgtgggtgaagagatccagattggccacattccaagggaagacgttgactaccacttgtatcctcatggcccgggattaaacccaaatgctagtacaggccaggaagccctgtctcagacaactatctcttgggcaccatttcaagacactagcgaatacatcatctcctgccatcctgtcggcacagatgaagaacccctgcagttccgtgtgccaggtaccagcacctctgctactttgaccgggctcacacgtggggcaacttacaacgtgattgtcgaggcactgaaggaccagcagagacacaaagtaagggaggaggtggtcacggtcgggaactccgtgaacgaaggcttgaatcagcctaccgacgattcttgcttcgacccatatacggtgtctcattacgccgtgggcgatgagtgggagcggatgtccgagtcgggttttaaactgctgtgccagtgtctcgggttcggatccggacatttccggtgcgattcgtctcgatggtgccacgacaatggagtaaattataagatcggtgaaaagtgggacaggcagggggaaaatgggcagatgatgagctgcacatgcctcggcaatggaaagggtgaatttaagtgtgatccccacgaagccacatgctatgacgacgggaaaacctaccatgtgggagaacagtggcagaaagagtacctgggcgccatctgtagctgcacgtgcttcggcggacagcggggctggagatgcgataattgccgaagacctggcggagagccatctccagaagggactaccggccaaagttacaatcaatactctcaaagatatcaccagaggaccaataccaatgtcaattgtcctatcgaatgttttatgcccctggacgtgcaggctgatcgcgaggattcaagagaatag

SEQ ID NO: 31720 - RNA, 6723 nt, synthetic construct
  misc_feature 1..6723: note = Description of Artificial Sequence: Synthetic coding sequence
  source 1..6723: mol_type = other RNA
atgctcagaggtcccgggcccggactcctcctgctcgccgtgcagtgtctgggtaccgccgtgcccagcacaggggcttccaagagcaagaggcaagcccagcaaatggtccagccccagagtccagtggcagtgtctcaaagcaaacccggctgttacgacaatgggaagcactatcagatcaatcaacaatgggagagaacatatctgggaaatgcactggtatgcacctgttacgggggctctcgtggctttaattgtgaaagcaagccggaagctgaagagacctgctttgacaagtacactggtaatacatatagagtgggcgacacctacgagcgcccaaaagattctatgatatgggattgcacctgtattggggccggacggggccgcatctcatgcacaattgcgaatcgttgccatgagggcggacagtcatataaaatcggggacacctggcgtcggccacatgaaactggcgggtacatgctggagtgcgtgtgtctgggcaatggcaagggagagtggacatgtaagcctatcgcagagaaatgctttgaccacgctgcgggcacaagctatgtggtcggtgagacctgggagaaaccttatcaggggtggatgatggtggattgcacctgcctaggagaggggtcagggcggatcacttgcacatcccgcaaccggtgcaatgaccaagataccagaacgtcttaccgcatcggcgatacatggagtaagaaagacaataggggtaatcttctgcaatgcatttgtacaggcaatgggagaggtgagtggaagtgcgagagacacacatctgtacagacgacatcttcggggagcgggccttttaccgacgtcagggcggccgtgtatcaacctcaacctcaccctcaaccacccccttatggtcattgcgtcaccgattctggcgtggtttactctgtagggatgcagtggctgaagacccagggaaataagcaaatgttgtgtacctgtctgggaaatggggtgtcctgccaggagacagctgtgacacagacatacggtggaaactcaaacggcgaaccgtgtgttctccctttcacttacaatggtcgcactttctactcatgcaccaccgagggtcgccaagacggtcacttgtggtgttctacaacatccaattacgaacaggatcagaaatacagcttttgcaccgaccatactgtgttggtgcagaccagagggggtaattcaaacggtgccctctgtcacttcccgttcctgtacaacaaccataattacaccgattgcacatccgagggtaggagagataacatgaaatggtgcggaaccacccagaattacgatgcggatcagaaatttggattttgccctatggccgcccatgaggagatctgtacaactaacgagggcgtgatgtatcgtattggggaccagtgggataagcagcatgatatgggtcatatgatgaggtgcacttgcgtcgggaacggcaggggtgaatggacctgcattgcgtactctcagttgcgagaccagtgcatcgtggatgatataacatacaatgtgaatgacactttccataaacggcacgaagagggacacatgcttaattgtacctgctttgggcaagggcgtggtcgatggaaatgtgatcccgtggaccaatgccaagattctgagacaggcaccttctaccagatcggcgacagctgggagaaatacgtacacggggtgcgctatcagtgttactgttatggcagagggatcggtgagtggcactgtcaaccattgcaaacctatccatcatcctctgggccagtggaagttttcattacggaaacccctagtcagccaaacagccatccaatccagtggaatgccccccagccttcccacatcagtaaatatatactgcgctggcgacctaaaaactccgtcggtaggtggaaagaagccacaatacctgggcacctcaattcctatacgataaaggggctaaagccaggcgtggtgtatgagggccaacttatctccatccagcaatacggccaccaagaggtaacaagattcgacttcacaacaacttcaaccagcaccccagtgacatccaacaccgtgaccggcgagactacacctttttctccattagtagctacaagcgaatctgtgacggagattacagccagttccttcgtggtcagctgggttagcgcgtcggatactgtgtccgggttcagagtggaatacgaactctccgaagaaggcgacgaaccgcagtatttggacttacccagcaccgccacctcggtaaacattcctgatcttttgcccggcagaaagtacatagtgaacgtttatcagatcagtgaagatggagagcagagcctgatcctatcaacatcccagaccacagcgcccgatgcacctccagacaccacagtcgatcaagtggacgatacaagtatagtggtgcggtggtcacgaccccaggccccaatcaccggatacaggattgtttatagcccctccgtcgagggttccagcacggagctcaatttgcccgaaacagcaaactctgtcaccctgtcagacctgcagcccggcgtgcagtacaacattaccatatacgctgtggaagaaaaccaggagagtaccccagttgtgattcagcaggagacaactggcacaccacggagtgacacggtgccctcccccagagacctgcaatttgtggaagtcacagacgtcaaagtgactatcatgtggacacctccagagtctgcagtgaccggttacagggtggatgtaatccctgtcaacctgcccggggagcacggccaacggctccctatttcacggaataccttcgcggaagtaactgggctgtcaccaggtgtaacatactacttcaaagtctttgctgtgtcccatggccgagagtccaagccactcacagcacagcaaaccacaaagcttgatgctccaaccaatctacagtttgttaatgaaactgacagcacagtcttggttcgatggactccacccagagcccagattacgggttacagattgacagtaggtctgacaagacgcgggcagccacgacagtacaatgtcggtcctagcgttagtaagtacccattgcgcaacttacaaccagcctccgagtataccgtttccttagtagctatcaaagggaaccaggaaagccccaaagccactggcgtgttcacgacacttcagccgggcagcagcatacctccctacaacacagaagtcaccgagactactatagttatcacatggactcccgctcctagaattggatttaagctcggagtgcgcccatcccaagggggggaagctcctcgcgaagtaaccagcgactcaggtagcatcgttgtctctggcctgaccccgggggtcgaatatgtgtacacaatccaggttttaagggacggtcaggagcgggacgcaccgattgtgaataaggtcgtcacccccctgtccccacccacaaatctgcatcttgaagccaaccccgacactggtgtcctcactgtgtcctgggaaagaagcacaaccccagacataactggatatagaatcacaacaacccccactaatgggcaacagggtaactctctcgaagaggtggtccacgccgaccagtccagttgtacttttgataacctgtcgcccgggctggagtacaacgtgtccgtttatactgtgaaggacgacaaagagtcagtgccaatctccgatactataattcccgcagtgccccctcccactgatttaagattcaccaacataggccccgataccatgcgagtgacttgggcacccccgccatctatcgacctgacaaacttcctagtgcgctactcacctgttaagaacgaagaagatgtcgcagagctgagcatttcccccagcgataatgcagtggtgctgaccaacctcttgccaggcacagaatatgttgtctctgtcagttccgtgtacgagcagcacgaaagtactccgttacgtggaagacagaagacaggcctggattcaccaaccggtatcgatttcagtgatattactgcgaacagcttcacagtgcattggatcgcaccccgagctacaatcacgggatacagaatcagacaccacccagagcacttttcgggccgaccccgagaggaccgggtccctcattctcgcaatagcattaccctaacaaatctaacccccggaactgaatatgtcgtatctattgtggcactgaacggtcgcgaagaatcacctctgctcatcggacagcagtcaactgtctccgatgtgccccgcgatcttgaggtagtagctgcgacaccaaccagcctgctcatatcctgggacgcacccgccgtgacggtgcgttactaccggatcacgtacggagaaaccggaggtaactctcccgtgcaggaatttaccgtgcccggtagcaagagcacagctaccatctctggacttaagcccggcgtggactacacaattacagtgtatgccgtgaccggaagaggcgattctcccgcctcctcaaagcctatcagcatcaattatagaactgagatcgataagcccagccagatgcaagtgactgatgtgcaagacaactccatctcagtcaagtggctgccctcttcttcgcctgtgacaggttacagagtaaccacaactcctaagaatggacccggcccaacaaaaactaaaactgcaggtccggatcaaaccgagatgaccatcgaaggcctccagcccacagttgagtatgtggtgagcgtctacgcacaaaaccctagtggcgaatcccaaccactcgttcaaacggctgtgacaacaattccagcacctaccgatctgaagttcacgcaggtgacacctacatctctttctgcacagtggactccacccaatgtacagctcaccggttatcgagtgcgcgtgacgcccaaagaaaaaaccggtcccatgaaagagatcaatctggcccccgactcaagctctgtagtggtgtcaggactcatggtcgcgacgaagtacgaggtgtctgtatatgctttgaaggatacgctgacaagccggccggcgcagggagtggtgacaacactggaaaacgtatcgcctccgaggagagcccgggtgactgatgccaccgagacaacaattaccatttcctggagaaccaagacagagacaattacgggcttccaggtagacgctgttcccgccaatgggcagacgcccatccaacggacgataaagccagacgtgcggtcttacaccatcaccggactgcagccagggacagactataaaatttacctctacacccttaatgataacgctagatcctctcctgtggttattgatgcttccaccgctatcgatgcaccttccaatttgaggttcctggcgacaacccccaactccctgttggtgtcctggcagcccccacgcgcccgtataaccgggtacatcatcaaatacgagaagcccggaagtcccccccgggaggtcgtccctcgtccccgccccggcgtcactgaggctacgatcactggcctggagcctggtacagagtacaccatatacgtaatagctttgaagaataatcagaagtccgagcccttaatcgggcggaagaaaactgttcagaagactccgttcgtcacacatccaggctacgatactggcaatggtattcagctgcccggtacatcagggcaacagccaagtgtcgggcaacagatgatttttgaagaacacgggttcaggcgcacgaccccacctaccactgcaacaccgatccggcacaggcccagaccttatcctcccaacgtgggtcaggaggcactgagccagaccacgataagctgggcacctttccaggataccagtgagtatataatcagctgtcatccagtcggcactgatgaagagcccctgcaattccgcgtccccgggacaagtacatcggcaaccctgaccggtctgacccgtggcgcaacgtacaatgtcatcgtagaggcactgaaagatcaacagaggcataaagttcgtgaagaggtggtcacagtcgggaattcagtgaacgagggcctgaaccagccaaccgacgacagctgctttgacccttatactgtgtcgcactatgccgtgggagatgaatgggaaagaatgagcgagagtggctttaaactcctgtgtcagtgtttgggcttcggctccggccacttccggtgtgatagttcaagatggtgtcacgacaacggggtcaactacaagatcggcgaaaaatgggacaggcagggggagaacggccagatgatgagctgcacctgccttgggaatggtaaaggagaattcaaatgcgatccacatgaggcaacttgctacgacgacggaaaaacttaccatgtgggggaacaatggcagaaggagtacctgggcgcgatttgctcctgtacgtgctttggcggtcagcgaggctggcggtgcgataattgtaggagaccaggcggtgagcccagcccagaaggtacaaccgggcagagctacaaccaatattcacagagataccaccaaagaactaacaccaacgttaactgtcctattgagtgtttcatgccacttgatgtgcaggcagatagggaagactcccgggaatag

SEQ ID NO: 31721 - RNA, 1974 nt, synthetic construct
  misc_feature 1..1974: note = Description of Artificial Sequence: Synthetic coding sequence
  source 1..1974: mol_type = other RNA
atgctgaggggtcctggccctggcttgcttctcctggctgtgcaatgcctgggcacagctgtacccagtaccggggctagtaagagcaagcgacaggcccaacagatggtgcagccacagtctcccgtcgcagtgagtcagtctaaaccaggctgttacgacaatggcaaacattatcagattaatcagcaatgggagcgcacttatcttgggaatgctcttgtctgtacctgctatggaggctcaagaggctttaactgtgaatccaaaccagaggccgaggagacctgtttcgacaagtacaccggaaacacctaccgggtgggggacacttatgaacgccctaaggatagtatgatttgggattgcacctgtatcggcgcagggagaggacggatctcctgcactatagcgaatcggtgccacgaaggcgggcagtcatacaagatcggggatacttggcgcaggccacatgagacaggtggttacatgctggagtgcgtgtgcctcggaaacggaaagggtgagtggacctgcaaacccattgccgagaaatgcttcgaccatgcggctggcacatcatacgtggtgggcgagacgtgggaaaagccataccagggatggatgatggttgactgcacatgtctaggagaagggagtgggcgcattacatgtactagcaggaatcgttgtaatgaccaagatacaagaacatcatatcgaattggcgatacatggtctaaaaaagataaccggggaaatctccttcagtgcatttgtacaggaaatggcaggggagaatggaaatgtgaaagacatacaagcgtacagacaacttctagtggatcaggcccattcacggacgtcagagccgcagtgtatcagccccagccacatccccaaccgccgccctatggtcactgcgtcaccgattcaggggtggtgtattccgtggggatgcaatggctgaagacgcaaggtaataaacagatgctttgcacctgcctggggaacggagtctcctgccaggaaacagcagttacgcaaacttacggtggaaattccaacggagagccatgcgtgctaccttttacctataacggaaggaccttttacagttgcacaactgagggaagacaggatggccacttgtggtgttcaacaaccagcaactatgaacaggaccagaaatactctttttgtaccgaccatactgtgctggtccagacaagaggaggtaattctaatggggctctgtgccactttccgtttctatacaacaatcataactacaccgactgtacttctgaggggagacgggacaatatgaaatggtgtgggaccacacagaactatgacgctgaccagaagttcgggttttgccccatggctgcccatgaagaaatctgtactacaaatgagggggtaatgtatcggataggagatcagtgggacaaacagcatgacatgggccatatgatgcggtgtacttgcgtgggaaacggacggggagagtggacatgtattgcgtacagtcagctgcgtgaccagtgtatcgtagacgacatcacttacaatgttaacgacacattccacaaacgccacgaagagggacacatgctgaattgtacctgtttcggtcagggcagggggagatggaagtgcgatcctgtcgaccagtgccaggactccgaaaccgggaccttttatcagatcggtgactcatgggagaagtacgtccatggcgtcagataccaatgttactgctacggaagggggatcggtgaatggcattgccaacctttacaaacataccccagcagctcggggccggtggaggtatttataacagagactccctcacagcccaattcacatcctattcaatggaatgcccctcagccatcgcatatcagtaagtacattcttaggtggcgaccagtctcaattccacccagaaacttgggttattag

SEQ ID NO: 31722 - RNA, 6804 nt, synthetic construct
  misc_feature 1..6804: note = Description of Artificial Sequence: Synthetic coding sequence
  source 1..6804: mol_type = other RNA
atgctaagaggacccggccctggcctgcttctgcttgccgtgcagtgtttgggcacggcagtgccctctaccggggccagtaaaagcaagagacaggctcaacagatggtccagcctcaaagccccgtggctgtctcacagagcaaaccaggttgctacgacaatgggaagcactaccagatcaaccagcagtgggagcgcacgtatctggggaacgcactggtatgtacctgctacggcggcagcagggggtttaactgtgaatcaaaacctgaagcagaggagacttgtttcgataaatacaccgggaacacatacagagttggcgacacgtacgaacgccccaaggattccatgatctgggattgcacatgcatcggggcaggcaggggaagaattagttgcactatcgcaaatagatgccacgaaggaggtcagagctataaaatcggtgatacatggcgaagaccacatgagactggcgggtacatgcttgaatgcgtatgtctagggaacggcaagggcgagtggacatgcaaaccaatcgctgagaaatgctttgatcacgccgctgggacaagctatgtagtgggggagacatgggagaagccatatcagggatggatgatggtggactgtacatgtttaggagaagggagcggtcgcatcacatgcacctccagaaatcgctgtaatgaccaggacaccagaacttcctacaggatcggcgacacatggagcaaaaaggataacaggggcaatctgctgcagtgcatctgtacaggcaatgggcgaggagaatggaaatgcgagcggcatacatctgtacaaactacgtcatctgggtccgggccatttacagatgtgagagctgccgtgtatcagccacagccgcaccctcaaccccccccttacgggcactgcgtgaccgattccggggttgtatatagcgtgggaatgcagtggcttaaaacccaaggcaacaagcagatgctttgcacatgtctcggtaatggcgtctcatgccaggagactgccgtgacgcagacctacggtggtaactccaatggagaaccgtgcgtgctcccttttacatacaacgggagaacattttatagttgtaccaccgaaggccggcaggacgggcacctctggtgtagcacaacctctaattatgagcaggatcagaagtattcattctgcaccgaccatacggtgctcgtgcagacgcgaggaggaaattcgaacggcgccctgtgccacttccctttcctctacaacaaccacaactataccgattgtacttctgaggggcggagggataacatgaagtggtgtgggacaacacaaaattacgacgcggatcaaaagttcggcttctgccccatggccgcacatgaagaaatctgtacaactaacgaaggcgtaatgtaccgcataggagaccagtgggataagcagcatgatatgggacatatgatgaggtgtacatgcgtgggcaatggccgcggcgagtggacatgcatcgcatatagtcagcttagagaccaatgtatagtagatgacatcacatataacgtgaatgatacgtttcacaaacgtcacgaagaggggcacatgctgaattgcacctgtttcggccaaggcagaggtagatggaagtgcgatcccgtggaccagtgtcaagattccgagactggaacgttttaccaaattggtgactcctgggaaaagtacgttcacggcgtacgttatcagtgctattgctatggccggggtattggggaatggcactgtcagcccctgcagacttatccctctagttcaggccccgttgaggtttttatcacagaaaccccatctcaaccgaacagccatcctattcagtggaacgctccgcagcctagccacatctcaaaatatattctgcgttggcgtcccaagaatagtgttgggcgctggaaggaagcgaccattcccggtcaccttaactcgtacacaattaaagggctgaaaccaggcgttgtttacgaaggacaactgatctccatacagcaatacggacaccaagaggtaacacgattcgatttcactacaacatccacatcgacaccagtgacttcaaatacagtgacaggagaaacgacgcccttttcgcccttggtggccaccagcgagtctgtcaccgagataacagcctcctcctttgtcgtgtcctgggtgagcgcctcggatacagtgagcggctttcgtgtagaatacgagctcagcgaggaaggggatgaaccccagtacttggatctacctagtaccgccacctctgtgaacataccagacctgttgccagggagaaagtatatcgtgaacgtgtatcagatctccgaggacggcgagcaatccttgattctgtccaccagccagaccacagcccccgacgcccctcccgataccactgtggatcaggttgacgacacttccattgtggttcgctggtctaggcctcaggctccaattaccggctatcgcatcgtctactcccctagtgtagaaggaagctcaaccgagttgaaccttccagaaaccgccaatagtgtaaccttatcagatctgcagcctggcgtacagtataacattacgatctatgccgtggaagagaaccaggaatccacccccgtcgtcattcaacaggagacaaccggcactccaagaagtgacactgtgcccagtccacgggaccttcaattcgttgaggtaactgacgtgaaggttaccatcatgtggacgccacccgagagcgccgtgaccggctatcgtgtggacgttatacctgtgaacctgccaggcgagcacggtcaaaggctccccatatcccggaatacatttgccgaagtcaccgggttatcacccggagttacctattattttaaagtgttcgccgtgagccatggtagggagagtaaacccctcaccgctcagcagaccactaaactagatgcccccactaatctccaattcgtgaacgaaaccgattccaccgtcctcgtgcgctggactccccctcgagctcagataaccggctataggcttactgttggattgacaaggagagggcagccccggcagtataacgttggtccttccgtgtcaaagtacccactgagaaatctccagccagcctcagagtatacggtaagcttagtggcgatcaaggggaatcaggagtcaccaaaggcgaccggcgtctttacaacattgcagcccggaagtagcattcctccttacaacactgaagtcaccgagacaacaattgtgattacttggacaccggcacccaggatcggattcaaattgggtgtgaggcctagtcaggggggcgaagcaccgagagaggtcacatccgactcaggatcgatcgttgtgagcggcttaacaccaggggtagaatacgtatataccatccaagtcctcagagacggccaagagcgggacgctccaatcgtgaacaaggtggtcacacccctatctcctccgaccaacctacacctcgaggccaaccccgacaccggggtgctgaccgtctcctgggagcgtagcaccacccccgatattacgggttatcgcatcaccacaactcccacgaacgggcagcagggaaactcacttgaggaagtggtgcacgctgaccaaagctcttgtaccttcgataaccttagtcccggacttgagtacaacgtcagtgtttacaccgttaaagacgacaaagaatcagtccctatctcagacactatcatccctgaggtgccccagctcacagatctgtccttcgtcgacataaccgacagttctattggtctgcgctggacgcctctgaactcaagcactattattgggtatcgcataacagtggttgctgcaggagagggaatccctatttttgaggacttcgttgattccagtgtaggatactatactgtcaccggtctggaacccggaatcgattacgatatcagtgtgattacactcattaacggaggtgagtcagctcctaccaccctgactcagcaaacggccgtccctccaccgacggaccttcgattcactaatatcgggccggacacgatgagggtgacgtgggcacccccccctagcatcgatctgacgaatttcttggtccgctacagtccagttaagaacgaggaagatgtcgccgaactgagtatatcaccttcggataatgcggttgttctaactaacctccttcctggtaccgaatacgtggtttcggtaagctcagtctatgagcagcacgaatctacacctttacgaggtcgccagaaaaccggattagattcccctactggcatagacttttccgatatcaccgccaatagtttcacggtgcactggatagcccctagggccacgattactggctacaggatcagacaccatcccgaacactttagcgggaggcctcgggaggatcgggtccctcatagccggaatagcatcaccctgactaacctgacacctgggaccgaatacgttgtctctatagtcgccctgaatgggcgtgaggagtctccgttgttgattggccaacaaagcactgtctcagatgtgcctcgcgatctcgaggtcgtagcagcaaccccaacctctctgctcatatcgtgggacgctcctgcagtaactgttaggtactaccggattacctacggtgagaccggcggtaattctccagtccaagagttcacagtgcccggcagcaagagcactgcaactatctcggggctcaagcccggcgtcgactatactatcactgtatatgccgtgacaggcaggggggactcaccagcttcctctaaacccattagtatcaactaccgcacagaaatcgataaaccctctcaaatgcaggtgacagatgtgcaggacaatagtatctccgtaaagtggctccctagttcaagtccggtaaccggttaccgcgtgaccaccacaccgaagaatgggccaggccctaccaaaacaaagactgccggacctgatcagaccgaaatgaccatcgaggggttacagcccactgtcgagtatgttgtgtcagtctacgctcagaacccctcaggcgaaagccagccacttgtgcagactgcggtgaccacgatccccgcgccgaccgacctcaaattcacgcaggtgaccccaacctcgctctctgcacaatggactccacccaacgtacaactgactgggtaccgcgtgagagttactccaaaggagaaaacagggcctatgaaagagatcaaccttgccccagattcctccagcgtcgtggtttctgggctcatggttgccaccaagtacgaggtgtctgtatacgctctaaaggacacactaacttccaggccagcacaaggggttgtgacaacccttgagaatgtgtcacctcccaggcgcgcaagagtcactgatgcaacagaaacaacaattacaatatcctggaggaccaagaccgaaacaatcaccggctttcaggtggatgctgtccctgcaaatgggcaaaccccaattcagcgaaccattaaaccggacgtgagatcctatactatcaccggcctccaacctggaactgactacaaaatatacctatacactctcaatgataacgccaggtcatccccagttgtcattgacgcttcaacagctatagatgcccccagcaatcttcggttcctcgctaccacaccaaacagcctcctggtgtcttggcagcctcctagagccagaatcactggatacattataaagtatgaaaaacccggcagcccccccagggaagtggtccctcggcctagacctggagtcaccgaagctacgataaccggcttggagccgggcacagagtacaccatctacgttatcgcactgaagaacaaccagaaatccgaacctcttatcggaagaaagaaaaccggacaagaagccttgtctcaaacgacaatatcgtgggctcctttccaggacaccagcgaatatattatatcatgccaccccgtcggcaccgatgaagaaccactgcaattccgcgtgcccggtacgtcgacatccgcaacccttactggtctgacgcgcggggccacttacaatgtgatcgtcgaagctctgaaagaccagcagaggcataaagtcagggaagaagttgtgacagtgggcaacagtgtgaatgaaggactaaaccaacccaccgacgacagttgttttgatccatacaccgtgagccattacgcagttggcgacgagtgggagcgtatgtcagagagcgggttcaaactgttatgtcaatgtctcggcttcgggtcagggcatttccgctgcgattcctccagatggtgccacgacaatggagtgaattacaagatcggggagaagtgggatcggcagggggaaaatggccagatgatgtcctgtacttgtctcgggaacggtaaaggcgagtttaaatgtgatccccacgaggccacctgttacgatgatgggaagacatatcatgtcggagagcagtggcagaaagagtatctaggcgccatctgttcttgtacttgctttggcgggcaacgcggttggcgctgcgataactgcagacgaccggggggcgagcctagcccagagggaacaacaggacagtcgtacaaccagtatagccagcggtaccaccaaaggactaacaccaacgtcaattgtccaattgaatgttttatgccgctggacgttcaggctgaccgagaagactctcgagagtag

SEQ ID NO: 31723 - RNA, 6798 nt, synthetic construct
  misc_feature 1..6798: note = Description of Artificial Sequence: Synthetic coding sequence
  source 1..6798: mol_type = other RNA
atgctgaggggccctggacccggactccttcttctagcagtccagtgcttgggcacagcagtgccatccactggcgcaagcaagtccaaaaggcaagcacagcagatggtgcagccccagtcacctgtcgccgtctctcagagtaagcccggatgttacgacaatggcaaacactatcagatcaatcagcagtgggaaagaacctatctggggaatgcactggtctgcacttgttacggcgggtcaaggggatttaattgtgagtccaaacctgaggcggaggagacctgtttcgacaagtacacagggaacacgtatcgggtgggagatacttatgaaagaccaaaagattcaatgatctgggactgtacttgcattggggccggcaggggccgaatttcctgtacaatcgctaaccggtgccatgagggcggccagagctacaaaattggtgacacctggaggcggccccacgagactgggggttatatgctagaatgtgtatgcctggggaatggcaaaggagaatggacgtgtaagccgatcgcagaaaagtgcttcgaccatgcggctggcacctcatacgttgtaggggagacttgggagaaaccttatcagggctggatgatggtcgactgcacctgtctaggtgaagggagcggaagaatcacgtgtacctctagaaatagatgcaatgaccaagatactcggactagctatcgtataggagatacttggtctaagaaggataaccgagggaatcttctgcaatgtatatgtacaggaaacggtaggggcgagtggaaatgcgagcgacacacatctgtccaaaccacatcgtcaggctcaggcccatttaccgacgtgcgtgccgctgtttaccaaccccagccacatcctcagccaccgccatacgggcactgtgttaccgattccggagttgtttattccgtaggcatgcaatggcttaagacccagggcaataaacagatgctttgcacttgcctcggtaatggggtctcttgccaggaaactgctgtcacgcagacatacggcggaaattctaatggagaaccttgcgtgctgccgtttacctataacgggcgcaccttctactcttgtaccaccgaaggacgacaggacggacacttgtggtgctccacaacctcaaactacgagcaagatcagaagtactccttctgtacagaccacaccgtgcttgtccagacacgaggaggcaactctaacggcgccctctgccattttcctttcctctataataaccacaattacacagattgcacatccgaaggaaggcgcgacaacatgaaatggtgtggtacaacccagaattatgatgccgaccaaaaattcggtttctgtcccatggcagcacatgaggaaatatgcacaaccaatgaaggggtgatgtacagaattggggaccagtgggacaagcagcacgacatgggccatatgatgcggtgtacttgtgtcggcaacgggcgcggggaatggacatgcatcgcctactctcagctgagagaccagtgcatcgttgacgatattacatacaatgtgaatgacacatttcataagagacatgaagaaggacatatgctcaactgcacctgctttggccagggacgcggtaggtggaaatgtgaccccgtcgatcagtgtcaagactcagagaccggtacattctaccagatcggcgatagctgggagaagtacgttcacggcgtcagataccaatgctattgttacgggcgcgggattggggaatggcactgccagcctttacagacatatcccagctcatctgggcccgtggaggtattcatcacagagaccccttctcagcctaactctcatcccatccagtggaacgccccacagccctcccacattagtaagtatatactccggtggaggcccaagaacagcgtcggacggtggaaggaagccaccatacctggccacctgaactcttacaccataaagggactgaaacctggcgtcgtgtacgaaggacagcttatcagcatacagcaatatgggcatcaggaagtcactcggttcgacttcacaactactagtacttcaacaccagtcacctccaatactgtaacaggagagactactcccttcagccccctggtggctacaagcgaaagtgtgaccgagattactgcatcctcgttcgttgtttcatgggtctccgcatccgacaccgtgtccggatttagagtggaatatgagctgtccgaagagggcgacgagcctcagtaccttgatctgccaagcacggctacctccgtcaatatccctgacctgctccctggcagaaaatatattgtgaatgtttaccagatcagtgaggatggtgaacagagcttaatacttagcactagccagacaaccgcccctgatgcccccccagacactaccgttgatcaggtggatgacacatcaatcgtggtgcggtggtctcggccacaggccccgataacaggttatagaatcgtgtacagtccctctgtagagggctcttctacagaattgaacttacctgaaactgcgaactccgtcactcttagcgatttgcaacctggagttcaatacaatatcaccatttacgctgtggaagagaatcaggaatctactcccgtggtcatccaacaagagacgaccgggacccctaggtcagacacagtcccaagcccacgggatctacaattcgtggaagtcactgatgtgaaggtaacaatcatgtggactccgccagagtctgctgttacaggatatcgcgtggacgtgattcccgtcaacctgcctggagaacatgggcagcgcctccccatctctcggaacaccttcgcggaggtaactggtctcagcccgggggttacttactactttaaggtgttcgccgtgtcccacgggcgtgagagcaaaccactgaccgctcaacagaccactaagcttgatgcgcccacaaacttacaattcgttaacgagaccgattctaccgtgctcgtgcgttggacccccccgcgtgctcagataaccggctatcgtctgaccgttggactgacacgcagagggcaaccgagacaatataatgttggaccgtcggtctccaagtatcccctcagaaaccttcagcccgccagtgaatacaccgtttctttggtggctataaagggtaatcaggaaagccctaaggccaccggcgtattcacgaccttgcagcctggaagttctattccgccctacaacaccgaggtcactgaaactacgatcgtcattacgtggaccccggccccaagaattggctttaaactaggagtgcgcccctcacagggcggcgaagccccacgcgaggtgacctcggatagcggttctatcgtagtctcaggcctaacaccgggagtcgagtacgtctatactattcaggttttgagagacgggcaggagagagatgcccctatcgtgaataaagtagtgacaccactctcccctcccaccaacttacatctagaggcgaacccagacaccggcgtgctgacagtctcttgggaaaggagcacaacacctgatattaccggctaccggattacgaccactccgacgaacggacagcaaggcaattccctggaggaggttgtgcacgccgaccagtcgagctgcacgtttgacaatctctcccctgggctcgaatataacgtctccgtctatactgtgaaagatgacaaagaatcagtaccgatatcagatactattatccctgcggtgcctccgcctaccgatctcagattcactaatattgggccagatacaatgcgtgtaacatgggctcctcctccatccattgatctgacaaacttcctagtccgttacagtccagtaaagaatgaggaagacgtcgccgagctgtcaatttcaccttcagataacgccgtcgtactgaccaatctgctgcccggcactgaatacgttgtgtccgtctcatccgtttatgaacagcatgagagcacgccactccgtggccggcaaaaaaccggactcgatagcccaactggcattgatttcagtgacatcactgcaaactcgtttacagttcattggatagctccaagagcgacaatcaccggctacaggattcggcatcaccccgagcattttagcggcagaccaagggaggacagagtacctcactctcgcaattctatcacactcacgaatttgacacccgggacagaatacgtggtttctattgtcgcgttaaatggtcgcgaggagtctccactgctaatcggccaacagtccacagtatccgacgtgccaagagacctcgaagtggttgccgcgactcctacctcactcctgatcagctgggatgcacccgccgtgaccgtgcggtattatcggattacctacggtgagacaggcggcaattctcctgtgcaggagttcacagttcccgggtctaagtcaacagccacgatttcaggcttgaagcctggggtcgattataccattaccgtctacgccgtcacaggccgaggcgactcccccgcatcgagcaaacctatatctattaactaccggacggagattgataaaccatctcagatgcaggtgactgatgtgcaggataatagtatcagcgttaagtggctaccctcttccagccccgtgaccggttatcgagtcacaacaactccaaaaaacggaccaggacccaccaagaccaagaccgctggcccagatcaaacagaaatgacaatagagggcctgcagcctacggtcgaatatgtggtgtcggtctacgcccagaaccccagcggcgagtcccagccccttgtgcagactgcagtcacaactattcccgcgccaacagatcttaaattcacacaggtgactccgacgtccctctcagcccaatggactcctcctaacgtgcaactcaccggctatcgcgtgagagtgacgcccaaggaaaaaactggccctatgaaagagataaaccttgctcccgacagttccagtgtggtcgtgagcggactgatggtcgccacaaagtatgaggtgtctgtgtacgcgttgaaggacaccctgaccagtcgcccggcacagggagtcgtgaccaccctcgaaaacgtgtcgccgccccgacgagcccgagtgacagacgcgaccgagaccaccatcacaattagctggagaacaaagacggaaacaattactggctttcaggttgatgcagtgcccgctaatggacagacccccatccagcgtaccataaagcctgacgtgcgcagctataccataacagggcttcagccaggaacagactacaagatctacctctataccctaaacgataatgctcgttctagtccggttgtaattgacgcctcaactgctatagacgctcccagcaatctccgcttcctggccactacgcccaatagtctgctggttagctggcaaccaccacgggcccggatcactggctacatcatcaaatatgaaaagccggggtctcccccccgtgaggttgtgccaaggccacggcctggggtgaccgaagctactatcactggactcgagccaggtaccgagtataccatttatgtgatcgcgctcaagaataaccaaaagagcgaacctttgataggacgaaaaaagacagatgaactgccacagctcgtgaccctcccccatccaaatctgcatggcccagaaatactcgatgtgccatccacagtgcagaagaccccattcgttacccacccgggatacgatactggtaacgggatacagttgcctggaacgtcaggccaacagccctctgtgggacagcaaatgatatttgaagaacatgggttcaggcgcaccactccccctactacggctactcccatccgccacagacctagaccttaccctcctaacgtcggccaggaagcgttaagccagacaacaatttcctgggcaccattccaagatactagcgagtacatcattagctgtcatccggtcggaactgatgaggaacccttacagttcagagtgcctgggacatctacctccgccacacttaccggactcacaagaggcgccacttacaatgtaattgtggaggctttaaaggatcagcaaaggcataaggtgcgagaagaggttgtaacagtcggaaattcagtgaacgaaggattgaatcaacccacagacgactcttgcttcgatccatataccgtttcccattacgccgttggggatgagtgggagcgcatgagcgaatccggtttcaagctactctgtcagtgcctggggtttggctccgggcactttcggtgcgattcctctcggtggtgtcacgacaacggcgtcaactataaaatcggcgaaaagtgggaccggcagggggaaaatggccagatgatgagttgcacatgtctgggtaacgggaagggagagtttaagtgtgatcctcacgaggcaacatgctacgatgacggcaagacctaccacgtaggggagcagtggcagaaagaatatctgggggcaatctgtagctgtacctgctttggtggtcagcggggctggcggtgcgataattgtcgacggccaggcggcgaaccctcacccgaaggcacaaccgggcagtcctacaaccagtattcccagcgttaccaccagcggaccaacacaaatgtgaactgtcctattgaatgtttcatgcctcttgatgtgcaggccgatagagaagactcacgcgagtag

SEQ ID NO: 31724 - RNA, 6993 nt, synthetic construct
  misc_feature 1..6993: note = Description of Artificial Sequence: Synthetic coding sequence
  source 1..6993: mol_type = other RNA
atgctccggggtccaggacctggtttgctgttattggccgtccagtgtttgggcaccgctgttccgtcaactggcgcttccaagtcaaaacggcaggctcagcagatggtacaaccccaatcccctgtcgctgtctcacagtccaagcctggttgctatgacaatgggaagcactatcagattaatcagcagtgggagcgtacttacctcggcaacgcgctggtttgtacctgttatggtggatctcggggcttcaactgtgaaagcaagccagaggcggaggagacatgttttgataagtatacgggaaacacctaccgtgtgggagatacatacgaacgtccaaaggattccatgatctgggactgtacttgtatcggggccgggagggggcggatctcatgcactatcgccaatcgttgtcatgaaggcggtcaatcctataaaattggcgacacatggcgcagaccccacgagacagggggatatatgctggagtgcgtctgcctcggcaacggcaagggcgaatggacctgtaaaccaattgcagagaaatgcttcgaccacgcagccggtacctcctatgtggtcggcgaaacctgggagaaaccatatcaaggctggatgatggtggattgtacatgcttaggtgagggaagtggccggataacatgtacctctcgtaaccggtgcaacgatcaggacacccggacaagttacagaataggcgacacgtggtcaaaaaaggacaataggggtaatcttttgcagtgtatttgtacaggcaatgggaggggtgaatggaagtgtgagagacacacaagcgtccaaaccacgtcatcagggtctggaccattcactgacgtgcgcgctgccgtttaccagccacaacctcatcctcagcctcctccatatgggcactgcgtcaccgactctggtgtcgtctactcggtcggtatgcaatggcttaagacacaggggaataagcagatgttatgtacttgcctgggtaacggcgtgagctgtcaggaaactgctgtgacgcagacatatgggggcaacagtaacggtgagccctgcgtactcccattcacctacaacggccgtacattctactcatgtacaacagagggcaggcaagatggacatctatggtgcagcactactagtaactatgaacaggatcaaaagtactctttctgtaccgaccacacggtgctcgtccagactcgaggcgggaacagtaatggtgccctgtgccacttccctttcctgtataacaaccataattacaccgattgtacctccgaaggccggagggacaatatgaagtggtgtggaactacacagaactacgacgccgaccagaagttcggcttctgcccaatggccgcccacgaagagatatgtaccactaatgaaggcgtgatgtaccgaattggagatcagtgggataagcaacacgatatggggcacatgatgagatgcacttgcgtgggcaatgggcgtggcgagtggacgtgtatcgcgtacagtcagctccgggatcagtgtattgtggatgatattacatacaacgtgaatgacaccttccataagcgccacgaagagggacatatgctgaactgcacatgcttcggccagggacgaggtcggtggaagtgcgatccagtcgatcaatgccaggactcagaaaccggtaccttttatcagataggcgactcttgggaaaagtatgtgcacggcgtgcggtaccagtgctattgctacggtcgtggcattggggaatggcattgccaacccttgcagacttatccttcatcctcgggtcccgtagaagtgtttattactgaaacccctagccaacccaactctcaccctattcagtggaacgccccccagcccagccatatttcaaaatacatcctgcggtggcgcccgaaaaatagtgtcggccgctggaaggaagctaccatccctggccatctgaattcttatacgatcaaaggacttaagccaggggtcgtttacgagggacagttgatatcaattcaacaatatggtcatcaagaagtcactcgttttgacttcaccaccacttccacaagtaccccggtcacatcgaataccgtgacaggggagaccaccccattttcacctctcgtggcgacatcagaatcagtcactgagatcacagctagttctttcgttgtcagttgggtgtccgccagcgataccgtcagtggctttcgagtggaatatgaattgagtgaggaaggcgatgagccacaatatctggatctccccagcacagccacctctgtaaacatccccgatctcctgccaggtaggaaatacatcgtgaatgtttatcagataagcgaggatggggaacagagcttaatcctgtctacctcacagaccaccgcccctgatgcccctccggacaccactgtcgaccaggtcgatgacacctccattgtcgttcgttggagccggccacaggcccctataacaggctatcggattgtctattccccatcagtagaggggagttccacagagttaaacctccccgaaacagcgaactctgtgaccttgtctgacctgcagcccggggtacaatataatataaccatctacgctgtcgaagaaaatcaggagtccacccctgtcgtgatacagcaggagacgaccgggacgccaaggtcagatactgtgccgagtccacgggacctgcagtttgtcgaagtgaccgatgtgaaggtcaccataatgtggactcccccggagagtgccgtgacaggttacagagtggatgttatcccggtgaacttacctggtgagcatggacagcgtctgccaattagtcgtaataccttcgctgaggtgacaggactgtcgcccggggtcacctactatttcaaggtctttgctgttagccacgggcgagaaagcaagcctcttactgcccagcagactaccaagctcgacgcgcctactaatctccagttcgtgaatgagaccgacagcacagttctggtgcggtggacccctcctcgagcccagataaccggctaccggctcacagtggggctgactcgcaggggccaacccagacagtacaacgtaggtccaagcgtgtctaaataccccctcagaaacctgcagcctgcatcggagtatacagtgtcccttgtggccattaaaggtaaccaagaatcacccaaagccaccggagtattcaccacactacagcctggctcatctattcctccttataatactgaggttaccgagaccacgatagtgatcacatggacccctgccccacggatcggcttcaagctcggcgttcggccctcccagggaggcgaggctccccgcgaagtgactagtgatagcggctctatcgttgtgtctgggctcactccaggtgtcgagtacgtgtacaccattcaggtcctccgggatggccaggagcgagatgctcccatcgttaataaggttgttacaccccttagccctcctaccaatcttcacttagaggcaaacccagatacaggagtgctcaccgtttcctgggagagaagtaccactccggacatcactgggtatcggatcactaccactccaacgaacggccagcagggcaactccctggaagaggtggtgcatgcggaccagtcctcctgcacctttgataacctttctcctgggttggagtacaacgtttcagtctataccgtgaaagatgacaaggagtcggttcccatctccgacacgataattccagcggttcctccacccactgatctcagattcacgaacattggaccagataccatgcgcgttacttgggccccaccacctagtattgacctcacgaatttcctggtgaggtactccccggttaaaaatgaggaagacgtagccgaactctccatctcaccctccgacaacgccgtagttttgacgaatctgctgccaggcacagaatatgtggtgtccgtgagcagtgtgtatgaacagcatgaatctactcccctgaggggccggcagaaaactggtctggattctcctacaggtatcgacttcagtgacatcaccgccaactcatttaccgtgcactggatcgcaccccgagcaaccattaccggttatcgcattaggcatcacccagaacatttttcaggtaggcctagagaggatagagtcccacacagcagaaactccatcactctcaccaatctgacaccggggactgagtatgtcgtgagcatagttgcattaaatggcagagaggagagcccactgcttattggccaacaatctaccgtcagtgatgtgccaagagacctagaagtggtcgctgccactccaaccagcctgttgatcagttgggatgcccccgccgtcaccgtgaggtattacagaataacatacggggagaccggaggaaattctccagtccaagaattcacagttcctggctctaaaagtacggcgaccattagcggactcaagcctggcgtcgactataccattaccgtgtacgccgttaccggccggggcgattctcctgcttcgagtaaacctatttctataaactatcggacggagatagataagccctcacagatgcaagttaccgacgtccaagacaatagcattagtgtgaagtggctgccatcatcgtctccggtaacaggatatcgtgtgaccacaacccccaagaacggccctggccccacaaagaccaagactgccgggcctgaccagaccgaaatgacgattgagggcttgcaacccacagtcgaatatgttgtgtccgtctacgcacagaacccaagcggagaaagtcagccgctggtgcagaccgctgtgacaaatatcgacagaccaaaaggccttgccttcaccgatgtggacgtcgatagcataaaaatcgcttgggaaagtcctcagggccaagtctctcgatatagagtgacatacagttcccctgaggatggcattcatgaattgttccctgcgcccgatggcgaggaggacactgctgagctgcagggactgcggcctgggagcgagtacactgttagtgtcgtcgcactgcatgatgatatggagtcgcagccactgatcggaacacagtcgactgccatccccgcgccaactgatctcaaattcactcaagtcacaccaacatccctgagcgcccagtggaccccccccaacgtgcagcttaccggctatcgggtcagagtgacaccaaaggaaaagacaggcccaatgaaggaaattaatcttgctcctgacagctcaagtgtcgttgttagcggattgatggtcgccactaaatatgaagtgtctgtctacgcactcaaagacaccttaacttccagacccgctcagggagtcgtgaccaccctcgaaaacgtttctcctcctagacgtgcacgcgtgaccgacgccacagaaactacaataaccatatcctggcgcacgaaaactgaaacaattaccgggtttcaggttgacgccgtcccagctaacggccaaaccccaattcagcggacgatcaagccagacgtacgatcttacacaatcacaggactccagccaggaactgattataagatctacctttacacccttaacgacaacgccagatcctcaccggtcgtgatcgatgctagcaccgcaattgacgcaccctctaatctccgctttctagccaccactcctaactccttactggtttcttggcaaccacctcgggccaggattactggttacatcatcaaatacgaaaaaccaggctcacccccccgagaagtcgtgccacgccctaggcccggggtgaccgaggcaacgattacaggcttggaacctgggaccgagtatacaatctacgtgattgctctcaaaaataaccaaaaatccgagccattaatagggagaaagaaaactgtgcagaagacacccttcgtgacgcaccccggctacgatactgggaacggaattcaactcccaggaacttctggccaacagccctcagtgggccagcagatgattttcgaggagcatggttttcggcgcacaacacctcctacgacggcaacacctatccgccaccgcccaaggccctatccacccaatgtcggtcaggaggcactgtcgcaaaccacaattagctgggccccgttccaggatacctccgagtatatcatctcatgccatcccgtgggtacagacgaggaacctctccagttccgagtgcctggaaccagcacgtctgccacccttaccgggttaactaggggcgcaacgtacaacgttatcgtagaggctctgaaggaccagcaacgacataaagttcgcgaggaagtggtgaccgtaggtaattcggtgaacgagggactcaatcagcccaccgacgattcctgtttcgatccctataccgtcagtcattatgctgttggggacgagtgggaaagaatgtctgagtccggctttaagctgctctgtcaatgcctcggatttggatctggacacttccgatgtgactccagcaggtggtgccacgacaacggagtgaactataaaattggtgaaaagtgggaccgccaaggtgaaaacggccagatgatgagctgcacctgcctcgggaatggaaaaggggaattcaaatgcgacccacacgaggccacatgttacgacgacgggaaaacctatcacgtcggcgagcagtggcagaaggaatatctcggcgccatctgctcgtgcacctgctttggtgggcagagggggtggcggtgcgacaactgccgaagaccagggggagagccatccccggaaggtacaaccggtcaatcctataaccagtacagccagagataccatcagagaaccaacacaaatgtaaactgccctattgagtgcttcatgcccttagacgtgcaagcagacagagaagattcacgagagtag

SEQ ID NO: 31725 - RNA, 3312 nt, synthetic construct
  misc_feature 1..3312: note = Description of Artificial Sequence: Synthetic coding sequence
  source 1..3312: mol_type = other RNA
ctccggtggacaccactcaacagcagcaccattatcgggtaccgcatcacagttgtggctgctggggaaggtattcccatatttgaggactttgtggattcatcagttggctactacacagtgacgggactcgaacccggaatcgactatgatatcagcgtgataactctgattaacggtggagaatccgcacctaccactttaacccaacaaacagccgtccctccacctactgacttaagatttactaacatcggcccagacactatgagagttacctgggccccaccaccgtcaatcgatttaacgaattttctcgttagatattctccggtgaaaaacgaggaagacgtggccgagctgtccattagtcctagtgataacgcagtcgtcctaacaaatctgctgcccgggactgaatacgtggtaagcgtatctagcgtatacgaacagcatgagagcacaccgttacgtggccggcagaagaccgggcttgatagtcctacagggatcgacttttccgacattacagccaactctttcaccgtgcactggattgccccacgggcaaccatcacaggatatcgcattcgccaccatcctgagcatttttccggcaggccacgcgaagacagggtcccccacagtcggaactccatcaccctcactaacttgacccctggcacagaatacgtggtgtctattgtggccctgaacggacgagaagagtcccccttgctcatagggcagcagtctacagtcagcgacgtcccccgagacctcgaggtggttgcagcgacccccacctcactactgataagctgggacgctccagcagttaccgtgcggtattaccgcataacatatggcgagactggaggcaattctcctgttcaggaatttaccgtacctgggtctaaatctacagctactatttctggcctgaaaccgggcgtggactatacaattactgtctatgccgtaaccgggcgcggagattcaccagcgagttccaaacccatatccatcaactatagaacagaaattgacaagccgtcccagatgcaagtcacagacgtgcaggacaatagcattagcgtgaaatggctgccatcatcctccccagtgaccggctatagagtcaccacaactcccaaaaacggccccgggcccacaaagactaagacagccggacctgatcagacggaaatgaccatagaaggcctccagcccaccgtagagtatgtggtgtccgtctacgcacaaaatcccagcggagagtcccagcccctggttcagaccgcagtcacaaccataccagctccaacggaccttaaattcacgcaggttacccccactagcctcagcgcccaatggacaccccctaatgtgcagttgaccggctacagagtaagagtcacaccaaaagaaaaaaccggtccgatgaaagaaattaacctggctccagattcatcgtcggtcgtggtgagtggcctgatggtagccaccaagtatgaggtttccgtgtatgccctgaaagataccctcaccagcagaccagcgcaaggtgtagtgacaaccctcgaaaatgtgtctccacctcgccgggctcgggtaacggacgcaaccgaaaccaccatcacaatctcatggagaaccaaaaccgagaccatcacaggcttccaggtcgacgcagtgcccgccaatggtcagactcctattcagagaaccatcaagcctgacgttaggtcttacacaataactggactgcagcctgggaccgactataagatctatctgtacacgctaaacgataacgcccgaagtagcccagtcgtcatagacgcctctacagccatcgatgctccgagcaacctgagatttctggccaccactcccaatagcctccttgtgagttggcaacccccacgggctcggatcacgggctacatcatcaaatacgaaaagccggggagcccccccagagaagtcgttccaagacccagaccaggcgttacagaagcaacaattacgggcctcgaaccaggcacagagtacaccatttatgtgattgccctgaaaaataaccaaaaaagtgagcctttgatagggaggaaaaaaacggatgagctgccacaactggtgaccctccctcatccaaatctgcatgggcccgaaattctagacgtaccatctactgtgcaaaagaccccatttgtcactcaccctggctatgacactgggaatggtatccaactgccgggtacaagcggccagcagccttccgtaggtcagcagatgattttcgaggagcacggatttcggcgaaccactccccccactactgccactccaattagacataggccaaggccttatccgcctaacgttggtgaggaaatccagatcggccacattcctcgagaagacgttgattaccacctgtacccccacggaccaggactcaacccaaacgcttccacaggccaagaggctttgagccagaccaccatcagttgggcaccatttcaagacacctccgaatacatcattagctgtcaccccgtcgggactgacgaggagccactccagttccgggtcccaggcaccagcacctccgccactctgaccgggttgactaggggcgccacttacaacgttatagtggaggctctcaaagatcaacaacgccacaaggtgcgcgaagaggtcgtaacggttgggaattcggttaatgaagggttgaatcagcccaccgacgactcgtgctttgatccttacacagtgtcacactatgcagtcggggacgagtgggagcgtatgtccgaatctggattcaaactactttgccaatgcctcgggttcggcagcggccatttcagatgcgactcttcaagatggtgccacgacaatggagtcaactataagattggggagaaatgggacaggcagggcgagaatgggcaaatgatgagttgtacctgtttagggaatggaaagggagagttcaagtgtgatcctcatgaggccacttgttacgatgacgggaaaacctatcacgtgggggagcagtggcagaaagaatacctgggcgcaatatgctcttgtacctgcttcggagggcaacggggctggcggtgcgataactgtaggcggcctggcggtgagcccagtcctgagggcaccactggccagagttacaaccagtatagccagcggtaccaccagagaacaaacactaatgtgaactgcccgattgagtgcttcatgccgctggacgtacaagcagatagagaggacagcagagagtag

SEQ ID NO: 31726 - RNA, 1062 nt, synthetic construct
  misc_feature 1..1062: note = Description of Artificial Sequence: Synthetic coding sequence
  source 1..1062: mol_type = other RNA
atggagctcactgagttacttcttgtggtgatgctgttgttaacggcgagattgaccctctcatctccagccccacccgcctgcgaccttagggtgctgagtaagcttcttagagactcccatgtactacacagccgtctctcccaatgtcccgaggtgcatcctcttcctacaccggtcctgctgccagctgtcgacttcagtctgggagaatggaagactcagatggaggaaacgaaagcccaggatatactcggggctgtgacccttctgctggagggagtcatggccgctcgaggccagctggggcctacctgtttatccagcctcctcggccaattgtccggacaagtaagattattgcttggagccttacagagtctcctgggtacacagctacctccacaaggccgcactaccgctcataaagaccccaatgctatttttctgtcattccagcatctgttaagaggaaaggtcaggttcttgatgctcgtggggggctccactctgtgcgtaaggcgagccccccctaccacagcagtgccatctcggacctccctggtgcttaccctcaatgaactgcctaacagaacatccggtctcttggagacaaactttactgcctctgctcggacaaccggatcgggactgctgaagtggcagcagggctttcgggccaaaattcccggactactcaatcagacatcaaggagtttggaccaaatcccggggtacctgaatcgtatacatgagcttttaaacggcactcggggtctgttccccggcccctctcgtcgtacactcggcgcccccgacatatcgtctggcacgtctgacacaggttccctgccccctaacttgcagcctggctactctccctccccgactcaccccccaaccggacagtatacccttttccctctgccacccacactgccaactccagtggtacaactacacccattgttgccagatcctagtgcacccacccccacccccacttcccctctgctaaacacgagttatacacactctcagaacctttcccaagaaggttag

SEQ ID NO: 31727 - RNA, 537 nt, synthetic construct
  misc_feature 1..537: note = Description of Artificial Sequence: Synthetic coding sequence
  source 1..537: mol_type = other RNA
atgacggttttagctccagcttggagccccaccacttacctacttttgcttctgttgttgtcctctggcctctctggcacccaggattgctcctttcagcacagtcctatctcctccgacttcgccgtcaaaattagagagctctcagactaccttctccaggattatcctgtgacagttgcctccaatctccaggacgaagaactgtgtgggggcctctggcgactcgtgctggctcagaggtggatggaaagacttaaaactgtggccggctcaaagatgcaaggtcttctggagagagttaatactgagattcatttcgtgacaaagtgcgcttttcagccaccaccttcctgcttaagattcgtccagaccaatatcagccgcttgctgcaggaaacttcagaacagctcgtcgccctcaagccttggataacccgccagaactttagtaggtgcttagaactccagtgccagcccgtcgaaacagtttttcatagagttagccaggatggcctggacctactgacgtcttag

SEQ ID NO: 31728 - RNA, 555 nt, synthetic construct
  misc_feature 1..555: note = Description of Artificial Sequence: Synthetic coding sequence
  source 1..555: mol_type = other RNA
atgtcccggaccgcatacaccgtaggggcgttgctgctcctgctgggaactttactgcccgccgcagagggcaaaaagaaagggagccagggtgccatcccccctccagacaaggcacagcataatgactcagagcagacccagtcacctcagcagcccggaagccgtaacaggggacggggacagggcaggggcaccgcaatgccaggggaggaggtactagaatcatctcaggaagctctgcatgtaaccgaacgtaagtacttgaagcgcgactggtgtaaaacccagccactaaagcaaactattcacgaagaggggtgcaattctcgaactatcataaatagattttgttacggacaatgtaattccttttatattccaagacacattcgaaaggaagaaggcagcttccaatcttgctcgttctgtaaaccaaaaaagttcaccacgatgatggtgacattaaattgccctgaactgcagccaccaacaaagaagaaaagggtcacaagagtcaagcagtgcaggtgcatcagcatcgacttagattag

SEQ ID NO: 31729 - RNA, 432 nt, synthetic construct
  misc_feature 1..432: note = Description of Artificial Sequence: Synthetic coding sequence
  source 1..432: mol_type = other RNA
atgtctcgtacggcctatacagtcggcgcccttcttctgctccttggtaccttactccctgcggccgaaggcaaaaaaaagggcagtcagggcgctatccctccaccagataaggcattacacgtcactgaaaggaagtatctgaagagagattggtgcaagacccagccactcaaacagactatacatgaagaaggatgcaattcacgcacaattattaataggttctgttacggacagtgtaatagcttctatataccacgccacatcagaaaagaggaggggagtttccagtcctgctccttttgcaagcccaaaaaattcacaactatgatggttaccctgaattgtccagaactacagcctccaactaagaaaaagagagtgactcgggtgaaacagtgcaggtgcatctccattgatctcgactag

SEQ ID NO: 31730 - RNA, 432 nt, synthetic construct
  misc_feature 1..432: note = Description of Artificial Sequence: Synthetic coding sequence
  source 1..432: mol_type = other RNA
atgtccagaacggcatacacagtcggggccctcctattgctgttaggaaccctgctccccgctgctgaaggaaagaagaagggctctcagggcgctatacctccacccgacaaagcgctccatgtgacggagcggaaataccttaagcgagattggtgcaagacccagccacttaaacagaccatccacgaggagggttgcaattcccgcactattatcaaccgattttgctacggacagtgtaactccttctacatacctaggcacattcggaaagaggaaggatctttccagtcctgctcattctgtaagcccaaaaagttcacaacaatgatggtgaccctcaactgtcccgaactgcagccacccacaaagaagaaaagagtgactcgcgtgaagcagtgtagatgcatcagtatcgatttagattag

SEQ ID NO: 31731 - RNA, 2976 nt, synthetic construct
  misc_feature 1..2976: note = Description of Artificial Sequence: Synthetic coding sequence
  source 1..2976: mol_type = other RNA
atgcattcccctggagctgacggtacacaggtctccccaggagctcactactgcagtcctactggggcaggttgcccccgcccctgcgcggacacccccgggccacagccccagcctatggatcttcgggttggacagcgtccccctgtggaaccgccaccagaacccactctgttggccctgcaaaggccacaaagactgcatcaccatctcttcctggctggcctgcaacagcagaggagcgtggaacctatgcgccttagtatggatacaccaatgccagagctgcaagtggggccgcaagaacaggagcttcgtcagctgctccacaaagacaagagcaagagatcagctgtggcttcaagcgtggtgaaacagaaattagccgaagtgatattaaagaagcagcaagccgccctggaacggaccgtccatccaaattcccccggaattccataccgaacactggaacccctggagactgagggcgcgactagatcaatgctatcatcctttctcccccccgtgcctagcctgccatctgatccccccgagcacttccccttgagaaagaccgtctctgaacccaacctgaaactgcgatacaagccaaagaaaagtctcgagcgacgaaagaatccactgctccgcaaggaaagcgcacctcccagcctgaggagacggcctgctgagaccttgggcgactcatcaccaagtagctcatccacccccgcatctggatgttcttcccccaacgactctgaacatgggccgaatcccatcctcggaagtgaagccttactggggcagcgcctgagactgcaggagaccagcgtcgccccctttgccctgccaacggtgtccttgttaccagccataactttgggcctgcccgcgccagcgagagcagactccgataggcgcactcaccctaccctcgggccacgcggacccatacttgggagcccacatactccactctttcttcctcatggtttggagcctgaagcaggtggcaccttgccgagccgtctgcagcctattctgcttctcgacccgagcggctctcacgctcccctacttacggtccccggtttgggtcctctgccatttcatttcgcacagtcactgatgaccacagaaaggctctcaggctcaggtcttcactggccgctcagcagaacacgatccgaacccctgccaccatctgctaccgcaccccctccgccgggccctatgcagcctaggctggagcagctgaagacacacgtgcaagtgatcaaaagatctgccaagccttctgagaaaccacgccttcgccagataccgagcgccgaggatctggagactgatggtggtggccccggacaggtggtggatgacggacttgagcacagagaactggggcacggccagcccgaggcccggggccccgccccgttgcagcaacacccacaagtcttgctctgggaacaacagcggttggcgggcaggcttcctcgggggagcaccggggacacagtactcctgccattggcccaggggggccacaggcccctctcaagagctcagagttcacccgccgcccccgcatcgctcagtgcaccagagcccgcttcacaggctagggtgctgtcctcgtcagagaccccagccagaaccctgccatttactacgggcctgatctatgactcagtaatgctgaagcaccagtgttcttgcggcgataacagccgccacccagaacacgctgggcgtatacaatcaatttggtcgcgcttgcaagagagagggcttaggagtcaatgcgagtgtctgagaggtcgcaaagccagtctggaggaactgcagtctgtccattccgaaagacatgttttactctacgggaccaatcccctgtctcggttgaagcttgataatggcaaactggcaggcttgcttgcccaacgaatgtttgtcatgctgccttgtggcggagtcggtgtagacacagacaccatctggaatgagttacactcatcaaacgctgcacgatgggccgctggttctgttactgatctagctttcaaggtggcatccagagaactcaagaacggcttcgcggtggtgagaccaccaggccatcatgctgaccatagcactgccatgggcttctgcttctttaacagtgtggccatcgcttgtcgacagctacaacagcaatccaaagcctctaaaatacttatagtggattgggacgttcatcacggaaacggaacacagcaaaccttctaccaagacccctcagtgttgtacatctctcttcatagacacgatgacgggaatttctttcccggctccggcgcagtggacgaggtaggagcagggagtggggaaggatttaacgtcaacgttgcttgggccggcggccttgatcccccaatgggggatcccgaatacctggccgcctttcggattgtcgtgatgcccattgccagagagttttccccagatctggtgttagtctcagctggcttcgatgctgccgagggtcacccagcccctctcggaggttaccacgtttccgccaagtgtttcggctacatgacccagcagttgatgaacctcgccggcggtgcagtggttcttgccctggagggagggcatgatctgactgctatatgcgatgcgagcgaagcctgtgttgccgctctgctgggcaaccgggtcgaccccctgtcggaggagggctggaagcagaagcctaacttaaacgccattagatcactggaagcagtaattcgtgtgcacagtaaatactggggttgcatgcaaaggctcgcatcttgtcctgatagctgggtgccaagggtccctggcgctgataaggaggaagtggaggctgtgacagcgcttgcatccctaagtgttgggatcttagcagaggatagaccaagcgaacaattggtggaggaggaagagcctatgaacctgtag

SEQ ID NO: 31732 - RNA, 588 nt, synthetic construct
  misc_feature 1..588: note = Description of Artificial Sequence: Synthetic coding sequence
  source 1..588: mol_type = other RNA
atgggcaaaatctcatctctgcccactcagctgttcaaatgctgcttttgtgacttcctgaaagtcaagatgcatacaatgagcagtagccacttattctacctagccttgtgtctgttgacgttcacatcaagcgctacagctggccctgaaaccctgtgcggtgctgagttagtggacgcccttcagttcgtgtgtggggatcggggattctatttcaataaacccaccggctatggttccagctcacgtcgcgctccccagactggcatcgtcgatgaatgttgctttcggtcgtgtgatttaagacgcctggagatgtattgtgctccactcaaacccgctaaaagtgcaagatcagtaagggcacagcggcacacagatatgcctaagacacagaagtatcagcccccctccactaacaaaaacactaagtctcagagaagaaaggggtggccaaagacccatcctggcggcgagcagaaagaggggacggaggctagtctgcagattaggggcaaaaaaaaagaacaacggagggagatcggcagtcggaacgcggagtgtcgaggcaaaaaaggcaagtag

SEQ ID NO: 31733 - RNA, 462 nt, synthetic construct
  misc_feature 1..462: note = Description of Artificial Sequence: Synthetic coding sequence
  source 1..462: mol_type = other RNA
atggggaagatctcaagcctacctacccagctgttcaagtgttgtttttgcgactttctgaaggttaagatgcacacaatgtccagctcacacctgttctatctcgcgctctgtttacttacattcacatcatccgcaaccgccgggccagaaactctttgtggtgccgagcttgttgacgccctgcagttcgtgtgtggggacagaggattctacttcaataaacccaccgggtacggatcaagctcacgtcgcgctcctcagacaggaatcgtagacgagtgctgttttcgatcgtgcgacttaagacgattggagatgtactgcgctccactcaaacctgccaaaagcgcgcggagcgtgcgtgcacagagacatactgacatgcctaaaacacaaaaggaggtgcacctcaagaatgcaagccgaggctccgctggcaacaagaattacagaatgtag

SEQ ID NO: 31734 - RNA, 477 nt, synthetic construct
  misc_feature 1..477: note = Description of Artificial Sequence: Synthetic coding sequence
  source 1..477: mol_type = other RNA
atgggaaagatcagtagccttccaacacaacttttcaagtgttgtttttgcgacttccttaaagtgaagatgcacactatgtctagctcccacctcttttacctggcactctgcctcctgacgtttacatcatctgcaactgctggcccagagacactttgtggagccgaactggtggacgccttacagtttgtttgcggggatcgggggttctactttaacaagccgacaggatatggatcatcatccaggcgagctccccagactggtattgtggacgaatgctgcttcagatcatgtgatctgagacgactcgaaatgtactgcgccccactcaaacccgctaaaagcgcgcgcagtgtacgagctcagcgccatacagacatgcccaaaacccaaaaatatcaaccaccaagtacgaacaagaacaccaaaagtcagagaaggaagggatcaactttcgaggagcgcaagtag

SEQ ID NO: 31735 - RNA, 420 nt, synthetic construct
  misc_feature 1..420: note = Description of Artificial Sequence: Synthetic coding sequence
  source 1..420: mol_type = other RNA
ctgaaagtgaaaatgcacaccatgagtagttcacatctgttttacctggccctgtgtctgttgacctttaccagcagcgctacagcgggacccgagaccctctgcggcgccgaactggtcgatgcccttcagtttgtgtgcggggataggggattttatttcaataagccaacaggctacggatcctcatcaagaagggccccacaaacaggaattgtggacgagtgctgcttccgcagctgcgacctgagaagattggagatgtactgtgcgccactaaaacccgccaagtccgccagaagcgtccgagcacaacgccacaccgacatgccaaagacccaaaagtaccaaccaccttcgactaacaagaacaccaaatctcaaagacgaaagggatcgacatttgaggagcgcaaatag

SEQ ID NO: 31736 - RNA, 414 nt, synthetic construct
  misc_feature 1..414: note = Description of Artificial Sequence: Synthetic coding sequence
  source 1..414: mol_type = other RNA
atgatcacacctaccgtcaaaatgcacactatgagtagcagccatctattctaccttgctctgtgtcttctcaccttcacttcgagtgctaccgccggcccggaaactttgtgcggcgccgaattagttgacgccctccagtttgtatgcggcgaccgagggttctatttcaataagcctacaggttatggttcctcctcaaggcgtgctccacagaccggcattgtggacgagtgctgctttaggtcctgcgacctgaggagactcgagatgtattgtgcccccctcaaacccgcaaaatcagccagatcagttagagcccagcggcacaccgacatgcccaaaacccagaaagaagtgcatctcaagaacgcctccaggggctcagcagggaataagaactatcgaatgtag

SEQ ID NO: 31737 - RNA, 477 nt, synthetic construct
  misc_feature 1..477: note = Description of Artificial Sequence: Synthetic coding sequence
  source 1..477: mol_type = other RNA
atgggaaagattagtagcttaccgacccagttgtttaagtgctgtttctgcgattttctcaaagtcaaaatgcacaccatgtcttcctctcacctgttctatctcgctctctgtcttctgacttttacaagctctgcaactgccggtcccgaaacactgtgtggtgctgagctggttgatgctctacagtttgtttgtggagaccgaggcttttatttcaacaaacccaccggttacggttcaagctcaagacgggccccccagacagggatcgttgacgaatgttgtttccgttcctgcgatttgcgcagacttgagatgtactgtgccccacttaaacctgccaagtccgcccgatccgtcagggcccagcgtcatactgacatgccaaagacacaaaaatatcaacctccctctaccaataaaaatacaaaatctcagaggagaaaaggctctaccttcgaagagcgtaaatag

SEQ ID NO: 31738 - RNA, 876 nt, synthetic construct
  misc_feature 1..876: note = Description of Artificial Sequence: Synthetic coding sequence
  source 1..876: mol_type = other RNA
atgcaaagagcacgcccaactctttgggccgccgccttgactctccttgtgctactgcgggggcctcccgttgcaagggctggcgcgtcttcagccggcttaggtccagtggtgaggtgtgaaccttgtgatgcccgcgccctggcccaatgcgccccaccccccgcagtctgcgctgaactggtccgggaacctggctgtggatgttgcttgacgtgcgcactctcagaaggccagccatgcggcatatatacagaacgttgcggcagcgggctcaggtgtcagccatcgcccgacgaggctagacctctccaggcactactcgacggaagaggcctgtgtgtgaacgcctctgcagtctcccgcctcagagcttacctactccccgcccctccggcgcctggaaatgcatctgagagcgaggaagacagatccgccgggtcagttgaaagcccctctgttagcagcacccaccgagtgagtgacccaaagttccatcctctacattcgaagattatcatcataaagaagggccacgccaaagactcacagcgctataaagttgactacgagtcccagagcacagacactcaaaacttttctagcgaaagtaaaagggagacagaatatggaccgtgcagacgagaaatggaagacactcttaatcacctgaaatttttaaacgtgctcagtccaaggggggtccatattcctaactgcgacaagaaagggttctataaaaagaaacagtgtcgaccatccaaggggaggaaaaggggattttgttggtgtgtcgacaagtatggacaacccttacccggctataccaccaagggtaaagaagacgtacattgctattcaatgcagtctaagtag

SEQ ID NO: 31739 - RNA, 894 nt, synthetic construct
  misc_feature 1..894: note = Description of Artificial Sequence: Synthetic coding sequence
  source 1..894: mol_type = other RNA
atgcagagggctagacccaccctctgggccgccgccctgactctgctcgtcttgctccgcggaccaccggtggcaagggcaggcgcaagctctgccggcctgggaccagtcgtccgctgtgaaccatgtgacgctcgcgcgttggcccaatgcgccccaccacccgctgtgtgcgctgagctggtgcgcgagcccggttgcggctgttgtctaacttgcgccctgtctgagggacagccgtgcggcatttatactgaacgttgtggatcgggccttcgctgccagccttcccccgatgaagccaggccgctgcaggccctccttgacggtcgtggcctgtgtgtaaatgcttctgctgtctcccgtttgagagcctacctactgcctgcccctcccgcccctggagaacctcctgctccaggtaatgcatctgaatcagaggaagatagatccgctggatccgttgagagccctagcgtgtcatctactcatagagtatccgatccgaaattccaccctctacattcaaaaataatcataattaaaaagggccacgcgaaagattcccagagatataaggtagactatgagtcccaatctaccgatacccagaatttctcttctgaatcaaagagggagactgagtatggtccttgtaggagggaaatggaggatactcttaatcatctaaagtttttaaatgtcttatcacctcgcggcgtccacatccctaactgcgacaaaaagggtttctataagaaaaaacaatgcagaccctcgaaggggagaaagcgcggtttctgctggtgcgtggataagtacggccagccactccccgggtacacaacgaaaggcaaggaagacgtccactgctattcaatgcaatccaagtag

SEQ ID NO: 31740 - RNA, 585 nt, synthetic construct
  misc_feature 1..585: note = Description of Artificial Sequence: Synthetic coding sequence
  source 1..585: mol_type = other RNA
atgcaacgggctcggcctttacaggccctcctggacggcagaggactgtgcgtgaatgcaagcgccgttagcagacttagggcctacctccttccagctccccctgcaccgggcaatgccagcgagtcggaagaagatcgatctgccgggtctgtggagtcgccaagtgtcagctctacccatagggtttccgaccccaagttccacccactacatagtaaaatcattatcattaagaagggtcacgccaaagactcacaaaggtacaaagttgactatgagtcccaaagcaccgatacacaaaatttcagctccgagtccaaaagggagacagaatacggaccttgtcggcgagaaatggaggacaccttaaaccatctgaagtttttgaatgtattatcgccacggggggtccatattcctaattgtgacaaaaagggcttctacaagaagaaacaatgcaggccgtcgaaaggacgaaagcgaggcttttgctggtgcgtagataaatatggtcaacccttacctggttacacgactaagggcaaggaggacgttcactgctatagtatgcagtccaaatag

SEQ ID NO: 31741 - RNA, 462 nt, synthetic construct
  misc_feature 1..462: note = Description of Artificial Sequence: Synthetic coding sequence
  source 1..462: mol_type = other RNA
tgatctgaggaggaccgaagtgccggttctgtcgaaagtccgtcagttagctctacacatcgtgtttccgatccaaaatttcatcctttgcactccaaaatcatcatcatcaagaaggggcatgccaaagacagccagcgctataaagtcgattacgagagccaaagtacagacactcagaacttctcttccgaatccaagcgcgaaaccgaatacggcccatgtaggcgagaaatggaggataccctaaaccatttaaagtttcttaacgttctgagtccacgcggagtgcacattcccaactgtgataagaagggcttctataagaaaaagcaatgtcggccaagcaaaggccgcaaaagaggcttctgctggtgtgtagataagtacggccaaccattgcccgggtacaccacaaaaggaaaggaagatgttcactgctatagcatgcagtccaagtag

SEQ ID NO: 31742 - RNA, 432 nt, synthetic construct
  misc_feature 1..432: note = Description of Artificial Sequence: Synthetic coding sequence
  source 1..432: mol_type = other RNA
tgagaatcaccttctgtttccagcacccatcgggtgtccgaccctaaattccatcccctccactccaaaatcatcatcattaagaagggacatgccaaagactcacagagatacaaggtggactatgagtcccagagcaccgatacacagaatttttcaagcgagtcaaagcgggaaacagaatatggaccctgtcgacgggagatggaagatacgttgaatcatctgaaattcctcaatgttctcagtccacggggcgtgcatattcccaattgtgataaaaagggtttttacaagaaaaaacaatgtagaccatcaaaggggcgaaagaggggattctgctggtgtgtagacaagtacggtcaaccactccccggctacaccactaaaggaaaggaagacgtccattgctatagcatgcagagtaagtag

SEQ ID NO: 31743 - RNA, 792 nt, synthetic construct
  misc_feature 1..792: note = Description of Artificial Sequence: Synthetic coding sequence
  source 1..792: mol_type = other RNA
atgcagagagcccggcctacactctgggccgcctgtgagccatgcgacgccagagcccttgcccagtgcgctccaccccccgctgtttgtgctgagctggtcagagaaccaggctgtggatgctgcctcacctgtgcactttcagagggccagccgtgcgggatctacacagaacggtgtgggagtggcctgcggtgccaacccagccctgatgaagcaagacctcttcaggccctcctggacggcaggggcttatgtgtcaacgcttcagctgtgtctcgtcttagagcctacctgctgccagcgccacccgccccaggcaacgcatctgaaagtgaagaagacagatccgccggctctgtcgaatctccatcagtttccagtacacacagagtgtccgaccccaagttccaccccctacactcaaagatcatcattatcaagaagggccatgccaaggactcgcagcgatataaagtagactacgaatcacaatcaacagatacccagaatttctccagcgaatcaaagcgcgaaacagagtacggtccctgtcgccgagagatggaggacacgctgaaccatttgaagtttctcaatgtcctgtcccctaggggggttcacatccctaattgcgataagaaggggttctataagaaaaaacagtgtagaccgagcaaaggccgaaagaggggcttctgttggtgcgttgataaatatggacagccgttgccaggttacacaacaaaaggaaaggaagatgtgcattgctacagtatgcagagtaagtag

SEQ ID NO: 31744 - RNA, 834 nt, synthetic construct
  misc_feature 1..834: note = Description of Artificial Sequence: Synthetic coding sequence
  source 1..834: mol_type = other RNA
atgagggcccttaggctcggcgccgaagaccagccattgccggcttggattccccagttacgggcggtttattgtcgacctattccggcccggccagcttgccaggccgcttgtcccggatgccgccgccatgccgccggagcaacacatgcccttgggagatgtgccgacagtgccggcgccgcaccccgagccgcggggggtgcaggttggagagaactgggtggcctgggaagtcgaggtgcactgagagccgtgagacaccttcaccgagcccttctagacggaagaggtctgtgcgtaaatgcgtcagcagtgagtcgtctccgagcctacctgctgccagcccctcccgctcccggcaacgcttccgagagtgaagaagaccggtctgccggatccgtggagagcccaagtgtcagctccacacaccgggtgagcgatccgaagttccaccctttgcatagcaagatcattataattaaaaagggacacgcaaaggattcccaacggtacaaggtcgactacgagagccagtctaccgacacgcagaatttctccagcgaaagtaagcgcgagactgagtatggcccctgtcggagggaaatggaggataccctgaaccatctgaagtttttgaatgttctgtctccgcggggtgtgcatattcctaattgtgataaaaaaggtttctataagaaaaaacagtgcaggccctccaaaggtcgaaaacggggattctgctggtgcgtcgacaaatatgggcagcctctccctggctacaccactaaaggaaaagaggacgtgcattgctattcgatgcagtcgaagtag

SEQ ID NO: 31745 - RNA, 570 nt, synthetic construct
  misc_feature 1..570: note = Description of Artificial Sequence: Synthetic coding sequence
  source 1..570: mol_type = other RNA
atgcagcgcgcaaggcctaccttatgggcggcagcactgacactgcttgatggaagagggctttgcgcctatctgcttcctgcgccccctgccccggggaatgcttctgagtctgaggaagacagaagcgcgggatccgttgaatctcccagcgtcagcagtacccacagagtcagcgatcctaagttccacccccttcattctaaaattattatcatcaaaaaaggacatgccaaagactcccagcggtacaaggttgattatgagtcacaatccacggatacccagaactttagttccgagtctaaaagggaaactgagtatgggccgtgcagaagagagatggaggacactctgaatcaccttaaattcctgaacgtcctgtcaccacgtggtgttcacattccgaactgcgacaaaaaagggttctataagaaaaaacaatgccgaccatctaaaggacggaagagaggcttttgctggtgtgtggataaatacggacagccactgcccggatacacaaccaaagggaaggaagacgttcactgctattctatgcaatctaaatag

SEQ ID NO: 31746 - RNA, 807 nt, synthetic construct
  misc_feature 1..807: note = Description of Artificial Sequence: Synthetic coding sequence
  source 1..807: mol_type = other RNA
atgcaaagggcccggccaacattatgggcagcggctctgactctccttgttcttctcagaggcccacctgtggcccgtgccggagcttccagcgctgggctgggtccagtggtccgcagggaacctggttgcggctgttgcctgacttgcgctctctctgagggacagccatgcggcatttatacggaaagatgtggatccggtctaagatgtcaaccctcccccgatgaagctcgcccactccaggccctgctggacggacggggcttgtgcgtgaatgcatctgccgtttctagactgcgtgcctatctcctccctgcacctccagcacctggaaacgctagcgagtctgaagaggatcgctctgccggttcagtcgaaagcccttcggtgtctagcactcaccgcgtttctgatccaaagtttcacccattgcattccaagattattataattaagaaagggcatgcaaaagacagtcagcgttacaaggtcgactacgagtctcagagtacggatacccaaaacttctccagtgagtccaaaagggagactgaatacggtccttgccggagagaaatggaggatactttgaaccacctgaagttcctgaacgtgctatcgcctagaggggttcacatccccaattgtgataagaaagggttctacaagaaaaaacagtgccgcccatccaaggggcgcaaaagggggttttgctggtgcgttgataagtacggacagcccttgcctggttatactaccaagggtaaagaggacgtacattgctactctatgcagtcaaaatag

SEQ ID NO: 31747 - RNA, 2397 nt, synthetic construct
  misc_feature 1..2397: note = Description of Artificial Sequence: Synthetic coding sequence
  source 1..2397: mol_type = other RNA
atgaacctccagcctattttctggattggattgatctcttcagtctgctgtgtctttgcccaaaccgacgaaaatagatgtctaaaagcgaatgcaaagagctgcggggagtgtatccaagccggaccgaactgcggatggtgcacaaactcaacgtttcttcaggagggtatgcccacatccgctagatgcgacgatttggaagctttgaaaaaaaaagggtgccctcccgatgatatcgagaaccctaggggctcaaaagacattaaaaagaacaagaacgttaccaatcgatctaaagggacagccgagaagcttaagccagaagacatcacccagatccaaccacaacaacttgtcctccgtttaaggtccggggaaccacagactttcacactgaagtttaagcgggccgaggactatcccattgacctctattacctcatggacctgagctactctatgaaagacgacctcgagaacgtcaagtcactgggaactgacctaatgaacgaaatgagacgcattacaagtgattttaggataggcttcgggagcttcgttgagaagactgtgatgccctacatcagcacaacacctgctaaactgagaaacccatgtacatctgaacagaattgcaccagcccgttctcttacaaaaacgtgttgtctctgaccaataagggagaagtgttcaatgaactggtgggcaaacaacgtataagcggcaacctcgacagtcctgaaggcggcttcgatgcgatcatgcaggtcgccgtctgtggctcactgatagggtggcgcaatgtgacccgacttcttgtgttttccacagacgcaggattccacttcgccggagatggaaagcttggcggtatcgttctgccaaacgatgggcagtgccatctggagaacaacatgtacaccatgagtcattactatgattacccatctatagcccatctcgtgcagaagctctcagagaataatatccagaccatatttgccgtaacagaggagtttcagcccgtctataaagagctgaagaaccttattcccaagtccgcggtgggtaccttgtcagccaactcatctaacgtgattcagctgattatagacgcatacaacagtctgtcatctgaggttattctcgagaatggcaagctaagtgaaggagtcactatttcctataagtcctattgcaaaaatggtgtaaatggtacaggcgagaatggccgcaaatgctccaacatatccattggcgatgaggttcagtttgagattagtatcaccagcaataaatgtccaaaaaaggactccgactccttcaagatcaggcccttagggtttaccgaagaagtggaggttatattacagtacatttgtgaatgcgagtgccagtccgaggggatcccagagtctcccaaatgccacgagggaaatggcacatttgagtgcggcgcttgtcgatgtaacgagggaagagtgggtcgccactgtgagtgctccacggatgaagtcaatagcgaagacatggacgcctattgcaggaaagaaaactcaagcgaaatctgttccaataatggggagtgtgtctgcggacagtgcgtctgtagaaagagagacaataccaatgagatctacagtgggaaattttgtgagtgtgacaatttcaactgcgatcgctctaatggcttgatctgcggcggaaacggggtatgtaagtgtagagtctgcgaatgtaatcctaattacacaggatccgcatgcgattgttccctcgacactagtacctgtgaggccagtaacgggcaaatttgtaacggccgcggaatctgtgaatgtggcgtgtgcaaatgcaccgaccccaagtttcagggacagacctgcgagatgtgtcagacatgcctgggtgtgtgcgccgagcataaagaatgtgtgcagtgtagggctttcaataaaggtgagaaaaaggacacctgcacccaggagtgctcctactttaatattaccaaagtggaatctcgggataagctcccacaacctgtgcaacccgaccctgttagtcattgcaaggaaaaggatgtagatgactgctggttttattttacctattccgtaaacggcaataacgaagtaatggtccacgtcgtcgagaatccagaatgtccaacaggacctgatatcattccaatcgtagccggggttgtggcaggcatagttctcattgggctcgccctgttgctgatctggaagctgctcatgatcatccacgatagacgcgagtttgccaagtttgagaaagaaaagatgaacgccaaatgggacaccggcgagaacccgatctacaaaagcgccgtcaccactgttgtcaatcctaagtatgaaggcaaatag

SEQ ID NO: 31748 - RNA, 2478 nt, synthetic construct
  misc_feature 1..2478: note = Description of Artificial Sequence: Synthetic coding sequence
  source 1..2478: mol_type = other RNA
atgaatctgcaaccaatattctggatcggcctaatctcctctgtatgctgcgtctttgctcagacagacgagaacaggtgcctgaaagcaaacgccaagtcatgtggcgaatgtattcaagccgggccaaattgcggttggtgtacgaactctaccttcctgcaagagggtatgcctacttctgcacgctgcgatgacctggaggccctaaaaaaaaaaggatgtccccctgacgacatcgagaacccaagagggagcaaagatattaagaagaataagaacgtgactaatagatcaaagggaacagcggagaaactgaaacccgaggacattactcaaatccagccacagcaactcgttttacggctcaggtccggggagccgcaaacctttacattaaaatttaaaagggcagaagactatccaatcgatctgtattacctgatggacctgtcctattccatgaaggacgatctggaaaacgtaaaaagtctcggaaccgacctgatgaatgaaatgcgtagaatcacctccgacttccgaattggattcggatcctttgtggaaaagacggttatgccctacatcagcacgaccccagctaagctccggaacccatgcacttcggagcaaaattgtacaagtcctttctcatacaagaacgtgttatccttgaccaataaaggggaagtgttcaatgagctggtcggtaagcagagaattagcggcaatttggattctccagagggcggatttgatgctatcatgcaggtcgccgtctgcggaagtctgattggttggcggaatgtgacgcgactcttagtgtttagtaccgatgctggattccatttcgctggggacgggaagcttggcggaatagtgcttcccaacgatgggcaatgtcatcttgagaacaatatgtataccatgtctcattattatgattatccatcaattgcacacttggtacaaaagctctctgagaacaacatacagaccatcttcgccgtgactgaagagtttcagcccgtttataaggaactaaagaacttgattcctaagtccgccgtcgggacactctccgccaattccagcaacgtgattcaactaattatcgacgcctataactcattatcttcagaagtgatcctggaaaacgggaagctttcagaaggcgtgactatctcatacaagtcatattgcaaaaatggtgtaaatggcaccggagaaaacgggcgaaagtgctccaatatcagtattggggatgaggttcagtttgagatttcaattaccagcaacaaatgccccaaaaaggattcagacagcttcaagatcagacctttaggattcactgaagaggtggaagtcattctgcagtacatctgcgagtgcgaatgtcagagcgaagggattcctgagtcccccaagtgccatgaaggtaacggcacttttgagtgcggcgcgtgtcggtgcaatgaggggcgcgtggggaggcactgtgagtgttcaacagatgaggtgaattccgaggacatggatgcttattgcaggaaggagaactcatccgagatctgttctaataacggggagtgcgtctgtggacagtgcgtttgcaggaaaagagacaataccaacgaaatctacagtggcaagttctgcgagtgcgacaatttcaattgcgataggagcaacgggttgatttgtggaggtaacggtgtatgcaagtgtagagtatgtgaatgcaatcccaattataccggatccgcctgtgactgtagcctcgatacaagtacttgtgaagcatccaatgggcagatctgcaacgggcgagggatctgtgagtgcggcgtgtgtaagtgcacagaccccaagttccaggggcaaacctgcgaaatgtgtcaaacgtgtctgggtgtatgtgccgaacataaggaatgcgttcagtgtagagcgttcaataagggggagaaaaaggacacctgcacgcaagaatgtagctattttaacatcactaaagtagagagcagagacaaacttcctcagcccgtccaaccggaccctgtaagtcattgcaaagagaaggacgtggacgattgttggttctactttacctattcagtgaacggtaataacgaggtcatggtacatgttgtcgagaatcctgaatgtcccaccggccctgatatcatccctatcgtggcaggtgtcgtggccggcatcgtcttaataggcctggccctgctgctgatctggaaattattgatgatcattcacgatcgtcgagaattcgccaaattcgagaaggagaagatgaacgccaagtgggacacctccctgagcgttgcgcagcccggtgtgcagtggtgcgacatcagtagcctccagccactgacatcccgatttcaacagttctcctgcttatcacttccatctacatgggactatcgcgtgaagattctgttcatacgtgtgccatag

SEQ ID NO: 31749 - RNA, 2397 nt, synthetic construct
  misc_feature 1..2397: note = Description of Artificial Sequence: Synthetic coding sequence
  source 1..2397: mol_type = other RNA
atgaacctccaaccaatattttggatcggactgattagctctgtttgttgcgtgttcgcacagaccgacgaaaatagatgtctaaaggctaatgcaaagagttgcggagaatgcatacaagccgggccaaattgcggctggtgcaccaattcgacctttctgcaggaagggatgcccacgtccgccagatgcgatgacctggaggctctgaagaaaaaaggctgccccccggatgacatagaaaatcccagaggttctaaagatattaagaagaacaagaacgtgaccaataggagtaaagggactgccgaaaagttgaaaccagaggatattactcaaattcagccgcagcagctcgttcttagactaagatcgggggagccacagacgttcacccttaaatttaagcgagcagaagactacccgattgatctctattatctcatggacttaagctatagcatgaaggacgacttggagaatgtgaaatcacttggaaccgacctgatgaacgaaatgaggcgcatcacgtccgatttccggattggctttggtagttttgtagaaaaaaccgtcatgccctacatcagtaccacccctgccaaactgcgaaatccatgtacaagtgaacagaattgtacatcgccctttagctataagaacgtgctctctcttacaaataagggcgaagtgttcaatgaattggtgggcaagcagaggatctctggtaatctggactcaccggaaggcggatttgatgctatcatgcaggtggccgtgtgcggctccttaatcggatggaggaacgtaactagactcctcgtcttttctactgacgcaggcttccatttcgccggggacggaaaacttgggggcattgtgctgccgaatgatggtcagtgtcacttagaaaacaatatgtacactatgtctcattactacgactatcccagcatagcccacttagtccaaaagctgagcgaaaacaatattcaaacgatcttcgccgttaccgaggagttccagccggtgtacaaggaacttaaaaatctcatccctaagagtgccgtgggcactctgtctgccaactccagcaacgtgattcagttaatcattgatgcatacaatagccttagctcagaagttatcctggagaatggaaagctgagtgagggtgtcactataagctacaaaagctactgcaaaaatggtgtgaatgggactggcgagaacggacgcaaatgttccaatattagcatcggagacgaagtgcagtttgagattagtattacatccaacaaatgtccaaagaaggattcggacagtttcaagatccggccactcggattcaccgaagaggttgaggtaatcttacagtacatctgcgagtgcgagtgtcagagtgagggcatcccagagagtccgaagtgtcatgaaggcaacggtacttttgagtgtggggcgtgcaggtgtaatgagggtcgagtgggtcgtcactgcgaatgtagtacagatgaggttaactcagaggacatggacgcctattgtcgcaaggaaaatagttctgagatatgcagcaacaatggagaatgcgtgtgcggccagtgcgtctgtagaaaaagggacaacaccaatgagatctattcggggaagttctgcgagtgtgacaatttcaattgtgatagaagcaatggcctgatttgtggcggtaatggcgtttgcaaatgtagggtgtgtgaatgtaatcctaactacaccggcagtgcctgtgactgctctctcgacacttctacatgtgaagcttcaaacggtcagatctgcaatggaagaggcatttgtgaatgtggcgtctgcaagtgcacggaccccaaattccagggtcagacgtgcgagatgtgccagacatgtctcggcgtgtgtgcagagcataaggaatgcgtgcaatgccgagcatttaataaaggagagaaaaaagatacgtgtacccaagagtgctcttactttaatatcactaaagtcgaaagtagggataagttgccccagcctgtgcagccagatccagttagtcattgcaaggaaaaggatgtggatgactgttggttttatttcacatatagcgtgaacggtaataacgaggtgatggtgcacgtcgtcgagaacccagaatgccctacaggacctgatatcatacctatcgtcgccggcgtcgtggccggaattgtgcttatagggttggcactgctcttgatttggaagctcttgatgattatccacgaccggagggaattcgccaaattcgagaaagaaaagatgaatgcaaaatgggacaccggagagaacccaatttataaatcagcagtaacaactgtagtgaatccaaagtacgagggtaagtag

SEQ ID NO: 31750 - RNA, 150 nt, synthetic construct
  misc_feature 1..150: note = Description of Artificial Sequence: Synthetic coding sequence
  source 1..150: mol_type = other RNA
atgaatctgcagccaatcttttggataggactaattagtagtgtgtgttgtgtcttcgcccaaactgacgagaacagatgtctgaaagctaatgcaaagtcctgtggagaatgtattcaagccggccccaactgtggatggtgcacatag

SEQ ID NO: 31751 - RNA, 270 nt, synthetic construct
  misc_feature 1..270: note = Description of Artificial Sequence: Synthetic coding sequence
  source 1..270: mol_type = other RNA
atgaatcttcagcctattttctggattggactgatatcaagcgtgtgctgtgttttcgcccagaccgatgaaaaccgatgcctgaaagccaatgcgaaatcttgtggggaatgtatccaggccggaccaaactgcgggtggtgtaccaattcaactttcttgcaggaggggatgccaaccagcgccagatgcgacgacctggaagcccttaagaaaaagggatgcccacccgatgacattgagaacccaagggggagcaaagatatttag

SEQ ID NO: 31752 - RNA, 2406 nt, synthetic construct
  misc_feature 1..2406: note = Description of Artificial Sequence: Synthetic coding sequence
  source 1..2406: mol_type = other RNA
atgaacctccagcctatcttttggatcggactcatatcatccgtgtgctgtgtttttgctcaaaccgacgagaaccgttgccttaaagcaaacgcaaagtcatgcggcgagtgtatacaggcaggtcccaactgcggatggtgcacgaacagtacatttctgcaggagggcatgccaaccagcgctagatgtgatgatttagaagccctgaagaagaaggggtgcccaccagatgacatcgagaatcccagggggtccaaggatattaagaaaaataaaaacgttaccaatcggtctaagggcactgctgaaaaactgaagccagaggacatcacccagatccaaccacagcaactcgtactgcgcttgcggtcaggtgagcctcagaccttcacattaaaattcaagcgagcagaagattacccgatcgatttatactacctgatggatctaagttattcaatgaaagacgacttagagaatgtgaaaagtctgggtactgacctgatgaatgagatgagaagaattacatctgacttcaggattggttttggctccttcgtggaaaaaacagtgatgccctacataagtacgaccccggccaagctcagaaacccttgtacgagcgaacagaactgtaccagccccttctcatacaaaaatgtcctgtctttgacaaacaagggagaagtgtttaatgaactcgtcggaaaacagcgtatatcggggaatctagactcccccgaaggcggctttgatgcaattatgcaagtggcagtctgcggaagcctgattggctggagaaatgtgactcgcctcttggttttctcaactgatgccggctttcattttgcaggggacggcaagttgggcggcattgtcctgcctaacgacggccagtgtcatctggagaacaatatgtacaccatgtctcattattatgactatcccagcatcgcccacctggtgcaaaaactgtccgaaaataacatacaaacgatcttcgcagtgactgaggaatttcagcccgtctacaaagagctaaagaatctcatacccaaaagtgccgtcgggaccctgagtgcaaacagctcaaacgtgatccaacttattattgatgcttacaactcgctgagcagcgaagtaatcctcgagaacggcaaactctccgagggagtcaccatttcgtataagtcttactgcaaaaatggtgtcaatggcacaggggagaatggaagaaaatgctcaaacatcagtatcggtgatgaggtgcagttcgagatctccattacatcaaacaaatgccccaagaaagattcagacagttttaagatccggccgcttgggttcacggaggaggtggaggtgatcctccaatacatctgcgagtgtgaatgtcagtcagaaggaatccctgaatctcccaagtgccacgagggcaatggcacctttgaatgcggtgcttgccgctgcaatgaaggacgagtcggccggcattgtgagtgcagtacagatgaagtaaactcagaggatatggatgcttattgtcgtaaggagaattcttccgagatatgttccaacaacggagaatgtgtctgtggtcagtgcgtctgccgcaagcgagacaatacaaacgaaatctactccggaaagttttgcgagtgcgataatttcaactgtgatcgaagtaatggtttaatatgcggtggtaatggcgtctgtaagtgccgagtctgcgagtgtaacccaaactataccggatcagcctgtgactgtagcctggatacatccacttgtgaggcgagcaacggtcagatctgtaatggtaggggcatctgcgaatgcggggtatgcaaatgtaccgatccaaagtttcagggccagacatgtgaaatgtgtcaaacttgtttaggagtctgcgcggagcataaagagtgtgtccaatgccgtgccttcaacaagggggaaaaaaaagatacatgcacccaggagtgttcttacttcaacataactaaagtcgagtccagggacaaacttccgcaacccgtacagcccgaccctgttagccattgtaaagaaaaggacgtcgacgactgctggttttattttacgtacagcgtcaatggcaacaacgaagtcatggtccacgttgtggaaaatccagagtgtcccactggacccgatatcatccccattgtggctggtgtggtcgccggaatagttcttatcggcctagcccttctattaatttggaagctgctgatgatcatacacgataggcgggagttcgctaagtttgagaaagaaaaaatgaatgccaagtgggatacacaggaaaatccaatttacaagagtccaataaataactttaagaacccaaattatggccgcaaagccggactatag

SEQ ID NO: 31753 - RNA, 411 nt, synthetic construct
  misc_feature 1..411: note = Description of Artificial Sequence: Synthetic coding sequence
  source 1..411: mol_type = other RNA
atgaacctgcagccgatcttctggataggactgattagctctgtgtgctgtgtcttcgcacagactgatgaaaaccgatgtctaaaggcgaacgcaaagtcctgtggggagtgtattcaggccgggccaaactgtgggtggtgcactaactccacttttctccaggaaggaatgcctaccagcgcgagatgcgacgacctagaggctctgaaaaaaaaaggctgcccccccgacgatattgaaaatccacgcggtagcaaagacattaagaaaaataagaacgttacgaatcgatcaaaaggaaccgccgagaagcttaaacctgaagacattactcagatccagccacaacaactcgtgctgcgcctgcggagtggtgagccacagacgttcacacttaagtttaagtag

SEQ ID NO: 31754 - RNA, 378 nt, synthetic construct
  misc_feature 1..378: note = Description of Artificial Sequence: Synthetic coding sequence
  source 1..378: mol_type = other RNA
atgaatctgcagcccatattctggatcggtcttatcagcagcgtgtgttgtgtatttgcccaaacagacgagaaccggtgtttaaaggccaatgcgaagagttgtggtgaatgcatccaagctgggccaaactgtggttggtgcacaaactctacgttcctgcaagaaggaatgccgacttccgcaaggtgcgacgacctggaagctcttaaaaagaaaggctgtccacccgacgacatcgagaatccgagaggctctaaagatattaaaaagaacaaaaatgtgacgaacaggagcaagggcaccgccgaaaagctcaaacccgaagatataacccaaatccagccccagcagcttgttcttaggcttcgatcttag

SEQ ID NO: 31755 - RNA, 492 nt, synthetic construct
  misc_feature 1..492: note = Description of Artificial Sequence: Synthetic coding sequence
  source 1..492: mol_type = other RNA
atgaatttgcagcctattttttggatcgggctaataagcagcgtgtgctgcgtcttcgcacagacggacgaaaacaggtgcctgaaagcaaacgccaagtcatgtggcgagtgtatacaagccggaccaaactgcgggtggtgcactaacagcacattccttcaagaaggcatgccgacatccgcccggtgtgacgatctggaggctctgaaaaaaaagggctgtccacccgacgacattgagaacccacgcggctctaaggacattaagaaaaacaagaacgtaactaataggagtaagggaacggccgagaaacttaaacctgaggatataacgcaaatccagcctcaacagttggtcctccgcttacgttcgggcgaaccccaaacctttacactcaaattcaagagagccgaagattatcctatagacctgtattaccttatggacctttcttattctatgaaagatgacctggaaaacgtgaagtag

SEQ ID NO: 31756 - RNA, 459 nt, synthetic construct
  misc_feature 1..459: note = Description of Artificial Sequence: Synthetic coding sequence
  source 1..459: mol_type = other RNA
atgaatctgcaaccaatattctggattggacttatttccagcgtgtgctgtgtcttcgcgcaaaccgacgaaaacaggtgcctgaaagccaatgccaagtcgtgtggagagtgcatccaggccggccccaattgtggatggtgcacaaacagcgtgtccaagaccttcctgcaagaagggatgccaacctcagctagatgtgacgaccttgaagcactcaaaaagaaaggatgcccgcccgacgacatcgagaacccgcgtgggtcaaaagacattaaaaagaataaaaatgttaccaatcgcagcaaaggcactgccgaaaagctgaagcccgaagatatcacccaaatccaaccccagcagcttgtattgagactcaggagcggtgagccccagacgtttacgctgaagtttaagcgggctgaagactatcctattgatttgtattatttgatgtag

SEQ ID NO: 31757 - RNA, 315 nt, synthetic construct
  misc_feature 1..315: note = Description of Artificial Sequence: Synthetic coding sequence
  source 1..315: mol_type = other RNA
atgaaccttcagcccattttctggatcggactgatttcaagcgtgtgctgtgtgtttgcccaaaccgacgaaaatcgctgtcttaaagcaaacgctaagagctgtggagagtgcatccaagccgggcctaattgtgggtggtgtactaattcgactttccttcaagagggcatgcccacaagtgcaagatgtgacgatttggaggccctgaaaaaaaaggggtgccccccagacgatattgaaaatccacgggggtccaaagatatcaaaaagaacaagaatgtgacaaaccgctcaaagggaaccgccgagtag

SEQ ID NO: 31758 - RNA, 432 nt, synthetic construct
  misc_feature 1..432: note = Description of Artificial Sequence: Synthetic coding sequence
  source 1..432: mol_type = other RNA
atgaatttgcaacctatcttctggattggtctgattagctccgtgtgttgcgtcttcgcccaaactgatgagaatcggtgtttaaaagccaatgccaagagctgcggcgagtgtatccaggctgggcctaattgtgggtggtgtaccaactcaacttttcttcaggaaggtatgcccacatccgcccgttgcgatgaccttgaagcactgaagaagaaaggttgcccgcccgacgacattgagaacccaaggggcagcaaagacatcaaaaaaaacaagaacgtaacaaatcgttccaaaggtacggccgaaaagttaaagcctgaagatataacccagatccaaccacagcaactggtcctgagattaagatctggtgagccccagacatttactttgaagttcaagagggcagaagactatcctatttag

SEQ ID NO: 31759 - RNA, 570 nt, synthetic construct
  misc_feature 1..570: note = Description of Artificial Sequence: Synthetic coding sequence
  source 1..570: mol_type = other RNA
atggctagccccttcgctctgcttatggtcctggttgttttgagctgtaaatccagttgctctttgggctgcgaccttcctgaaactcatagcctcgacaatagaaggaccctgatgctcctcgcacagatgtcgcggatctctcccagctcctgccttatggacaggcacgattttggctttcctcaggaagaattcgacgggaatcaattccagaaagccccggcaatctcggtcctgcatgaattaatccagcaaatctttaatctattcactacaaaagactcgtcagcagcctgggatgaagatctgttagataagttttgcacagaactataccaacaactgaatgacttggaagcatgcgtcatgcaagaggagagagtcggcgagactcctttgatgaacgccgactccattctagccgttaagaagtatttcagaaggattacgttgtacttaacagaaaagaaatatagtccatgcgcctgggaagtggtgcgggctgagatcatgagaagtttatcactgtctaccaacctccaggagcgcctcagacgaaaagagtag

SEQ ID NO: 31760 - RNA, 762 nt, synthetic construct
  misc_feature 1..762: note = Description of Artificial Sequence: Synthetic coding sequence
  source 1..762: mol_type = other RNA
atgtggcccccaggaagtgcttctcaacctccaccaagccccgcggccgctactggactgcatcctgccgcccgccccgtctctctccaatgtcgtctgtcaatgtgcccggctaggtccttactgctcgtggccactctagtgctgctggaccaccttagcctggcccgcaatctgccagtggccaccccggatcccggcatgtttccctgtctccaccattctcagaaccttttgcgggcggtgtctaacatgctgcaaaaagcaaggcaaacactggagttttacccatgcacctctgaagaaatcgaccacgaggacataactaaagataaaacaagtacggtggaagcttgcttacctcttgagctgaccaagaatgagtcctgcttgaacagccgcgagacgtcttttattacaaacggctcatgcttagcgtcacgaaaaactagcttcatgatggctctgtgcctgtcatcaatttatgaggatctcaaaatgtaccaggtggaatttaaaacgatgaatgcgaaactgttaatggacccaaagcgccagattttccttgatcagaatatgctggcagtgatcgacgaactgatgcaggcacttaatttcaatagcgagacggtcccgcagaaatcatccctcgaggaacccgacttctataagactaaaattaaactgtgtatactcttacacgcctttagaatacgggctgtgactattgatagggtgatgagctacctcaatgcatcttag

SEQ ID NO: 31761 - RNA, 720 nt, synthetic construct
  misc_feature 1..720: note = Description of Artificial Sequence: Synthetic coding sequence
  source 1..720: mol_type = other RNA
atgtggccaccaggaagcgcatcccagccacccccatctcccgccgctgccacgggcctccatcccgctgcacgtccggtctcattgcagtgcagattaagcatgtgccccgccagatctttattactggtagccaccctggttttactagatcacctctcactagctcgcaatctaccggttgctacccccgacccgggcatgtttccctgcttacaccactcccagaacttgctgcgggcagtgtccaatatgctccaaaaggctcggcaaacattggagttttacccatgcacatcagaggagatcgaccatgaggatattactaaggacaaaacatccaccgtcgaggcctgtctgcctctggagctgactaaaaatgggagctgtttagcgtctaggaagacatctttcatgatggcattatgtctgtccagcatttatgaggatcttaagatgtatcaagtggaatttaaaaccatgaacgccaaactcctgatggatcctaagcgtcaaattttcctggatcaaaatatgcttgcggtgatcgatgagcttatgcaagccttaaactttaattccgagacagtcccacaaaagtcgagtctcgaggagcccgatttttataagactaagataaagctgtgtatcttacttcacgcctttcgaatccgagcagtcaccatcgatagagttatgtcatacctgaatgcctcttag

SEQ ID NO: 31762 - RNA, 648 nt, synthetic construct
  misc_feature 1..648: note = Description of Artificial Sequence: Synthetic coding sequence
  source 1..648: mol_type = other RNA
atgtggccccccgggtctgccagccaaccgcccccaagtcccgccgcagccactgggcttcacccagctgcccgtcccgtctcgctgcagtgcaggctgtccatgtgtcctgcccgttcgctgttactggtcgccacgctagtgctcctggatcacctttccctagctagaaatcttcctgttgcaacccccgacccaggaatgtttccatgcctacaccactcacaaaacctattgcgtgctgtgtccaatatgctacaaaagaatgagtcttgcctgaatagtcgagaaacctcattcattaccaatggctcctgtctcgccagcagaaagactagctttatgatggcactgtgcttatcatcgatttacgaggatttaaaaatgtaccaggttgagtttaagacaatgaatgccaagctcctgatggaccccaagagacagatctttctcgaccagaacatgctggccgtaatcgacgagctgatgcaggctctgaacttcaactccgagaccgtgccgcagaagtcatctttggaggagcccgatttttacaaaacaaaaattaaactgtgcatcctgctccatgccttccgcatccgggctgtcacgatcgaccgggttatgagttatctgaatgcatcgtag

SEQ ID NO: 31763 - RNA, 582 nt, synthetic construct
  misc_feature 1..582: note = Description of Artificial Sequence: Synthetic coding sequence
  source 1..582: mol_type = other RNA
atggcggcagaacccgtggaagacaactgcatcaactttgtggcaatgaagtttattgataacacactctatttcatagctgaagacgacgagaacctggagagcgactacttcggcaagcttgaatctaaactgtctgtgattaggaacctgaatgaccaagtgcttttcatagatcaaggaaataggcccttattcgaggatatgactgattcagactgccgcgataatgctccacgaaccatcttcatcataagcatgtataaagactctcagccccgaggtatggctgtgactatctctgttaagtgtgaaaaaatctcgaccctgagttgtgaaaacaaaatcatctcgttcaaggaaatgaaccctccagataacatcaaggataccaagtctgacatcatcttctttcagcggtctgtccccggccacgacaacaaaatgcagtttgaatcttcatcttatgagggatattttctcgcttgtgaaaaggagcgagacctctttaaattaattctgaaaaaagaagacgaacttggggaccgatctattatgttcacagtacagaatgaagactag

SEQ ID NO: 31764 - RNA, 570 nt, synthetic construct
  misc_feature 1..570: note = Description of Artificial Sequence: Synthetic coding sequence
  source 1..570: mol_type = other RNA
atggcagccgagccggtcgaagacaactgtatcaatttcgttgccatgaagtttatagacaacacattgtatttcatcgagaacctcgaatccgactactttggtaagctggaaagcaaactgagcgtcattagaaatctcaatgaccaagtcctatttattgatcagggaaaccgcccactcttcgaggatatgacagactcagattgtagggataacgcaccaagaacaatttttattatatctatgtataaagacagccagcctagggggatggctgtaaccatcagcgtcaaatgcgagaagatctccacattatcatgcgaaaacaaaattattagctttaaagaaatgaacccaccagataacatcaaggacaccaaatctgacattatttttttccagcgatccgtgcctggacatgataataagatgcagtttgagagttctagctatgagggttactttcttgcctgtgagaaggaacgcgatctgttcaaattgatcctgaagaaagaggatgaattaggggataggagcattatgttcaccgtccaaaacgaggactag

SEQ ID NO: 31765 - RNA, 582 nt, synthetic construct
  misc_feature 1..582: note = Description of Artificial Sequence: Synthetic coding sequence
  source 1..582: mol_type = other RNA
atggctgccgaaccagtcgaagacaattgtattaattttgtggctatgaaattcatcgacaatactctttacttcatcgccgaggatgacgagaatctcgaatctgattactttgggaaattagaatctaaattgagtgtgatcagaaatctcaatgatcaagtgttattcatcgatcaggggaacagaccacttttcgaagacatgaccgatagtgattgtcgggataacgccccacggacaattttcatcatctccatgtacaaagattcacaaccgaggggaatggcggtaacaataagtgtgaagtgtgaaaagatctccacattaagttgtgagaacaagattatctcttttaaggagatgaatcccccagacaacattaaagacacaaaaagcgacatcattttcttccagcgctctgtacctggtcacgacaataagatgcaattcgagtcatcatcctacgagggttatttcttagcttgtgagaaagaacgcgatttatttaagctgattttgaaaaaagaggatgaactgggcgacagatccattatgttcacggttcaaaatgaggattag

SEQ ID NO: 31766 - RNA, 639 nt, synthetic construct
  misc_feature 1..639: note = Description of Artificial Sequence: Synthetic coding sequence
  source 1..639: mol_type = other RNA
atgaactcattcagcacctctgcattcggccctgttgccttctccctcggcctgctcctcgtgctgcctgccgcttttcccgcacctgtgcctcccggcgaagactccaaggacgtggccgcaccccaccggcaacccctgacttcctctgagcgaatcgataaacaaatccgatatattcttgacggaatcagcgccctcagaaaagaaacttgtaataagagcaatatgtgcgagtcctcaaaagaagccctggccgaaaataatttaaacttgcccaagatggcagaaaaggatggctgctttcaatctggattcaacgaggagacctgccttgttaaaataattaccggactcctggagttcgaagtttatctggagtacctgcaaaaccgctttgaatcaagcgaagaacaggccagagctgtgcagatgtcaaccaaggtgctgattcaattcctgcagaaaaaggcgaagaacctggatgctatcaccaccccagatcctaccactaacgcctcactactaacaaaacttcaggcacagaatcagtggctccaagatatgaccacccacttaatcctgcgcagttttaaagagtttttgcaatcctctttgcgtgcccttcggcaaatgtag

SEQ ID NO: 31767 - RNA, 369 nt, synthetic construct
  misc_feature 1..369: note = Description of Artificial Sequence: Synthetic coding sequence
  source 1..369: mol_type = other RNA
atgtgtgaaagcagcaaggaggccctggcggaaaataacttaaacctccccaagatggccgagaaggatggctgcttccagtccggctttaacgaagaaacatgtttggtgaaaatcattacaggattgctcgaatttgaagtttacctcgagtacctgcagaatcgctttgagtcctccgaggagcaggcccgggcagtgcagatgagtacaaaggttttaattcagtttttacagaagaaggtcggagtctcatccttcccccaactaggcgttggtgaagaccgacttaaagactccgttttagacaattcaggaatgcagtgccatttccagaaacggagactgcacgtaaataagagagtgtag

SEQ ID NO: 31768 - RNA, 639 nt, synthetic construct
  misc_feature 1..639: note = Description of Artificial Sequence: Synthetic coding sequence
  source 1..639: mol_type = other RNA
atgaactccttctccaccagcgcattcgggcctgttgccttttcccttggcctcctgttagtactcccagcggcctttcccgctccggttcctcccggcgaagatagtaaagatgtggcagccccgcaccgccagccactaacaagttcagaaaggattgacaagcagatccggtatattttggacggcatctcggcactccgtaaagagacatgcaataagtcaaacatgtgtgagtcttccaaggaggcccttgctgaaaacaatttgaatctgcccaagatggctgaaaaggatgggtgcttccagtccggatttaacgaggagacgtgtcttgtcaagatcattactggattactcgaattcgaagtttatttagaatatttgcaaaaccgattcgagtcgtctgaagaacaagctcgggcagtacagatgagcactaaagttttaatacagttccttcaaaaaaaggctaagaacctcgacgccattacaactcccgaccctacaacgaatgcaagcctcctgacgaaactgcaagcacagaatcagtggctacaagacatgactacccatctgatcttaaggagttttaaagagtttttacaaagctcactaagggctctccgccaaatgtag

SEQ ID NO: 31769 - RNA, 597 nt, synthetic construct
  misc_feature 1..597: note = Description of Artificial Sequence: Synthetic coding sequence
  source 1..597: mol_type = other RNA
atgaactctttttctacgtcagcatttggtcccgttgcattttctctgggcttacttttagtgctacccgcggctttccctgcccctgtccctcctggtgaagacagcaaggatgttgccgcaccgcacagacaacctctgacttcatccgaacggatcgacaagcagattagatacattctcgacggcattagtgccttaagaaaagaaacatgcaataaaagtaatatgtgcgaaagcagcaaggaggcactggctgaaaataatctgaaccttcccaagatggcagagaaagatggttgctttcagagtggatttaacgaagaaacatgtctggttaagattatcacaggcctcctcgaatttgaagtttatctggagtacctgcagaacagatttgagtcctccgaagaacaggcacgtgccgtgcaaatgagtactaaagtgcttatccagtttctccaaaagaaagtaggagtctcaagcttcccccagttgggagtgggcgaagacagattgaaagattcagtgctggacaattcggggatgcagtgccatttccagaaacgtcggcttcacgtgaataagcgcgtgtag

SEQ ID NO: 31770 - RNA, 759 nt, synthetic construct
  misc_feature 1..759: note = Description of Artificial Sequence: Synthetic coding sequence
  source 1..759: mol_type = other RNA
atgaacagcttctctacgagcaaatgcagaaagagccttgcactggaattacctgcagccgtggagccctgcgtgcgtgaaggctgcgtggcccagggcgggctggccggcggacagcagcaaagacaggcaccttcatgcgccgtgtccagcccactgagatcactgccatcaggcacgggtgcctttggccctgtagctttttctctcggcttactactggtcctgcccgccgccttccctgctcctgtacctccaggtgaagacagcaaagatgtcgcggcaccccacagacagccattgacttcaagtgaaagaatcgacaagcaaattcgctacatactcgacggaatctctgccctgagaaaagaaacatgcaacaagtctaacatgtgcgaatctagcaaggaagccctggccgagaacaacctcaacctgccaaagatggctgagaaagacggctgcttccaaagtggctttaatgaggaaacatgtctggtgaaaatcatcacaggcctgcttgagtttgaggtctacttggaatatctgcagaacagattcgagtcttcggaagaacaagccagggcagttcagatgagcaccaaggtcctgatacaattcctgcagaagaaggtgggagtctcctcattccctcagttaggtgttggcgaagaccgactgaaagactcagtgctcgataattcaggaatgcagtgccattttcagaagcggcggctacacgtgaataagagagtgtag

SEQ ID NO: 31771 - RNA, 459 nt, synthetic construct
  misc_feature 1..459: note = Description of Artificial Sequence: Synthetic coding sequence
  source 1..459: mol_type = other RNA
atgaactcattcagtacatcagcctttggcccagtcgctttttctctgggattgctgcttgtgttacccgccgcctttcccgcaccagtcccgcccggggaggactctaaagatgttgccgcaccacacagacagccactcacgtcaagcgagagaattgacaagcagattagatacatcctcgatggcattagtgccctgagaaaagagacatgcaacaagtcaaacatgtgcgaaagctctaaagaggccttggccgagaacaacctgaatctgccaaagatggctgaaaaagacgggtgtttccagtcaggttttaatgaagagacttgtctcgtgaagataataaccggactgctggagttcgaagtgtatttagaatacttgcaaaacaggtttgagtccagtgaagaacaggcaagagcggtgcaaatgtctactaaagtcctgattcagtag

SEQ ID NO: 31772 - RNA, 1419 nt, synthetic construct
  misc_feature 1..1419: note = Description of Artificial Sequence: Synthetic coding sequence
  source 1..1419: mol_type = other RNA
atgactacatgtagcaggcagtttacgtctagcagctcaatgaaggggtcctgcggcattgggggaggtatcgggggcggttcttctcggatcagtagcgtcctcgccggcggcagttgcagagccccgagcacatacgggggcggcctgagtgtgtcgagctctcgattcagcagcgggggtgcctgtgggctcggcggaggatacggcggcggattttcttcatcatcctcctcctttggctctggcttcggtggtgggtacggggggggtctgggtgccggattgggcggaggcttcggcggcgggttcgctgggggggacggtctccttgtcggttctgagaaagtgaccatgcaaaatctgaacgatcgattggcatcatatctggacaaggtgagagcgcttgaagaagccaatgcagacctggaagttaaaattagagactggtatcagcggcagcgtccagcggaaatcaaagattatagtccctacttcaaaacaatcgaggaccttagaaacaaaattcttaccgccacagtggacaacgctaatgttttgttgcaaattgataacgctcggctggctgccgatgacttccgcactaaatacgagaccgaactgaatctgaggatgtccgttgaggcagacatcaacggcttacggcgtgtcctggatgaattgacacttgctagagccgatctggagatgcagatcgaatcattgaaagaagaactcgcataccttaagaagaatcacgaggaagagatgaatgcacttagaggccaggtaggcggcgatgtcaatgtggaaatggatgccgctccgggtgtcgacttgtcccgcattctgaatgagatgagagaccagtacgaaaagatggccgaaaaaaatcggaaagacgccgaagaatggttctttaccaagacagaggaactcaacagggaggttgcgaccaacagtgagttagtgcaaagtggcaaatctgaaatctccgagctcagacgaactatgcagaaccttgagattgaactccagagccaattatccatgaaagccagtctcgagaacagtcttgaggagactaagggacgctattgcatgcagttggcgcagatacaggagatgattggaagcgttgaggagcagctggcccagttaaggtgtgagatggagcagcagaaccaagagtacaagatactgttggacgtaaaaactcgcttagagcaggagattgctacttatcggagattattggagggcgaggatgcacacctctcttcatcgcagttttcttccggttcacagtcctctagagatgtgacaagcagtagtcggcagattaggactaaggtgatggacgtgcacgacgggaaggtggtgtccacacacgagcaggtactgcgaacaaaaaactag

SEQ ID NO: 31773 - RNA, 1416 nt, synthetic construct
  misc_feature 1..1416: note = Description of Artificial Sequence: Synthetic coding sequence
  source 1..1416: mol_type = other RNA
atgcaccccggagtgctggccgctttcttgtttcttagctggacccactgtcgtgctctgcctctcccatcagggggagatgaggatgatctgtccgaagaggacctccagttcgccgaacggtatctgcgctcttattaccatcccaccaacctagcaggtatactgaaggaaaacgccgcttctagtatgacggaacgcctcagggaaatgcagtcatttttcggactggaagttacagggaaacttgacgacaacacacttgacgtgatgaagaagcccagatgtggggttcctgatgtaggtgagtataatgtgttcccacgtactttaaagtggtcaaaaatgaatctaacttatcgcatcgtgaactacactcccgatatgacgcattccgaggtcgagaaggcctttaagaaagcatttaaagtatggtccgacgtaaccccccttaacttcacccgcctccacgacggaatcgcagatataatgatcagctttggaatcaaggaacacggagacttctaccccttcgatggcccttctggattacttgctcacgcctttccaccaggcccaaactatggcggcgatgcacattttgatgacgatgaaacttggacgtctagctctaagggatataaccttttcctagtcgcagcccacgaattcggccattcattaggattggatcactccaaggaccccggggcgttgatgttcccaatttacacctacactgggaaaagtcatttcatgctgcccgacgatgatgtacaaggcatccagagcctttatgggcctggagatgaggaccccaatcctaaacaccctaaaaccccagacaaatgcgatccctctctgagcctcgatgccattacaagcctgcgcggagaaacaatgattttcaaggacagattcttctggaggctacatccccaacaagttgacgctgaattatttctcacaaagtcgttctggcccgaactcccaaatcggattgatgctgcctacgagcatccctcccatgacttaattttcatatttagaggacgtaaattttgggcgctcaatggatacgatatcctggaggggtaccctaagaagatcagcgagctggggctgcccaaggaggtgaaaaagatctccgccgcagtgcactttgaagataccggaaaaactctcctgtttagtggcaaccaggtctggagatacgatgacacaaatcacattatggataaagattatccacggctaatcgaagaggacttccccggcatcggtgacaaggttgacgccgtttatgagaaaaatgggtatatttattttttcaatggacccatccaattcgagtattccatttggtccaacagaatcgtgcgagtcatgccagcaaatagtatcctgtggtgttag

SEQ ID NO: 31774 - RNA, 1470 nt, synthetic construct
  misc_feature 1..1470: note = Description of Artificial Sequence: Synthetic coding sequence
  source 1..1470: mol_type = other RNA
atgcaccctggagtgctggccgccttcttgttcctgagttggacccactgtagagccctaccactgccttcggggggcgatgaggacgacttaagcgaagaggacctccaattcgctgagcgctaccttcggtcttattatcacccaactaacttagccgggattctcaaggaaaatgccgcatcctcaatgaccgaaagactgcgcgagatgcagagcttcttcggtttagaagtgaccgggaagctggacgataataccctggacgtgatgaaaaaaccacgctgtggggtgccagatgtgggcgagtacaatgtgtttcctcgaacactaaaatggagcaaaatgaacttaacgtaccgcatcgtgaactacacccctgacatgacccatagcgaggtggaaaaagcttttaagaaggcctttaaagtgtggtccgatgttacccccctgaacttcactcgtctccacgacggaattgccgatataatgatctccttcggtatcaaagagcatggagatttctatccctttgacgggcccagtggactgctggcccacgctttccctcctggccctaactacggcggagacgcacatttcgatgatgatgagacttggacctcatcaagtaaaggatacaatctttttttagtagccgcccatgaatttgggcactctctaggactagaccacagcaaagaccccggagccttgatgttcccaatctacacatatactggcaagtcgcacttcatgctgcccgacgacgatgttcagggcattcagtctctctacggccctggagacgaggacccaaaccccaaacacccaaagactcccgacaaatgcgaccctagtctgtcactggacgcaatcacttctctacgtggagaaacgatgatattcaaggaccgatttttttggcgactgcacccacaacaggttgatgctgagcttttcctcactaaaagcttctggcctgaactacccaatcggatcgacgccgcatacgaacaccctagccatgacctgatcttcattttccgcggccgaaagttctgggcgttgaacggatatgatatccttgagggatatcccaagaaaattagtgagctcggcctgcccaaagaggtgaaaaaaatctccgccgctgtgcacttcgaggacaccgggaaaaccctattattcagcggaaatcaggtgtggcgatatgatgatactaatcacatcatggacaaggattacccaagactgatcgaagaggattttcctggaataggggataaagtggatgccgtgtacgagaaaaatgaatcacattcagtgactcaggctggtgtacattgcagaaatctctctagcttgcagcccccgcctccagggttcaaacgtttttcctgccttagtctctggtcgtcctgggactatagactttatctcttcttccagaggacccacaccgtgtag

SEQ ID NO: 31775 - RNA, 1152 nt, synthetic construct
  misc_feature 1..1152: note = Description of Artificial Sequence: Synthetic coding sequence
  source 1..1152: mol_type = other RNA
atgcatcccggagtgttggcagcttttctcttcttatcctggacacactgccgggctttgccgctgcccagcggtggcgacgaggatgacttatctgaagaggacttacagtttgcagaaagatacctgaggagttactaccaccctacaaacctggctggcatcttaaaagagaatgctgcctcctcaatgactgagcgcctgagggagatgcagtctttttttggtttggaggtgaccggaaagttggacgacaatacattggatgtgatgaagaaacctcgctgcggagttccagatgttggcgagtataacgtattcccaagaaccctcaagtggagcaagatgaacttgacctatcggattgtgaactacacacccgatatgacccactccgaagttgaaaaagcattcaagaaggctttcaaggtgtggagtgatgtgacacctctgaactttactcgattacacgacggaattgccgatattatgatatcctttggcattaaggaacacggagatttttatcccttcgatggccctagcggactcttggcacacgcttttcctcctggccctaattatggaggcgacgcccattttgacgacgacgagacttggactagctcttccaagggttacaatcttttcctggtggcggctcacgaatttggacactctctaggcttagatcactcaaaggatccaggggccttaatgttccccatctatacatatactggcaaatcgcacttcatgctgcctgacgacgatgtgcagggtatccaaagtttatatgggccgggggatgaggatcccaacccaaagcatccaaagactcccgataaatgtgatccatctctgagccttgacgcaatcacttcactgaggggcgagacgatgattttcaaagatcgattcttctggcggctgcatccacagcaagttgatgctgaactcttcttgacgaaaagcttttggcctgagctacctaatcgtattgatgcagcatatgagcatccatcccacgacctcattttcatatttcgaggacggaagttctgggccctgaacggatacgacattctggagggatatcccaaaaaaatctcagagctgggtctgcctaaagaggtgaataagttacaatag

SEQ ID NO: 31776 - RNA, 1743 nt, synthetic construct
  misc_feature 1..1743: note = Description of Artificial Sequence: Synthetic coding sequence
  source 1..1743: mol_type = other RNA
atgcctggttggccctggggattgctgctcaccgccgggacactttttgctgccctctctccggggcctcccgctccagctgatccgtgtcacgacgagggaggagcaccacgaggttgcgtgccagggctcgtcaacgccgctttgggccgggaagttctggcctcgagtacttgtggaagacccgctactcgggcctgtgacgcatctgatcctagacgagctcacagtcctgcgttgctgacatctcctggcggaactgcaagcccactgtgctggcggagtgaatcacttccccgcgccccacttaacgttacactgacagtgcctctagggaaagcattcgagctcgtttttgtctctctgcggttctgcagtgctcccccggcctctgtggctctgctcaagtcacaggaccatggccgtagctgggcacctctggggtttttttcatcgcactgtgacctggattatggccgcttgccagcccccgctaatggacccgcaggccccggcccagaagcactgtgttttccagctccactggctcagcctgatggctctggcctgctggccttctcaatgcaagattctagccctcccggacttgacctggacagctcccccgttctccaggactgggtcacagcgacagacgtgagggttgtattaacccgcccatctacggccggcgatccaagagacatggaagcggtcgtgccttattcttatgctgccactgatctgcaagtaggcggtagatgtaagtgcaacggtcacgcctccaggtgtttattagatactcagggccatttgatttgtgactgcagacatggcactgaaggtcccgattgcggcagatgtaaaccattctactgtgaccgcccatggcagcgcgccacagcccgggagtcacacgcctgtcttgcctgttcttgcaatggacatgcccgaagatgtcggttcaatatggagttgtacaggctcagcggaaggaggagcggaggagtgtgcctgaattgccggcataacaccgctgggcgacactgccactactgccgagaaggtttctaccgggatcctggccgcgcactgtccgatcggcgtgcttgcagagcgtgtgattgccatcctgtgggcgctgcaggaaaaacttgtaaccagactaccggacagtgtccttgcaaagacggcgtgactggactaacatgcaacagatgcgctcctggattccaacaaagtcggagccctgttgctccttgtgtgaagacaccaattccaggccctacagaagactcctcccctgttcagccccaggattgcgactcgcactgcaagcctgctcgaggctcatacaggattagcctgaagaaattttgcaaaaaagactacgcagttcaggtcgctgtgggggcacggggggaggccaggggtgcatggactcgctttcctgtcgctgtattggcagtgttccgatccggcgaagaacgcgcccgccgcggctccagtgcgctctgggtgccggctggagacgcagcctgcggatgtccacgattgctccccggaagaaggtaccttctgctgggaggaggcccgggtgccgccgccggaggcgccggaggacggggacctggacttattgctgcacgcggttcactcgtactgccctggcgagacgcctggacaagacggttacgtaggcttcaacggcgggaaaggcggggcaggtgctctgccgcttag

SEQ ID NO: 31777 - RNA, 651 nt, synthetic construct
  misc_feature 1..651: note = Description of Artificial Sequence: Synthetic coding sequence
  source 1..651: mol_type = other RNA
atgcccggaaacttgatgtcacaaacctctagggctgtgagcatttggaaatttcctgcaaaacttggaaaaactcacggacaccgggcactagaggctactggtatgatgcttagagtgctggtcggcgctgtgcttcctgccatgttacttgcagcacctccccccattaacaaactcgctctgtttccagataagtcagcttggtgcgaagctaaaaacattactcagatagtgggccactccggatgtgaggccaagtcgatccaaaaccgggcgtgtcttggccagtgcttctcctattctgtccccaatacctttccccagagcacggaatctctggttcactgcgatagctgcatgcccgcccaatctatgtgggaaatcgttaccctcgagtgccccggccatgaggaggttccaagggtcgacaagctcgtagaaaaaatcctccactgtagttgccaagcttgcggaaaagagccctctcatgaagggctttctgtctatgtccaaggtgaagatggacccggcagccagcccgggacccatccccatcctcatccccacccacacccaggcggccagacccctgaacctgaagatccacctggggctccccatactgaggaagagggagcagaggattag

SEQ ID NO: 31778 - RNA, 546 nt, synthetic construct
  misc_feature 1..546: note = Description of Artificial Sequence: Synthetic coding sequence
  source 1..546: mol_type = other RNA
atgatgctccgcgtgttagtgggtgccgtgttacccgctatgctactcgcagcccctccccccatcaataagctggcactgtttcccgataaatccgcatggtgtgaggctaagaatataacccagattgtgggacactcaggatgtgaagccaaaagtatccaaaaccgagcatgtcttggtcagtgcttctcttactctgtgcctaataccttcccccagtcgaccgagagtttagtgcactgcgattcctgcatgcccgcccagtctatgtgggagatcgtcactctcgagtgccccggacatgaggaggttcctcgagtggataagctcgttgaaaaaatcctgcactgcagctgccaggcctgcggcaaggaaccatctcatgaaggtctcagtgtttacgtccagggagaagacggccccggctcgcaacctgggacccacccacatccacacccacacccgcaccccgggggccagacccctgaacccgaagaccctcccggcgctccgcatactgaggaagaaggcgccgaagattag

SEQ ID NO: 31779 - RNA, 351 nt, synthetic construct
  misc_feature 1..351: note = Description of Artificial Sequence: Synthetic coding sequence
  source 1..351: mol_type = other RNA
atgatgttaagagtcctagtgggcgcagtcttacccgcaatgttactcgctgctccaccccccatcaataagcttgctttgttccctgataaatccgcctggtgcgaagccaaaaacatcacccaaattgtcggacactctggttgcgaagctaagagcattcaaaatagagcatgtctgggccagtgcttctcttactccgtaccaaacacctttccacaatcaactgaatcgctggtacattgcgattcttgcatgcccgcccaaagtatgtgggaaattgtcaccctggagtgtccaggccacgaggaggtcccccgtgtcgataaactggtcgagaagattttgtag

SEQ ID NO: 31780 - RNA, 492 nt, synthetic construct
  misc_feature 1..492: note = Description of Artificial Sequence: Synthetic coding sequence
  source 1..492: mol_type = other RNA
atgctgcgcgtgctggtcggtgctgtgcttcccgctatgctgctggccgcccccccaccaattaacaaattggcattgtttccggacaagtcagcttggtgcgaagcaaagaatatcacacaaatcgtcggtcactcgggctgcgaggcaaagtcaatccaaaatcgggcctgtctgggccaatgtttcagctactctgtcccaaacacattccctcagtcaaccgaatctcttgtgcattgtgactcatgtatgccagcacaatccatgtgggagatcgttaccctcgagtgccctggacatgaggaagtgcccagggtggataagctagtcgaaaagatcctccattgctcttgccaggcatgtggaaaggaaccatctcatgaaggcctgtctgtctacgttcaaggcgaggatggaccggggtcacagccgggtacacatccacacccccacccacacccccacccaggtggccagacacccgagtag

SEQ ID NO: 31781 - RNA, 354 nt, synthetic construct
  misc_feature 1..354: note = Description of Artificial Sequence: Synthetic coding sequence
  source 1..354: mol_type = other RNA
atgatgttacgtgttttagtgggagctgttttgcccgccatgctcctggccgctcctccgcccatcaacaagcttgctctattccccgataagagcgcatggtgcgaggccaaaaacataacacaaattgttggacactctggatgcgaggcaaagtctatccagaacagggcttgtctgggtcagtgcttcagctactcggttcccaatacgtttccacagtctaccgaaagcctggtccattgcgatagttgcatgcctgcgcagagtatgtgggaaatcgtgacacttgaatgcccggggcatgaagaagtgccacgagttgataagttagtcgaaaagatcctgcactag

SEQ ID NO: 31782 - RNA, 330 nt, synthetic construct
  misc_feature 1..330: note = Description of Artificial Sequence: Synthetic coding sequence
  source 1..330: mol_type = other RNA
atgatgctcagagttctagttggcgctgtcctccctgccatgctgctcgccgctccccctccaattaacaaactcgccctcttccctgataaatcagcatggtgtgaggcaaagaacatcacccagatcgttggccactccgggtgtgaagccaagtcaatccaaaaccgtgcctgccttgggcagtgcttttcatactccgtgcctaatacgttcccacagtcgaccgaatctttagtgcattgcgactcttgcatgcctgcacaaagtatgtgggagatcgttactcttgaatgccctggccatgaagaagtgccaagggtcgattag

SEQ ID NO: 31783 - RNA, 387 nt, synthetic construct
  misc_feature 1..387: note = Description of Artificial Sequence: Synthetic coding sequence
  source 1..387: mol_type = other RNA
atgatgctgcgggtcctcgtaggagctgttctgcccgcaatgctgttagccgccccgccacccattaataaactcgccctgtttcccgataaatcagcatggtgtgaagccaagaatattacccagatcgtcggacactctggttgcgaggccaagtcaatccagaacagagcgtgtcttggccagtgttttagctactctgtgcccaacacgtttccacagagtaccgaatccctcgttcactgtgactcttgtatgccagctcagtccatgtgggaaatagtaacgttagaatgtcctggtcacgaagaagtgccgagagtagataagctggtcgaaaagattctgcactgctcctgtcaagcttgcgggaaagagcctagctag

SEQ ID NO: 31784 - RNA, 543 nt, synthetic construct
  misc_feature 1..543: note = Description of Artificial Sequence: Synthetic coding sequence
  source 1..543: mol_type = other RNA
atgctgagggtgctcgtcggtgccgtgctcccagccatgctcctcgcagccccaccacctataaataaactggccctgttccctgataaatctgcctggtgcgaggcaaaaaacattactcagatcgtgggtcacagcggctgtgaggcaaagtctatccaaaaccgtgcttgcctgggccaatgtttttcctatagtgtgcctaacaccttcccacagtccaccgaaagtttagtgcattgcgatagctgcatgcctgcacagtctatgtgggaaatagttaccctcgaatgtccgggccacgaagaagtgccgagagtcgataagctggtagaaaaaattctccattgttcctgtcaggcctgcgggaaggagcctagccatgagggactgtcagtatacgttcagggagaagacggacctggaagccagcctggtactcacccccatccccatccacacccccatcccggcgggcagacaccagagcctgaggaccctccaggggcaccacacaccgaggaagagggcgcagaagactag

SEQ ID NO: 31785 - RNA, 534 nt, synthetic construct
  misc_feature 1..534: note = Description of Artificial Sequence: Synthetic coding sequence
  source 1..534: mol_type = other RNA
atggtgcttttgtcaacattgggcattgtctttcagggagagggcccaccaattagttcttgcgacacaggtactatggcgaattgtgaacgcactttcatcgcaataaagcctgatggcgtgcaacgcggcttagtgggagagataattaagcggttcgaacaaaagggatttcgtctagttgggctgaagtttatgcaggcctctgaagaccttctgaaggagcactacgttgatctgaaagatcggccattctttgcaggcctggtcaaatacatgcatagcggtcccgtcgtggcaatggtgtgggagggactcaatgtcgtaaaaaccgggagggtgatgttgggcgaaacaaaccccgcagatagtaagcccgggactatccgcggagacttttgcatccaagtggggagaaacataattcatggcagcgactcagtggaatccgccgagaaggaaattggcctttggtttcaccccgaagagcttgtggactacacgtcatgcgctcagaattggatctatgaatag

SEQ ID NO: 31786 - RNA, 429 nt, synthetic construct
  misc_feature 1..429: note = Description of Artificial Sequence: Synthetic coding sequence
  source 1..429: mol_type = other RNA
atgaagtcccctcatgtgcttgtctttttgtgcctgctggtggcgttggtgacaggaaatctcgtgcagttcggcgtaatgattgagaagatgacagggaaaagcgccctccagtataacgattacgggtgttactgcggaatcgggggtagtcactggccggtggatcagacagattggtgttgccacgcccacgattgctgttatgggcgacttgaaaaactaggatgcgagccaaaacttgaaaaatatctgttcagtgtgtccgagagagggattttttgtgccggtcgaacaacatgtcagcgccttacctgcgaatgtgataagagagcagcactctgtttccgacgtaacttgggaacttataacagaaaatatgcccactaccccaacaaattgtgtactggcccaaccccaccctgctag

SEQ ID NO: 31787 - RNA, 636 nt, synthetic construct
  misc_feature 1..636: note = Description of Artificial Sequence: Synthetic coding sequence
  source 1..636: mol_type = other RNA
atggccgatggagcaaaagcgaacccaaaaggattcaagaagaaagttttagatcgttgtttctctgggtggcgcggaccacgattcggggcatcttgtccttcccgtacctcccggagctctctgggcatgaagaagttttttaccgtcgcaatactggccggatctgtccttagcacagcacatggctctctcttaaacttaaaagccatggtggaagcagttacaggcagatctgccattttatctttcgtgggatacggatgctattgtggactggggggacgcggccaaccaaaggacgaggttgactggtgttgccatgcgcacgactgttgctaccaggaactctttgatcagggctgccatccttatgtagatcactacgaccataccattgagaataatacagagatagtgtgcagcgacctgaataaaactgaatgtgacaaacagacttgcatgtgtgacaaaaatatggtgctctgtcttatgaatcagacataccgagaggaataccggggatttctgaacgtctattgtcaagggcccacccctaactgctcaatctacgaaccaccccccgaagaggtaacttgctcccatcagagtcctgcacctcccgccccaccctag

SEQ ID NO: 31788 - RNA, 570 nt, synthetic construct
  misc_feature 1..570: note = Description of Artificial Sequence: Synthetic coding sequence
  source 1..570: mol_type = other RNA
atggcactgctgtctcggccagctctcaccctgctgctcctgctgatggccgcagtggtgaggtgtcaagaacaagcccagaccactgactggcgggctaccttaaaaacaatcaggaacggagtgcacaaaattgatacgtacttaaatgctgctctcgatcttctaggcggcgaggatggattgtgtcagtacaaatgtagtgatggtagcaaacctttccccaggtatggctataaaccttccccccccaatgggtgcggcagccccctgttcggcgtccacctgaacatcggcatccccagtctgaccaagtgctgcaatcaacatgaccggtgctatgaaacttgcggtaagtccaagaacgattgcgatgaagagtttcagtattgcttatcgaaaatctgccgcgatgtccagaagacgctcggcctgacccaacatgtgcaagcttgtgaaaccaccgttgagttactttttgattctgtgatccatctaggttgtaaaccttatctcgattcccagagagccgcatgtcggtgtcattacgaagagaagacagatttgtag

SEQ ID NO: 31789 - RNA, 213 nt, synthetic construct
  misc_feature 1..213: note = Description of Artificial Sequence: Synthetic coding sequence
  source 1..213: mol_type = other RNA
atggccctactgagtcgccccgccctcacactactcctgctgctcatggctgccgtagtccgttgccaggaacaggcccagacaaccgattggcgcgctaccctgaagacaataaggaacggagtccataaaatcgatacctaccttaatgcagccttagatctgcttggcggagaagacggactctgtcaatacaagtgctctgatgcctag

SEQ ID NO: 31790 - RNA, 477 nt, synthetic construct
  misc_feature 1..477: note = Description of Artificial Sequence: Synthetic coding sequence
  source 1..477: mol_type = other RNA
atggcactcgaggtgttgatgctgttagccgtactgatatggaccggtgctgagaacctccacgtgaagatcagttgttcgttggattggctgatggttagcgtgattcctgtggccgaatcccgaaacctgtacatcttcgccgacgaacttcatctcggaatgggctgtccagcgaaccgcattcacacgtacgtttatgaattcatctatttggtcagagattgcggaattaggacaagagtagttagcgaagagaccctgctgttccagaccgaactctattttacccctaggaacatcgaccacgatcctcaggaaattcacctggagtgcagcacatcccgaaaaagcgtctggctcacacccgtatcgaccgaaaatgagattaagctagacccatccccatttattgcagattttcagacgacagcagaggaattaggccttctgtcaagcagcccaaatttattatag

SEQ ID NO: 31791 - RNA, 1038 nt, synthetic construct
  misc_feature 1..1038: note = Description of Artificial Sequence: Synthetic coding sequence
  source 1..1038: mol_type = other RNA
atgagcctattcggtttactgctgcttactagcgctttggcgggtcagaggcagggcacccaggctgagagcaaccttagtagcaagtttcagttttcaagtaataaggagcagaacggagtgcaggacccccagcacgaacgaatcatcacggtgagcactaacggtagtattcactcacccagatttccccatacttatcctcggaataccgttctcgtatggaggctggtagcagtggaggagaacgtctggatccagttgacatttgacgaacgctttgggctggaggaccccgaagatgatatctgtaaatatgactttgtcgaggttgaggaaccctctgacgggactatcctgggcagatggtgcggctcaggtaccgtgccaggcaaacagatcagcaagggaaatcagattagaatcaggttcgtgtcagacgagtactttccaagcgagcccggattttgtatccattacaacattgttatgcctcagttcaccgaagccgtaagcccaagcgtactcccaccttccgccctccccctggatctcctaaacaacgccattactgcgttttccacactggaggaccttatccggtatctcgaacctgaaaggtggcagctcgatcttgaagatctgtacaggcctacttggcaactattaggcaaggcgtttgttttcggacgcaagtctcgggtggttgatttgaacctgttgaccgaagaagtgagattgtattcgtgtaccccgcgtaacttctccgtatccatcagagaggaactcaaacgaacagatactatcttttggccaggatgtctgcttgtcaagagatgcggaggcaattgcgcctgttgcctccacaactgcaacgagtgtcagtgcgtcccaagcaaagttaccaaaaaataccatgaggtgctacagctgagacctaaaaccggggtaagagggctccacaaatccttaacagatgtggcactagagcatcatgaagaatgcgactgtgtatgtcgaggctctactggcggctag

SEQ ID NO: 31792 - RNA, 549 nt, synthetic construct
  misc_feature 1..549: note = Description of Artificial Sequence: Synthetic coding sequence
  source 1..549: mol_type = other RNA
atgccacaatttacagaagccgtatctcctagtgtcctgccaccctcagcattacccctcgaccttctcaacaatgccattacagccttcagcaccctagaggatctaatcagatacctggaacccgagagatggcagctggacctggaagacctgtatagaccaacctggcaactgctgggcaaggccttcgtctttggccgtaaatcaagagtggttgacctgaatctactcactgaggaggtccggctgtactcctgcacacccagaaacttcagtgtcagcatccgagaggaattgaaacgcacagacactattttttggccagggtgcctgcttgtcaaacggtgcggggggaactgcgcctgctgcctgcataattgtaatgagtgccagtgtgtgccaagtaaggttactaagaaatatcatgaagtgctacagcttcgaccgaaaactggcgttagaggtctgcataaatcgctgacagatgtcgcactcgaacatcatgaggagtgtgactgtgtgtgccgcggctctaccggaggctag

SEQ ID NO: 31793 - RNA, 573 nt, synthetic construct
  misc_feature 1..573: note = Description of Artificial Sequence: Synthetic coding sequence
  source 1..573: mol_type = other RNA
atgatgcagtacacctggttactaacgaaacaattcaccgaggccgtgagcccctctgtcctaccaccaagtgcgctcccgcttgacctcctgaacaacgcgatcacggcgtttagtacgcttgaggatctgatccggtacttggaacctgaaagatggcagttggaccttgaagatttgtatagacctacttggcaactcctcggcaaagcctttgttttcgggaggaagtcacgcgtggtggatctgaacctgctcacagaggaggtgcgcctttattcttgcactccccgaaacttcagcgtctctattagggaagaactaaagagaaccgataccatattctggcctggatgcttgctcgttaaacgatgcggaggaaattgcgcatgttgtctccacaattgtaacgaatgtcagtgcgtgcctagcaaagtgactaagaagtatcacgaggttttgcagctgcgccccaagacaggtgtgagaggtcttcacaagagcctcaccgacgtagccttggagcatcacgaagaatgtgattgcgtgtgcagaggttcaactgggggttag

SEQ ID NO: 31794 - RNA, 504 nt, synthetic construct
  misc_feature 1..504: note = Description of Artificial Sequence: Synthetic coding sequence
  source 1..504: mol_type = other RNA
atgagtctttttgggctccttcttctgacaagtgcattagctggccagcggcagggcacccaggccgagagtaatttatcgagtaagttccaattctccagcaataaggagcagaatggagtgcaggacccgcagcatgaaagaataattacagtgtctactaatggctcaatccactcccctcgctttcctcacacttaccctcgaaatacagttcttgtgtggagacttgtggccgttgaggagaatgtttggattcagctcacctttgatgaacggtttggattggaggacccagaggatgatatctgtaaatacgatttcgtggaagtcgaagaaccaagcgacggcactattctggggcgatggtgtggcagtggaacagtgccaggcaaacagatctccaagggcaatcagataaggattcggttcgtatctgacgaatactttcccagtgagccctcaaatcgaggaggcaagatcatccagctccacacatcctag

SEQ ID NO: 31795 - RNA, 636 nt, synthetic construct
  misc_feature 1..636: note = Description of Artificial Sequence: Synthetic coding sequence
  source 1..636: mol_type = other RNA
atgcgtactctcgcgtgtctgctcctactggggtgtgggtacttggcccatgtactggctgaagaggctgagataccaagagaagtcattgagcggctggcgcgcagccagattcactccatccgcgatttgcagcggcttttagagatcgattctgttggctcagaggactccctagatacatcactcagagcacatggagtgcacgccaccaagcatgtgcccgagaaacggcccctcccaattcgacgtaagagaagtattgaagaggctgttcctgctgtctgcaagactcgtaccgtaatctatgaaataccccggtctcaggtcgacccgacaagcgccaatttcctaatttggcccccttgcgttgaggtaaagagatgcacaggctgttgcaacacgtcttcagtaaaatgccagccctccagagttcatcacaggagcgtgaaggtagctaaagtggaatatgtcaggaagaaaccgaagcttaaggaggtccaggtgagacttgaggaacatttggaatgcgcctgtgccaccacttcattaaatcccgactaccgcgaagaggatacaggcagacccagggagtccggtaagaaaagaaagcgtaaaaggctcaaacctacatag

SEQ ID NO: 31796 - RNA, 591 nt, synthetic construct
  misc_feature 1..591: note = Description of Artificial Sequence: Synthetic coding sequence
  source 1..591: mol_type = other RNA
atgaggactctggcatgtctgttgcttcttggctgtggctacctggcccacgtcctagctgaggaagccgaaatcccccgcgaggtaatagagcgcctggcgcgttcacaaatacactcaattagggaccttcagcggctgctcgagattgacagcgtcgggtctgaggattcccttgatacttcccttagggcccacggggttcatgccaccaagcatgtcccggaaaaaagaccgctacccattcgccgcaagaggtcaatcgaagaagccgtacccgcagtatgtaagacccgtacggtgatttatgaaatcccgagatcccaggtcgatcccaccagcgctaactttctgatatggcccccctgcgttgaagtgaaaaggtgtaccggctgctgtaacactagctctgtcaaatgtcagcccagcagggtgcatcacagaagcgtgaaggtagccaaagtagaatacgttaggaagaagcccaaacttaaggaagttcaagtcagattggaagagcatctggaatgtgcttgtgccaccacatctctcaaccccgactatcgagaagaagacaccgacgtgagatag

SEQ ID NO: 31797 - RNA, 162 nt, synthetic construct
  misc_feature 1..162: note = Description of Artificial Sequence: Synthetic coding sequence
  source 1..162: mol_type = other RNA
atgcgaacactggcttgtcttctgctcctgggctgcggttacctcgcacatgtgttggcagaagaggcagagatccctagggaagtaatcgaacggctcgcccgtagccaaatccactctattcgtgatctgcagcgtttactggaaatagatagtgtatag

SEQ ID NO: 31798 - RNA, 1128 nt, synthetic construct
  misc_feature 1..1128: note = Description of Artificial Sequence: Synthetic coding sequence
  source 1..1128: mol_type = other RNA
atgatgaagaagaacaactccgccaagcggggacctcaggacgggaaccagcagcctgcacccccagagaaggtggggtgggtacggaaattttgcggcaaaggtatttttagagagatatggaagaacagatacgtggtgctcaagggcgaccagctctatattagtgaaaaagaggtgaaggatgaaaaaaatatccaagaggtttttgatctctctgactacgagaaatgcgaagagctcagaaagtcaaaatccaggagcaaaaaaaaccatagcaagttcactcttgcccacagcaagcagccaggaaacactgcaccaaacctcatctttctggccgtgtctcccgaggaaaaagaatcctggataaatgcgctgaacagtgcgataaccagagctaaaaataggattcttgatgaggcgtctactagtacctctgatggtatgctgactctggatctaatacaggaggaggatcctagccctgaagaacccaccagttgcgcagagagttttcgcgttgatttggacaaatctgttgcccaattggcaggctccagaaggcgagccgatagcgatcgaattcagcctagcgctgaccgggcttcctcacttagccggccctgggaaaagaccgataaaggagccacttatacaccccaggcccctaaaaagttgacccctaccgagaagggcaggtgcgccagccttgaggaaatcttaagccagcgtgacgccgctagcgctagaaccctgcaattacgggctgaagagccccctacccccgctctccccaatccagggcaattgtcccgcatccaggacttggtggcacggaagctggaagagacacaagagctgctcgcagaggtccagggattaggagatggcaagaggaaggcgaaggaccccccacggagtccccctgattccgagtcagaacagttgctcttggaaaccgaaaggctgctgggcgaggcgagtagcaattggagtcaagcgaagagagttctacaggaagttcgggagctcagagacctgtacagacaaatggatcttcaaactccagattcccacctgcgccagacaacaccccacagtcagtacaggaaatcactgatgtag

SEQ ID NO: 31799 - RNA, 1140 nt, synthetic construct
  misc_feature 1..1140: note = Description of Artificial Sequence: Synthetic coding sequence
  source 1..1140: mol_type = other RNA
atgtctagcccgtccctctcggatctcggaaagcgggagccggctgccgcagcagatgaaaggggaacacaacagcgccgggcttgtgcaaatgcaacctggaacagtattcataatggcgtgatagccgtctttcagcgcaaggggctacctgatcaagagcttttcagcctcaacgagggcgttaggcagctcttaaaaacggagctaggtagcttttttaccgagtaccttcagaatcaactgctgaccaagggcatggtaatactgcgggacaaaattaggttttatgagggacaaaaattgctcgatagcctcgcagagacctgggattttttcttctccgacgtgctgcccatgctccaggcaatcttttacccagtgcagggcaaggagccctcagttagacagcttgctctcttgcatttccgcaacgcaattaccctttctgtgaaactcgaagatgctttggcccgcgcccatgccagggtcccacccgccatcgttcagatgcttctcgtcctgcaaggcgtgcacgagtcccgaggtgtgacagaagactatctgcgcctcgagacactggtgcaaaaagtcgttagcccctatctaggcacctatggactgcattcctcagagggcccctttacacattcttgcattctggaaaaacgactgcttcgaagaagccggagcggcgatgtgctggcaaagaatcccgtcgtgagatccaagtcttataacacgcctctcctcaatcctgtccaagaacacgaagcagaaggcgccgcagctgggggcactagcattcgacgtcacagcgtctccgaaatgacttcctgccccgagcctcagggtttttcagatccaccaggtcagggccctacagggacttttcgctcttcaccggccccccattctggaccatgccctagcaggttatatcctactacacaaccacctgagcagggactggatccaacaagatcgtcattaccccggagttcaccagagaatctcgtagaccagattttagaaagcgtcgatagtgattctgagggtattttcattgactttgggagaggacgcggttctggcatgtcagaccttgaagggagcggcggtagacagagtgttgtgtag

SEQ ID NO: 31800 - RNA, 1032 nt, synthetic construct
  misc_feature 1..1032: note = Description of Artificial Sequence: Synthetic coding sequence
  source 1..1032: mol_type = other RNA
atgaaagagatcaacctgttgccggatcgtgtgttatctactccttcagttcagctggtacagtcttggtacgtgcagagcctcctcgacattatggagttcctagataaagatccagaggaccatcgaaccctctcgcagtttaccgatgcactggttaccatacggaatcgccacaatgatgttgtgccgactatggctcagggggtgctagagtacaaggatacatacggcgatgatccagtgtccaatcagaatatccaatacttccttgaccgcttctacctgagtagaatcagcatcaggatgctcatcaatcagcataccctcatcttcgacggctcaacaaatcctgctcaccccaagcatattggttctatcgatcccaactgtaacgtaagtgaagttgttaaagacgcctatgacatggccaagctgctctgcgataaatactacatggctagccccgacctggaaattcaggagatcaacgcagcaaacagcaaacagccaattcatatggtttacgtgccctcgcatctataccacatgttgttcgaactattcaagaatgcaatgcgggcgaccgtggagtcgcacgaatcctctttaatactcccccccatcaaggttatggtcgcccttggcgaagaagatttgagcataaaaatgtctgatcgagggggaggtgtcccactgcggaagatagagagactgttctcatacatgtacagcactgcacccacgcctcaaccaggaaccggaggcacacccctcgctggttttggatacggcctccctatttccagactctacgccaaatatttccaaggggacctgcagctgttcagcatggagggttttgggaccgacgccgtgatctacctaaaggccttaagcacggactctgtggaaagattgccagtgtacaacaagagcgcttggcgccactatcaaacaattcaggaagccggagactggtgcgtcccgtcaactgagccgaagaacacaagcacatacagagtgtcctag

SEQ ID NO: 31801 - RNA, 4785 nt, synthetic construct
  misc_feature 1..4785: note = Description of Artificial Sequence: Synthetic coding sequence
  source 1..4785: mol_type = other RNA
atgaaactgtatgtttttctcgttaacactggcacgacactgacctttgatacagagctgacagtccagaccgtggcagatctcaagcatgccatccagtcaaagtacaagatcgcaatccaacatcaagtgcttgtagtgaacggcggagaatgcatggctgcagatcggagagtatgtacttacagcgccgggacagacactaatcctatttttctgtttaataaagaaatgatcctctgcgatagacctccagcaatccccaagaccacatttagtactgagaacgacatggaaataaaggtggaggagtccttaatgatgcccgccgtgtttcacacagtcgctagtcgtactcagttagctctcgaaatgtatgaggtcgcgaagaagctgtgctcattctgtgagggcctggttcatgatgagcacctacagcaccaaggatgggccgcaataatggcaaacctcgaggactgttcaaacagttatcaaaagttgctgtttaaatttgagtctatatattcgaattacttgcagagcatcgaagatataaaactgaagctcactcatttgggtaccgcagttagtgtgatggctaagattccactgttggaatgtctcactcgacatagttacagagagtgtctgggaaggctggactcacttccagagcacgaggacagcgagaaggctgaaatgaaacgttcaactgagctcgtcctttccccggacatgccccgaaccactaacgagtctctgctgacctcattccctaagagcgtcgaacacgtgagcccagataccgctgatgcggaatcagggaaggagattcgagaatcttgccagtccaccgtgcatcaacaagatgagactacaatagatacaaaagacggggacctgcctttttttaatgtgtcactgctggactggattaatgtgcaagacaggccaaacgacgtagaatcgctcgtgcggaagtgctttgattccatgtcgagactggatccgcgtatcattcgaccttttatagccgaatgtaggcagacgatcgccaaattggacaaccagaatatgaaagcgatcaaggggctggaagatagactttatgccctagatcagatgatcgcgtcctgtggtagactcgtgaatgagcagaaggaattagctcagggattccttgcgaatcagaagagggcagaaaacctgaaggatgcatcagtgctaccagacttatgtctatctcatgctaatcaattgatgattatgttacagaaccatcgaaagctcctggacatcaaacagaaatgtacaaccgctaagcaggagctcgctaacaatttgcatgttaggttaaagtggtgttgttttgttatgctgcatgctgaccaggatggcgagaaacttcaagcactgcttcgtctggtcattgagctgttagagcgggtcaagatcgtggaagcactctccaccgtcccccaaatgtactgcctggcagtcgtcgaagtagtgcgtagaaagatgtttattaagcactaccgcgagtgggccggagccctggtcaaagacgggaaaagactgtatgaagctgaaaagagtaagagggaatccttcggcaaactatttcgcaaatctttcttgagaaacagactgtttagggggcttgactcatggcccccctccttttgcacccaaaaacctcgaaagttcgattgtgaactgccggacatttctctgaaggatttgcaatttctccagtcgttttgccccagcgaggtgcagccgttcctaagggtaccactgctatgtgacttcgagccactccaccagcacgtgttggcactgcataacttggtgaaggccgcacagtccctggacgaaatgagccagacaattaccgaccttctgagtgaacagaaagctagcgtttcccagacttcgccgcaaagcgcctcttctccgcgaatggagtccactgccggtatcactacaactacaagcccaagaactcccccccctttaactgtccaggacccgctatgcccagctgtgtgccctttagaggagctctccccagattccattgacgcccatacgttcgatttcgagaccatccctcaccctaatatcgagcagaccattcatcaagtaagtttagatctggatagtctcgctgagagccctgagagcgatttcatgagcgccgttaatgagtttgtgatagaggagaatttgtcgagccccaatccgatcagcgaccctcagtctcccgagatgatggtggaatctctgtatagctcagtgatcaatgcaatcgactcacggcgaatgcaggataccaatgtgtgtgggaaggaggatttcggcgaccatacttcactgaatgttcagttggagagatgtagggtggtggcccaggattctcacttcagcatccagacgataaaagaggatctgtgccactttagaaccttcgttcagaaggagcagtgcgacttcagtaacagccttaaatgcaccgccgtggagatccgtaatattatcgaaaaagtcaaatgttctctagaaattacattaaaagaaaagcatcagaaggagcttctgtctttaaaaaatgagtacgagggcaagcttgacggtctgatcaaagagaccgaggagaatgagaataagattaagaaactcaagggggagttagtttgtttggaggaggttctgcagaataaggacaacgaatttgcactggttaagcacgaaaaggaggctgtcatctgccttcaaaatgaaaaggatcagaaattgttggaaatggagaacatcatgcacagccagaattgcgagatcaaagaactaaaacagtcaagggagatcgtgcttgaagacttaaaaaagctgcacgtggaaaacgatgagaaactccagctgctcagagcagagctacaatccctggaacagtctcacttgaaagaactcgaggacaccctgcaggtcaggcacatccaagagttcgagaaagttatgacggatcatagggtatcgctcgaggaactgaagaaagagaatcagcagattatcaatcagatccaagagagccatgccgaaatcatccaagaaaaggaaaagcagctgcaagaactcaaactaaaggtatctgatctgagcgacactagatgcaaactggaagtggaactcgccttgaaagaggctgagaccgatgagatcaagatcctcttagaggaaagcagagcgcagcaaaaagagaccctgaagtctctactggaacaggaaacagagaacctccggaccgaaatcagtaagctcaaccagaagatccaggacaacaatgagaactaccaggtggggctcgccgagcttcgcactttgatgactatcgaaaaagatcaatgtattagcgaactgatttctaggcacgaagaggaatctaatattcttaaggccgagctcaacaaagtgacctcgctccacaaccaagcattcgagatagagaagaacctgaaagagcagatcattgagttgcagtccaaactcgatagcgagctgtccgcactcgaaaggcaaaaggatgagaaaattacccagcaggaggaaaagtatgaagctatcatacagaatctggagaaagaccgccagaagctggtcagttcccaggaacaagaccgcgagcagctgatccagaaactcaactgcgaaaaagacgaagccattcagaccgcccttaaggagtttaagctggaacgagaggtggttgaaaaagaattgcttgaaaaagttaaacacctggaaaatcagattgcaaagagtccggctatcgactccaccagaggagacagctcctccctggtagcggagctgcaagagaaactgcaagaggaaaaagctaagtttctggaacaactggaggagcaggaaaaacggaaaaacgaagagatgcagaacgttcggacttccctgatcgccgagcagcagaccaactttaacacggtcctcacccgtgaaaaaatgagaaaagaaaatatcattaacgatctcagtgataagctgaagtcaaccatgcagcagcaagaaagggacaaggacttaatcgaaagcctgtcggaggatagagctcgcctgcttgaagagaaaaagaagttggaagaggaggtgtccaagcttagatcctctagcttcgtgccaagtccatatgtggctacagccccagaactttatggcgcatgtgccccggagctaccaggcgagagtgatcggagtgccgtcgagacagccgatgaaggcagagtggacagtgccatggaaacgtcgatgatgagtgtacaggaaaacatccacatgctgagtgaagaaaaacagcggattatgttactggagaggacactgcagttaaaagaagaggagaacaaaagactaaatcaaaggctgatgtctcaaagcatgtcttcagtgtcaagtcgacatagcgagaagatagctattcgcgatttccaggttggcgacttagtgctgatcatccttgacgagaggcatgacaattacgtgctattcacagtgagcccgaccttgtacttcttgcactccgagtcgcttcctgcattggatcttaagcccggcgagggcgcctctggggccagtcgacgaccttgggtgctaggcaaagtgatggaaaaagagtactgccaggccaagaaggcgcagaacagattcaaagttcctcttggcacaaaattttaccgagtcaaggccgtaagttggaataaaaaggtctag

SEQ ID NO: 31802 - RNA, 471 nt, synthetic construct
  misc_feature 1..471: note = Description of Artificial Sequence: Synthetic coding sequence
  source 1..471: mol_type = other RNA
atggcacctgcccgggccgggttttgcccccttctgctcctcctgctgcttgggctgtgggtggctgaaattccagtgtccgccaaaccaaagggcatgacttcctcacaatggttcaagattcaacacatgcaaccatcgcctcaggcctgtaatagtgccatgaaaaatatcaataaacatacaaagaggtgcaaagatcttaacacatttctccacgaacccttttcatccgtagccgccacatgccaaacccctaagatcgcctgcaagaatggcgacaaaaactgccatcagagccacggcgcagtgtcgttgaccatgtgcaagctcacttccggcaagcaccctaattgcagatataaggagaaacgtcagaacaagagctacgtagttgcttgcaaacccccacagaagaaggactcccagcagtttcacctggttcccgtccacttagaccgcgtattgtag

SEQ ID NO: 31803 - RNA, 471 nt, synthetic construct
  misc_feature 1..471: note = Description of Artificial Sequence: Synthetic coding sequence
  source 1..471: mol_type = other RNA
atggcccccgcccgcgctggattctgccctctgctgcttctgcttctactggggctgtgggtcgccgagatccccgtgtcagccaaacctaagggaatgacctcctctcagtggtttaaaatccaacacatgcaaccatctccccaggcatgcaactccgccatgaaaaacattaacaaacacactaagcgttgcaaagatctcaacactttcctccacgagccttttagcagcgtcgccgcgacctgccaaacccccaagattgcctgtaagaacggcgataagaactgtcatcagtcccatggagccgtaagcctcacaatgtgcaaacttacctcaggaaagcatcctaactgccgctacaaggagaaacgccagaacaaatcctatgttgtggcctgtaagcccccacagaaaaaggactctcagcagttccatttggttccggtccatcttgacagagtattatag

SEQ ID NO: 31804 - RNA, 621 nt, synthetic construct
  misc_feature 1..621: note = Description of Artificial Sequence: Synthetic coding sequence
  source 1..621: mol_type = other RNA
atgctgcctccagccattcacttctacctgctgcctcttgcatgtattctcatgaagagttgccttgccttcaaaaatgacgctactgagatcttgtattcacatgtggtcaaacccgttcccgctcacccttcaagcaactcgaccctcaaccaggccaggaacggaggccgccacttttcaaatactggtctggaccgaaacactcgcgtacaggttggctgtagagagctacggagcacaaagtatatttcggatggacagtgtacctcaatcagtcccctaaaggagctcgtctgtgccggagagtgcttaccactgcctgtgttacccaattggattggcggcggatatggaacaaaatattggtcccggaggagctctcaggaatggagatgcgtgaatgataagacaaggacccagcgcatccagttgcagtgccaggatggcagtacaagaacctataaaataactgtcgttacagcatgcaagtgcaagcggtatacgcgccagcataatgaatcttctcataactttgaaagcatgtctcccgcgaaacccgtgcagcatcacagggagaggaagcgcgcatccaaatccagcaagcatagtatgagttag

SEQ ID NO: 31805 - RNA, 693 nt, synthetic construct
  misc_feature 1..693: note = Description of Artificial Sequence: Synthetic coding sequence
  source 1..693: mol_type = other RNA
atgctgcccccggcaatacacttctacctgctgcctctggcctgcattctcatgaagtcatgccttgcgtttaaaaacgacgccacagagatcctatattcacacgtggtgaaaccagttccagcgcatcccagctctaatagcaccctgaaccaggcccggaacggcggaagacacttttcgaataccggcctagacagaaacagaacagaatcccttacacgacagaattacttttggctatttcctggtgcctttctcaggcagttacaggaggcccgcgttcaggtcggatgtagggaactacgcagcaccaagtatatctccgacggccagtgtacatccatctcacctcttaaagagcttgtgtgtgccggcgagtgtcttcctttacccgtgctgccaaattggataggggggggatacggcacaaagtactggtcccgaagaagttcccaggaatggcgatgcgtgaatgacaaaacgcgcacccagaggatccaattacagtgccaagacggcagtacacgcacatacaaaatcaccgtggtcacagcttgtaaatgtaagcgatatacgcgccaacataatgaatcatcccacaattttgagtcaatgagtccagcgaagcccgttcagcatcaccgcgaaagaaaacgagccagcaagtcttctaaacactcaatgtcctag

SEQ ID NO: 31806 - RNA, 1041 nt, synthetic construct
  misc_feature 1..1041: note = Description of Artificial Sequence: Synthetic coding sequence
  source 1..1041: mol_type = other RNA
atgtttctctctattttggtggccctgtgtttatggctccacctcgccctgggagtgcggggcgcgccatgcgaagcagttagaatccctatgtgtaggcacatgccctggaatatcacccggatgcccaaccatcttcatcatagtacccaggagaacgccatcttggcaattgaacaatacgaggaactggtagacgttaactgttctgcagttttgaggttcttcttatgcgcgatgtacgctccaatctgtactttggagttcctgcatgacccgattaagccgtgcaagagcgtgtgccagcgagccagggacgattgtgagcccctcatgaagatgtataaccacagctggcccgagtctttggcttgtgacgaactgccagtctacgataggggagtttgcatcagccctgaagctatagtcacggacttgcctgaagacgtgaaatggattgacatcacgcccgacatgatggtccaggaaagaccgctcgatgttgactgtaagcgactttctcctgaccgctgtaaatgtaagaaagtgaagccaaccctggcaacctacctgtctaaaaactactcctatgtgattcatgctaagatcaaagcggtgcagcgcagtggatgcaacgaagtgacaaccgtggtagatgttaaagaaattttcaagagctcctctcccatccctaggacacaggtccccttgattactaattcttcttgccagtgcccccacatcctcccccatcaagatgtgttgataatgtgttacgaatggcggagtaggatgatgctcctcgagaactgtctggtcgagaaatggcgtgaccagctgtctaaaagatcgattcagtgggaagagaggctgcaggaacagcgccggacggttcaagataagaagaagacagctgggcgcacaagtcgctctaacccgcctaagcctaagggaaaaccgcccgctccaaagcccgcttcaccaaaaaaaaacattaagactcggtctgcccaaaaacgcaccaatcccaaacgggtgtag

SEQ ID NO: 31807 - RNA, 1032 nt, synthetic construct
  misc_feature 1..1032: note = Description of Artificial Sequence: Synthetic coding sequence
  source 1..1032: mol_type = other RNA
atgagggtagccggcagggaaggtagatttctgtccgctggggtcgcagctcgggagggatcggccatgttcctgagcattttagttgctttgtgcctgtggctgcatctcgccctgggcgtaaggggggctccatgcgaagctgtgcgtattccgatgtgccggcatatgccatggaacattactcgcatgcccaatcaccttcatcattcaacacaagagaatgccatgtacgcacccatctgcaccctcgaattcttgcatgaccccattaaaccttgtaagagtgtctgccagagggcccgggatgactgtgagcctttgatgaaaatgtataaccattcctggccagaatcacttgcatgcgacgaactgccagtgtacgaccggggtgtttgcatctctcccgaggccatcgttaccgacctgccagaggacgtgaagtggatcgacatcacccctgacatgatggttcaagaacgcccattagatgttgactgcaaacgcttgagtccagaccgatgtaaatgcaaaaaggtgaaacctacgttagcgacctatttgagcaaaaattacagctacgtcatccacgccaagattaaagcggtgcaaagatccggatgcaacgaagtgacaacagtcgttgacgttaaagaaatttttaaaagcagctccccgatcccccggactcaagtcccactcattacaaacagctcctgtcaatgtcctcatatactgccccaccaggatgttctgattatgtgttacgaatggaggagtagaatgatgctgttagaaaactgtctggtggaaaagtggcgcgaccagttgtcgaagcgcagtattcagtgggaggagcggctccaggagcagcgcaggaccgtccaggacaaaaagaagacagccggaagaactagtcgttccaacccccccaaaccaaaagggaagcctcccgcaccaaaaccagctagcccaaaaaaaaacataaaaactcgctccgcgcagaaaagaacaaacccgaaaagagtgtag

SEQ ID NO: 31808 - RNA, 807 nt, synthetic construct
  misc_feature 1..807: note = Description of Artificial Sequence: Synthetic coding sequence
  source 1..807: mol_type = other RNA
atgcctcgtagctttcttgtcaaaaaacactttaatgcctctaagaagccgaattattccgaactggatacccacactgtgatcatcagcccatatctgtacgagtcctactcaatgcccgtcatcccccagcctgaaattttatcctccggcgcctatagccctattactgtgtggaccacggccgccccatttcacgctcaacttccaaacggtcttagcccgctctctggatactcctccagcctgggaagagtgtctccccctcctccgagcgatacctctagtaaggaccactctggctctgaaagccccattagcgacgaagaagaacgactccaatccaagctcagcgaccctcacgccatcgaagcagagaaatttcagtgcaacctatgcaataaaacctactcgacattctccggtctcgccaaacataaacaactccattgcgacgcccagagccggaaatctttttcttgcaaatattgtgacaaggagtacgtcagtttgggagcacttaagatgcacattcgtacacacacactaccatgcgtctgcaagatttgtggaaaggcctttagccggccctggctgctacagggccacatcagaacccatacaggagagaagccgttttcttgtcctcattgcaacagagcatttgccgatcggtctaatctgagagctcatttacagacccactcagacgtaaagaaataccagtgtaagaactgtagtaaaaccttctcccggatgtcacttcttcataaacatgaggaaagcggctgctgcgtcgcccattag

SEQ ID NO: 31809 - RNA, 747 nt, synthetic construct
  misc_feature 1..747: note = Description of Artificial Sequence: Synthetic coding sequence
  source 1..747: mol_type = other RNA
atggaaagagcgtcccttattcagaaagcaaagctcgccgagcaagccgagagatacgaggatatggccgcgttcatgaaaggtgccgttgaaaaaggggaggaactttcttgcgaggaacgaaacttactgtcagtcgcctataaaaacgtggtgggcggccagagggcggcttggagagtgttgtcgtctattgaacagaagagcaacgaggaagggtctgaagaaaagggaccagaggtaagggaataccgggagaaagtggaaacagagctgcaaggagtatgtgatactgtgctgggattgctcgattcacatttaatcaaagaggccggggatgcagagtctagggtgttctacctgaaaatgaagggtgattactacaggtatctagccgaagttgcaactggagacgataagaagcgaatcattgactccgcaaggtccgcttaccaggaggccatggacatcagcaagaaggagatgcctcccaccaatccgatccgcctgggactcgccctgaatttctcagttttccactatgagatcgcaaacagccccgaagaggcaataagtctggctaaaaccacatttgacgaggcaatggccgaccttcacacactgtccgaagatagttacaaggactccactctcattatgcaacttctcagagacaacctcaccctgtggactgctgacaatgccggggaggaggggggggaggcccctcaggaaccacagagctag

SEQ ID NO: 31810 - RNA, 651 nt, synthetic construct
  misc_feature 1..651: note = Description of Artificial Sequence: Synthetic coding sequence
  source 1..651: mol_type = other RNA
atggaaagagcatccctgatccaaaaggcaaagctggcagaacaggcagaaagatatgaagatatggctgcgttcatgaaaggagcagtagaaaaaggagaggaactgagctgtgaggaaagaaacctccttagcgtagcctataagaatgtggtaggcgggcagcgagcggcctggagagtgctgagtagcatagaacagaagagcaacgaggaaggatcggaggaaaagggtccagaagtaagagagtaccgggtgttctacctgaaaatgaaaggtgattattacaggtacctggccgaggtcgctaccggggacgacaagaagcggatcattgattcagcgcgttctgcgtaccaggaagcaatggatatcagcaagaaagagatgccgcccaccaaccccattcgccttgggctcgccctgaatttctctgtgtttcactacgagatagccaatagtccagaagaggccattagcttagcaaaaaccacttttgatgaggccatggctgacctgcacactctgagcgaggactcatacaaggattccacactgattatgcaacttctgcgggataatctgacactttggacagctgataacgctggtgaagagggaggtgaggcaccccaggagcctcagagttag

SEQ ID NO: 31811 - RNA, 12735 nt, synthetic construct
  misc_feature 1..12735: note = Description of Artificial Sequence: Synthetic coding sequence
  source 1..12735: mol_type = other RNA
atgatgcccgcccagtatgctttaactagctctcttgttctgctggtcctgctgagtacagcccgagccggcccatttagctctaggtccaacgttactcttcctgcccctaggccaccaccccaacctggcggtcacacagtaggggctggcgtgggaagcccctcttctcagctgtacgagcacacagtggaaggcggcgagaaacaggtagtatttacccacaggattaacctgcctcctagtaccggttgtggctgtccccctggaaccgaaccaccggttctggcaagtgaggttcaggccctccgagtgaggttggagatcttagaggagcttgtgaagggtctcaaagaacagtgtacaggcggttgctgtcctgcatctgctcaggccggtaccggccagacagacgtgagaaccctctgttccctgcatggcgtgttcgacctttcgcgctgcacctgctcctgcgagcccgggtgggggggaccaacttgcagtgacccgaccgatgctgaaattcccccatcaagccccccatccgcttctggctcttgccctgatgattgcaacgatcagggtcgttgtgtgcggggaaggtgtgtgtgtttccctggatataccggccctagttgcggatggccttcttgtcccggcgactgccagggccggggaagatgcgtccagggagtgtgtgtctgccgagctgggttttctggacccgattgttcccagagatcctgtcctcgaggatgtagccagagaggcaggtgcgaaggagggcggtgcgtttgtgaccccggctacaccggcgatgattgcggtatgagatcatgtccacggggctgttcacagcggggcagatgtgaaaatggcaggtgcgtgtgcaatcccggctatactggcgaggattgtggcgtccgctcatgtccccgtggctgtagtcaacgggggcgttgtaaggacggaaggtgcgtttgtgaccctggatataccggagaggattgtggaaccaggagctgcccctgggattgtggtgaggggggccggtgcgtcgatgggcggtgtgtgtgctggccgggctataccggcgaagattgttccacaaggacttgcccccgcgactgccgaggccgtggacgctgcgaggatggggaatgcatctgcgacacaggatactcgggcgacgactgcggcgtacgttcctgtccgggtgattgtaatcagagagggagatgcgaggacggaaggtgcgtttgctggccaggatacaccggaactgattgcggctccagagcttgcccaagagactgtcgtggacgaggtcggtgtgaaaacggagtgtgcgtctgcaatgccgggtattcaggggaagactgcggagtgagatcgtgccccggcgactgcagagggcgtgggagatgtgagagtggcagatgcatgtgttggcccggctacacaggtcgggattgtggaaccagagcttgcccgggtgactgccgcggtagggggcgctgtgttgacggcagatgtgtttgtaaccctgggtttacaggggaagattgcggttcacgaagatgccctggggattgtagggggcacggcctgtgtgaggatggcgtgtgcgtctgtgatgctggctattcaggtgaggactgctctacccgaagctgtcccgggggatgccgagggagggggcagtgtttggacggtaggtgcgtctgcgaagatgggtactcaggcgaggactgcggggtccgccaatgcccaaatgattgctcccaacacggggtgtgccaggacggtgtatgtatttgctgggaagggtacgtctcggaagactgttcaattagaacttgtccaagtaactgccatggccgcgggcggtgtgaagaggggcgttgcctatgcgaccctgggtataccggacccacatgtgcgacacgtatgtgtcccgccgattgtaggggtcgtgggagatgcgtgcagggagtgtgcttatgtcatgtcggctacggcggcgaggattgcggacaggaggagccgccagctagcgcctgtccgggcgggtgcgggccaagagaactgtgcagagccgggcagtgcgtctgtgtggagggattcagggggccagattgtgccatccaaacctgccccggggactgtaggggacgcggggaatgccacgatggctcctgtgtctgcaaagatggttacgccggcgaagactgtggggaagaagtccccactattgaaggaatgagaatgcatctcctggaggaaaccaccgttaggactgagtggacaccagccccaggaccagtagacgcgtacgaaattcagttcatccccactactgagggcgcctccccccccttcactgccagagtgcctagcagcgctagtgcctatgaccaacgtggcttagcacccgggcaagaatatcaggtgaccgtgcgagcgttacggggaacatcttggggcctcccagcatccaaaactattacaacaatgattgatgggccacaagacctcagagtggtcgctgtcaccccaacaacattagaactcggatggctacgaccgcaggcagaagttgaccgctttgttgtgtcatacgtttctgctggcaatcagcgcgttcgattagaagttcctcctgaggctgatgggacactcttaacagacctgatgcccggcgttgagtatgtagttaccgtgacagctgaaagggggagagcagtctcatatccagcatccgttagggctaatacaggttcctctccgttgggtttgttggggactactgacgaaccacctccgtccgggccatctacaactcagggagcgcaagcacccttgcttcagcaaagaccccaggaacttggggaactgcgcgttctgggccgagacgaaactggcaggttgagggtggtgtggacggcccagcctgatacgtttgcttactttcagctgcgaatgagggttcctgaaggacccggcgctcacgaagaagtgcttccaggcgatgttcggcaggcgctggtgccaccaccacccccagggaccccctacgagctgagtttacacggggttcctcccggtggaaagccctcagatccaattatttaccaggggatcatggataaagacgaggaaaaaccgggaaaaagcagcggaccacccaggctcggagagctgactgtaacagatcggacatctgactctctgctcttaaggtggaccgtcccagaaggagagtttgatagttttgtgatccaatataaagacagagatggacaaccacaggttgtcccagtcgaggggccccagcgctctgccgtgattaccagtctggaccctggtcgcaaatataagttcgttctgtatgggttcgtagggaagaagaggcatggcccattagtggcggaagctaaaatccttccacaatccgacccttccccagggactcctccccacctgggtaatctttgggtaactgatcccacacccgatagcctccacctgagctggaccgtgcctgaaggacagtttgacacattcatggtgcagtatcgagacagagatggacggccccaggttgtgccagtagaaggacccgagcgtagttttgtcgtttcctctctcgacccagatcataagtatcgcttcaccctgttcggcatcgcaaataagaagcggtacggtcccctcactgccgacggcacaaccgcaccagaacggaaagaagaaccaccgcgacctgagtttctggagcagcccctcctcggtgagctcacggtaaccggcgtgacccctgatagtctgcggctgagttggactgttgcacaggggccttttgatagctttatggtccagtacaaagatgctcagggacagccccaagctgtccccgtggccggcgacgagaatgaagtgactgtgcctgggctggatcccgacaggaagtacaagatgaacctctatggtctgcgcggccgacaacgcgtggggcccgaatcagtggtagcaaaaaccgcaccccaagaggatgtcgatgaaaccccgtcgcctacagaattaggaacggaggctcccgagtcccctgaagagccactgctcggtgaactgacagtcactggctcctcacctgattctctgtctctgttttggaccgtgccacagggatcctttgactccttcactgtccagtataaggacagagacggacggccccgggcggtccgggttgggggcaaggaaagcgaagtcacggtgggaggactggagcccggacacaagtacaaaatgcacttatatggtctccatgaaggccagcgagtgggccctgttagtgcagtgggggttactgccccccagcaggaagaaacaccccccgcgacggaatctccactcgaacctaggctgggagagcttactgtgacagacgtgacaccaaatagcgtgggcctgtcctggacagtccccgagggccagtttgactctttcattgtccaatacaaggataaagacggccagccacaggtggtgcctgtagccgccgaccaacgtgaggtcactgtctataatttagagcctgagagaaaatacaagatgaatatgtatggcctgcatgatggtcagcgcatggggcctttatctgtcgtcatcgtgacggccccactccctccagctcctgcaactgaggcttcaaagccacccctcgagccaaggcttggcgagctgacggtgaccgacatcacccccgatagtgtgggtctaagctggacagtgcccgaaggtgagttcgattcctttgtcgtgcaatataaagaccgcgatggacagccacaagtggttcccgtggccgcagatcagagagaggtgacaatacctgatctggagccttcgcgcaaatataagtttctgctcttcggcatacaggatggaaaacgcagatctcctgtatctgtagaggcaaaaaccgtggccagaggcgacgcctcccccggagcaccccccaggctgggagagctatgggtaaccgaccctacacccgactcgttgcgcttaagttggaccgttccagagggccagttcgacagctttgttgtgcagttcaaagacaaagacggtccccaagtcgttccggttgaaggtcacgaaagaagtgtgaccgtcactccactggacgccggccgaaagtatcggttcttattgtacggtctgcttgggaagaaacggcacggacccttgaccgctgacggcaccaccgaagcgaggtcagctatggatgacaccggcactaaaaggccgcctaagccccgccttggggaggaattacaggtaactacagtgacccagaactcagtgggcttgtcctggaccgtgcccgaaggacagttcgattcctttgtcgttcagtacaaagatcgcgacggacaaccccaagtcgtcccagtggagggctctctaagggaggtgagtgtgccgggcctggatcccgcgcacagatataaactcttactgtacggccttcaccatgggaaacgtgtcggccctatttccgccgtggcgataacagcggggcgcgaagagacagaaacagagaccacagccccaacaccgcccgctccggaacctcacctgggagagttaacggtagaggaggcaacttctcacaccctgcacctatcctggatggtgactgaaggcgaattcgacagcttcgagatccagtatacagatagagacgggcagctccagatggtccggattggtggggacaggaatgacatcacattaagcggcctggagtccgatcaccggtatcttgtaaccttgtacggcttcagtgacggaaagcacgtgggtccagtacacgtggaggctctcacagtgccggaggaggaaaagccttccgaacctcctaccgctacccccgaacctcctatcaaacctagactgggagagctcaccgtgaccgacgccacacccgattccctttctctctcctggactgtacccgaaggccagttcgatcactttctggtccagtatagaaatggtgacggacagcctaaggcagtaagggtcccaggccacgaggaaggcgtcactatctcaggccttgaacctgaccataagtataaaatgaatctctatggtttccacggtggtcagcgaatggggcctgtctcagtagtcggtgtgacagcagccgaggaggaaactcctagtccaacggaaccaagcatggaggcgccggaaccagctgaggagcccctgctgggcgaactcaccgtaacaggttcctccccggactcactgtcactgtcctggactgtgcctcaaggacgattcgatagctttaccgtacagtacaaggaccgtgatgggcgcccccaggtggtcagggtgggtggcgaagagtcagaagtgactgttggcggactggagcccggccgtaaatacaagatgcatctctatggtctgcacgaggggaggagagttggccctgtttccgcagtcggcgtcacagctcctgaggaggaaagcccagacgccccgctcgctaagctgagactgggccagatgaccgtgcgcgacatcacaagtgactccctgagcttgtcctggacggtcccagaagggcagttcgatcacttcctggtgcagtttaagaatggagatggacagccaaaagccgttcgtgtgcccgggcacgaggacggagttacaatctctggcctggagccggatcataagtacaaaatgaacctgtacggatttcatgggggccagcgggttggccctgtttccgccgttggactgacagcacctggcaaggacgaggagatggctcccgccagcacggagcctcccacccccgagccccccataaagcctcgtctagaggagttaacagtgacagacgcaacaccagactccctttcactgagttggacagtgcccgagggccagtttgatcattttctggtgcagtataaaaacggagacgggcagcctaaagctacccgagtacctgggcacgaggatagggttacgatttcaggcttagagcccgacaacaaatacaagatgaatttgtatgggtttcacgggggccagagggtggggcccgtgtccgctatcggcgtcacggccgcggaagaagagacccctagcccaaccgagccaagtatggaggcccctgaaccccccgaggagccactgctgggcgagctgaccgtgactggctcatcccccgatagtctgagtctgagttggacggtcccacagggaagatttgacagcttcacagtccagtacaaggatagagacggaaggccccaagtggttagagtgggaggcgaggagagcgaggttacagtcggagggctcgagcctgggagaaaatataaaatgcacttgtacggtcttcatgagggaagacgagtcggtccagtttccacagtgggagtgacagctccgcaggaggatgtggatgagaccccctcacctacagaaccgggaaccgaagcgccgggccccccagaggaacctcttctgggagaattgaccgtaaccgggagctccccagactctcttagtctatcttggactgtcccccagggtcgtttcgattcatttacagtacaatataaggatcgggatggtaggccccaggccgtgcgggttgggggccaagagtccaaggtaaccgtgcgcggcctggaaccaggtcgaaagtacaaaatgcacctgtatgggctgcatgaaggtcgccgcctcggccctgtgagtgcggtcggtgtaaccgaagacgaggccgaaacaacacaggccgtcccaactatgaccccagaaccccctatcaagccgcggctcggggaactgacaatgacagatgcaacccccgatagtctgagcctcagctggaccgtcccggagggacaatttgaccactttttggttcagtaccggaacggcgacgggcagcccaaggcagtgagagtgccaggccacgaagacggggtgaccatctccggactggaacccgaccataaatacaaaatgaacctgtatggcttccatggagggcagagagtgggacctatttccgtgattggtgtgacggccgccgaagaggagactccctcacccacagagttaagcactgaggcccccgaaccccccgaggagcccctgttgggtgaactgaccgtgaccggctcatctccagattcactgagtctgtcatggactataccgcaggggcactttgacagttttacagtacagtacaaagatcgcgacggacgaccgcaggtgatgcgcgttcgcggtgaagaatctgaggtgacggtggggggtctggaacccggacgaaaatacaaaatgcacctttacgggttacatgaagggcgacgagtaggacctgtaagcactgtgggcgtgacggccccagaagacgaggcagaaacgacccaggctgttcctaccaccactcctgagcctccaaataaacctagactgggtgaattaacggtaactgatgctacccccgacagtttatccttgtcttggatggttcctgagggtcagtttgaccacttcctggtgcaatatagaaatggggatggtcagcccaaggtcgtcagagttccaggtcacgaagacggcgtgactatttccggtctagagcccgatcacaaatacaagatgaatctttatggcttccacggaggacagcgggtcgggcctatctcagtgataggcgtgacagcggccgaggaagagaccccagctcctaccgaacccagcactgaggcacccgagccccctgaagagccactgcttggcgagctcacagtgacgggttcatcaccagactctctctccctcagttggacaataccgcaggggagatttgactccttcaccgtacagtataaggaccgagatggtagaccccaggttgtcagagttagaggcgaggaatccgaggttaccgtcggaggccttgagccagggtgtaaatataaaatgcatctctacggtctccacgaaggacagcgcgtagggcctgtgagcgcagtgggcgtcacagcacctaaggatgaggccgaaactacccaagcagttcccaccatgacaccagaaccgccgattaagcctcgtctgggagagctgacagtaactgacgcaaccccagattccctgagtctcagctggatggtccctgaggggcaattcgaccactttttagtccagtatcgaaacggggatggacagccaaaggctgtcagagtacctggacatgaagatggagtgacaatcagcggactggaacctgatcacaaatacaaaatgaacctctacggatttcatggcgggcagcgagtcggtcccgtcagtgctatcggcgtcacagaagaagagacgccgtctcctactgagccatcaaccgaggccccagaggcccccgaggagcccctgcttggcgagctgaccgtcacaggatcctctccggactccttgtctttaagttggacagttccacaaggcagattcgactcattcaccgttcagtacaaagatcgcgacggacagccgcaggtggtgcgcgtacgcggtgaggagagcgaggtgactgtgggtggcctggaaccggggaggaagtacaagatgcacttgtacggtctccacgaaggacagagagtcgggccagtttccactgtagggataacagcacccctgcctacacccttgccagtcgaacccaggctgggtgaactggccgtagctgcagtcacgtcagatagtgttggactcagttggacagtcgcacaaggaccatttgacagtttcctagttcagtacagggatgcgcaaggccagccccaagcggtacccgtatccggtgatctgcgcgctgtggctgtctccggtcttgatcccgcgagaaaatacaagtttttgctatttgggcttcagaacgggaagaggcatgggcccgtgccagtggaagcacgcacagcgccggatactaagccatctcctagactgggggaactgacggttactgatgctacgccggactcagtgggactctcatggaccgtccctgaaggcgaattcgattctttcgttgttcagtataaggacaaagacggccggctccaagtggttcctgttgccgccaaccagcgagaggtgactgtgcagggcctggagcctagtcggaagtatcgcttccttctgtatggcctgagcggacggaagcggctcggtccaatcagcgccgatagtactacagcgcctcttgaaaaagagttgcccccgcatctaggggagctcacagtagccgaggaaactagctcgagcctgcgtctgtcctggaccgtcgcgcagggcccctttgattcgttcgtcgttcaatacagagatactgacggccagcccagagctgtccccgtcgcagctgaccagcgaacggtgactgtggaggatcttgaacctggcaaaaaatataaatttctattgtatggactgttggggggaaaaaggctcgggcccgtgtcagcgctgggcatgacagctcctgaggaagatacgcctgcacctgaactggcaccagaggctccagaaccccctgaagagcccaggctgggggttctgaccgtgactgacacaacccctgatagcatgcgtctcagctggtctgtggctcagggtccctttgatagttttgtcgtgcagtatgaagacacgaacggacagcctcaggcattactcgttgatggggaccagtccaagattctcatttctgggctggaaccctctacgccttatagattcctcctatacggtctgcacgaggggaaacgcctcggccctctgtcagctgaaggtaccaccgggttggcaccagctggacagaccagcgaagaatcaaggcctaggctgtcccagctgtcagtgaccgacgtgactacatctagcctgcggctgaattgggaggccccccccggagcctttgattccttcctgttgcgattcggggtgccttctccttctaccttagagccacatccaagacctttgctacagcgggagctcatggtgcccgggactcggcactccgctgtgcttagagacctgcggtccggcacgctctattccctgactctgtacggtttgcgtggcccacacaaggctgacagcatccagggcaccgctcgcactctaagtcccgtgctagagagtcctcgagacttgcaattctcggagattcgtgaaacctccgcaaaggttaactggatgccacctcctagcagggctgattcgtttaaagtatcttatcagctcgcggatggaggagagcctcagtcggtgcaggtcgatgggcaggccaggacgcagaaacttcaggggcttatcccgggagccagatatgaggtaacagtggtgagcgtccggggatttgaggagtcagagcccctgacagggtttctcacaaccgttcctgacggaccaacgcagttacgcgcactgaatttgaccgaagggttcgcagtacttcattggaaaccgccacagaaccctgttgacacatatgatgtgcaggtaactgctcccggtgcacctccgttgcaggccgagacaccagggagcgctgtggattaccccctacacgatctagtgttacatactaactatacagctacagtgagaggccttcggggtcccaacctcacctcccccgcctcaatcacatttaccaccgggctcgaagccccaagggaccttgaggccaaggaagtcacacctagaactgccctgctgacatggacggaacctccagtaagacctgccgggtatttattgtcctttcatacccctggaggccagaatcaggagatcttactgccaggcggcattacgagtcatcagctcctggggcttttcccaagcacaagttataatgccagacttcaggcaatgtggggtcagtctctcctcccacctgttagcaccagctttactactggtggcctgcgcatcccctttccacgggactgtggggaggagatgcagaacggggcaggggccagccgcacttcaacaattttcttaaatgggaatcgggaacggccacttaatgttttttgtgacatggaaacagatgggggcggctggctcgtctttcagcgtcgcatggacgggcagactgacttctggagagattgggaagattacgcccatggctttgggaatatcagtggggagttctggctcggcaacgaggctttgcatagtcttactcaggctggtgattacagcatgagagtggacctacgggctggggacgaggccgtgtttgcccagtatgactccttccatgtggattcagcagcggaatactatcggctccatctggagggctatcacggaacagcaggcgacagcatgtcttatcatagcggaagtgtatttagtgctagggacagagatccaaatagcctgcttattagctgtgccgtatcttatcgcggggcatggtggtaccggaattgccattacgctaacctgaatggattatacggctccactgtggatcaccaaggtgtttcgtggtatcattggaaaggctttgaattctccgtccccttcacagaaatgaaactgcgccccaggaacttccgaagcccagcaggcggaggctag

SEQ ID NO: 31812 - RNA, 12729 nt, synthetic construct
  misc_feature 1..12729: note = Description of Artificial Sequence: Synthetic coding sequence
  source 1..12729: mol_type = other RNA
atgatgcccgcacagtacgcccttacaagttcactggtgctcctggtgctgctttcgacagcccgcgccggacccttctcaagccgatctaacgtgaccctgccggctcctaggccaccaccccagcccggcggtcacaccgtcggtgcaggcgtcggcagtccctcctctcagctctacgagcataccgtcgaaggtggcgaaaaacaggtcgtgttcacacatcgcattaacctcccgccatccaccggctgcgggtgcccacctggcactgagccacccgtccttgcctccgaggtacaggcattgagggtccgcctggagattttggaggagctcgttaaaggattaaaggaacagtgcaccgggggttgttgtcccgcatcagcgcaggcaggaacaggccaaactgacgtccgaaccctttgctccttgcatggggtgttcgatctgtccaggtgtacctgttcctgtgaacctggctggggaggccctacatgttcagatcccactgatgcagagattcccccatccagccccccaagcgccagtggcagttgtccagacgactgtaatgaccagggacgctgcgtgcgaggtcggtgcgtgtgttttccaggatacacaggtccctcgtgtggctggcctagttgccctggggactgtcaggggcgcgggcgctgcgtgcagggtgtgtgcgtttgccgggccgggtttagcggacccgattgctcccagcgcagctgtcctagaggctgcagccagcgcggccggtgtgaaggaggccgttgcgtgtgcgacccaggatacactggcgatgattgtgggatgagatcctgcccgcgcggctgctcccaaagaggcagatgcgagaatggccgatgcgtatgcaatccaggatatactggagaggactgtggtgttcgcagctgcccacggggctgcagtcagcgaggacggtgcaaagacgggaggtgcgtttgtgatcctggctatacaggggaagactgtggaaccagatcatgtccgtgggattgtggtgagggcggccggtgcgtggatggacgctgtgtctgctggccaggctataccggggaggattgtagtacccggacgtgtccaagggactgccggggacgaggtcggtgtgaggatggtgagtgcatctgcgacactggatattcgggtgatgactgtggcgtaaggtcttgtcctggcgactgcaaccagcgggggagatgcgaggacggcagatgcgtgtgttggcccggctatactggcacggattgcggatcacgagcttgcccaagggattgccggggacgcgggcgctgtgaaaatggagtgtgtgtgtgcaatgcaggatattctggagaggactgtggagtacgtagctgtcctggcgactgcagaggcagaggaaggtgcgaatccggcagatgtatgtgttggccaggctacaccgggagggactgcgggaccagggcctgcccgggtgactgtcggggccgggggagatgtgttgatggcagatgtgtttgcaaccccggattcacaggagaggactgtgggtcgcggcgctgcccaggcgattgcagagggcacggactgtgcgaagatggcgtgtgtgtgtgcgatgcagggtacagcggggaggattgctctacgcgttcctgccccggtggttgccgcggaagagggcagtgcttggatggtagatgtgtgtgcgaggacggttatagtggcgaagattgcggcgtgcgacagtgccccaacgattgttcacagcacggagtatgccaggatggcgtgtgcatttgctgggaaggctacgtcagcgaggattgttccatcagaacctgcccaagtaactgccacggtagaggccggtgtgaggaagggcgctgcttgtgtgatccgggatatacaggacctacttgtgctacacgtatgtgtcccgctgactgtaggggccggggacgctgtgtacagggagtatgcctatgccacgtagggtacggaggcgaggattgcggtcaagaggaacctccagcctcagcctgtccgggggggtgtgggcctcgcgagttgtgtcgtgcaggccaatgcgtgtgtgtggaaggcttcaggggccctgattgcgccatccagacatgtcctggcgactgtaggggcagaggcgagtgccacgacggatcatgcgtgtgtaaagacggctatgccggggaggactgcggcgaggaagtccctaccatcgagggcatgagaatgcacctcctcgaggagaccacggtcaggactgaatggacgcctgcacccggtcctgtagacgcgtacgagatccagtttatccccacaaccgaaggtgcctcgccaccctttacagcacgagtcccctcatctgccagcgcctacgatcagaggggcctcgccccaggacaagagtatcaagttacagtgagggctctacggggcacatcctggggactcccagcatccaagactatcacgacgatgatcgacggaccacaggacctacgggttgtggcggtgaccccgacgactcttgaactgggctggctcagacctcaggccgaggtggaccgatttgtggtgtcttacgtttccgccggaaatcagcgtgtcagattagaggtcccccctgaggccgatgggaccctgctcacggatcttatgccgggcgtcgagtacgtggttactgttactgctgagaggggtagagccgtttcctacccagcaagcgtccgggcgaacaccggcagtagcccgttggggctgctcggtaccaccgacgagcccccgccttcgggcccttcaaccacccagggggcccaggcacccctacttcagcagagaccacaagagcttggagaattacgtgtgctgggcagggatgaaacaggcaggctccgagtcgtttggaccgcccagccagatactttcgcttactttcagcttcgaatgagggttcccgagggccctggagcccatgaggaggtactacccggagatgtgagacaagccctggtacccccccctccgcctggaacgccttatgagttatctttacatggagtaccccccggtggtaaaccttctgaccccattatttaccagggaattatggataaggacgaggagaagcccgggaaaagttcaggcccccctagactgggtgaacttaccgttacagatagaacctccgacagcttgctcctgcgatggacagtccctgagggggagtttgacagtttcgtgattcagtacaaggatagagatggacagcctcaagtcgtgcccgtggaaggaccacagcgcagcgcggtgatcaccagcctggacccaggtaggaagtataaattcgtgttatacggtttcgttggcaagaaaagacacggcccacttgtcgctgaggctaaaatcctgccccaatctgacccttcaccgggcacacccccgcatctagggaacctatgggtaacagatccgactcccgacagcctccacctgagctggaccgtccctgagggccagtttgacacatttatggtgcagtaccgcgaccgtgacgggcgtccccaggtggtgcccgtggaaggaccagagcgaagctttgttgtttcttccctggacccagaccacaaatatcgattcacactttttggaattgccaacaagaagagatacggacctcttaccgccgacggaaccaccgcccctgaaaggaaggaagagccgccgagacccgaatttcttgaacagcccttgttgggggaactgacagtaacaggagttactcctgactcccttaggctctcatggaccgtggcccaaggccccttcgattccttcatggtgcaatacaaggatgcacagggacagccacaggcagtcccagtcgccggggatgaaaacgaagtcaccgtccccggcctggatcctgaccgcaagtacaagatgaatctttatggcctaagaggaagacagcgtgtggggccagaaagtgttgtggcaaagacggcaccccaggaggacgtagacgaaacgcccagtcccacagagctcggcacggaagctccagagagccctgaggagcccctgctcggcgagctcacagttactgggtccagcccggattctctgtctttgttctggacggttccccaggggagcttcgatagcttcactgtacaatacaaggatagggacggaaggccccgcgctgtgagagtcggcgggaaggagtccgaagtcaccgtgggcggactggagcctggtcacaagtataaaatgcacctctacggcttacacgagggccaaagggtgggcccggtgtcagctgtcggagtgaccgccccgcaacaggaagagacccctcctgctactgagtcaccactggagccacggctaggggagctcaccgtcactgacgtgacccctaatagcgtcggactgtcttggaccgtgcctgagggccaatttgactccttcatcgtccaatataaggataaagatggccagccccaggtcgtgcctgtcgccgctgaccagcgggaggtaacagtgtacaatctggagccggaacggaaatataaaatgaacatgtacggcctgcatgacggccagcggatgggtcccctctccgtggtgatagtaacagctcctctgccgcccgctccagccacagaggcttctaaaccacctctggaacccagactaggcgagctgacggttacggatatcactcccgatagcgtgggtttatcctggacagtccccgagggtgaattcgacagttttgtcgtgcagtacaaggacagagatggccagccccaggtggttcctgttgccgccgatcaacgcgaggttactattccagatttggaaccgagccgaaaatacaagttcctactcttcggtatccaggatggaaagagacgctcccctgtcagtgtggaggccaaaacggtggcccggggtgacgcctctcctggcgccccacctcgcctgggcgaactctgggtgactgatcccacacctgattcccttcgtttaagctggaccgtgcctgagggtcagttcgatagcttcgtggttcaatttaaggataaagatgggccccaggtggtcccagtagaaggccacgaaaggtccgtcactgttacaccattagatgccggtcgaaagtaccgattcctgctgtatggcctgctggggaagaaacgacatggtccacttactgctgacggaactacggaggcccgcagcgcaatggatgatacaggcaccaaacggccccctaagccaaggctcggtgaggaactacaagtgacgacagtaacacagaattccgttgggttgtcttggactgtgccagaaggacaatttgactcctttgtggttcagtacaaggatagggacggccagccccaagtagtaccagtggagggctccctgagggaagtatccgtcccaggtctggatccggcacaccgctacaaattactattgtacggcctacaccatggtaaaagagtgggccccattagcgctgtcgcaatcaccgccggtagagaggagacagagacagaaacgacagcacccaccccccccgcgcccgaaccacatctcggcgagcttaccgttgaagaggccacttctcatacattacatctgtcttggatggtgaccgagggagagtttgattcttttgaaatccagtacacagatcgagatggacaactacaaatggtgcgaattgggggtgatcgtaatgatattaccctaagtgggctggaatcagatcaccggtatctagttacattgtatgggtttagcgacggcaagcacgtgggccctgtgcatgtcgaggctctgacggttccagaggaggagaaaccatctgaaccacccacagcgacaccggaaccaccgatcaagccgcggctgggggagctgacggtcacggacgcaacacccgattccctctccctgagttggactgtgcccgaagggcagttcgatcactttctagtccagtatcggaatggggatggccaaccaaaggcagtccgggtcccagggcacgaggagggcgtgactatttccggactcgaaccagaccacaaatacaaaatgaatttgtacggcttccatggggggcaaaggatggggccagtttccgtggtaggagtgaccgcagccgaggaggaaaccccaagtcccaccgagccttctatggaggccccagagcccgctgaggaacccctcctgggggagctcaccgtgaccgggtccagtccagacagtctgtctctttcttggacagttccacagggcagatttgacagctttacggtacagtacaaggatagagacggccggcctcaagtggtgcgcgtggggggggaagagagcgaggttaccgtcggaggtctggagccaggaaggaaatataaaatgcacctctacggactgcacgaagggaggcgggtgggacctgtgagcgccgttggcgtgaccgcacccgaggaggagtctccggacgccccattggctaagctccgcttagggcagatgactgtgcgcgacattaccagtgactccctgagcttgtcgtggacggttcccgaaggacagtttgatcatttcctcgtgcaatttaagaatggtgacgggcaacctaaggccgtaagagtgcccggccacgaggatggcgttactattagcgggctggagcccgaccataaatacaaaatgaacctctacggattccacgggggacagcgcgtcggacctgtgtcggccgttggacttacagccccaggcaaagacgaggagatggctccagcctcaactgagccacccactccggagccccctattaaacccagactggaggagctaactgtcacagacgccacgcctgactctctcagcctgtcttggacagtgccagaggggcaattcgaccattttctggttcaatataagaatggagacggacagcctaaagccacacgggtccccggacacgaggacagagttactatcagcggtctggagccagataataaatataagatgaacttatacggttttcacggaggccagcgcgtcggcccagtcagtgccattggagtcaccgctgccgaggaggaaacccctagccctactgagcccagtatggaagcgcccgagcctccagaagagcctctcctgggcgaacttactgtgaccggaagctcccctgacagcttaagcctgtcatggaccgttcctcaggggaggttcgactcattcaccgttcagtacaaagatagggatggtcggccacaggtggttcgagtggggggcgaagagagtgaagtcacggtgggcggactggaaccaggcaggaaatacaagatgcacctgtacggccttcatgagggcagacgagtcggacccgtcagtacagtaggcgtaaccgctcctcaggaggatgtggatgagacccctagcccaaccgaacccggcaccgaagcacctggtcctccggaggagccacttctcggggagctgactgtgacaggctcatccccggattctctgtccttgagttggacagtaccacagggacgatttgactcttttacggtacagtataaggatcgcgacggtagacctcaggctgtgcgggtgggggggcaggaaagtaaggtgaccgtgaggggtctggagcctgggcgcaaatacaaaatgcacttgtacggcctccacgagggccgcaggcttggaccagttagcgctgtgggggtgacggaggacgaagctgaaacgactcaggctgtacctactatgaccccagaacctccaatcaaaccccgactaggagaactgacaatgacagatgcaacacctgacagcctttcgctgtcttggactgtcccggagggtcagtttgatcactttctggtacagtaccgcaacggcgacggccagcccaaagcagtgagagtccctggccacgaggatggcgtgacaatctctggactggaacctgatcacaagtataagatgaatctctacggattccatggggggcagcgcgttggcccaatcagtgtgatcggcgtaaccgcagcagaggaggagacaccctccccaactgagctaagcaccgaggcccctgagccccctgaagaacccctcctcggtgaactaacagtgacaggcagctccccagactccctgagcctcagttggacaatcccccagggccacttcgactcgtttaccgttcaatacaaggatagggacggcaggccacaagtcatgagagttaggggtgaggaatcggaagtaactgtcgggggactcgagccgggccgtaaatacaagatgcatctctatgggttgcacgagggacgtagagtgggcccagtgagcaccgtgggcgttactgaggacgaagccgagaccacgcaggctgtaccaacaaccacccctgagcctccgaacaaacccagactgggggagctaactgtgaccgacgcaacacctgacagtctctcactctcttggatggtgcccgaggggcagttcgatcactttcttgttcaatacaggaacggcgatgggcagcccaaagtggtcagggtgcctggtcacgaagacggtgtaacaattagcggactcgagccagaccataaatacaagatgaacctgtacgggtttcacggcggtcagagggtgggccccataagcgtcatcggtgtgaccgccgcggaggaggagaccccagcacccacagagccctcaacagaagcccccgaaccccccgaggaacccctcctgggagagctgactgttacgggctcctcgcccgattcactgagcctatcctggacaattccccaaggacgtttcgactcgttcacagtccagtacaaggatagagatggacgtcctcaggttgttcgagtccgcggggaagaatcggaagtgacagttgggggtctggaacctggctgcaaatataaaatgcacttgtatggattgcacgagggacagagggttggacccgtctccgctgtgggggttacggcgcccaaagacgaagctgaaacgactcaggcagtaccgaccatgaccccagaaccccccatcaaaccacgcctcggcgaactgaccgtgacagatgccacgccagactctcttagcctgagctggatggtgcccgagggtcagttcgaccattttctagtgcaataccggaacggcgatggtcagccaaaagccgtgcgggtgcccggccatgaagacggagtaactatctcaggtttggaacccgatcataaatacaagatgaacctatacggctttcatggaggccagcgagtggggccagtgtcagcaataggcgtgaccgaagaggagacaccctcaccaactgaaccttctacggaagcaccagaggcccccgaggaacctcttctgggggaattgactgtaaccggctcgtcacccgacagcctttccctgagctggactgttcctcagggaaggtttgactctttcaccgtgcaatacaaagatagagacggccagcctcaggtggtacgcgttagaggggaagagtccgaggtgactgtaggtgggttggagcccggccggaagtacaagatgcatctatacggtcttcatgaaggacagagggtgggccccgtttctactgtcggaataaccgctcctttgcccactcccctccctgttgaacctaggctgggtgaattggcagtggccgctgtgacaagcgactcagtggggctctcctggacagtggctcagggcccctttgacagctttctggtccagtatcgggatgcccaggggcagccacaggctgtacctgttagtggcgacctccgggccgtcgctgtgtccggcttagatcctgcgcgcaagtataaatttctattatttggtctacagaatggcaaaaggcatggccccgtgccagtagaagctagaaccgctccagacacaaaaccttcacccagattaggagaattaaccgtgacagacgccaccccagactctgttggtctgagctggactgttccagagggcgaatttgatagtttcgtcgtgcagtataaggacaaggacggccggctccaggtggtgcccgttgcggccaaccaacgtgaggtgactgttcaagggctcgaaccaagccgaaagtataggtttttgctttatggactgagcggccgcaagcgcctaggtccaatttcagccgactctacaactgcgccactggagaaagaattgccccctcacctgggggaactcactgttgccgaggaaacctcctccagtttaaggttaagctggaccgttgcccagggccccttcgattcatttgttgtgcagtacagagatacagacgggcagccacgtgctgttcctgtcgcagcggatcagaggacggtgactgtggaggaccttgaacccggcaaaaagtacaaattcctgctgtacggactgctcggggggaagcgcttgggcccagtatctgccttaggcatgaccgcgcccgaggaagacacccctgcccctgaactggcaccagaggctcccgaacctcccgaggagcctagattaggcgtactgacggtaacagacactacacccgactctatgcgcctctcctggtcagtggcccagggcccgtttgattctttcgtggtccagtatgaagacacgaacggccagcctcaggcgctccttgtggacggtgaccaaagtaagatcttgattagcggcctggagcccagtacgccctacagatttcttctgtatggcctgcacgaaggaaaacgcttagggcccctgtcagcagaagggaccacagggctggcgcccgcagggcagaccagcgaagaatcccgccctcggttatcacaactctccgtcactgatgtgacaacaagcagtctgaggctgaactgggaagcgccgccaggtgcctttgacagcttcctacttagatttggggtcccctcgccctccactcttgagccgcatccccgtccactgctgcagcgggagcttatggtacccgggacacggcattccgccgtcctccgcgaccttcggtctggcactctttatagtctgactttatacggccttaggggcccgcacaaggctgatagtatacagggaactgcccggacattgtcgcccgtgttagagagtccgcgggacctccagttcagtgaaattagagagaccagcgccaaagtcaattggatgcccccgccctcacgggccgatagctttaaggtatcttatcagttggctgatggtggcgaaccccagtccgtgcaggtcgacggtcaagcccggacccaaaagttacagggcctgatccctggtgctcgatacgaggtgaccgtagtgagtgttcgagggtttgaagagagcgagccccttacagggttcctgactacggtcccggacggtcctactcagctgcgggctctaaatctcactgagggatttgccgtgcttcattggaagcctccccagaatccagtcgacacatatgacgtgcaggttacagcacccggcgcccctcccttacaggccgagacccccgggtcggctgtcgattacccccttcacgacctggtcttacacacaaactacaccgccacagtgcggggcctgcgaggcccaaatctcactagccccgcgtccattacatttacaaccggcctagaggctccacgcgatcttgaagctaaggaggtaactccacgcactgccttactgacgtggactgagccacctgttaggccagcaggctaccttctgtcttttcatacaccgggtggccaaaatcaggagatcctcctaccgggaggcataacctctcatcagctgctcggccttttccccagcacaagctataatgcaaggctgcaagcaatgtgggggcagtcattgctgcccccagtgagcaccagtttcaccaccggaggcttgcgtattccctttccaagagactgcggcgaagaaatgcaaaacggggccggggcatcgaggacatcaaccatcttcttgaatggaaatagagagcgcccactgaacgtcttctgcgacatggagactgatggcgggggttggttggtgttccagcgacgcatggacggccaaaccgacttctggagagactgggaggactacgctcacggatttggtaacatctctggggaattctggttgggaaatgaggctctgcactccctaacgcaggctggcgactacagtatgagagtggacttgcgggcaggagacgaagcggtgtttgcccagtacgattcatttcacgtagactccgccgccgagtactaccgtctacaccttgaagggtaccacggaactgccggggatagtatgagttatcactcaggatctgtcttttcagcacgggatcgagatcccaactcattgttaatttcttgcgccgtctcttataggggagcctggtggtaccggaactgtcactacgcgaacttgaacggtctgtacggctccaccgtggatcatcagggggtgtcatggtaccactggaaaggatttgaattttctgttccgttcaccgagatgaagctgaggccgcgtaatttccgctcccccgccggcggaggatag

SEQ ID NO: 31813 - RNA, 2022 nt, synthetic construct
  misc_feature 1..2022: note = Description of Artificial Sequence: Synthetic coding sequence
  source 1..2022: mol_type = other RNA
atgcgattatcatggagtgtagcccagggacctttcgactcttttgtcgtccaatacgaagatacaaacggtcaaccccaggcgcttctcgtggatggcgatcagagcaaaattctgatttccgggctggagccttctaccccataccggttccttctctacggacttcacgaaggcaaacggctcggcccactgagtgccgagggcaccaccggattggccccagccgggcaaaccagtgaggaatcccgcccacggctgtctcaactgtccgtgactgacgtgactacttcatctctgcggctcaattgggaggccccacctggagcttttgactcatttctgctgagattcggtgtgcccagcccgagcacactggaaccccaccccagacccctgcttcagcgagaactgatggtgcctggaacacgtcactcagccgtgctgcgcgacctgaggagtggaacattatactcactaaccctgtatggcctgcgcggaccgcataaagcagattccatccagggtacagcccgcactctttctccagtgcttgagtccccccgagatttacaattttcagaaattcgagagacatcagccaaggtcaattggatgcctccaccgagcagagctgatagcttcaaggtcagctaccagttggcggacggtggagagcctcagagtgttcaggtagacgggcaagcaaggacgcagaaactccaaggactcatccctggcgctaggtatgaagttaccgtggtgtccgtgcgcggcttcgaggagtccgagccactgaccgggttcctcaccacagttcccgacgggccaacacagttgagggctttgaacctaacagaaggtttcgcagtgctgcattggaagccccctcaaaatcccgtagatacatacgatgtgcaggtaaccgcgccaggcgcacctcctttgcaggctgagactccgggctcagccgtcgattatccattacatgacttagtgttacacaccaattacaccgccaccgtgagaggacttcgcggacctaacctgacatcccctgcaagcataacatttacaactggtctggaagctccaagggatcttgaggcgaaagaagtgaccccacgaaccgcgctgttaacttggacggaaccgcctgtaaggccagctggctacttgttgagctttcataccccaggaggccaaaatcaagaaatcctcttgcccggggggatcaccagtcatcaactcctcgggctgttccccagcacaagctacaatgcccgcctccaggcaatgtggggccagagcctgctcccacctgtttcgaccagtttcaccacaggaggactgaggataccgtttccccgcgattgtggagaggagatgcaaaacggtgcaggagcatctagaacaagcactatatttttgaacggaaacagggaaagaccgctgaatgttttttgcgacatggaaacagatggaggaggctggctggtgttccagagacgcatggatgggcagactgacttctggcgcgattgggaggactatgctcacggctttggaaatatcagtggggagttctggttagggaacgaggcattgcatagtctgacacaggccggagactattcgatgagagtggaccttcgagctggcgacgaagccgtgttcgcccagtatgatagcttccatgtagattccgccgccgagtattacaggctccacctggagggctatcatggcaccgccggtgactcaatgtcatatcatagcggatcagtattctccgcgcgtgaccgagacccgaactcattactgatctcatgcgccgtcagttaccgcggcgcttggtggtatcggaattgccattacgctaatcttaacgggctgtacggctctacagtggaccatcagggggtgtcgtggtatcactggaagggatttgagttctccgtccctttcacagaaatgaagctgcgacctcggaatttcaggtcccccgccggcggaggatag

SEQ ID NO: 31814 - RNA, 1335 nt, synthetic construct
  misc_feature 1..1335: note = Description of Artificial Sequence: Synthetic coding sequence
  source 1..1335: mol_type = other RNA
atgccacggtccggggctcccaaagaacggccagccgaaccactgacacccccaccctcttatggccatcagcctcagactgggtcaggcgaatcctcaggtgcttctggagacaaagatcacctttactcgacagtgtgcaagccccgttctcctaaaccagctgcccctgctgctcccccgttctcttcctcgtcaggagtcctgggtaccggcctttgcgagctcgataggctgctgcaggaactcaatgcaactcagttcaatataactgatgagataatgagccaattcccctccagtaaggtggcctcaggcgagcagaaggaggaccagtccgaggacaaaaaacgccccagcttacctagcagtcccagccctggcttgccgaaggcaagcgccacatccgccaccctggagttagaccgcttgatggctagcttgagcgatttccgcgtccagaatcacttgccagcttccggcccaactcaaccaccagtagtgagctccactaacgaagggagtccaagcccccctgagcccaccggaaaagggagccttgataccatgcttggtctcctgcagagcgatctgtctcggcgtggggttccaacacaggctaaaggtttgtgcggctcctgcaataagcctattgcgggccaggtcgtaacagcgttggggcgagcgtggcatcccgagcactttgtgtgtggaggctgttcaacagcactagggggctcatccttcttcgaaaaggacggcgctccgttctgtccagagtgctacttcgaacgtttcagtccgaggtgtggattctgcaatcaacccataaggcacaaaatggtgactgctctcgggacccactggcacccagaacatttctgctgcgtgagctgtggtgagcctttcggtgacgagggatttcatgagcgcgagggaaggccgtactgccgaagagattttcttcagctattcgcacctaggtgccaaggttgtcaagggcccatactagacaactacatatctgcactaagcgccctatggcatcctgactgttttgtctgcagggagtgctttgcacctttttcaggcgggtcctttttcgagcacgaagggcgccctttatgtgagaatcattttcatgccaggagaggctcactgtgtgctacctgtggcttgccagtaaccggtcgttgtgtgtcagcgttgggccggcgcttccaccccgaccactttacttgcacattttgtttaagaccacttacaaagggatcctttcaagagcgcgccgggaagccatattgtcagccctgcttccttaagctcttcggatag

SEQ ID NO: 31815 - RNA, 1335 nt, synthetic construct
  misc_feature 1..1335: note = Description of Artificial Sequence: Synthetic coding sequence
  source 1..1335: mol_type = other RNA
atgccaaggtccggggccccaaaagagagacccgcagagcctctcacaccccctcccagttacggacatcagccccagacgggatcgggcgagtcttccggcgcttcaggagacaaggatcacctttactcaaccgtgtgcaagccacgctcaccaaaaccagcagccccagccgcaccaccctttagttcctccagcggcgtgctcggcacgggcttgtgcgaacttgaccgcctgctgcaggagctcaacgcaacccagttcaacatcaccgacgagatcatgtcgcaattcccgtccagcaaggtcgccagcggcgaacaaaaagaggaccaatccgaagataagaagcgaccatctcttcctagtagtccatcaccgggcctgcccaaagcctcagccacctctgcgaccctggaactggaccggcttatggcgtcactttcagacttcagagtacaaaaccatctgcctgcgtctgggccaacgcagccccctgtcgtgagcagcaccaacgaggggagccctagtcccccggaacccaccggtaagggcagcctggacaccatgcttggactcttacagagcgacttgtcaagacgcggcgttccaacacaggctaaaggattgtgtggaagttgtaacaaaccaatcgccggacaggtcgtcacagctcttgggcgtgcatggcaccccgaacatttcgtgtgcggcggatgctcaactgccctaggcggtagctccttcttcgaaaaggatggcgcgcccttttgcccggaatgttacttcgagcgcttctccccaaggtgcggattttgtaaccagcccatccgtcacaaaatggtgacagcactaggcacacactggcaccccgagcatttttgctgcgtttcgtgtggggagccttttggggatgagggattccatgaacgcgagggaaggccgtactgccgaagagattttctccagttatttgctccgcggtgccaaggttgtcagggtccaattctagataattatatatccgctttgtccgctctttggcaccctgattgttttgtgtgtagagaatgttttgcacctttctctggcggctccttcttcgagcacgagggccgcccattatgcgagaatcactttcacgctaggcgcgggagcctctgtgcaacatgtggattaccagtcactggtagatgcgtgagcgcactgggaaggaggtttcatccagaccatttcacttgcaccttctgtttgaggcctctcacaaaaggcagcttccaagaaagggccgggaagccatactgtcaaccctgtttccttaagctgttcggctag

SEQ ID NO: 31816 - RNA, 1386 nt, synthetic construct
  misc_feature 1..1386: note = Description of Artificial Sequence: Synthetic coding sequence
  source 1..1386: mol_type = other RNA
atggaagatctcgacgctctgctttctgacctcgagacaactacgagccatatgccaagatccggagcacccaaagagcggcccgccgagcctcttaccccacctccttcttacggacaccagccacaaaccggaagcggagaatcaagtggggcatccggagataaagatcacctttattccacagtttgtaaaccacgcagccccaagcctgccgcccccgccgccccgcctttctctagttctagtggcgtcctgggaacggggttatgcgagctggatcgactgcttcaagaacttaatgcgacccagttcaacataacagatgagattatgtcacagttcccttcctccaaggtggcctccggagagcaaaaggaggatcagagcgaagacaaaaagcggccttctctcccgagctctccaagcccaggcctcccgaaagctagcgcaacttctgccacgctcgagcttgaccggttaatggctagccttagtgactttagagtccagaaccatttgccggcaagtgggccaactcagccccccgtggtttcttccaccaatgagggatccccatcccccccagaaccaacaggtaagggtagtctcgatacaatgctcggcttgctgcagtcggacctgagtagacgcggggtgcccacacaggccaagggcctgtgtggctcctgcaacaaacccatcgcaggtcaggtggtaactgcccttggaagagcctggcatccagagcacttcgtgtgcggcggctgttccacagcactcgggggctcatcattttttgagaaggacggcgccccattttgcccggagtgttacttcgaacggttttctcccaggtgcgggttctgcaatcagcctattagacataaaatggtcactgcactcggcactcactggcacccagaacacttctgttgtgtctcctgcggagagccctttggagacgaaggtttccacgagagagaaggtaggccatactgcagaagggattttttgcagttgtttgctccacgctgccagggatgccaaggccctatactagataactacatttcagcattgtcggccctgtggcacccagattgctttgtgtgtagggaatgcttcgcccctttcagcggaggatcatttttcgagcacgagggccggccactctgtgaaaatcattttcacgctaggcggggaagtctgtgcgccacctgtggactgcccgttactgggcggtgcgtgtcagctctgggacggagattccaccccgatcatttcacctgtaccttttgcctgaggcctttgaccaaaggatcatttcaagaacgcgcaggaaagccttactgtcagccgtgcttcctaaaactcttcgggtag

SEQ ID NO: 31817 - RNA, 3075 nt, synthetic construct
  misc_feature 1..3075: note = Description of Artificial Sequence: Synthetic coding sequence
  source 1..3075: mol_type = other RNA
atgtgtgcaagaatggctgggaggactacggcagccccccgaggtccctacgggccttggttgtgcctactggtggcgttggcattagacgttgtaagagtggactgcggacaggctcccctggatcccgtttacctgcctgccgcattggagttactggacgcccccgaacacttcagggtgcagcaggtgggccattatccccccgctaacagctccctttcttctcgcagtgaaacattcctgcttttgcagccgtggccacgggctcagccccttctgagagcctcttatcctccttttgccacccagcaagtcgtgcccccccgagtgactgagcctcaccagcgccccgtaccttgggacgtgcgcgccgtcagcgtggaggccgcagtaacccctgctgaaccttacgcgagggttctatttcatcttaaggggcaagactggccccctggatcaggaagcttaccctgcgcgaggttacacgctacccaccctgctggaacagcgcaccaggcctgccgcttccaaccttccctcggcgcctgcgtagttgaactcgaattaccatctcattggttctcacaggcttctaccacacgcgctgagctggcctatactctagagcccgccgcagaagggcccgggggatgtggaagcggagaagagaatgatcctggtgagcaagccttgcccgtggggggggtggagttgaggccagccgacccaccccagtaccaggaagtcccattagacgaggccgtaacgctgagagtgcctgatatgcctgttcgacctggccagctgttcagcgctactctgctcctgaggcacaacttcacagcttccctgttgaccctgcgcattaaagtcaagaagggactgcacgtgactgccgctcggccagcccagcccaccctatggaccgctaagctggaccgatttaagggctcaaggcaccatactacccttataacatgccacagggccggcctgaccgaacccgatagcagctcaccattagagctttccgaattcctgtgggttgatttcgtggtggaaaatagtactggaggcggggtagcagtaactcgtccagttacctggcagctcgagtatcccggacaggctcccgaggccgaaaaagacaagatggtctgggaaattcttgtgagcgagagggatattagagccctgatcccactagctaaggcagaggaactcgttaataccgctccactgaccggggtaccacaacatgtgccagtgcgactcgtgacagtggacggtgggggtgcgctagtcgaagtgactgaacacgtaggttgtgagagtgcaaacacgcaagtgctccaagtgagtgaggcttgtgacgcagtctttgtggcaggaaaggaatcccgaggagcgcgcggcgtaagagtcgacttttggtggagacgcctgcgggcttctctcaggttgaccgtctgggcccccttactccccctaaggatcgaattgactgacactaccttggagcaggtgcgtggctggagggtaccgggccctgcagaaggccctgctgaacccgccgctgaggcctctgatgaagccgaacgccgcgcacgtggatgtcatttgcagtaccagcgcgcaggcgtgcgatttctagcccccttcgcggcccacccacttgacggtggcaggagactgactcatcttctcgggcccgattggcttttggacgtgagccatttggttgcacctcatgcgagggtcctcgatagccgggttgcctcattagaaggcggtagagtcgttgtgggaagagaaccaggggtgacctccatcgaggtccggagccccctgtctgacagtatcttaggtgaacaggcattggcggttactgatgataaagtgtctgtcctagaactgcgggtgcagccagtcatgggcatttcgctcaccctttcacgtggaactgcccaccctggagaggtaacagcaacctgctgggcgcagtccgctctgccagcccctaaacaggaagtcgccctgtccctctggctcagcttcagtgaccacactgttgcgcccgccgaactgtatgatagacgggacctgggcctctccgttagtgccgaagaacctggcgccatccttcccgcagaagaacagggggctcagctgggcgtggtagtgtctggtgcgggagccgaaggattaccgctgcatgtggctcttcatccgcctgaaccatgtagacgtgggcgccatcgggtgcccctcgcttcaggtacagcctggctcgggctacctccagcaagcacaccggcaccagccctgccctcttccccggcttggagcccgcccgcgacagaagcgacaatgggcggcaagagacaagtggccgggtctgtggggggtaacactggggttaggggaaagtttgaacgtgctgaagaggaagcacgaaaggaagaaaccgaagcccgcgaggaagaggaggaggaggaagaagagatggtacccgcaccccagcatgtcactgaattagagctgggtatgtatgcactgttgggggttttctgcgttgctatctttattttcctagttaacggagtggtgttcgttctcagatatcagcggaaagaaccccctgactccgccacggaccccaccagccctcagcctcataactgggtatggttaggtacggatcaagaagagctaagcagacaattagaccgacaatcacctgggcctccaaaaggagagggcagttgtccatgtgaatcaggcggcgggggcgaggcccctacactggcgcctggacccccaggcgggactacctcctcgtcttctaccctagctcgcaaagaagcaggcgggaggcgaaagagagtcgagtttgtcaccttcgcaccagcacctcccgcacagtcgccggaggagcccgttggcgctcctgccgtgcagtcaatccttgtggccggggaggaagacatacgctgggtttgtgaagatatgggactgaaggaccccgaagagttaaggaattacatggaaagaatccgaggatcgtcctag

SEQ ID NO: 31818 - RNA, 1368 nt, synthetic construct
  misc_feature 1..1368: note = Description of Artificial Sequence: Synthetic coding sequence
  source 1..1368: mol_type = other RNA
atgggcctgtctacagtgccagatctgttattgcccctggttcttctcgaattgctcgtaggcatttaccccagtggtgtaatcggcctggtcccccacttaggcgatcgggaaaagagagattccgtctgcccgcagggaaaatatatccatccacagaacaactctatttgctgcaccaaatgccataaaggcacatacctgtataacgactgtcctggccctgggcaggatacagactgtagggaatgcgagagtggcagcttcactgctagtgaaaatcacttgcgtcattgcttgagctgttccaaatgcagaaaagagatgggacaggttgaaatctcatcatgcacagtggatcgcgataccgtctgcggttgtagaaagaaccaatacagacattactggtcagagaacttgttccaatgttttaattgtagcctctgcctgaacggaaccgtccacctgtcttgccaagagaaacagaataccgtatgcacgtgccacgctggatttttcctgcgcgaaaatgaatgtgtctcctgcagcaactgcaagaagtctttggaatgtaccaagctgtgtttacctcaaattgagaatgtaaagggcactgaggactctggaacaaccgtgttactacccttagtcattttttttggtctctgcctgttgtctctcttattcatcgggctcatgtataggtatcagcggtggaagtcgaagctgtatagcattgtttgcggtaaaagcactcccgaaaaggagggagagctagaaggcaccaccactaaacctttagcacccaaccctagctttagcccaactcctggattcacccccacattaggattttcacctgtgccatctagcacctttacatcaagtagcacatacaccccgggggattgcccaaattttgctgctcctcgcagagaagtggctcccccctaccagggagcagaccctatacttgccacggcactggcttcggaccccattccaaacccgctccaaaaatgggaagactcagcccataagcctcaatcgctagatactgatgatcccgctactttgtacgcagtggttgagaatgtaccacctttgaggtggaaggagtttgtgagacgccttggcctctccgatcacgagattgatcgtctcgagctacaaaatggccgatgcctcagggaggcacagtacagcatgttggcaacctggcggagacggacaccacggagagaagcaacactcgaattgctgggccgggtcctaagggatatggacctgctgggctgcttagaggatatagaggaggcactgtgtggtcccgcagctttgccccctgctccatcgcttttgcgatag

SEQ ID NO: 31819 - RNA, 657 nt, synthetic construct
  misc_feature 1..657: note = Description of Artificial Sequence: Synthetic coding sequence
  source 1..657: mol_type = other RNA
atggggttgtcaacggtcccagacttgttgctgccactcgtcctcctcgaacttcttgtgggcatttacccatctggggtaataggcctggtgccccatctgggcgatagggagaagcgagactcagtatgcccccaaggaaaatacattcatccccagaataatagcatctgttgtaccaagtgccataagggaacatatctctataatgattgtcccggtccaggtcaggatacagattgcagagaatgtgaatccggttctttcactgcttctgagaatcatcttcggcactgtctgtcctgcagtaagtgcagaaaagagatgggccaagtcgaaatttcaagctgcacagttgacagagataccgtctgcggctgtcggaaaaatcagtatagacactactggagcgagaacctgtttcagtgcttcaattgtagcctgtgtctgaacggcacggtacacctgtcatgccaggaaaagcagaacaccgtgtgcacctgccatgctggcttctttttacgcgaaaacgaatgtgttagttgttctaaagtgttactgtgccggcccggatggaacgccgttgcaagaagtcgcctgaccgctactagtgcctcacaaattcaagccattttactccttcagcctcccaagtag

SEQ ID NO: 31820 - RNA, 1386 nt, synthetic construct
  misc_feature 1..1386: note = Description of Artificial Sequence: Synthetic coding sequence
  source 1..1386: mol_type = other RNA
atggcacccgttgccgtatgggcagcactcgctgtcggcttggaattatgggccgccgctcacgccctccctgcccaagtagccttcaccccttatgcaccagaacccggctcgacctgtcggctgcgagaatattacgatcagacagcccaaatgtgctgttctaaatgcagccccggtcagcatgcaaaggtgttctgtacaaagacctctgacaccgtctgcgacagctgcgaggacagtacctatacccagctctggaattgggtaccagaatgcttaagctgcggttcaagatgtagcagcgatcaggtcgaaacccaggcgtgtacccgagaacagaatagaatttgcacctgccgacctggatggtattgcgctttatcaaagcaagagggctgccgtctgtgtgcaccattaagaaagtgtcgccctggatttggcgtggctcgcccgggtacagagactagtgatgttgtatgtaaaccctgcgctccagggacttttagcaatactacgagtagtacagatatatgccggcctcaccagatatgcaatgtggtcgccattcccggcaacgcctcaatggacgcggtttgcacctccaccagccccacccggtccatggcccctggggcagtccacttgccacagcctgtctcaactcgctctcaacacacacagccaacacccgagcctagtactgccccatcaacatcattcttgctgcctatgggtccgagccctccggctgagggatccaccggggacttcgcgctacccgtggggctgatcgtcggggttactgccctgggactgcttatcattggagttgtgaactgcgtaattatgacccaggtcaagaagaagcctctatgcctacagcgggaggcaaaggtcccgcacctacccgcagataaagcacgaggaacccaggggcccgagcaacagcatttgctgatcaccgcaccttcttcctctagcagctctctcgagagttcagcctcagctttggatcgacgcgccccgaccagaaaccagccacaggcgcctggcgtcgaagcctccggtgctggagaggcacgcgcatccactggttccagtgactccagtcctggggggcatggcactcaggtgaacgtgacctgcatcgtgaacgtttgctcaagtagtgatcacagcagccagtgttccagccaagcgagttcaactatgggagataccgactcttctccatctgagtctccaaaagacgagcaggttccatttagtaaggaagaatgcgctttcagaagccagctagaaacccctgagaccctgttgggcagtaccgaagaaaaacctttgcctctcggagtgcctgacgctgggatgaagccttcttag

SEQ ID NO: 31821 - RNA, 807 nt, synthetic construct
  misc_feature 1..807: note = Description of Artificial Sequence: Synthetic coding sequence
  source 1..807: mol_type = other RNA
atggcacctgtggctgtttgggcagccctcgcggttggtctcgaactctgggccgccgcacacgcactgccggcacaagtcgcctttactccatatgcccccgaaccaggcagtacatgccgactacgcgaatattacgatcagacggcacagatgtgctgctcaaaatgttctccgggacagcacgccaaggtgttctgtacaaagacctctgacacagtttgcgactcttgtgaggacagtacatatacccaactgtggaattgggttcccgagtgtctgtcctgcggatcccgttgttcatccgaccaggtcgaaactcaagcctgcacccgcgagcagaatcggatctgtacatgtcgcccaggctggtactgcgcccttagtaaacaggagggctgcagattgtgcgcccccttgcggaagtgcagacctggtttcggagttgcccgtcctggcactgagacttccgatgtcgtgtgcaagccctgtgcccccggtacattctccaataccacctcttcaactgatatctgcaggccccaccagatctgtaacgtggttgccataccagggaacgccagtatggatgcagtctgcacgtcaacatccccaacccgttctatggctccaggcgccgttcacctgcctcagccagtttccactcgttctcagcacacacagccaacccccgagccatcaacagccccctctacttccttcctcctgcccatgggtcctagtcccccagccgagggtagcacaggggatttcgcgctcccggtcgtctctctctccagtagctag

SEQ ID NO: 31822 - RNA, 468 nt, synthetic construct
  misc_feature 1..468: note = Description of Artificial Sequence: Synthetic coding sequence
  source 1..468: mol_type = other RNA
atggctcctgttgctgtctgggccgcactggccgtcggtctcgagctgtgggctgcagcccacgcgcttccggctcaagtggctttcaccccatacgcccctgaaccaggttccacgtgcaggcttcgagagtactatgaccagacagctcagatgtgttgttccaagtgcagtccaggacagcatgcgaaagtgttctgcaccaagaccagcgacaccgtgtgtgacagttgtgaggattccacctacacccagctatggaactgggtcccagagtgtttgtcctgcggctccagatgttcctctgaccaggttgaaacccaggcttgtacacgagagcagaaccggatctgcacgtgtagaccaggatggtactgcgcccttagtaaacaagaaggctgccggctctgtgctcctctccggaaatgtaggccgggctttggcgtggcgcgccctgatctctcctag

SEQ ID NO: 31823 - RNA, 114 nt, synthetic construct
  misc_feature 1..114: note = Description of Artificial Sequence: Synthetic coding sequence
  source 1..114: mol_type = other RNA
atggcacccgttgcagtatgggcagcgctggcagtcggactggaactatgggccgctgctcacgccctgcctgcccaagtggaccctggccccctctttccccaccccggatag

SEQ ID NO: 31824 - RNA, 1131 nt, synthetic construct
  misc_feature 1..1131: note = Description of Artificial Sequence: Synthetic coding sequence
  source 1..1131: mol_type = other RNA
atggttgtcgtggcagcagcacccaatcctgccgatggaactccgaaagttctactactgagtggccagccagcttctgccgccggggctccagcgggacaggcgctaccactgatggtacctgcacaacgcggtgccagccccgaggcagcctccggcggtctcccccaagcacgcaagcggcaacggctgactcatctctctcccgaagaaaaggcactgagacgcaagctgaaaaacagagttgcggcccagaccgcccgagaccgcaagaaagcaaggatgagtgaattagagcagcaagtcgtggacctggaagaagagaatcagaagctcctcctcgaaaaccaactgttgagggaaaaaacccatggcctcgtggtcgaaaatcaggaactccgtcaaaggcttggcatggacgcccttgtggcagaggaggaggccgaggctaaagggaacgaagtacgacctgtcgccggatccgctgaaagtgctgcaggcgcggggccagtggtgactcctccagagcaccttccgatggattcgggtggaatcgactcatccgactccgaatccgatattctgctgggaatcctggacaaccttgaccccgtgatgtttttcaagtgccccagccccgagcccgctagcctagaggaactgcctgaggtgtatccagaaggcccttcatcactgcccgcctcactgtccctctcggtcggcacgtcttctgcgaagttggaggctatcaacgagctgatccgcttcgaccacatctataccaaaccattggttctggagattccctctgaaaccgaaagtcaagccaatgttgtcgtgaagattgaagaagcccccctgtctccttctgagaacgatcatcctgaatttattgtgtcagtgaaggaggagcccgtcgaagacgatcttgtgcccgagctggggatcagcaacttattgtcgagctctcattgccccaagccctccagttgcctacttgatgcctacagcgactgtggatatggtggatccctttccccgttttctgatatgagtagtttactcggtgtgaaccatagctgggaagatacattcgccaatgaacttttcccccagttaatttcagtctag

SEQ ID NO: 31825 - RNA, 1494 nt, synthetic construct
  misc_feature 1..1494: note = Description of Artificial Sequence: Synthetic coding sequence
  source 1..1494: mol_type = other RNA
atgaccgtatttctctcttttgcatttttagcagccatactaacccatatcggttgtagcaatcaaagacgcagtcctgaaaattctggccgccgatataacagaattcagcacggacagtgtgcctacacctttatactgccagagcacgacggtaactgccgggagtctactacagatcagtataacaccaacgccctccagagggacgcgccccacgtggaacctgacttctcatctcagaaacttcagcatctcgaacacgtgatggagaattacacgcagtggctccagaaactggagaactatatagtcgagaatatgaagagcgaaatggcccaaatccaacaaaatgccgtgcaaaaccacacagccacgatgcttgagatcggtacttccctgcttagtcagactgcagagcaaacacgcaagctcactgatgtggaaacccaagtcctgaatcaaaccagcagacttgagattcaactccttgagaattcacttagtacttacaagcttgagaagcaattgctgcaacagaccaacgagattctaaagattcacgaaaagaattctctcctggaacataaaatattggagatggagggcaagcacaaagaagagttggatactttaaaagaagaaaaagagaacctgcaagggttggttacacgtcagacatacattattcaggaattggaaaaacagctaaatagggccaccacaaacaactcagtcctgcagaagcaacaactggagttaatggacactgttcataacctggtaaatctgtgcacaaaagaggtcttactgaagggaggcaaaagagaagaggagaagccttttagagactgcgctgatgtctatcaagcgggatttaacaaaagcggaatatacactatctatatcaataatatgcctgaacccaagaaagttttctgcaacatggatgtcaacgggggcgggtggacagtgatacaacatagggaagatggaagtctcgatttccagcggggatggaaagagtataaaatgggtttcggcaatcccagtggcgagtactggcttggcaatgaatttatcttcgcgatcacaagtcagaggcagtatatgctccggattgagctgatggattgggaaggcaacagagcgtactctcagtatgacaggtttcatatcggtaacgaaaagcagaattataggctgtacctcaaaggacacacaggcacggctggaaaacaatcatctttaattctgcacggagccgatttcagcaccaaggacgccgataatgacaactgcatgtgcaaatgcgccttaatgctcactgggggctggtggttcgacgcctgcggcccatcaaatttaaacggaatgttttacacagcgggacagaaccatggcaagctgaatgggattaaatggcattatttcaagggcccttcctactccctgcgctcaactactatgatgattcggccactggacttttag

SEQ ID NO: 31826 - RNA, 459 nt, synthetic construct
  misc_feature 1..459: note = Description of Artificial Sequence: Synthetic coding sequence
  source 1..459: mol_type = other RNA
accgtgagtaatctgctggagcacaaaatcctcgaaatggaggggaagcataaggaagagctggacacgctgaaagaagagaaagagaatttgcaaggactagttacacgacagacctatattatccaagagttagagaaacaactgaatagagcgacaaccaacaatagcgttctgcaaaaacagcagttagaactgatggacacagtgcacaatctagtcaatctgtgtaccaaagaaggtgtcctgctgaagggtgggaagagagaggaagagaagccctttcgcgactgtgctgacgtgtaccaggcagggtttaacaagtccggcatttatacgatctatatcaacaatatgcctgaacctaaaaaagtgttttgcaacatggacgtaaacggcggcggatggacagtcattcagcaccgggaagacggttccctggattttcagaggggttag

SEQ ID NO: 31827 - RNA, 1497 nt, synthetic construct
  misc_feature 1..1497: note = Description of Artificial Sequence: Synthetic coding sequence
  source 1..1497: mol_type = other RNA
atgaccgtcttcctctctttcgcgttcttggccgcgattcttacccatatcggctgttctaaccagcgcagatcgcccgagaattctggccgccgttataatcgcatacagcatggccagtgtgcgtacacctttatcctcccagagcacgacggaaattgcagggagagtactactgaccagtacaacacaaatgcattgcagagggatgccccacacgtcgaaccagatttcagctctcagaaactccagcacctcgaacatgtcatggaaaactacactcaatggttgcaaaaactagaaaattatattgtcgaaaacatgaaaagtgaaatggctcagatccagcagaatgcggtccagaaccacactgctaccatgcttgagatcggaacctcactgctgagtcaaaccgctgaacaaaccagaaagctcaccgatgtggaaacccaagtgcttaatcagacatcacgcctagaaatccagctattagagaacagtttatctacttacaaactagaaaagcagctactgcagcaaacaaacgaaatccttaagattcatgagaaaaactccttactggagcacaagatactcgaaatggagggaaaacataaagaggagttagatacactcaaagaggaaaaagaaaacctgcagggcctggttacacgacagacttatattatacaggagttagaaaagcaactgaaccgtgccaccaccaataatagcgtcttgcagaagcaacagctggaactcatggacacagtccataacttagttaatttgtgtaccaaagagggggtgttgctcaaagggggaaagagggaagaagaaaagccattcagagattgcgctgacgtgtaccaggcgggcttcaacaaatctggcatatataccatctacattaacaatatgcccgagcccaagaaggtgttttgcaacatggacgtgaacggtggaggatggaccgtaatccagcatcgcgaggacggctccctggattttcagcgcggatggaaagagtacaaaatggggtttggaaatccttctggcgagtattggcttgggaatgaatttatctttgcaattacctcccaacgacagtacatgttaagaatcgaactcatggattgggagggcaatagggcctactctcagtacgacagattccacattggaaatgagaaacagaattacaggctgtacctgaaaggtcatacaggaacggccggcaaacaatcttcattaattttgcatggcgccgacttctcaacaaaagatgctgataatgacaattgcatgtgcaagtgcgccctgatgctaaccggtgggtggtggtttgatgcctgtggcccctctaaccttaatggtatgttctacacagccggtcagaaccacggaaaacttaatggcattaagtggcattactttaaaggaccttcctactccttacgcagcacaacaatgatgatcagacccttggacttctag

SEQ ID NO: 31828 - RNA, 894 nt, synthetic construct
  misc_feature 1..894: note = Description of Artificial Sequence: Synthetic coding sequence
  source 1..894: mol_type = other RNA
atggagggcaaacacaaggaggagctagatactttgaaagaggagaaagaaaatctgcagggactggtgacaagacagacatatattattcaagagctggagaagcaacttaacagggcaactaccaacaattcagtcttacagaaacagcaactggaactaatggacacagtccacaatctggtaaacctgtgcaccaaggaagtgttgctgaagggggggaagagagaagaggagaaaccgttcagagactgcgccgatgtataccaggcagggttcaacaaatcaggcatatacacaatctatattaataatatgccagagcctaaaaaagttttttgcaacatggatgtcaacggagggggttggacagtgatacagcatcgggaagacggttctttagacttccagcgaggatggaaagagtataagatgggcttcgggaacccaagtggggaatattggctagggaacgaatttatttttgccattactagtcagcgccagtacatgcttaggattgagctgatggattgggaaggcaatcgggcgtattcacagtatgacaggtttcatattggcaacgagaaacagaattacagactttatctaaagggacacacaggtacagcgggcaaacagtcatcactgatactacatggtgccgacttttcaaccaaagatgcagacaatgacaattgcatgtgcaagtgcgctctgatgctgacgggggggtggtggttcgacgcatgtgggccctctaacttaaacgggatgttttatacggcaggccagaatcatggaaagctgaacgggattaagtggcattattttaagggacctagctattccctacgcagtaccacaatgatgattcggccgctcgatttctag

SEQ ID NO: 31829 - RNA, 897 nt, synthetic construct
  misc_feature 1..897: note = Description of Artificial Sequence: Synthetic coding sequence
  source 1..897: mol_type = other RNA
atggagggcaagcacaaagaagagctcgacaccctgaaggaagagaaagaaaacttacagggccttgtgaccagacagacgtatattattcaggagttagagaaacaattaaatagggctacaaccaataattcagtgttacaaaagcagcagcttgaacttatggacaccgtccataacctggtgaatttgtgcactaaagaaggagtgctgttgaagggaggaaaaagagaggaggaaaaaccctttagagattgtgcagatgtctatcaagccggttttaataagtcagggatttatactatctacattaacaacatgccagaacctaaaaaggttttttgcaacatggatgtcaacggtggcggctggaccgttatacagcatcgagaggatggatccttggattttcagcgagggtggaaagagtataagatgggctttggaaatccaagtggggaatactggttgggaaacgaatttatctttgccattacttcacaacgtcaatacatgctcaggattgaattaatggattgggagggaaatagggcttatagtcaatatgatcgctttcacatcggcaacgagaaacagaattatcgactctacttaaaaggccataccggcactgcgggcaagcaatccagcctcattctccacggcgccgacttctctactaaagatgctgataacgataattgtatgtgtaaatgcgctctgatgctgacaggcggttggtggttcgatgcttgcggaccaagcaatctgaatggtatgttttatactgccggacaaaaccatggaaagttgaacggcattaaatggcattacttcaagggcccatcctacagcctgagatccactactatgatgatccgccccttggacttctag

SEQ ID NO: 31830 - RNA, 720 nt, synthetic construct
  misc_feature 1..720: note = Description of Artificial Sequence: Synthetic coding sequence
  source 1..720: mol_type = other RNA
atggctcacgcaggtagaaccggctacgacaaccgcgaaattgttatgaagtacatccactataaactgagtcagcgtggctacgaatgggatgccggggacgttggcgcggctccacctggcgccgcccccgctcccggaatcttcagcagccagcccggccacactcctcatccagccgcttccagagaccctgtggcaagaacctctcctctgcagactccagccgctccaggcgcagctgccgggccggccttgtcccctgtcccccccgtggttcatttaactcttcggcaagccggagatgatttttcaagaagatacagacgggattttgcagagatgagcagccaattgcacttaaccccattcacggccaggggcagatttgctacagtggtagaagagttgttccgagacggcgttaactggggaaggattgtcgcattcttcgagttcggtggagtgatgtgcgttgaatccgttaatcgtgaaatgtcacccctcgtagacaatatcgctctgtggatgaccgaatacttgaatagacatctgcacacctggattcaggataacgggggatgggacgcctttgtggagttgtacggaccaagcatgcgccccttatttgactttagctggctgagccttaaaactttgctgtcattagccctcgtcggcgcctgcatcaccctcggagcttatttaggccataaatag

SEQ ID NO: 31831 - RNA, 720 nt, synthetic construct
  misc_feature 1..720: note = Description of Artificial Sequence: Synthetic coding sequence
  source 1..720: mol_type = other RNA
atggcacatgcaggacggaccggctacgacaatcgagaaattgttatgaaatatattcactataaactgagccagagaggatatgaatgggacgctggcgacgttggcgctgctccccctggcgctgctcctgctccagggattttttcctcccaaccgggtcatactccacatcccgcagcatcacgcgatcccgtagctcgtacttccccactgcagacgcccgccgcccccggcgccgccgcggggcccgccctcagccctgtgcccccagtagttcacctcacgctccgccaggcgggcgacgatttctcacgacgctacaggcgggactttgcagagatgagtagccaattacacttgacgccgtttaccgcaagaggaaggtttgcgacagttgtggaagaactgttcagagatggggtgaactgggggaggatcgtggcgttttttgagttcggaggagtgatgtgcgtggaaagcgtcaatcgggagatgagccctctcgtagacaatattgccttgtggatgactgaatacctcaacaggcatctacatacatggattcaggacaatgggggctgggacgcttttgttgagctatacgggccttcaatgagacccttgttcgacttttcatggctttcgcttaagacactcctcagcctcgcactggtcggggcctgcataactttaggagcctatttggggcacaagtag

SEQ ID NO: 31832 - RNA, 618 nt, synthetic construct
  misc_feature 1..618: note = Description of Artificial Sequence: Synthetic coding sequence
  source 1..618: mol_type = other RNA
atggcacacgcaggtagaaccgggtatgacaaccgagaaatagttatgaaatacatacattataagttgtcccaaagaggttacgaatgggacgcgggagatgtaggagccgcacctccaggcgctgcaccagctccgggtattttttctagtcagccaggtcatacaccacatcctgccgcatctagagatcccgtcgcacgtacctcccccctccagacccccgctgccccaggcgccgctgccggccctgctctctcccccgttcctccagtcgttcatctcacactgagacaggcaggcgatgactttagccgcaggtacagaagagatttcgcagaaatgagcagccagcttcatctcaccccgtttactgctcgggggagatttgcaactgtcgttgaggaactgtttagagatggtgtgaattggggcagaatcgtggcctttttcgagtttggaggcgtaatgtgtgtggagagcgtgaaccgcgagatgagcccactggtggacaatatagccttgtggatgaccgaatacctgaataggcatctccatacttggattcaggataatggtgggtgggtgggagcgttaggggacgtttctcttgggtag

SEQ ID NO: 31833 - RNA, 939 nt, synthetic construct
  misc_feature 1..939: note = Description of Artificial Sequence: Synthetic coding sequence
  source 1..939: mol_type = other RNA
atggctaaggttttctcctttatacttgtgacaaccgcacttactatgggccgtgagatctcagccctggaggattgtgcgcaagaacaaatgagactgcgtgcccaggtcaggctgctagagacaagggtaaaacaacagcaggtgaagattaagcaacttctccaagaaaacgaagttcaattcttagataagggcgatgaaaacacagttattgacctaggatctaaaaggcaatacgctgactgttccgaaatcttcaacgacggatacaagctttctggattctataagatcaaaccactccagagtccagccgaattttctgtttactgcgatatgagtgatggaggcggatggaccgtaatacagcgcagatccgacgggagcgagaatttcaaccgcggctggaaggactacgagaatggattcggaaattttgtccagaagcacggagaatactggctcggcaataagaacctgcatttcctgactacacaagaagattatactctgaaaattgatttagccgattttgagaaaaattctcggtacgcccagtataagaatttcaaggtgggggatgagaagaatttctacgaactgaatatcggcgagtatagcggtaccgcaggcgattctctggctggaaactttcaccccgaagttcagtggtgggcgtcacatcaacggatgaaattttctacttgggatagggatcacgacaattacgagggaaactgtgcagaggaggatcaatctggatggtggttcaaccggtgccattctgcgaaccttaatggcgtttattactccggcccatacactgcgaaaacagataatggtatcgtgtggtatacgtggcacgggtggtggtattctcttaaaagtgtagtgatgaaaataaggcccaacgacttcatccccaacgtaatctag

SEQ ID NO: 31834 - RNA, 702 nt, synthetic construct
  misc_feature 1..702: note = Description of Artificial Sequence: Synthetic coding sequence
  source 1..702: mol_type = other RNA
atgagtcagtctaatcgcgaacttgtggtggactttctgtcttacaaactgtcccagaagggctactcctggtcccaattcagcgatgtggaagagaacagaacagaagcacccgaagggactgagtccgagatggagaccccttcggctattaatggtaatccttcttggcatttggccgattcacctgctgtcaatggcgctacaggacactcctcctctctcgatgcccgtgaggtgattccaatggccgcagttaaacaggctctccgagaagcgggagacgagttcgaactacggtaccggagagctttttctgatctgacttcacagttgcatattacgccaggcacagcttaccagtcttttgagcaagttgtaaatgaattgttcagagatggcgtaaactggggaagaatcgtagcctttttttcatttggtggcgctctgtgcgtcgaaagcgttgacaaggaaatgcaagtgcttgtgtctcgaattgcagcctggatggctacataccttaatgaccacctcgaaccatggattcaggagaatggcggttgggatacatttgttgaactatacgggaataacgccgctgccgaatcgcggaaggggcaggagcgatttaaccggtggttcctcacaggaatgactgttgccggggttgtgttactggggtcactattctctcgaaaatag

SEQ ID NO: 31835 - RNA, 513 nt, synthetic construct
  misc_feature 1..513: note = Description of Artificial Sequence: Synthetic coding sequence
  source 1..513: mol_type = other RNA
atgagtcagtctaatcgagaacttgtcgttgacttcttgagctataaacttagtcagaagggttactcctggagtcaattcagcgacgtcgaagagaatagaaccgaggcacctgaaggcacagaaagcgagatggaaactccctctgccataaatgggaacccctcttggcatctggcggactcaccagcagttaatggcgccactggccattcctcatccctagatgcacgggaagttattccaatggccgccgtaaaacaagctttgagggaagcaggagatgagtttgaattacgctatcgaagagcatttagcgatctcacgagtcaactccacattacacccggaactgcctatcaaagtttcgaacaggacaccttcgtagagctgtatgggaacaatgctgctgccgaatctcgtaagggacaggaacgcttcaatagatggtttttgaccggaatgaccgtcgcgggagtagtcctactagggtcattgtttagcagaaaatag

SEQ ID NO: 31836 - RNA, 702 nt, synthetic construct
  misc_feature 1..702: note = Description of Artificial Sequence: Synthetic coding sequence
  source 1..702: mol_type = other RNA
atgtcgcaatcaaaccgcgaactggttgttgactttctcagttacaagctgtcgcagaaaggttacagttggagccagttttcagatgttgaggagaaccggacagaggccccagaaggcaccgagagcgagatggaaaccccctcggctattaatggcaacccatcctggcacctagccgattcacccgcggtcaacggcgctaccggacactcttcttctcttgatgctcgtgaagtcattcctatggcggcagtcaagcaagctctccgtgaagccggagacgaatttgaacttaggtaccgaagagcgttcagcgatctaaccagtcagctccatatcacccctggcacagcctatcagtcattcgaacaggttgtcaacgaactctttagggacggcgtcaattgggggcggatagtggccttcttcagtttcgggggtgcactctgtgtggaatccgtggacaaagaaatgcaggttctagttagccgcatcgccgcgtggatggcaacctaccttaatgaccacctagagccgtggatacaagagaacggaggatgggacaccttcgtagaactgtatgggaataatgcggccgccgaaagtcgaaagggccaggagcggtttaacaggtggttcttgacaggcatgaccgtggcgggtgtcgttctactgggcagcctgttctctagaaagtag

SEQ ID NO: 31837 - RNA, 567 nt, synthetic construct
  misc_feature 1..567: note = Description of Artificial Sequence: Synthetic coding sequence
  source 1..567: mol_type = other RNA
atgagccagagtaatcgggagctggtagttgactttctgtcctacaaactgagtcagaaagggtattcctggtcacaattttctgacgtggaggagaatagaactgaagccccagaaggtaccgagtctgagatggagacaccgagcgctatcaacggcaaccctagctggcacctggcagattcacccgccgtcaacggagctaccggtcatagctctagtttggatgcacgagaggttattcccatggctgccgtgaaacaggccttacgcgaagcaggcgatgagtttgaactgcgctataggagggccttctcggacctgacaagtcaacttcacattactccgggcaccgcttaccagagtttcgaacaggttgttaatgaactattcagagatggagtaaattggggaagaatcgtcgctttcttctcattcgggggggcattgtgtgtggaaagcgtcgacaaagagatgcaggtgctagtctcgagaatcgctgcgtggatggcgacttacctgaatgaccacctggaaccttggatacaagagaacggcggctggtag

SEQ ID NO: 31838 - RNA, 702 nt, synthetic construct
  misc_feature 1..702: note = Description of Artificial Sequence: Synthetic coding sequence
  source 1..702: mol_type = other RNA
atgtcacagtccaatcgagagctggtcgtggattttttatcatataaattgagccagaaaggctactcttggtctcagttctcagacgttgaagaaaatagaacagaggcacccgaaggcacagaatctgagatggagaccccaagtgctatcaacggcaacccaagctggcatttagctgactctcccgccgttaacggcgccacgggtcacagtagtagtttggacgcgcgcgaagtaataccaatggccgcggtgaaacaggcactgagggaggcaggggacgagtttgaattgcggtatcgccgtgcgttttccgacttaactagccagcttcacattaccccaggtacagcttatcagtcatttgaacaagtagtcaatgaattgtttcgggacggcgttaattgggggagaatcgtggcctttttcagctttggaggggccctatgcgtggaaagtgttgataaagaaatgcaagtcctagtgagtcggatcgcggcctggatggcaacgtacctgaacgatcatctcgagccttggattcaggagaatgggggatgggatacctttgtggaactgtacggcaacaatgcagccgcagaatctaggaagggacaggagcgttttaatcgctggtttctaacggggatgacagttgctggcgtggtgttactcggatccctcttctcacggaaatag

SEQ ID NO: 31839 - RNA, 567 nt, synthetic construct
  misc_feature 1..567: note = Description of Artificial Sequence: Synthetic coding sequence
  source 1..567: mol_type = other RNA
atgtcccagtccaatagggagctcgtcgtcgacttcctctcttacaaactgtcccagaaaggatactcctggtctcagttcagcgatgtagaggaaaatagaaccgaggccccagaaggtactgagagtgaaatggagacccccagtgcaattaatggaaatccttcatggcacctggcagattcaccagctgtgaacggagcgacggggcacagttcttctttagacgctcgagaagttattccaatggcagcagttaaacaagcgcttagggaggcaggggacgagttcgagctcaggtacaggagggctttctcagatctcacatctcagttgcatatcacacccgggaccgcataccaaagctttgaacaagtagtcaatgagctcttccgcgacggagttaactggggccgcattgtggcctttttttcattcgggggtgcgctgtgcgtggaatcagtggataaggagatgcaggtactcgtttccagaatcgccgcttggatggctacatatctaaatgatcacctagaaccttggatccaggaaaacgggggttggtag

SEQ ID NO: 31840 - RNA, 147 nt, synthetic construct; identical to SEQ ID NO: 31659
  misc_feature 1..147: note = Description of Artificial Sequence: Synthetic coding sequence
  source 1..147: mol_type = other RNA

SEQ ID NO: 31841 - RNA, 546 nt, synthetic construct
  misc_feature 1..546: note = Description of Artificial Sequence: Synthetic coding sequence
  source 1..546: mol_type = other RNA
atgagtcaaagcaatagagaactggtcgtggatttcctgagttataagttatcgcaaaaaggctatagttggtcacaattttcagacgttgaagaaaataggactgaggcccccgagggaacagaaagcgaaatggagactccatccgcaatcaatggaaacccgtcgtggcaccttgccgattcgcctgccgtgaatggggccaccgggcattcatctagcctggacgctagagaagtcatcccaatggctgccgtaaagcaagcattgagggaggccggcgacgaattcgagctaaggtatagaagagcctttagtgaccttacatcacagctgcatatcaccccaggtactgcctaccaatctttcgagcaggtggttaacgaactttttagagacggtgtgaattggggtcggatagtggccttcttttcgtttggaggcgcactctgcgttgagtcagtcgacaaggagatgcaagtcctagtgtctagaattgccgcatggatggctacatacctgaatgatcacctcgaaccatggtag

SEQ ID NO: 31842 - RNA, 618 nt, synthetic construct
  misc_feature 1..618: note = Description of Artificial Sequence: Synthetic coding sequence
  source 1..618: mol_type = other RNA
atgtcacagtctaatagggaattagtggtagactttctcagctataagctctcacagaaaggctattcttggagtcagttctcagacgtcgaagaaaaccggacagaggcacccgaaggaaccgaatcagagatggagactcccagtgcgatcaacggcaatccatcatggcacctcgcagacagtccggccgtgaacggggctacgggtcattccagttctctggacgcgcgtgaggtcattccaatggccgctgtcaaacaagccctccgagaggctggagatgaattcgagttgcgatacaggagggcattcagcgatttgaccagtcagctacacattacccccggaactgcctaccagtcgttcgaacaagtggtgaatgaactcttcagagacggcgtaaactggggccgcatcgtggcatttttcagctttggaggtgctctgtgcgttgagtccgtggataaggaaatgcaggttcttgtaagtcgtattgctgcatggatggctacctaccttaacgaccacttagagccttggattcaggaaaacggcggttgggacacctttgtggaattatacggaaataatgctgccgccgagagtagaaagtag

SEQ ID NO: 31843 - RNA, 567 nt, synthetic construct
  misc_feature 1..567: note = Description of Artificial Sequence: Synthetic coding sequence
  source 1..567: mol_type = other RNA
atgagccagtccaatcgcgaactcgtagtcgatttcctgtcctataagctctcacagaaaggctatagctggagccaattttcggatgtagaagagaatcgaaccgaagcacctgagggcacagagagtgaaatggagactccctcagctatcaatggcaacccttcctggcatttagcagatagccctgccgtgaacggggctaccggccattcaagctcactagatgcaagagaggtgattccaatggccgcggttaaacaggcgctgcgcgaagctggtgacgaatttgagttacgttatagacgagcattcagcgatcttacctcccaactgcacattactccagggactgcatatcagtcatttgaacaggtggttaacgagctattccgcgatggcgtgaactgggggagaattgtcgcttttttttcatttggcggtgctctgtgtgtggaatcagttgacaaagaaatgcaagttctggttagccggatcgccgcgtggatggctacctacttaaacgatcacctcgaaccctggatacaagagaacggaggctggtag

SEQ ID NO: 31844 - RNA, 2613 nt, synthetic construct
  misc_feature 1..2613: note = Description of Artificial Sequence: Synthetic coding sequence
  source 1..2613: mol_type = other RNA
atgaaccacttgaatgtgctcgctaaggctctatatgataatgtggccgagtcacccgatgaactgtcttttcgaaagggcgacatcatgacagtgcttgaacaggatacccaaggactagatggatggtggttatgctctctgcacgggcgtcaggggattgttcccgggaataggttgaaaatcctcgttggcatgtacgataaaaagcctgccggtccagggccaggacctcctgcaactcctgcgcagccgcaaccaggcctgcatgcacctgcccccccagcttcccagtataccccaatgctcccaaacacatatcaaccccaaccagatagtgtctatctagttcctactccctccaaggctcagcaaggcctgtaccaggttccgggcccatctccacaattccaaagccctccagccaaacaaacctcaacctttagtaaacagaccccccaccacccatttccctcccccgccactgatctgtatcaggtgcctcctggcccgggaggccccgcccaagacatctatcaagtgcctccctctgctggtatgggacacgacatctaccaggtgccaccatcaatggatactcgaagttgggagggcactaaaccaccagcaaaggtggtcgtgcctacaagagtaggacagggttatgtgtatgaggcagcccagcccgagcaagatgagtacgatataccacgtcaccttctggccccaggtccacaggacatatacgacgtacctccagtcagaggcctgttaccatcccaatacggccaggaagtctatgacaccccccctatggcggttaaaggccccaacgggcgtgaccccttattggaagtttatgatgtacctccctcagtggaaaagggcctccctccgtcaaaccatcacgctgtgtatgacgtgcctcccagcgtgtccaaagatgtccccgatgggccactgctgcgggaggaaacttatgacgttcccccggcatttgctaaagccaaaccatttgatcctgctagaacccccctcgtgctcgctgctccccctcccgactcccccccagccgaggatgtgtatgatgtgccgcccccagccccagatctgtatgacgttccacctgggctgcgccgacctggaccagggaccctgtacgacgttccgcgcgaacgagtgctccccccggaggtcgccgacgggggagtggtcgacagtggagtgtacgccgtaccacctcctgccgagcgggaagcccctgccgagggaaaaagacttagcgcatcttcaacgggctctacacgtagctcacagtctgccagttccttagaagttgcaggccccggtcgggagcccttggagcttgaggtggctgtcgaagctctggcccgattgcaacagggagtgtccgccactgtggctcatctgctcgaccttgctggttccgccggagccaccggctcgtggagaagcccctccgaaccccaggaaccattagtgcaagatttacaagcagctgtggccgctgtgcagagcgccgtgcatgaactcctggagttcgctcggagtgccgttggtaacgccgctcacacctcagatagagccctccacgccaaactgtcacggcaattacagaagatggaggacgtccaccagacgcttgtagcccacggccaagcactcgacgctggacggggtggttccggggctactttggaagatctggacagactcgttgcctgcagtagggcagtacctgaagatgctaaacaacttgccagctttctgcacggcaacgcaagcctactattcagacggactaaagctacagcaccaggcccggagggaggtggaactctccatcctaatccgactgacaaaacttcctcaattcaatctagaccactgccttctccccctaagtttacatctcaggatagtcccgatggtcagtacgagaatagcgaaggaggttggatggaggattacgattatgtgcacctgcagggcaaggaagaattcgagaagacccagaaagagctgctggagaaaggaagtatcacccgacaaggtaagagtcagttagaactgcagcagcttaaacaatttgaaagactcgagcaggaagtatcccgacccattgaccacgacctagccaactggacacctgctcagcccctcgctcctggacggaccggaggcctagggcccagtgaccgacagttgttgcttttttacctggaacagtgtgaagcaaacctgacaactctcaccaacgcggtggatgcatttttcacagcagtggcaactaatcagcccccaaaaatcttcgtggcacacagcaaatttgtaatcttgagcgcacacaagttggtctttatcggcgacaccctttctagacaagctaaagccgcagacgtgaggagccaagttacccactattcaaatcttctgtgtgatctgctacgcggtatcgtcgccacaaccaaggcagccgcccttcagtacccgagccctagcgcagctcaggatatggtggaacgagtaaaggagttgggccattctacacaacagttccgacgggtgttgggtcagctcgctgctgcctag

SEQ ID NO: 31845 - RNA, 1563 nt, synthetic construct
  misc_feature 1..1563: note = Description of Artificial Sequence: Synthetic coding sequence
  source 1..1563: mol_type = other RNA
atggaaggcggacctgccgtgtgttgtcaagatcctagggcggaactggtggagagggtagcggcgattgacgtgacacacctagaagaggctgacggtggtccagaaccaacacgtaatggcgtagatccaccacctagggcacgggctgctagtgtgattccgggctcaacttcaagattgctgcccgctaggcccagccttagtgctcgcaagttaagtctacaggaaagacccgcaggctcatacctggaagctcaagcggggccttacgctacaggaccggcctcgcatatttccccccgcgcatggagaagacctaccatagaaagccaccatgttgcgatatccgatgccgaggactgcgtccagttgaatcaatacaagctccagagtgaaattgggaaaggcgcctacggtgtggtgagactggcttataacgagagcgaagataggcactacgctatgaaagttctctctaaaaagaagctgctcaaacagtatggattccccagaagacctccgccacggggttcccaggccgcccagggagggcccgctaagcaactcctgccgctggaaagggtttatcaggagatcgccatacttaagaaactcgatcacgtaaatgtggtgaaacttattgaagtccttgatgatcctgcggaagataacctgtacctcgccttgcaaaatcaggcccaaaacatccagttggactcaaccaatatagctaaaccccattccctgcttccctccgagcagcaggacagcggatcgacttgggctgccagatctgtcttcgatctcctgaggaagggaccagtcatggaagtaccatgcgacaagccatttagcgaagagcaggcccgtctgtacctgagagatgtcatattggggcttgagtacctacactgtcagaaaattgttcaccgagatattaagccaagtaacctcctcctcggggatgatgggcacgtaaaaattgcagatttcggcgtctcaaatcaattcgaaggtaacgatgctcagctctcctcaacagccggtactcctgctttcatggcgcctgaggccatatcagacagtggacaatcattctccggaaaagctctggatgtctgggctaccggcgtgaccttgtattgtttcgtgtacggaaaatgcccctttatagacgacttcatactggctttgcacagaaaaataaaaaatgaacccgtggtattccctgaagaacccgaaatcagcgaagaacttaaagatttgatccttaaaatgctggataagaaccctgagactaggatcggtgtccctgatatcaagttgcatccttgggtcaccaaaaacggagaagagccactgcccagtgaagaggagcactgctctgtcgtggaggtaacggaagaggaggttaaaaattcagtgagattaatcccatcctggaccacagtcattctagtcaagtccatgctgcgaaagaggtctttcggtaatcccttcgaaccacaggctcgaagggaagaaagatctatgtctgcacctggcaatctgctcgtatag

SEQ ID NO: 31846 - RNA, 1020 nt, synthetic construct
  misc_feature 1..1020: note = Description of Artificial Sequence: Synthetic coding sequence
  source 1..1020: mol_type = other RNA
atgtggcaattgtgggccagtctgtgctgcttgctggtgttggcaaacgctcgatccaggccatccttccaccctctttcagacgagctcgtgaattacgtcaataagagaaacacaacttggcaggccggacacaatttttataacgtagacatgtcctatctgaagagactatgcggaacattcctcggaggacctaaacccccccagcgtgtgatgttcacagaagaccttaaattgcccgcgtcattcgatgcccgcgagcagtggcctcagtgtccaaccataaaggaaatcagagatcaggggagctgcggcagttgctgggcattcggagccgtagaggctatttcggaccgcatctgcattcataccaacgcacacgtatccgtggaagtaagcgccgaagatctcctcacgtgttgcgggtccatgtgtggagacggatgtaacggagggtaccctgccgaagcctggaacttttggactcgaaaggggctggtaagcggtggtctgtacgagagccatgtcgggtgtcggccctattcaatcccaccttgcgagcaccatgtcaacggttcccgtccaccatgtaccggagagggcgacactccaaagtgtagtaagatctgtgaacccgggtactctccaacttataagcaggataagcattatggttacaatagctacagcgtaagtaattcggagaaggacatcatggccgagatctacaaaaatggcccggtggaaggcgcgtttagtgtgtactcagattttttactctataaatccggcgtatatcagcacgttaccggcgaaatgatgggggggcatgcaatccggatcctgggatggggcgtagaaaacggaactccgtactggttggtggcgaatagctggaatacagactggggtgataatggtttttttaaaatccttcgggggcaggaccactgtggtattgaatcagaagtggtggccggaattccaagaacggatcaatattgggagaagatttag

SEQ ID NO: 31847 - RNA, 1020 nt, synthetic construct
  misc_feature 1..1020: note = Description of Artificial Sequence: Synthetic coding sequence
  source 1..1020: mol_type = other RNA
atgtggcaactctgggcctctctttgctgtctgctggtcctcgccaacgctaggtctagaccttcatttcatcctctgtcagatgaattagtaaactacgtgaataagcgaaacaccacttggcaagctggacacaacttctacaatgttgacatgagctaccttaaacggctctgtggcacatttctaggcggtccgaagccaccacagcgcgttatgttcaccgaagacctcaagttgcccgcctccttcgatgcccgcgaacagtggccgcagtgtccaaccattaaggaaatccgcgatcagggatcctgtggatcctgttgggcattcggcgctgtggaggcaatctcagatagaatttgtattcatactaatgcccacgtatcagtcgaggtatctgctgaggatctcttaacctgttgtggaagcatgtgtggagacgggtgcaacggcggttacccagcagaagcctggaatttctggaccagaaagggactcgtctcaggcggactctatgagagccacgtcggatgtagaccatattccattcctccttgcgaacatcacgtgaacggcagccggccgccatgcactggcgaaggggacacacccaaatgctcaaagatttgtgaacctggatactcacccacatataaacaagacaagcactacggctacaacagttattctgtgtctaactcagaaaaagatatcatggctgagatctataagaatggaccggtggaaggcgccttttcagtgtacagtgacttcctcttatacaagtccggagtgtatcagcacgtgactggcgaaatgatgggtgggcatgctattcgaatcctcggctggggcgtagaaaacggcacaccctattggctggtcgccaattcttggaacacagattggggcgataatggcttctttaaaatactccgtggacaagaccattgtggcatagaatcagaggtcgtcgctggaatccctagaacagatcagtattgggagaagatttag

SEQ ID NO: 31848 - RNA, 333 nt, synthetic construct
  misc_feature 1..333: note = Description of Artificial Sequence: Synthetic coding sequence
  source 1..333: mol_type = other RNA
atgtggcaactttgggcttcattatgctgtcttctagttctggctaatgcgcgctcccgcccttccttccatcctctgtccgacgagctggtgaactacgtcaataagcgcaacactacatggcaggccggacacaacttctataatgtagatatgagttacctaaagagactctgcggaacctttttgggcggaccaaagcctccacaacgcgtaatgtttactgaggatctgaagttacctgcctccttcgacgcacgcgaacagtggccacagtgccctaccatcaaagaaatcagagatcagggttcttgtggtagctgttggctttag

SEQ ID NO: 31849 - RNA, 1020 nt, synthetic construct
  misc_feature 1..1020: note = Description of Artificial Sequence: Synthetic coding sequence
  source 1..1020: mol_type = other RNA
atgtggcagttatgggccagtctttgttgcctgctggttctggcaaatgctcgatctcgaccaagctttcaccccttgtcagatgaactcgtgaattacgtaaataagaggaatacaacatggcaggccggtcataatttttacaatgtggatatgagctatctgaagcgattgtgtggtacgttcctcggcggacccaagccaccacaaagagtgatgtttactgaggatttaaaactgcccgcctcattcgatgcaagggagcagtggccccagtgcccaaccattaaggagatacgcgatcaaggttcatgtggcagctgctgggcctttggcgctgttgaagcgatctcagatagaatttgcatccatactaatgcccacgtcagcgtagaggtaagtgctgaagatctgcttacctgttgcggcagcatgtgcggagacggttgcaatggaggctatcccgccgaagcttggaatttctggactcggaaaggactggtttctggcggtttatacgagtctcatgtcggttgccgtccatattcaatccccccctgtgagcaccacgtcaacggaagcaggccaccctgcactggagagggagatacgcctaaatgttcgaagatttgcgaacccggctactcgcctacatacaaacaagacaagcattacgggtataatagttatagtgtgtctaatagcgagaaagatattatggccgaaatctacaagaatgggccagtcgaaggcgcctttagcgtgtactctgactttctcctatataaaagcggcgtgtaccaacacgtgactggcgagatgatgggaggacatgcaatccgaatacttggttggggagttgagaacggaacaccatactggttagtggcaaacagttggaatacagattggggagacaatggattctttaaaattcttagggggcaggatcattgtggcatcgagtccgaagtggtagcaggcatcccaagaacagatcaatactgggagaagatctag

SEQ ID NO: 31850 - RNA, 1020 nt, synthetic construct
  misc_feature 1..1020: note = Description of Artificial Sequence: Synthetic coding sequence
  source 1..1020: mol_type = other RNA
atgtggcagttatgggcctcactgtgctgtctcctggtgcttgcaaacgctagaagcagaccatcctttcacccattgtcagacgaacttgttaactatgtgaacaagagaaatacaacttggcaggccggccacaacttctataatgtcgacatgagttaccttaaaagactatgtggaacattcttaggcggccctaagcctccacaacgtgtaatgttcaccgaggacctcaagctaccagcttccttcgatgccagagaacagtggccccagtgccccacgattaaggagattagagaccaaggtagttgtggaagttgctgggcctttggggcagtggaagcaattagcgatcgcatttgcatacacactaatgcccacgtaagcgttgaagtctcagctgaagacctacttacttgctgtggcagcatgtgtggcgatggctgcaatggaggctaccccgctgaggcttggaacttttggaccagaaagggcctggtgagcggcgggttgtacgaatcgcatgtaggctgcaggccctatagtatcccgccttgtgaacaccatgtgaacgggagtaggccaccctgtacaggggaaggggacacacctaaatgctccaagatctgtgaacctgggtacagccccacctacaaacaagacaagcactacggctacaattcatacagtgtgagcaactccgagaaagacattatggccgagatctataagaatggaccagtagagggtgctttcagcgtgtattcggatttcttgctgtataaatcaggagtatatcaacacgttaccggcgaaatgatggggggtcatgccataagaatactcggatggggcgtggagaacggaacaccttactggttggttgctaactcttggaatacggattggggtgacaatggattttttaagatacttagagggcaggatcattgcggcattgaaagtgaggttgtagcgggtattcccagaaccgatcagtattgggagaagatatag

SEQ ID NO: 31851 - RNA, 1020 nt, synthetic construct
  misc_feature 1..1020: note = Description of Artificial Sequence: Synthetic coding sequence
  source 1..1020: mol_type = other RNA
atgtggcagctctgggcaagtctgtgttgccttcttgtcctagccaacgcccgctcccgaccttcctttcatccgctcagcgacgaattggtaaactacgttaacaagcggaacacaacctggcaggccgggcacaatttttacaatgtggatatgtcttaccttaagaggctatgcggaaccttccttggcggccccaaaccccctcagagagtcatgtttaccgaggatcttaagctccccgcctcttttgatgcccgcgaacagtggcctcaatgtcctacaatcaaggagatccgcgatcagggatcctgcggttcctgttgggccttcggagctgtggaggccatctctgaccgtatttgtattcacaccaacgcccacgtcagtgtggaggtatcagcagaggacctgctaacatgttgcggtagcatgtgcggggacggatgtaatggaggttacccagctgaggcatggaatttttggacacgtaaagggctggttagtggcggcttgtacgaatcgcacgttggatgccggccgtatagtatacccccctgtgagcaccacgtaaatggaagtagacctccctgtacgggtgagggagatacccctaaatgttccaaaatttgcgaaccaggctacagtccaacttataaacaagacaagcattacggctacaatagctacagcgtttcgaactccgagaaagacattatggcggaaatatataagaacggaccagttgagggcgctttctcagtatactccgacttccttctctacaaatccggagtatatcagcatgtgaccggtgaaatgatgggcgggcacgcaatcagaattcttgggtggggggtggagaacgggacaccatattggctagttgcaaattcttggaacacagactggggggataatggattctttaagatactaagaggtcaggatcattgcggtatagagagcgaggtggtggctggtattccacggactgaccaatactgggagaagatttag

SEQ ID NO: 31852 - RNA, 1020 nt, synthetic construct
  misc_feature 1..1020: note = Description of Artificial Sequence: Synthetic coding sequence
  source 1..1020: mol_type = other RNA
atgtggcagttatgggctagtctctgttgtctgctggtcctggcgaacgctcgctcccggccttcgttccaccctttaagcgacgagcttgttaactacgtgaataaacggaataccacctggcaggccggccacaatttttataacgtcgacatgagctacctgaaaagattgtgcggtacatttcttggcggcccgaagccccctcagagggttatgttcacggaagatctgaaactgcccgccagctttgacgcccgcgaacaatggcctcagtgtcctactatcaaagagattcgggatcagggctcttgtggtagttgttgggctttcggtgcggtggaagctatctctgatagaatttgtatccataccaatgctcatgtctccgtggaagtatcagccgaagacctgcttacttgctgcgggagcatgtgcggagacggttgtaacggtggctacccagccgaggcatggaatttttggacaagaaaggggttagtcagtggtggactatacgagagtcatgtgggctgtagaccctactccatacccccctgcgaacaccacgtgaatggaagccgccctccatgtacgggagaaggagacactcccaaatgtagtaaaatctgcgagcccggctacagtcccacatacaagcaggataaacactacggctataactcatattctgtctccaactctgagaaagatatcatggcggagatctacaaaaatggacctgtggagggagcattcagcgtgtatagcgacttccttctttataagagtggcgtataccagcacgtgaccggggaaatgatggggggacatgccattcggatactgggttggggtgtggagaacggaacaccatactggctagttgcaaactcgtggaacaccgattggggcgataatggttttttcaaaattctgcgaggccaggatcactgcgggatcgaatcagaagttgtggcggggattccaaggacagatcagtactgggaaaaaatctag

SEQ ID NO: 31853 - RNA, 1020 nt, synthetic construct
  misc_feature 1..1020: note = Description of Artificial Sequence: Synthetic coding sequence
  source 1..1020: mol_type = other RNA
atgtggcagctctgggcctctctctgctgcctgctggtgctcgccaatgccaggagtagaccctccttccatcctctgtccgacgaactggtgaactacgtgaacaaacggaacacaacatggcaagcagggcataatttctacaatgtcgatatgtcatatctgaaacggctctgtgggacatttcttggaggacccaaaccaccacagcgggtcatgttcaccgaagacctcaaactgccagcttcctttgacgcacgagaacagtggccccaatgtccgactattaaagaaataagagaccaggggtcctgcgggagttgttgggcattcggcgccgtcgaagctattagtgataggatttgtattcatacgaatgcacacgtgagcgtggaagtcagcgctgaagatcttctgacatgttgcggttcaatgtgcggtgatgggtgtaatggaggctacccagccgaagcttggaatttttggactcgtaaaggactggtttctggcggattatacgaatctcatgtcggctgccgaccttatagtatccctccttgtgagcaccatgtaaacgggagccgtcctccctgtacgggagagggcgatacccctaagtgttcgaaaatctgtgagcctgggtactcccccacatacaaacaggacaagcattatggttataactcatacagcgtcagcaatagcgagaaagatattatggctgaaatttataagaacggccccgtggagggcgcattttcagtatatagcgactttctgttatacaaatctggtgtgtatcagcatgtgacaggcgagatgatgggcggtcatgcgatcagaattctgggttggggcgtggagaatggcactccatactggctagtagccaactcgtggaacactgattggggggacaacgggttttttaaaatccttagaggacaggaccattgtggcatagagtccgaggtagttgcaggaatacccaggacagaccaatattgggaaaagatatag

SEQ ID NO: 31854 - RNA, 1020 nt, synthetic construct
  misc_feature 1..1020: note = Description of Artificial Sequence: Synthetic coding sequence
  source 1..1020: mol_type = other RNA
atgtggcagctttgggcctctctctgctgcctcttggtactcgctaacgcccgctctcgcccctcttttcaccccctgtctgacgaattagttaattatgtcaataaaaggaataccacctggcaggcagggcacaacttttacaatgtcgacatgtcctacttgaagagattgtgcggaaccttcctgggaggtcctaaaccaccacagcgcgtgatgtttactgaagatttgaaattaccagcatccttcgacgcccgagagcaatggccacagtgcccgacgattaaggaaattcgcgatcagggttcttgcggtagctgctgggcgttcggtgccgtagaagctatttcggacagaatttgcattcatacaaatgcccacgtttctgtggaggtcagtgcggaggatttactaacctgttgcggctcgatgtgtggagacggttgcaatggcggttacccagcagaggcatggaatttttggactagaaagggcttggtcagtggtgggctgtacgagtcccacgtgggttgtagaccttacagcataccaccctgtgaacaccacgttaatgggagcagacctccttgcaccggagagggagacaccccaaaatgttcgaaaatttgtgaacccggttattcacctacctacaaacaggataaacattacggctacaattcttactctgtctccaattctgaaaaggacattatggccgaaatctacaaaaacggacccgtggagggagccttcagcgtctacagtgattttctcctttacaagtccggcgtctatcaacacgtcaccggagaaatgatgggtggacacgctatccgcatactcggttggggagtagaaaatggtacaccgtattggttggtcgccaactcatggaacacggattggggcgacaatggtttttttaagatattaagagggcaggatcattgcggtatagaatcagaggtggttgccggcataccgagaacggatcagtattgggaaaagatttag

SEQ ID NO: 31855 - RNA, 831 nt, synthetic construct
  misc_feature 1..831: note = Description of Artificial Sequence: Synthetic coding sequence
  source 1..831: mol_type = other RNA
atggatatgaatcggagagcctcttgtcttttgccagacctttgcggacagggatggggttggaggctgttccctgctagttgcgcctacctgggaagtgtgccgtggagggtgtggggattaggaggtcttttagccccattagccgccgctggtggaggatctacaagtggtcttggacatctaggtagcacgcagtggagcggtgaactcgttgtgctgctttctgaggtcttcattagaggatgcctgttctcctgcaatggaggctaccctgccgaggcctggaatttttggacccgcaagggcctggtttcaggaggcctttacgaatctcacgttggttgccgaccctactctatcccaccctgcgagcaccatgtcaatggctccagacccccctgcaccggtgaaggcgatactccaaaatgctcaaaaatctgtgaaccaggatacagccccacgtacaaacaggacaagcattatggttacaatagttattcagtttctaactccgaaaaagatattatggcagaaatctacaaaaatggtcctgttgaaggagcatttagcgtttacagcgacttcctactttataaatctggagtttaccagcatgtgacaggggagatgatgggcggccacgcgatcaggattctagggtggggggtggagaacggtactccatactggttagttgctaactcatggaacacagactggggggataacggtttcttcaagattttaagaggccaggatcattgcgggatcgagtcagaggtcgttgctgggataccgaggaccgatcagtattgggagaagatttag

SEQ ID NO: 31856 - RNA, 738 nt, synthetic construct
  misc_feature 1..738: note = Description of Artificial Sequence: Synthetic coding sequence
  source 1..738: mol_type = other RNA
atgccaggtgcaggaccattatctattccatgcagaatgagttgggccttcggggcagtagaagccatttccgacagaatttgtattcacactaacgcccatgtgagcgtagaggtttctgcagaggacttgctgacttgttgtggatcgatgtgtggtgacggatgtaacggcggctaccctgctgaggcatggaacttctggacccgaaaaggattggtatctggaggcctgtacgaaagtcacgtcggttgtcggccgtactcgataccaccttgtgagcatcacgtaaacggatctcgtcccccttgtactggagaaggcgacacccccaagtgttccaaaatatgtgagccaggctatagtcctacatataagcaggataaacactatggatacaattcctatagcgtcagtaactcagagaaagatattatggcagaaatctataagaacggccccgtggaaggcgctttttcagtatactccgattttttgctgtacaaaagcggcgtttaccagcatgtcactggcgagatgatgggaggccatgcaatacgaatactgggatggggcgtagaaaatggaaccccatactggcttgtggctaacagctggaacacagactggggggataacggattctttaaaattctgagaggtcaggatcactgcggaatagagagtgaagtggttgctggcattccaaggacggatcagtactgggagaagatttag

SEQ ID NO: 31857 - RNA, 1002 nt, synthetic construct
  misc_feature 1..1002: note = Description of Artificial Sequence: Synthetic coding sequence
  source 1..1002: mol_type = other RNA
atgaatccaactctgatcctggctgctttttgcttaggaatcgcctccgctacactcaccttcgatcacagcttggaagcacagtggactaaatggaaagcaatgcacaatagactctatgggatgaacgaagaaggctggaggagagctgtctgggagaaaaacatgaaaatgatcgagcttcacaaccaagaatacagggaaggtaagcacagtttcactatggcaatgaacgcttttggcgatatgactagcgaggaatttcggcaggttatgaacggattccagaacaggaagcccaggaagggcaaggtgttccaagagccactgttttacgaagcacctagaagcgtggactggagagagaaaggttacgttacaccagtgaagaatcaaggacagtgcggcagttgttgggcattttctgctactggcgccctcgaagggcagatgtttagaaaaactggtcgattaatcagtttgagcgaacaaaacctggttgattgcagcggacctcagggcaatgaaggatgtaatggaggacttatggactatgccttccagtatgtgcaagataacgggggcttagattctgaggagtcttatccttacgaggccacagaagaaagttgcaagtacaatccaaagtatagtgtagcaaatgacaccgggtttgtggatatcccaaaacaggaaaaggcattaatgaaagcggtggcaacggtcgggccaatatctgtagccatagacgccgggcacgaatcattcctcttttataaggaaggcatctatttcgaacctgattgttcatccgaagatatggatcacggtgtccttgtggtggggtacggctttgagagcacggagtcggataacaataaatactggctagttaaaaatagctggggagaggagtgggggatgggagggtacgtgaaaatggccaaagataggaggaaccattgtggcatcgccagtgcagcaagttatccaactgtttag

SEQ ID NO: 31858 - RNA, 678 nt, synthetic construct
  misc_feature 1..678: note = Description of Artificial Sequence: Synthetic coding sequence
  source 1..678: mol_type = other RNA
atgaatccaaccctgatattagccgctttttgcctcggaattgcaagcgccactctaacgttcgatcattctttggaggcccaatggacaaagtggaaagctatgcacaatcgtctgtacggcatgaatgaggaaggctggaggcgagccgtgtgggaaaagaacatgaaaatgattgaattacacaaccaggaatacagagaaggaaaacacagctttacaatggcgatgaacgctttcggagacatgacaagtgaagaatttagacaggtgatgaatggtttccagaatagaaaacccagaaagggtaaggtgttccaggagcctctgttctatgaggcccctcgttcagtagactggagagagaagggctacgtcacccctgtaaaaaatcagggacagtgtggaagttgctgggctttcagcgccactggagctctcgagggtcagatgttcaggaagacgggtaggctcatatctctcagcgaacagaatctagttgattgctcgggccctcagggaaatgaaggatgcaatggcggactcatggactatgcatttcagtacgtacaggataacggtggcttagacagtgaggagtcctatccatacgaagctacagtttccggcgccccttgtcaccatagttcttctgcttttggacggtggacactatag

SEQ ID NO: 31859 - RNA, 1002 nt, synthetic construct
  misc_feature 1..1002: note = Description of Artificial Sequence: Synthetic coding sequence
  source 1..1002: mol_type = other RNA
atgaaccctactctgatactcgccgccttttgcttagggattgccagcgctacactcacctttgaccactctctcgaagcacagtggactaagtggaaagcaatgcacaatagactgtatgggatgaatgaagagggatggcgtcgggctgtctgggagaaaaacatgaagatgatcgagcttcacaaccaggaatatagagagggcaagcatagctttactatggctatgaacgcattcggcgatatgaccagcgaagaattcagacaggttatgaacggtttccagaatcgcaagcccaggaaggggaaggtgttccaggaaccccttttttatgaggcacctagaagcgtggactggagggaaaaaggctatgtgaccccagttaaaaatcaggggcaatgcgggtcatgttgggcattctccgcaactggggcgctcgaggggcaaatgtttcgcaaaaccgggcgcttaatctcactctctgagcaaaaccttgtagattgctcgggacctcaggggaatgaagggtgcaacggcggactgatggactacgcctttcagtatgtgcaggataacgggggactcgacagcgaggagtcctacccatatgaggctactgaagaaagctgcaagtataacccaaaatatagcgtggccaatgacacaggcttcgttgatatccccaagcaggaaaaagcgctaatgaaggccgtggctactgttggacctatctctgttgccattgatgctggtcacgaaagcttcctattttacaaagaggggatctactttgaacccgattgttcttctgaagacatggatcacggtgtcctggtggtcgggtacgggttcgagagcaccgagagcgacaacaataaatattggttggtgaagaatagttggggtgaagaatggggcatgggtggatatgttaagatggcaaaggaccgaaggaatcattgcggcatagcttctgcagcaagctatcctactgtgtag

SEQ ID NO: 31860 - RNA, 120 nt, synthetic construct; identical to SEQ ID NO: 31679
  misc_feature 1..120: note = Description of Artificial Sequence: Synthetic coding sequence
  source 1..120: mol_type = other RNA

SEQ ID NO: 31861 - RNA, 2544 nt, synthetic construct
  misc_feature 1..2544: note = Description of Artificial Sequence: Synthetic coding sequence
  source 1..2544: mol_type = other RNA
atgcatctgctcgggccatggctgttactactggttctggagtatttagctttctctgattcttccaagtgggtcttcgagcacccagaaacgctgtacgcttgggagggcgcttgcgtgtggatcccatgcacttacagggcattagacggcgacctggagagcttcattctgtttcataatccggagtacaacaagaatacctctaagtttgatggaaccagattatatgagtctacaaaggatggaaaagtgcccagcgaacagaaacgggttcagttcctcggggataagaacaaaaattgtacattgtcgatccatcccgtgcaccttaacgattccggacaactcggtctacgcatggagagtaaaacagaaaagtggatggagcggatacatcttaacgtctccgaaagaccttttcccccccatatccaacttcctccggaaatccaggagagccaggaggtaacattgacatgtcttcttaatttttcctgttatggttaccccatccagcttcagtggttactcgaaggcgtgccaatgagacaagcagcagtgacttccacctctctgacaattaagtctgtctttacccgatccgaactgaagttttccccccaatggtctcatcacggcaaaatcgtcacttgccagctgcaagatgcagacggaaaatttctctccaatgatacagtacagttaaacgtcaaacatactccaaagcttgaaattaaggtgacacccagcgatgctatcgttcgagagggcgacagtgtgaccatgacatgcgaggtcagctcttccaacccagaatatacaacggtgtcttggctgaaggatgggacctccctcaagaaacagaatacttttacgctgaatttaagagaggtgaccaaagatcagtcggggaagtattgctgccaagtgtctaatgacgtcggacccggtcgctcagaagaggttttccttcaagtgcagtacgcgccagagccgagcacagtgcagattctacacagccctgctgttgaagggtctcaggtcgagtttttgtgtatgtccctcgctaatcctctcccaactaactacacatggtatcacaacggtaaagagatgcaaggacgcaccgaggaaaaagtccacatccctaagatcctgccctggcacgcgggtacatatagctgtgttgctgagaacattctaggcaccggacaacgcgggcctggagctgaactcgatgtacagtatcctccgaaaaaggtgacgacagtgatccagaatccaatgccaatacgtgagggagatacagtaaccttgtcatgtaactataatagctccaacccctccgttactcgatacgagtggaaacctcatggcgcttgggaggagccaagtttgggcgtgcttaaaatccagaacgtaggatgggataatactacgatcgcctgcgcagcctgtaattcttggtgcagctgggcatctcccgttgctctgaacgtgcagtacgcacctagagatgtgagggtcagaaaaattaagccactgtcagaaatccatagtgggaatagcgtctcgctgcaatgcgattttagttcctcccatcctaaagaagtgcagttcttctgggaaaaaaatggccgtctccttggtaaagaatctcagctaaacttcgattctatcagccccgaagacgccggatcctactcttgctgggtcaataactccattggccagactgcttctaaagcctggaccctggaagttttatacgccccccgtcgactccgagtgtctatgagtcccggcgatcaagtgatggaaggtaaatctgcaacccttacttgcgagtctgacgcaaacccaccggtgtcacactatacatggttcgattggaacaatcagagcttaccataccacagccagaaactgcgtctcgaacccgtaaaggtgcaacactccggtgcttactggtgtcaagggaccaattctgtaggcaaaggaagatcccccttgtccaccttaactgtctattactcaccagagaccattggccgacgtgtcgctgttggcctagggtcatgcctggctattctgatattggctatatgtggcctcaaactgcagcggcggtggaagcgaacccagagccagcagggcctccaggaaaattcctctggtcagtcattcttcgttaggaataagaaagtacggcgcgctcctctctcagaaggaccacattctttaggctgttacaaccctatgatggaagatggtatctcatacacaacactgaggtttccagagatgaacatcccccgaaccggagatgctgaatcctccgagatgcagcgaccacccccagattgtgatgacactgtaacctactctgccctgcataagagacaagttggcgattatgaaaatgtgataccagactttcccgaggacgaaggtattcactactctgagctcatccaattcggcgtgggcgaaagaccacaggcacaggaaaatgtagattacgtgatccttaaacattag

SEQ ID NO: 31862 - RNA, 1377 nt, synthetic construct
  misc_feature 1..1377: note = Description of Artificial Sequence: Synthetic coding sequence
  source 1..1377: mol_type = other RNA
atgaaccgtggagtgccctttagacacctgcttctcgttctgcagcttgccctcttgcctgccgcaacccaaggtaagaaagtcgtacttggcaagaaaggcgacacagtcgaattaacctgtacggcttcacagaaaaaatctattcaatttcactggaaaaatagtaatcagatcaaaatactagggaaccagggctctttcttaaccaagggcccctctaaactgaatgaccgagccgacagtaggagatcactgtgggatcaggggaattttcctctaatcataaagaatttgaagattgaagactcggacacctatatctgcgaggtcgaggatcagaaagaggaggtgcagctgctggtgttcggtcttaccgctaactcagatacccacttacttcaaggtcaaagcctaacgctaactctggaatcaccgcccggaagctcccctagcgtccagtgccgttctcctcgaggcaagaacatccagggggggaaaacgctaagtgtgtctcagctggaactgcaggacagcgggacgtggacttgcacagttcttcaaaatcaaaaaaaggttgagtttaagatcgatatagtcgtgctcgcatttcaaaaggcatcttcaattgtttataaaaaggaaggagaacaggtggagttcagttttccgttggcattcaccgttgaaaaactcaccgggagtggagaactgtggtggcaggccgagcgcgcgtcaagtagtaaaagttggatcacattcgacctcaaaaacaaggaagtcagcgtcaagcgagtcacccaggaccctaaactgcaaatgggtaagaagctccctctgcacctgaccctgccccaggccctcccccaatacgcaggctcaggtaatctgacacttgctttagaggcaaagacaggcaagcttcatcaggaagtcaacctcgttgtgatgagggctacccagctgcaaaaaaacctcacttgcgaggtgtgggggcccacaagcccgaaactgatgctgtcacttaaactcgaaaacaaggaagcgaaggtcagcaaacgcgaaaaagcggtatgggtgctcaatcccgaggctggaatgtggcagtgcctgcttagcgactccggacaagtgcttctggaatctaacattaaagtgctccccacttggtctacgcctgtacaacccatggccctcattgtcctaggcggtgtagccggattattgctatttattggcttgggtattttcttctgtgtgagatgtagacatagacgccgacaggcagaaagaatgtcgcagattaagagactgttgtctgagaaaaaaacgtgccagtgccctcatcggttccagaagacgtgctccccaatctag

SEQ ID NO: 31863 - RNA, 276 nt, synthetic construct; identical to SEQ ID NO: 31682
  misc_feature 1..276: note = Description of Artificial Sequence: Synthetic coding sequence
  source 1..276: mol_type = other RNA

SEQ ID NO: 31864 - RNA, 276 nt, synthetic construct; identical to SEQ ID NO: 31683
  misc_feature 1..276: note = Description of Artificial Sequence: Synthetic coding sequence
  source 1..276: mol_type = other RNA

SEQ ID NO: 31865 - RNA, 270 nt, synthetic construct; identical to SEQ ID NO: 31684
  misc_feature 1..270: note = Description of Artificial Sequence: Synthetic coding sequence
  source 1..270: mol_type = other RNA

SEQ ID NO: 31866 - RNA, 360 nt, synthetic construct
  misc_feature 1..360: note = Description of Artificial Sequence: Synthetic coding sequence
  source 1..360: mol_type = other RNA
atgaatgctaaggtagtggtggtcctcgtcctggtgctaacagctctgtgtctctcagatggcaagccagtgtccctctcttaccgctgtccttgtagattctttgagagccacgtagctcgagctaatgtgaaacaccttaaaatcctgaacacccccaattgtgctcttcagatcgtcgcccgactaaagaataataaccgccaggtgtgcatcgaccctaaattgaaatggattcaggaatacttagaaaaggcgctcaataaaggtcgtcgggaggagaaagtgggcaaaaaagagaagataggtaagaaaaaaagacagaaaaaaagaaaggccgcacagaagagaaagaactag

SEQ ID NO: 31867 - RNA, 282 nt, synthetic construct; identical to SEQ ID NO: 31686
  misc_feature 1..282: note = Description of Artificial Sequence: Synthetic coding sequence
  source 1..282: mol_type = other RNA

SEQ ID NO: 31868 - RNA, 423 nt, synthetic construct
  misc_feature 1..423: note = Description of Artificial Sequence: Synthetic coding sequence
  source 1..423: mol_type = other RNA
atgaacgctaaggttgttgtggtcctcgttcttgttctaaccgccctttgtctctcagatggtaagcctgtttcccttagttaccgctgtccatgtagattctttgagtcccatgtagcccgagccaacgtcaaacatctgaaaatacttaacaccccaaactgcgcccttcagatagttgctagacttaagaataataatcgccaagtttgtattgatccaaagctgaaatggatacaagaatatctcgagaaagccctcaataatctcatcagcgcggcacctgctggaaagcgtgttatcgcaggcgcccgcgcactccatccctcccctccccgcgcatgtccaaccgcccgggcactttgcgaaataaggttatggcccccaccagagtggtcttggccctcacccggcgacgtttag

SEQ ID NO: 31869 - RNA, 273 nt, synthetic construct; identical to SEQ ID NO: 31688
  misc_feature 1..273: note = Description of Artificial Sequence: Synthetic coding sequence
  source 1..273: mol_type = other RNA

SEQ ID NO: 31870 - RNA, 4101 nt, synthetic construct
  misc_feature 1..4101: note = Description of Artificial Sequence: Synthetic coding sequence
  source 1..4101: mol_type = other RNA
atgctcagctttgtcgacacacgcaccctgctgttactcgcagtcacactatgccttgcaacttgtcaatcgctacaggaggaaacagtaagaaaggggcctgccggtgataggggaccaaggggggaacgcggaccaccgggtcctccaggcagagatggtgaagacgggcctacaggacctcccggcccaccaggccctcccggtcctcctggactcggcgggaatttcgcagcccagtacgatggcaaaggtgttggcctcggaccggggcccatgggcttgatgggacctagaggcccgcccggagccgccggggccccaggccctcagggatttcaagggccagccggcgaaccaggagaacctggccagaccggtcctgccggagcaagaggacctgcgggtccccccggcaaggcaggagaagacgggcaccccggcaaacctggacggccaggagagcgcggcgtcgtcggcccccaaggtgcgcgcggattccccggaacacccggactgcccgggtttaaaggcatcagaggacataacgggttagatggcctgaaaggccagcccggagcccctggcgttaaaggcgagccaggagctcctggcgaaaatgggacaccgggacagacaggcgctcgaggcttaccaggtgaaaggggtagggttggcgctcccgggccggcaggagcccggggatctgacggatcagtgggaccagtcgggccagccggccctattggaagtgctggaccacctggcttcccaggtgctcccggcccaaagggagaaattggcgccgtgggaaacgccggacctgctggacccgccggaccccggggtgaggttggacttcccggcctgtcaggacctgtgggtcctcctggcaatcctggagctaatggcctcaccggcgcgaaaggtgcggcagggcttcccggcgtggccggcgcccctggcctgccaggccctcgcggaatccccgggcccgttggagcggcaggagccaccggcgctcgcggactcgtcggagagccgggcccagctggaagtaaaggagaaagtgggaataaaggagagcccgggagtgcgggcccacaaggcccccccgggccctcaggcgaagaaggaaagcgcgggcccaacggagaagctggatccgcaggaccacccggcccccctggcctgagaggatcacctggaagtaggggactgcccggggcagacgggcgcgcaggcgtgatgggtcctccaggaagtagaggagcttcaggacccgcgggtgtgcggggaccaaatggtgacgctggaagacccggggaaccaggcttaatgggacctcgggggttgcctggctcccccgggaacattggccctgccggcaaggagggaccagtgggcttgcctggaatagacggtcgtcccggaccaatcggaccagcaggtgcacgcggagagcccggaaacatcgggttccccggacccaagggacccactggggatccaggtaagaacggcgacaagggacacgctggcttggccggagcacgcggagcaccaggtccggatggcaacaacggcgcacagggtccaccagggcctcagggcgtgcagggaggaaaaggagaacaggggccgccaggtcctcccggatttcagggactcccaggcccctcgggaccagctggagaggttggcaaacccggtgaaagaggacttcacggcgaatttggcttacccggtcctgcgggcccccgcggagaacgggggcctcctggtgaaagtggagcagcaggccctactgggccgataggaagtcgtggcccgagcggccctccgggaccagatggaaataagggcgaacctggagttgtgggtgccgttggtactgccggtccatccggaccaagtgggctacctggcgagcgtggagccgcaggcatccctggaggcaaaggagagaagggcgaacccggcctgcgaggtgaaattgggaatcccggccgagacggcgcaagaggtgcccccggagccgtgggtgcgcctggaccagcaggggcgaccggggatagaggagaagcaggtgcggccgggcccgccgggcccgccgggccaagaggatcaccaggagaaagaggcgaagtaggccccgcaggaccgaatgggttcgctgggccagcaggagctgcgggtcagcctggcgcaaagggcgagcgcggcgctaaggggccaaaaggagagaacggggtcgttggaccaaccggaccagttggcgcagctggacctgccggaccgaatggaccacccggacccgcaggcagtcggggcgatggcggccccccaggaatgaccggctttcctggagccgcaggtagaacaggtccacctggcccaagcgggatatcaggaccacctgggccaccggggcccgctggcaaggagggccttaggggcccacgaggagaccagggcccggtaggacgcaccggagaggtgggagctgttggccccccgggtttcgcgggggagaaaggaccatccggagaagccggcacagctggaccacccgggacccccggtcctcagggactgctgggagctcccggcattctcggcctacctgggtctagaggagaaagaggattgcccggagttgcaggcgctgtcggcgagcccggccccctgggtatagctggacctcccggagcccgcggtccgccaggcgcagtcggatccccaggggtgaatggggctcccggagaggctggacgggatgggaatccagggaacgacggaccgccaggtcgtgatggacagcctggtcacaagggggaacgcggttatcccgggaatatcggaccagtgggggccgccggagctcccgggcctcatgggccagtcggccctgctggtaaacacggcaaccgaggagagacaggaccttccggcccagtcggcccggccggtgctgtgggacctcgcggaccttcaggcccacaaggaatcagaggggacaagggggaaccaggtgagaagggccctaggggtttgcccggactgaaaggccacaatggcctccagggactgcctggcatagccggacatcatggtgatcaaggggccccaggtagcgtaggtcctgccggtccaagaggccccgctggcccttccggacctgctggcaaggatgggcgcaccggacacccaggaactgtggggccagccggtattaggggacctcaaggacatcagggtcctgccggcccccccggacctcccggcccgcccggcccgcctggagtttccggaggaggatatgatttcggctacgacggggatttctaccgcgcggaccagcctaggagcgcacccagcctgaggcccaaggactacgaggttgacgcaactctaaaaagcctgaataaccagatcgagactttgttaacaccagaggggagccgcaaaaaccctgccaggacatgtagagatttgagactgagtcacccagaatggtcctccggttactactggatcgatccaaaccagggttgcacaatggatgccatcaaagtgtactgcgacttttctacaggggaaacttgtatcagagcacagcccgaaaatatacctgcaaaaaattggtaccggtcatccaaagataagaaacacgtgtggttaggtgaaacaatcaacgctgggagccagtttgagtataacgtagagggcgtgactagcaaagagatggctacgcagctggccttcatgagactccttgctaattatgcttcgcagaacatcacatatcactgtaaaaattccattgcctatatggatgaggaaactggaaacctgaaaaaagctgtcatcctacaaggtagtaatgatgtcgagcttgtggcagaaggaaattcaagattcacctacactgtgcttgtagacggatgcagtaaaaaaacaaacgaatggggaaagacaatcatcgagtacaaaacaaacaagcccagcagactcccttttctggacattgcccccctcgacattggcggggcagaccaggaattttttgtcgatatcggacctgtgtgtttcaaatag

SEQ ID NO: 31871 - RNA, 4104 nt, synthetic construct
  misc_feature 1..4104: note = Description of Artificial Sequence: Synthetic coding sequence
  source 1..4104: mol_type = other RNA
atgcttagctttgtggatacaagaacccttcttctccttgctgtgacattatgtctagcgacctgtcaatgcacactgggaggacagaccctctcaaagtttcccccctacctgcacatagagcggtctgagcagggcccccctggaccccccggtcgcgacggcgaggatggtcccaccggcccccccggccctcccggccctcctggccctcccggactgggtggtaacttcgccgcacagtatgacggtaaaggcgtgggcctcggaccaggaccaatgggattaatgggccctagaggccccccaggagccgctggagcccccggacctcaaggatttcagggccctgcaggagaaccgggagagcccgggcagactggccctgcaggcgcaagagggcctgcaggacctcctggaaaagcaggcgaagatggccatcccggaaagcccggccgcccaggcgagcgtggagtggtgggacctcagggcgccagaggatttcccggaactcccggccttcctggctttaaagggataagagggcataatggcttagatggactcaaagggcagcctggcgcccccggcgtgaagggtgaaccgggtgctccaggcgagaacggcactcctggccagaccggagcacgggggctccctggcgaacgaggaagggttggagcgccgggcccagcgggtgcccgcggatccgatggctcagttgggccagttgggccagctggaccaataggaagtgcaggcccccccggatttcctggcgcccccggacccaagggggaaattggcgctgttggcaatgcaggacccgcgggtccagccggccctaggggcgaagtaggcttaccaggactgtccggcccagtcggaccgccaggtaatcctggagccaatggcctgacaggcgcaaaaggagcagctggactcccaggcgtggccggagctcctgggctacctggaccccgcgggatacccggccctgtgggcgctgctggtgcaactggcgcacgaggtctggtgggcgaaccgggacctgcaggttcaaagggggagtctggaaacaagggggagcctggaagcgcagggcctcagggcccaccgggaccgtcaggtgaggaaggaaagcgagggccaaatggagaggctggctcagcggggccacctggaccccccggtctgagggggagccctggatcaagggggctccccggggcagatggtcgcgcaggtgtaatgggaccacctgggagcagaggcgcctcaggtccagctggagtccgcggaccaaacggtgatgctggccgcccaggcgaaccagggctcatgggacctcggggcttgccaggaagccccggaaatatcggaccggctggcaaggagggaccagtaggcttaccaggaatagatggcagaccaggccctattggccctgctggagcacggggagagcccggcaacatagggttcccagggccaaaggggccaactggtgatccaggcaaaaatggcgataaaggacacgctgggctggcgggagcaaggggagcccctggacctgatggaaataacggggcacaagggcccccagggccacagggagtgcagggcgggaaaggagaacagggtccaccaggcccacccggattccagggcctgccaggacctagcggtccagctggtgaagtgggcaaacctggggaacgcgggttacacggagagtttggtctgcccggtcctgctggtcctagaggcgagcgtggcccccctggggagtctggcgcagctgggcccacaggaccaattggaagtagagggccctccggaccacctggtcccgatggaaacaaaggagagcccggtgtggtgggagcagtgggaactgccggtccgtcaggtccgtctgggctaccgggagagagaggagccgccggaatccccggaggaaaaggggaaaaaggtgagcctgggctgaggggggagattggtaacccaggccgcgacggcgcccgcggcgccccaggagcagttggcgccccagggcccgccggtgctacaggtgataggggagaagctggcgcggctggtcccgctggtcctgccgggccccgagggtcgccaggggaacggggagaagtgggacccgccggccccaacggtttcgccgggcccgctggcgctgctggacagcccggagcgaagggagaacgaggggccaagggaccaaaaggcgagaacggagttgtcggacctaccggaccagtgggcgctgcgggtcccgccgggccaaacggaccaccaggcccagctggctcccggggggacggagggccaccaggaatgacaggcttccctggtgcagcaggtagaaccgggccacctggcccctctggtatctccggaccccccggccccccaggccccgctggcaaagagggcttgcgcggtccgaggggcgatcagggacccgttggtaggaccggggaagttggcgctgtgggccccccgggtttcgcaggggagaagggaccaagtggcgaggccggaacagctggacctcccgggacacccggcccacaaggtctgcttggtgcccctggcatcttaggcctgcccggttcacgaggggagcgagggctgcccggagttgccggcgctgtgggtgagccaggccccttgggtatcgcaggcccgcccggagccaggggaccgcctggcgctgtgggcagccctggcgtgaatggagcccccggcgaagcaggccgggatggaaacccagggaacgatggacccccgggtagagacggccaaccaggccacaaaggggagaggggataccccgggaacatcggacctgtcggagccgctggagccccgggtccacacggccctgtgggaccagcagggaagcacggcaatcggggggaaacagggccttcgggacctgtcggaccagctggagcagtggggccgcgcggaccctcaggaccccaaggaattagaggagataaaggagaacctggagaaaagggcccaagaggattgcctggactgaaaggacacaacggtctccaaggactcccaggaatagcagggcaccacggagatcagggcgcccccggcagcgtcggtcctgcaggaccccgagggccagctggaccatccgggccagccggtaaggacggccgcactgggcacccagggactgtggggcccgccgggatacggggcccacaaggccaccaagggcccgccggtccaccaggccccccagggccacccggaccaccaggagtgtccggaggcggctacgactttggttacgacggcgatttttaccgtgccgaccagccccgttctgcccccagtttgcgacctaaggactacgaggtggacgcaactctcaaaagccttaataatcagatcgaaacactgctgacccctgaaggatcacgcaagaaccctgcaagaacctgtcgggacctgagactttcacacccagaatggagctcaggctactactggatcgatccaaatcagggctgcactatggatgcgattaaggtgtactgtgactttagcacaggcgagacttgcatcagggcccagcccgaaaatatccccgctaaaaactggtatcggagctccaaagataagaaacacgtctggttgggcgaaactattaacgcaggctcccagtttgaatacaacgtcgaaggcgtcacatccaaggagatggccacgcagctggcatttatgagactattagccaactacgcatcacaaaatatcacatatcattgtaagaacagcatagcgtacatggacgaagaaactggcaacttgaagaaagccgtgattctacagggaagcaatgatgtcgaactggtggccgaaggaaattcaaggttcacctatacagtactggttgacgggtgcagcaagaagacaaatgagtggggtaagaccatcatagaatataaaaccaacaaacctagccgactcccattcctggacatcgcacctttggatattggcggtgcagatcaagaattcttcgtggacatcgggccggtgtgttttaagtag

SEQ ID NO: 31872 - RNA, 5304 nt, synthetic construct
  misc_feature 1..5304: note = Description of Artificial Sequence: Synthetic coding sequence
  source 1..5304: mol_type = other RNA
atggagccttggtctagcaggtggaaaactaaacggtggctatgggatttcacagtgacaaccctggctctgacctttctgtttcaggcaagagaagtacgaggagccgcaccggtcgacgtcttaaaggccctggactttcataactcaccagaaggcatctccaaaaccacggggttctgtactaatcggaaaaactctaaaggttctgataccgcttatcgagtgtcgaaacaagcccagctctcagccccgaccaaacagttgtttccaggcggcacctttccagaggatttctcaatactgtttaccgttaagccaaagaagggcatccagtcctttctgctgtccatatacaatgaacacggcatccaacaaattggagtggaggtgggaaggagccctgtattcctcttcgaagaccatactggtaagcccgctccagaagattaccctctctttagaaccgtgaatatcgccgacgggaaatggcatagggtggctataagcgtggagaagaagaccgtgacgatgatcgttgactgcaaaaaaaagacaaccaagcccctggaccgaagtgagcgcgcgattgtggatacaaatggaataacagtgtttggtacgaggatccttgatgaagaagtgtttgaaggagatatccagcaattcctgatcaccggggaccctaaagcagcctacgattactgtgaacactacagccccgactgcgactcctcggctcctaaggcagcccaggctcaagagcctcaaatcgacgaagcaaatattgtggacgacttccaagaatacaattatggtaccatggagtcttatcagaccgaagcgccccgccatgtcagtggtacaaatgaacccaatcctgttgaggagatatttaccgaggaataccttacaggagaagactatgattcccaaagaaagaattccgaggacacactctatgaaaataaggaaatcgatggcagggactcagacctcctcgtggatggcgacttgggcgagtatgatttctacgaatacaaagagtatgaagacaaacctacatccccacccaatgaagagtttggcccaggcgtgcctgctgaaacagacattactgaaacatcaattaacggacacggagcatacggagaaaaaggacaaaagggagagcctgcggtggtggaacctgggatgctcgtggaaggcccacctggacccgcggggcctgcgggaatcatgggaccccctggccttcaaggtccaacaggaccccccggggatccaggcgatcgggggccgccgggccggccaggcttaccaggtgcggacggtctcccaggaccccccggaactatgttaatgcttccgttccgctatggtggagatggttcgaaagggcccacaatctcagcccaagaagcacaggcacaagctatcctacaacaggccaggatcgctcttagaggaccgcccggcccaatgggcttgacggggaggcccggcccagtgggtgggccaggcagttctggggccaaaggggaaagcggagaccctggaccacaagggcctagaggtgtgcagggtccgccaggcccaactggtaaacccgggaagcgcggaaggcctggggccgacgggggccgcgggatgccaggcgagcctggggctaagggcgatagaggttttgacggtttgccaggattgccaggcgataaaggacataggggagagagaggccctcagggacctccaggaccaccgggcgatgacggaatgagaggcgaggacggcgagatcgggccgcgtggcctgcccggagaggctggtcctcggggcctgcttggcccacgcggtacccccggcgctccaggtcagcccggcatggctggcgtggacggacctcccggtcccaaagggaatatgggacctcagggcgagcccggacccccaggacagcagggcaatccaggcccccagggactgccaggaccccaaggaccgattggtcccccaggggagaaaggaccacaggggaagccaggccttgccggattacctggagctgacggacccccgggtcatccaggaaaagaaggtcagagtggtgagaagggtgctctcggtcctcccggaccccaaggtcccattggctacccaggaccgagaggcgttaaaggtgctgacggcgtgagaggcctgaagggaagcaaaggggagaaaggcgaggatgggtttccaggattcaaaggtgatatgggtctcaagggagacaggggtgaggtaggccagatcggccccagaggggaggatggacctgagggacccaaaggcagagcaggaccaacaggggaccccgggccatcaggacaggcaggcgagaagggaaagctaggtgtgccaggtttacctggataccccggtaggcaggggcctaagggctcaaccggctttcctggcttccccggcgcaaatggcgaaaaaggagcaagaggcgtggccggcaaaccgggacccagaggccagagaggaccaacaggccctcggggcagtagaggcgcgcgtggaccaaccggcaaacccggacctaaaggaacttctggcggggatggccccccgggccccccaggagaaagaggacctcaaggccctcagggcccggttggattccctggacctaagggccccccaggaccacccggtaaagatggactgcccggacacccagggcagcgaggcgaaacaggatttcagggaaagacaggcccaccagggccaggtggcgtcgttggtccacagggacctacaggtgaaacgggccctattggtgagaggggacatccagggccaccgggaccccccggggagcagggcctgccgggagcagcaggcaaggaaggcgcgaagggggaccctggaccccagggaataagcggaaaggacgggccggccggattgcgcggattcccgggtgagagaggactgcccggtgcgcagggggctccaggactcaagggcggagaaggaccccaggggcccccaggccccgtgggatcaccaggagagcgtggtagcgcggggaccgccggtcctattggcttacccggaaggcctggtcctcagggaccaccgggtcctgcaggcgagaagggggcccctggagagaagggtccacaaggaccagccgggagagacggagtgcaaggaccagtcgggctcccaggacctgcaggccccgccggatctccaggagaggatggcgacaaaggcgagatcggagaaccggggcagaaaggcagcaaaggtgataaaggtgaaaatggacccccaggtccaccaggattgcagggccctgtgggtgccccggggatcgcagggggagacggtgaacccggccctagaggacagcagggaatgttcgggcagaaaggggacgaaggcgctcgtggattcccgggtcccccaggccctataggactgcaggggcttcccggtccaccaggcgagaagggtgaaaacggagatgtaggtcctatgggaccacctggcccacccggccctagaggaccacaaggacccaatggcgccgacggaccacagggccccccggggagcgtcggctcagtcggtggcgtgggggagaagggcgaaccgggcgaagcaggcaaccctggaccaccaggagaggcgggggtgggtggccccaaaggagaaagaggcgagaagggagaggccggccctcccggagcggcagggccaccgggcgcaaaaggacctcctggcgatgacggacctaaaggcaatcctggacccgttggattcccaggcgaccctggacctcccggtgagccgggtcctgccggccaggatggtgtggggggagataagggggaagacggcgatccaggacagcctggacccccaggcccgtcgggggaggctggaccaccaggaccccctggcaagcggggacctcctggcgccgccggggctgaaggaagacagggcgaaaagggcgcgaagggcgaagcaggagcagagggtcctccagggaagaccgggcctgttggtccacaaggacccgccggcaagccaggacctgaaggcctccgtggcattcccggaccagtcggtgagcagggcctccctggtgccgcaggacaggacggccctcccggcccaatggggcccccaggactgccaggactgaagggtgaccctgggagcaaaggtgagaagggccaccccggacttatcggcctgattggacctccaggcgaacaaggcgaaaagggcgatagaggtttacccggaactcaaggctcgccgggtgccaaaggcgacggaggtatcccagggccagcggggcctctcggcccaccaggacctccgggcttacctggccctcaaggacctaaaggcaataaaggaagtaccgggccagcaggccagaagggagacagcggattgcccggccctcccggctctccaggtccacctggcgaagtaatccagcctctcccaatcctcagcagcaaaaagacaagaagacacaccgaaggcatgcaggctgatgccgatgacaatattttagactactcagatgggatggaagaaatcttcggctcactgaatagcctcaaacaggacattgagcacatgaaatttccaatgggaacccagaccaatcctgctagaacctgtaaagatttgcaattaagccatcctgattttcctgacggcgaatattggattgaccctaatcagggttgttcaggggactcatttaaagtgtattgcaatttcacaagtggcggtgaaacatgtatttatccagataaaaagtctgaaggcgtgaggatctcttcctggcctaaagagaagcctggatcttggttcagtgagttcaagcgtggcaagttgttgtcctacctggatgttgaaggcaacagtataaatatggtgcagatgacattcctcaaattgttgaccgcctctgcccggcagaatttcacataccactgtcatcagtccgctgcttggtatgacgtcagctctggcagctacgacaaggcattgcgtttcctcgggagtaacgacgaagagatgtcctacgataacaatccgttcatcaaaaccttatacgacggctgtgcttcaagaaagggatacgagaaaacagtgatcgaaatcaacacacccaagatagatcaagtgcctatagtagatgtgatgatcaatgatttcggcgatcagaatcagaaatttgggtttgaggttgggccagtctgctttctggggtag

SEQ ID NO: 31873 - RNA, 5457 nt, synthetic construct
  misc_feature 1..5457: note = Description of Artificial Sequence: Synthetic coding sequence
  source 1..5457: mol_type = other RNA
atggagccctggtcttccagatggaaaactaaaagatggctctgggattttactgtgactacactcgctctcacattcctttttcaggcccgagaagtccgcggggctgcccccgtcgatgtacttaaggccctggatttccataattctccagaaggaattagtaagaccacgggcttttgcaccaaccgaaagaactcaaaaggcagtgacaccgcttatagagtgtcaaaacaagcacaactgagcgcaccgactaaacagcttttcccaggagggactttcccagaagatttctcaatactattcaccgtgaaacctaaaaagggtatacaatcatttctgctatccatttacaatgagcatgggatccaacaaattggagtggaggtggggcgttcacccgtgttcctgttcgaagatcacactggaaagccagctccagaagattacccccttttccgtactgttaacattgctgacggcaagtggcaccgggttgctatctctgtcgagaaaaaaactgtgacaatgatcgttgattgtaaaaaaaagaccacaaagccactcgatcggtctgagagagcaatagtcgatacgaatggaataaccgtctttggaactaggattcttgacgaagaagtctttgaaggcgacattcaacagttcctcattactggggaccctaaggccgcctacgattattgcgaacactattcccctgactgcgactcatctgctcctaaagccgctcaggcccaggaacctcaaattgacgaaaaaaaaaagtccaatttcaagaagaagatgcgaaccgtggcgacaaagtccaaggaaaagagtaagaagttcaccccaccaaagtctgagaagttctccagcaagaagaaaaagtcatatcaagcatccgccaaggcaaagctaggtgtcaaagctaatattgtcgacgattttcaagagtataactatggaactatggagtcctaccagaccgaagcacctcgccatgtgagtggaaccaacgaacctaatcccgtggaagaaatctttacagaggagtatctcactggagaagattatgattcgcagcgcaaaaactccgaagacactctctacgaaaacaaagaaatcgacggtcgggacagcgacctgctcgtcgatggagacctcggggaatatgacttttacgagtacaaagagtatgaggacaaaccgacatcgccccccaacgaagaatttggaccaggggtaccggctgagacggacatcacagaaacttcgattaatggccacggggcctacggggagaagggacagaaaggggaaccagctgttgtcgagccagggatgttagtggagggccctccaggtccagccggaccggctggcattatgggtcccccaggtctgcaggggcccacaggaccaccgggagacccaggagacagaggaccgccagggcggccgggattgccaggggcagacggactgcccggacccccaggaacgatgctgatgctcccttttcggtatggaggagatggctcaaaaggacctacaattagtgcacaggaggctcaggctcaggcaattctccagcaggcgaggatcgccctgcggggacctccaggccctatgggactgaccggtaggcctggccctgtgggaggacccggtagctccggtgccaagggggaaagcggtgatccaggacctcaagggcctcgcggtgttcaaggcccacccggcccaacagggaaacctggaaagcgagggcggccaggggcggacggtggacgtggaatgccaggagagcctggcgccaagggcgatagaggcttcgacggccttccggggctgccaggggacaagggacatagaggcgagcgcggaccgcaggggcccccgggaccaccaggagatgacggcatgcgtggtgaagatggcgagatcgggccacgcggattgccgggtgaggctgggccacggggccttcttggtcctaggggaactccaggtgcaccagggcaaccagggatggcaggtgtcgatggaccccccggccctaagggtaacatgggacctcaaggggaacccggtccaccggggcagcaggggaaccccggtccacagggcttgccagggccgcagggaccgatcggcccacctggggagaaagggccacaaggcaaaccaggcctggccgggttaccaggcgctgatggacccccaggtcatccgggcaaagaaggccaatcaggagagaaaggggctctgggccccccaggaccacagggaccaataggatatccaggaccacgaggagtgaaaggtgcggacggagtccgcggcctgaaaggttcgaaaggcgagaagggcgaggatggatttccaggttttaaaggcgacatggggctgaagggcgatcgaggcgaggtgggccaaatcggtccaagaggcgaggatgggcccgagggtcccaagggaagggctggaccaacaggggatccaggaccatccgggcaggccggagaaaagggcaagttgggggtgcccgggttgccaggatacccagggcggcaaggacctaagggatcgacagggttcccgggctttcccggagccaatggcgagaaaggagcacgcggagtggcaggcaaaccaggcccaagaggccagcgcggacctaccggaccaagaggcagtcgcggagctcggggacccacaggcaagcccggtccaaagggaacctcgggtggagatggcccaccaggacctccgggtgaacgcggaccgcaggggccccagggcccagtagggtttcctggacctaaagggcctcccggcccccctggcaaagacggcctcccaggacaccccgggcagaggggggagacaggctttcagggcaagaccggaccacctggaccaggcggcgtggtgggcccacaaggacccacgggagagacgggcccaatcggagaacggggccatccaggtcccccaggcccccccggggaacagggactcccaggcgcagcggggaaagaaggagccaaaggcgaccccggtccacaaggcatatctgggaaagatggacccgctggtttgcgaggctttcctggcgaaagagggttgccaggtgcccaaggagcccctgggctgaaagggggagagggtccccagggcccaccagggccagtcgggagtcctggagagagaggcagcgcaggaaccgccggacccattggactgcctggccggcccggaccgcagggccctccaggtcccgccggcgagaagggggcaccaggggagaagggccctcaaggacctgctggacgagacggggtgcagggccctgtcggactgcccggtcccgccggaccagcgggaagccccggggaagatggagataaaggtgagattggggaacccggccagaaggggagtaaaggcgacaagggggagaacggcccccccggccctcccggactgcagggaccagtgggagctccgggcattgcaggcggcgacggtgagcctggtccacgcggtcaacaagggatgtttggacagaaaggagatgaaggcgcacgaggttttcccggcccaccaggacccatcggcctgcaaggtttgccaggaccacctggggagaagggcgagaacggcgatgtcggacctatgggtccacctgggccacccgggcctcggggcccccagggccccaatggtgccgacggtccgcagggtccacctggttcagtaggcagtgtcggtggtgtgggagagaaaggcgaacccggagaagcagggaaccctggtccaccaggcgaagcaggagtgggtggtccgaaaggcgagaggggcgagaagggtgaagcagggccacctggcgcagctggcccccccggcgccaaaggtccccctggagacgacggcccaaaaggcaacccaggcccggtgggattccccggagacccaggtcctcccggtgaacccggccctgctggccaagatggagtggggggggataagggcgaagatggcgatcccggccaacctggccccccaggaccctccggggaggccggaccaccggggcccccaggcaagagaggcccccctggtgctgctggcgctgaaggacggcagggagaaaagggagccaagggagaagccggagcagaagggcccccaggaaagacgggacctgtcggaccccaaggacctgcaggtaagccgggacctgagggcctgagaggcattcccgggcccgtgggggagcagggactccctggagccgcaggacaggacggaccaccaggacccatggggcccccgggcctgcctgggctgaagggcgaccctgggagcaaaggggagaaaggccatcctgggctgatcggattgattgggccccccggagagcagggcgagaagggcgataggggattaccgggcacccaggggtctccaggagccaaaggagatgggggtattccaggtcccgccggcccacttggtccgccaggcccaccaggcctgccaggcccacagggccccaagggtaataagggctcaacagggccagctggtcagaagggagactccggtttacctggccccccaggctcacccggcccccccggagaggtgattcagccccttcccatactcagctcgaagaagactcgcaggcataccgaaggtatgcaggccgacgccgacgacaacattctagattactccgacggcatggaagaaattttcgggtcgttaaatagtttgaaacaagacattgagcatatgaagtttcctatgggcactcagacaaatccagccagaacttgcaaggacttacagctgagtcaccccgacttccccgacggcgaatactggattgaccccaaccaaggatgctccggtgatagtttcaaagtgtattgcaacttcaccagcggcggcgaaacatgtatttatccagataagaaaagcgaaggcgtgcgtattagttcatggcccaaagagaaacccggatcctggttttcggaatttaaacggggaaagctcctgtcttatttagacgttgaaggcaatagtattaacatggtgcaaatgacatttctgaaacttttaaccgcaagtgctcgacagaactttacttatcactgtcaccagtctgccgcctggtatgacgtttcttccggatcctacgataaagcgctgcgctttttgggcagtaatgacgaagaaatgagctatgacaacaatccattcattaaaaccctttacgacggatgtgcctctcgcaagggctacgagaaaactgtgatagagatcaacacgcctaagatcgaccaggtcccaatcgtggacgtaatgattaacgattttggagatcaaaatcagaagtttggattcgaagtcgggcccgtgtgtttcttggggtag

SEQ ID NO: 31874 - RNA, 3081 nt, synthetic construct
  misc_feature 1..3081: note = Description of Artificial Sequence: Synthetic coding sequence
  source 1..3081: mol_type = other RNA
atggtcagtgaagtgtcacgggatctgaaggtgaagagagaaaagctggtcaagctggcacaggagggcaaaatggcactgaaggaccccaaggtagaacaggcacaactagaaacacaggtattacaggttaaacaggaaaagcgcgaaaatttggagttccaggactaccaggacatccaggaagataaggttcagcgcatttctgatgtgataggaagcacgggattccccggctttcccggagctaacggggagaagggagcaagaggcgtggcaggaaagcccggtccgcgaggtcagaggggacctacaggacctagggggagtcggggagcgcggggacccacggggaaaccaggtccaaaaggtacaagtgggggcgacgggcctcccggaccgccaggggagcggggaccacaagggccacaaggacccgtgggttttcctggaccaaaggggccacccggaccccccggcaaggacggactccccggtcacccaggtcagaggggcgaaacaggattccaggggaagacaggaccccccggtccaggcggagtagtgggaccgcaggggcctacaggggagacaggtccaatcggcgagcgcggacaccccgggccccccggacccccaggcgaacaaggactgccaggtgccgccggcaaggagggagccaaaggtgacccaggccctcaggggatctcaggcaaagatggtcccgctggtttgaggggattccccggcgaacgcggactacccggagcccagggtgccccaggtctgaaaggcggggaagggccacaaggaccccccggccctgtgggttcccccggtgagagaggttcagccgggacagctggcccaattggcctacccggccgccccggaccccagggtcccccaggtcccgcgggcgaaaagggcgctccaggagaaaaaggtcctcagggccccgccgggcgagacggagtacaaggacccgtgggtctcccaggacccgcaggaccagctggcagcccaggagaagacggagataaaggcgaaataggggagccaggccagaagggatctaaaggcgataagggcgagaacggacccccagggcctccaggactgcagggtcccgttggcgctcccggaatagcaggtggggacggtgaaccgggaccgcgcggtcagcagggtatgttcggtcagaaaggagatgagggtgctcgaggatttccgggcccaccgggccccatcggtctgcaagggctgcccggacctcccggggagaaaggcgagaatggcgacgtcgggccaatgggaccccccgggcccccgggtccccgaggcccacaggggcccaacggagctgacgggcctcagggtccaccgggttctgtggggagcgtaggcggagttggcgagaaaggggagccaggcgaagctgggaaccccggaccaccgggggaagcaggggtaggaggcccgaagggagaaaggggtgaaaaaggggaagctggtcctccaggagccgctggaccacccggggcgaagggaccacccggcgacgatggaccaaaaggtaacccagggcccgtggggttccccggcgaccctggccctccaggcgaaccgggtcctgcaggccaggacggagtaggaggtgataagggagaggacggtgacccaggacaacctggaccccctggaccttcgggggaagcaggaccaccgggaccacccggtaaaagaggaccaccaggtgcagctggcgccgaaggcaggcagggtgagaaaggcgctaaaggagaagcaggggcagagggccctccaggtaagacaggacctgtgggaccccagggcccggccggcaaaccaggcccagaaggactccggggaataccagggcccgtgggtgagcagggccttccgggagcagcaggccaggacggaccaccaggacctatgggtcctccaggactacccggcctcaaaggggacccaggctcaaagggcgaaaaaggccatccaggcttaataggattgatcggccccccaggtgaacagggtgaaaaaggggaccgaggactcccgggcacgcagggcagccctggagcgaagggggacgggggtataccaggcccggcaggcccactgggacccccgggacctccaggactcccaggtccgcaaggcccaaaaggaaacaaagggtcgaccggcccagcgggacagaagggcgacagtggcctcccaggtccccctggctcaccaggaccccccggcgaagttatccaaccattgcccatactgagttcaaagaagaccaggagacacactgagggcatgcaagctgacgctgacgacaatatactagactattctgacggtatggaggaaatatttgggagcttgaattctctgaagcaagatattgaacacatgaaatttcccatggggacgcaaaccaaccccgctagaacgtgcaaagacctgcaactgtcacatcccgatttcccagacggagagtattggatagatccaaaccagggctgctccggagatagcttcaaggtctattgcaattttacttccgggggggagacttgtatctaccctgacaaaaaatctgaaggagtgcgaatatccagctggcctaaagaaaaacctggatcttggttctccgagtttaaacgaggaaaactcctttcctacctagatgtggagggcaactccattaacatggtgcaaatgaccttcttaaagcttttaacagcatcagcccgtcagaatttcacttatcattgtcaccagtccgcagcttggtacgatgtttccagcggttcttacgacaaggcattacgctttcttggtagcaatgacgaagaaatgagctacgataataatcccttcatcaagacactgtacgacggatgcgcatcgcggaagggctatgagaaaacagttattgagatcaatactcctaaaattgaccaagtgcccatagttgatgttatgattaatgacttcggggatcagaaccaaaaatttggattcgaggtggggccagtgtgctttttgggttag

SEQ ID NO: 31875 - RNA, 5421 nt, synthetic construct
  misc_feature 1..5421: note = Description of Artificial Sequence: Synthetic coding sequence
  source 1..5421: mol_type = other RNA
atggagccctggtcctctcgatggaaaacaaagagatggctctgggattttacagtgacgacgttggcccttactttcttattccaggctcgagaagtcagaggtgccgctccagtagacgttcttaaagcgctcgatttccacaactcccctgagggcattagcaagacaacgggcttctgcaccaaccgcaagaattccaaagggtccgacaccgcttaccgagtctcaaaacaagcccagctgagcgctcctaccaaacaactcttcccagggggcacgtttccggaggatttctcaattctgttcacagttaaacccaagaaaggcatacagtccttcctgctgagcatttacaatgaacacggtattcaacagatcggagttgaagtgggaagatctcctgtgtttctgttcgaggaccacaccggaaaacctgcacccgaggactaccccctctttaggactgttaatatcgccgatggcaaatggcacagggtagctatcagcgtggaaaagaagaccgttactatgatcgttgattgcaaaaagaaaaccacgaagcccctcgataggagcgagagagccatagtcgacacgaacggaattaccgtctttggcaccagaatcctagacgaagaggtgtttgagggtgacatccagcagtttctcattacaggggatccaaaggccgcatatgactactgtgaacactacagcccagattgtgactcttcagcccccaaagcggcccaggcccaggaaccgcaaatcgatgaatacgcgccggaggatattatcgaatatgattatgagtatggagaggccgagtacaaagaagccgagagcgtcaccgaaggtccaactgtcaccgaagaaactattgcacagacagaggccaatattgtggacgactttcaggagtataattacggaacgatggagtcgtatcagacggaagcaccacgacacgtttccggaaccaatgaaccaaatcccgtagaagaaatctttactgaagaatatctgaccggagaagactatgattcacagcgcaagaactccgaagacacattatatgagaataaagagatcgacggccgcgattctgatcttttagtggacggcgacctgggagaatatgacttctacgagtataaggagtacgaggacaagccgacatcacccccaaacgaagaattcggaccaggcgtacctgcagaaaccgatattacggagacatcaatcaatggccatggtgcttatggagaaaagggccaaaagggggagcccgctgtagttgaacctggtatgctggtggaggggcctcctggaccagccggaccagccggcatcatgggccctccaggcttgcaaggccccacaggacctcccggcgaccccggagaccgtggacctcccggccggccaggacttccgggtgctgatgggctcccaggtccacccgggactatgcttatgttgccatttagatatggaggagacggctcaaagggcccaactatctctgctcaggaagcccaggcacaggccattctacagcaggcaagaattgccctaaggggtcctcctggcccaatggggctgacaggacggcccggccccgtgggcggacccggcagttccggcgccaagggggaaagcggagacccagggccacagggaccgcggggagttcaggggccaccaggaccaaccggaaagccagggaagcggggtagaccaggggcggatggaggaagggggatgcctggagaacccggggcgaagggcgatcgcggcttcgacggattacccggtttacctggggacaaaggacaccggggagagcgcggcccacaaggacccccaggacctccaggagacgatggcatgcggggagaagatggcgaaataggaccaagagggctccccggcgaggccggccctagaggacttcttgggcccaggggaacccccggggctcctggacagcctggaatggcaggagtggatggccccccagggccaaagggtaacatgggaccacagggtgagcccggccccccaggtcagcaggggaaccctggcccgcaaggactgcctggcccacagggcccaatcgggcccccaggggaaaaaggtccacagggcaagccagggcttgccggattacctggcgcggacgggcccccgggacacccaggaaaagaaggacagagtggagagaaaggcgcgttgggcccacctggcccacagggccccatcgggtatcccggcccccgaggtgttaaaggggccgatggtgtgagaggacttaagggtagtaaaggagaaaagggcgaagatggtttccctggatttaaaggcgacatggggctgaagggtgatcggggggaggtcgggcaaataggcccgcggggtgaggatgggccagagggaccaaaggggcgagcagggcccaccggagacccgggaccatctggacaggcaggggagaagggcaagttgggagtacccggcctcccaggttatccaggacgacagggaccaaaggggagcaccggctttcctggctttccaggagccaatggcgaaaagggggccagaggtgtcgcgggtaagccaggccccagaggccagcggggtccaacaggccctagggggtccagaggcgcaagaggaccgacggggaagcccggcccgaaggggacaagtggaggcgacgggcccccaggtccccccggagagcgcgggccccaaggaccacagggccctgtcggctttcctggccccaagggaccacccggccccccgggaaaagacggcctccccggccaccccggtcagcgaggagaaacgggattccaggggaagacaggaccgcctggtcccggtggtgtcgtcggccctcaggggcccactggagaaactggaccgatcggagagcgtggccacccggggccccccggcccacccggagagcaggggctgccaggtgcggctggaaaagaaggtgctaagggagacccaggtccacaagggatttcagggaaggacggaccagctgggctccgtggcttcccaggagaaaggggtcttccaggggctcagggcgctccaggcctaaaggggggcgaaggaccgcagggaccccccggaccagtcgggtcgcctggtgaacgcggttccgccggtacagctggcccgataggcctgccaggaagaccaggcccccagggcccacccgggccagccggcgagaagggtgcccccggggaaaagggacctcagggacccgcaggcagagatggagtgcaggggcctgtcggactgcccggacccgccggcccagccgggtcacccggtgaagacggagataagggcgaaattggagagccaggccaaaagggtagcaagggagataagggagaaaacgggccgccggggcctccagggctgcaggggccagtaggtgcacccggtattgctgggggagatggggaacccggacctcggggacagcagggtatgtttggacaaaagggtgatgagggcgcccgcggcttcccagggccaccgggtccaatcgggttgcaaggactccctggaccaccgggagaaaagggggaaaacggtgatgtaggccccatgggaccgccagggccccctggaccaagaggtccccagggtcctaacggcgcggatgggccacagggacctccggggagtgtaggtagtgtgggcggcgtgggggagaagggggagcctggtgaagctggcaatcccgggccacctggtgaagcaggagtcggggggccgaagggagagaggggtgaaaagggcgaagctggaccacccggggccgcgggcccgcccggcgctaaaggaccaccaggggatgatggccccaagggcaatccaggcccagtgggctttcccggcgatccaggccctcccggggaaccaggccctgctggacaggatggagtcggaggtgacaaaggagaagatggagatccagggcagcccgggcctccgggaccttctggtgaggcaggccctcccggcccgccaggtaaaagaggaccccccggcgctgcaggggcggagggaagacagggcgaaaaaggagctaagggcgaggccggtgctgaggggccacccggaaaaaccggccctgtaggtccgcagggaccagccggcaaacctggccctgaagggctgcgaggcatcccgggaccggtcggcgagcaggggctgcccggggcggcaggacaggacggcccaccagggcctatgggacccccggggctccctggcctcaaaggcgacccaggcagcaaaggagagaaaggacatcccgggttaatcgggctcatcggacctcccggagaacagggtgagaagggggaccgggggctcccaggcacacaaggcagtcccggtgcaaaaggagatggcggtataccaggccctgccggacctctcggcccccctggtcctcctgggctgcctggaccccaagggcctaaaggaaacaagggatccacaggacctgcaggacagaagggagactctgggctcccaggcccccccggcagtcccggaccacccggcgaagtcatccagcctcttcccattttatcttccaaaaagacacggcgccacacggaaggcatgcaggcggacgcagacgataacattctggactattccgacggtatggaagagattttcgggagcctaaactctctcaagcaggatatcgagcacatgaagttcccaatgggcacacaaactaatcctgctaggacctgcaaggacctgcagctgtcccaccccgattttccagatggcgagtattggattgacccaaatcagggctgcagcggcgactcatttaaagtatactgcaactttacatctggtggtgaaacatgtatttacccggataaaaagtccgagggagttcgcatttcctcttggcccaaagaaaaacctggttcttggttttcagaatttaagcgcggcaagctcttatcctatctcgacgtggagggaaactcaataaatatggtccagatgactttcctcaaactgttgacagcctccgccaggcaaaactttacctaccattgccaccagtctgccgcctggtacgacgtatccagcggatcttacgacaaagccttacgtttcttgggctctaacgatgaagagatgagctacgacaataacccattcatcaaaacactgtatgacggatgcgcgagcagaaagggctacgaaaagaccgtcattgagatcaatacaccaaaaattgaccaagtaccaatcgtcgacgtaatgatcaacgactttggggaccagaaccaaaagttcggattcgaagtagggcctgtatgtttcctcggctag

SEQ ID NO: 31876 - RNA, 5073 nt, synthetic construct
  misc_feature 1..5073: note = Description of Artificial Sequence: Synthetic coding sequence
  source 1..5073: mol_type = other RNA
atggaaccatggtctagccggtggaagacaaaaagatggctgtgggacttcactgttacaaccctcgccctaacttttttatttcaagcgagagaggtaaggggcgccgcaccagtagacgttctcaaggctctcgactttcacaacagtccagaaggcatctcaaagacgacgggcttctgtacaaaccgaaaaaatagcaaaggctcagatacggcgtaccgagtcagtaagcaggctcaattgtcagctcccaccaaacagttatttcccgggggcacatttccagaagattttagcattctcttcaccgtcaagcccaagaagggaatccagagtttcttgctgagcatttacaatgaacacgggatccaacagataggggtcgaagtcggtaggtctcccgtttttcttttcgaggatcacactggtaaacctgcacctgaagactatccattatttcggaccgttaacatcgctgatggaaaatggcaccgcgtagcaatcagcgttgagaagaagacggtcacaatgatcgttgactgcaagaaaaaaacgactaagccactggacagaagcgagagggccatcgttgatacaaacggtattaccgttttcgggaccaggatactagacgaagaggtctttgaaggcgacatacaacagtttcttatcactggtgaccccaaggcagcatacgactactgcgaacactatagccctgactgcgattcctccgcgcctaaagccgcccaggcccaggagccacagatcgatgaatatgccccagaggatataattgagtacgactatgagtatggcgaggccgaatataaagaggccgaaagcgtgacagaaggccccacagtaacagaagagacaatcgcccagacagaaatcaacggacacggcgcttacggcgagaagggtcagaaaggggaacctgctgtcgtggagcccggtatgttagtggaaggaccaccaggtcctgcaggccctgcaggcataatgggaccccctggattacaaggaccgacgggtccacccggcgaccccggagataggggacctcctggaagacctgggctgcccggcgccgatggactaccgggtccaccaggcacaatgcttatgctgccatttcggtacggcggggatgggagcaaaggaccaaccatcagcgcccaagaagcacaggcccaagcaatcctccagcaagcccggattgccctaaggggaccacccggacccatgggacttaccgggagaccaggccccgtcggaggtcctggctctagtggcgcgaaaggtgagagtggtgaccccggcccgcaggggcctcggggcgtccagggccctccaggacccacagggaagccgggaaagcgcggacggcctggcgctgatggcgggaggggcatgcctggcgagcccggagccaagggggataggggatttgacggtttaccaggactgccaggtgacaagggacacaggggcgagcgggggcctcagggcccacccggaccccccggggacgacggcatgcgaggcgaggacggagaaataggacctagaggattgcctggcgaagcaggacctagaggactcctcggtcctagaggaaccccaggagccccaggccaacccggtatggcaggagttgatggccctcctgggccaaaggggaatatgggcccacagggggagcccggccctcctggccagcaaggcaaccccggtcctcagggtctgcccggaccccagggtcccattggcccaccgggggagaaaggacctcaaggaaaacctgggttggcgggcttgcctggtgctgatggcccgccaggacatcccggaaaggagggtcaatctggggaaaaaggcgctctggggcctcctgggccacagggacccatcggctaccccggccccaggggtgtcaagggagcggacggagtaaggggccttaaaggcagcaagggtgaaaaaggggaagatggattccctggctttaaaggagatatgggactgaaaggggaccggggagaagttggacagatcgggccaaggggagaagatggtccagagggtccgaagggtagagccggacctacgggagaccctggccctagcggtcaggcgggggagaaggggaaattaggtgttccaggattgcctgggtatccaggacggcaaggtccgaaaggcagtaccgggtttcctgggttccctggagccaatggcgagaagggcgctagaggggtggcggggaagcctgggccaagaggacagcgaggccctacaggcccccgcggaagtagaggggcacgtggtccaacgggaaaaccaggacctaagggaactagtggcggggacgggccaccaggaccaccaggggagagaggaccccagggtccacaagggccagtcggctttcccggccctaaaggaccgcccggacctcccggcaaggatggcctacctggtcaccctgggcagaggggggaaaccgggtttcagggcaagaccggaccacctggtcccggtggcgttgtgggacctcagggaccaacgggggaaactgggccaatcggggagaggggccaccccggacctccaggcccgccaggtgaacaaggattaccaggggctgcggggaaggaaggagcaaagggagatccagggccacaaggaatcagtggaaaggatgggcctgccggacttcgaggattccctggcgagagaggtctgcctggggctcaaggcgctccgggtttgaaaggtggagagggaccacagggtcccccgggacccgtcgggtctcctggtgaaagggggagcgctggaaccgcgggtccaatcggcttgcctggtcgacctggccctcaaggacctcctggccctgcgggcgaaaagggtgcgcccggtgagaagggaccacaggggcctgctgggagagatggggtgcagggccccgtggggctccccggtcctgctgggccggccgggagtcccggtgaagatggcgataaaggtgaaattggtgaacccggacagaaaggaagtaaaggcgataagggtgaaaatggccctcctggacctcctgggctgcagggaccagtcggtgcacctgggattgcaggtggggatggcgagcctggtcctcgggggcagcagggtatgtttggccaaaagggagatgagggtgccagaggattccccggaccccctggacccataggacttcaagggttaccagggccccctggagagaaaggagaaaatggcgacgtgggcccgatgggcccgccgggtccccctggaccacggggcccccagggcccaaacggagctgatgggccacaaggcccccccgggtctgtgggaagcgtcggaggtgtgggagaaaaaggagagccaggtgaagccgggaacccagggccgcccggcgaagctggtgtgggagggccgaagggcgagagaggcgagaagggagaagcaggaccccctggagcagccggaccccctggcgccaaggggcctcctggcgatgatggccctaaaggaaaccccggcccagtgggattcccaggagaccctggacctcccggagagccagggccggctggtcaggatggtgttgggggagataagggcgaagacggggatccaggacaacccggaccccctggcccctctggcgaggcagggcccccgggtccacccggcaagcgaggcccgcccggtgccgcaggagcagagggcagacagggagagaagggagcaaagggcgaagcgggggcggaaggcccaccaggaaagactggaccagtggggcctcagggaccagctggaaaacctggcccagaaggcttaaggggtatccccgggccggtcggagaacaggggctaccgggcgcagctggacaagacgggccacccgggcctatgggccctccaggtctgcctggcctcaagggagatcctgggtctaaaggtgaaaaagggcatcccggcctcatcggtctcataggcccccccggggaacagggtgaaaaaggcgaccggggtcttcctggaacacagggcagtccaggcgcaaagggggacggaggaatcccaggcccagcaggcccacttggtcctccaggtcctccgggcttaccgggcccccaggggcccaagggaaataaaggcagtacgggccccgccggacagaagggcgatagcgggttgcctggaccccctggctctccaggaccccctggggaagtaatacagccactgccaatcctcagctccaaaaaaactagaaggcacacagaagggatgcaggcagacgcagatgataatattctggattactctgatggcatggaggaaatcttcggatcactaaactcccttaaacaggatatcgagcatatgaaattcccaatgggcacccagacaaaccctgctcgcacctgtaaagacttgcaactctctcacccggactttcccgatggcgagtactggatagaccctaatcaaggatgttctggtgactccttcaaggtttactgcaattttacctctggcggcgaaacatgtatctaccctgacaagaagtctgagggggtacggattagctcctggccaaaagagaagcccggctcttggttcagtgaattcaaacgcggcaagctcctttcttacttagatgtcgagggcaatagtattaatatggtgcaaatgactttcttgaagctgttaacagccagcgcccgacagaactttacatatcactgtcaccagagtgccgcctggtatgacgttagctccggcagctacgacaaggcgctccgattcctcggctcgaatgacgaagagatgtcctatgataacaaccctttcatcaagaccctatacgatggctgtgcctctaggaagggatacgagaagaccgtgattgaaataaacacgccaaagatagaccaagtgcccatagttgacgtaatgatcaacgactttggtgaccagaatcagaaatttgggttcgaggtcggtccagtatgcttcctcggatag

SEQ ID NO: 31877 - RNA, 1761 nt, synthetic construct
  misc_feature 1..1761: note = Description of Artificial Sequence: Synthetic coding sequence
  source 1..1761: mol_type = other RNA
atgggagttaacgcagttcactggttcaggaagggtcttcggctccatgacaatcccgcacttaaggaatgcatacagggtgctgacaccatccgctgcgtctacatcttggacccctggtttgcaggcagcagtaacgtgggcataaataggtggaggtttctccttcagtgtttggaggatttggacgccaatcttaggaagctgaattctagactgttcgtaatacggggtcaaccagcagacgtattcccccgattatttaaggaatggaacatcacaaaactaagtattgaatacgactcagagcccttcggaaaggagcgcgacgccgccatcaaaaagctcgctaccgaggcaggtgtggaagtaattgtgcgaatcagccatacattatacgacttggataagattatagagcttaacggaggccagccacctctaacatataagcgatttcagacactgataagcaaaatggagcccctcgagattccggtcgagaccataacaagcgaagtaatagaaaagtgtaccactcccctgtctgatgaccacgacgaaaagtacggagtgccctccctcgaggaactggggtttgacactgatggactatcctccgccgtctggccgggaggcgaaactgaagccctgactaggctggaaagacacttagaacgcaaggcctgggtagcgaactttgagagacctcggatgaacgccaattcactgctggcatccccaactggactgagtccgtacttgcggttcggctgcctcagctgtagactgttttatttcaagctcactgatctgtacaagaaagtcaagaaaaactcttcccccccactaagcctgtatggacagctactgtggcgcgaatttttttacaccgctgccactaacaaccctcgtttcgataaaatggaagggaatccaatatgcgtgcagatcccttgggataaaaatccagaagcacttgctaagtgggccgagggtcgaacagggtttccgtggattgacgcaataatgacccagctgcgacaagaaggatggatacaccacctcgccaggcatgcagttgcatgttttttgacaagaggcgacttgtggatatcttgggaggagggaatgaaggtgtttgaagagttgttactagatgccgattggagcatcaacgccggatcctggatgtggctgagttgctcctccttcttccaacagtttttccactgttattgccccgttggctttggaagacgcaccgacccgaacggagactacatcagacgctatttacctgtcctacggggctttccggccaagtatatctatgatccatggaacgcacctgaaggaattcaaaaagtcgctaagtgccttatcggagtgaactaccctaaacccatggtgaatcatgcagaagcctcccgactcaacatcgagcggatgaaacagatctatcagcagctgagtcggtataggggccttggactgctcgcaagtgttccatccaatccaaatggaaacggcggctttatggggtactcagccgagaacatccccggatgctcatcatcaggaagttgtagccagggcagtggcatactccattatgcacacggagacagtcagcagacccaccttctgaaacaagggcgaagtagcatggggaccggattatccggtggtaagaggccctctcaggaggaggacacccagtcaatcgggcctaaagtgcagcgccagtctaccaattag

SEQ ID NO: 31878 - RNA, 504 nt, synthetic construct
  misc_feature 1..504: note = Description of Artificial Sequence: Synthetic coding sequence
  source 1..504: mol_type = other RNA
atgttgcccgagaaggccttacatggacacccgcaactgccaagaacagtgcctacacgagctgctatgcgtgccgctgggacactactcgcattttgctgcttggttctgtcgactaccgggggtccttcacccgatacttgttcacaggatctgaattcacgagtaaaacccggattcccaaaaactattaagactaacgatcctggcgtcctacaagccgcccgatactctgtcgaaaaattcaacaattgcacaaacgacatgtttctctttaaggagagtcgcatcactagagctctcgtgcagattgtgaaggggctgaagtacatgctggaggtggaaattggccggacaacatgcaagaagaaccaacatttacgcctagacgactgtgattttcaaactaaccacacccttaaacagacgttgtcctgctattctgaggtatgggtagtgccctggctgcaacatttcgaggtacctgtgttacgctgtcactag

SEQ ID NO: 31879 - RNA, 438 nt, synthetic construct
  misc_feature 1..438: note = Description of Artificial Sequence: Synthetic coding sequence
  source 1..438: mol_type = other RNA
atgcgtgccgcaggaaccttactagctttctgttgcctcgtgctcagtactacaggcggcccttcaccagacacttgctcccaagacttgaacagtcgtgtcaaaccaggattccctaagaccattaagacaaacgaccctggcgtgttgcaggcagcccggtatagtgtggagaaattcaataattgtacaaatgatatgttccttttcaaagaatctcggataaccagagccctagtgcagatagtgaaaggattaaagtacatgttggaggtagaaataggaagaaccacctgtaaaaaaaaccagcaccttcggctagatgattgtgattttcagacaaaccacaccctgaagcagacgctgtcctgttatagcgaggtttgggttgttccctggctgcagcacttcgaggtccccgtcctaagatgccactag

SEQ ID NO: 31880 - RNA, 513 nt, synthetic construct; identical to SEQ ID NO: 31699
  misc_feature 1..513: note = Description of Artificial Sequence: Synthetic coding sequence
  source 1..513: mol_type = other RNA

SEQ ID NO: 31881 - RNA, 1053 nt, synthetic construct
  misc_feature 1..1053: note = Description of Artificial Sequence: Synthetic coding sequence
  source 1..1053: mol_type = other RNA
atgcagagattgggggccaccctgctatgtctcctgttggctgctgccgtacctactgctcccgcccccgctcccaccgcaacttcagcccccgttaaacctgggcccgccctgtcttatccccaagaggaggcaactctgaatgagatgtttcgggaagtcgaagaactcatggaagacacacagcacaagcttagatcagctgtggaggaaatggaagccgaagaagccgccgcgaaggcttcatctgaagtgaatcttgccaacttacctccgtcctatcacaacgaaacaaacacagatacaaaagtgggtaataatactatacacgtgcaccgagaaatccacaaaatcacgaataaccaaaccggccagatggtattctccgaaacagtaatcacatcagtgggtgacgaggagggacgccgaagtcacgaatgcataatcgatgaggattgtggacccagcatgtattgccaatttgcaagttttcagtatacctgccagccatgcagagggcaaagaatgctctgtactagggactcagagtgctgcggagatcaactttgcgtgtgggggcactgtacaaagatggcaacgcgcggaagcaacggaacgatttgcgacaaccaacgagattgccaacccggcctttgttgcgcatttcagcgaggcttgctcttcccggtctgtaccccacttcccgtggaaggggagttgtgtcatgatcccgcctcccggcttttagacctgatcacatgggaactggagcctgacggggccctggatagatgtccatgcgcatccggcttattgtgtcagccacattctcacagtctagtgtacgtgtgcaaaccaacatttgtgggaagccgcgatcaagatggcgagatccttcttccaagagaagtccccgacgagtatgaagtaggatcattcatggaggaagtgcgccaagagttagaggatctcgagcggagcttgaccgaggagatggcactgagagagccagcagccgccgcagccgccctgcttggaggagaggaaatctag

SEQ ID NO: 31882 - RNA, 882 nt, synthetic construct
  misc_feature 1..882: note = Description of Artificial Sequence: Synthetic coding sequence
  source 1..882: mol_type = other RNA
atggaggatacacaacataaactcaggagcgcagtggaggagatggaagctgaagaagcagctgcgaaagcctccagtgaagtgaacctggctaatttgcctccatcatatcataacgagactaacactgatactaaggttgggaataatactatccatgtacatcgagagatacataaaattacaaataatcaaacaggacagatggtcttcagcgaaactgtaattacgagcgtcggggacgaggagggtcgccgatcacacgagtgcattattgatgaggactgcggcccgtctatgtactgtcaattcgcttccttccaatacacttgccagccttgtcgcgggcagcggatgttatgcacaagagactctgaatgctgtggggaccaactctgcgtctggggccactgcactaagatggccacaagaggaagcaatggaacgatatgtgataaccaaagggattgtcagccaggtctgtgttgtgccttccagcggggactcctgtttccggtctgtactcctcttccggtcgaaggagagctctgccatgatccagcctctcgactcttagacttgattacctgggaattagaacctgacggagccctggataggtgcccatgtgcaagcggactcctatgtcaaccccattcacattctcttgtgtacgtatgcaagcctacctttgtcggatcccgggaccaggatggtgaaatattgctacccagggaggtccccgacgaatatgaagtgggatcatttatggaagaggtgcggcaagaactagaggatctcgagcgaagcttgactgaagagatggcacttcgagaacccgccgctgccgcagcagcactcctggggggtgaggaaatctag

SEQ ID NO: 31883 - RNA, 1053 nt, synthetic construct
  misc_feature 1..1053: note = Description of Artificial Sequence: Synthetic coding sequence
  source 1..1053: mol_type = other RNA
atgcaacggctgggggccactcttttatgtctacttctcgccgccgcagtccccaccgcccccgcccctgcccccaccgctaccagcgccccagtgaaaccaggccccgccctaagctacccccaagaggaggctactctaaacgagatgttccgggaggtggaagaactcatggaggatacacaacacaaactgagaagcgctgtcgaagagatggaggctgaggaagcagcagccaaggcgtccagcgaagtgaacctggcgaatctacctccctcctatcataatgagaccaacaccgataccaaagtggggaataacaccattcatgttcatcgagaaattcacaaaattactaacaaccaaaccgggcagatggtgtttagcgaaaccgtcattaccagcgtcggagatgaggaaggcagacgttcacacgaatgtattattgacgaagactgcggaccttctatgtattgccaattcgcaagttttcagtacacgtgccagccgtgtcggggacagaggatgctgtgtacccgtgattctgagtgctgtggggaccagttatgcgtatggggtcattgcacaaagatggctaccagaggaagcaacggtaccatttgtgacaaccagagggactgccagccaggcctgtgttgtgcctttcagagaggacttctgtttcccgtgtgtacacccctacctgtggaaggagaattatgccacgaccctgctagtcgccttcttgacttgatcacgtgggaattagagccggatggagccctggatcgatgcccttgtgctagtgggctcctatgtcagcctcattcgcactcgcttgtgtatgtgtgtaagcccaccttcgtagggagccgggaccaggacggggaaatcttgctgccacgcgaagtccccgatgagtatgaagtcggatcttttatggaggaagtaaggcaggaactggaggatctggaacgatcacttacagaggaaatggctctccgagaacccgctgccgccgctgctgcattactgggaggagaagaaatctag

SEQ ID NO: 31884 - RNA, 969 nt, synthetic construct
  misc_feature 1..969: note = Description of Artificial Sequence: Synthetic coding sequence
  source 1..969: mol_type = other RNA
atgcagcgtctgggcgctacactcctgtgtctgttactcgccgcggcggtgccgacagcaccagcgcctgcacctactgccacatctgcccctgtgaagccgggccccgcattgtcatacccacaagaagaggctacccttaatgagatgttcagagaggtcgaagaactaatggaagacacacaacacaaattaagatccgcagtggaagagatggaggccgaagaggcagctgccaaagccagcagcgaggttaatctagccaatctgcccccgtcgtaccataacgagaccaacactgataccaaagtaggaaacaatacaattcacgtccaccgcgaaatccataaggaatgcatcattgacgaagattgcggaccatctatgtattgccagtttgctagctttcaatatacctgtcagccttgtcgcgggcaacgcatgctgtgcaccagagactctgagtgttgtggagatcaattgtgtgtgtggggtcactgcactaagatggcaacccgcgggtcgaatggcactatttgcgacaaccagagggactgccagccaggactgtgctgcgcatttcaacgcggactcctgttcccagtatgtacaccccttcctgtagaaggagaactgtgtcacgaccctgcatcacgactgctggacctgatcacttgggagttggaaccagacggagccctggatcggtgcccgtgcgcctctggactgctgtgccaaccccattcacattccctcgtgtacgtgtgtaaaccaaccttcgtgggttcacgtgatcaagatggcgaaatactgctcccccgggaagtccctgatgaatacgaagtcgggagttttatggaggaagtgcgtcaggaactggaggatctcgaacgtagtctaaccgaggaaatggcattacgtgaaccagctgctgctgcagccgcattattgggcggcgaagagatctag

SEQ ID NO: 31885 - RNA, 708 nt, synthetic construct
  misc_feature 1..708: note = Description of Artificial Sequence: Synthetic coding sequence
  source 1..708: mol_type = other RNA
atgcagcggcttggcgccactctcctatgcctgctgctggccgcagctgtaccaaccgctcccgctcccgctccaaccgccacaagcgcacctgtgaaacccggaccggccctgtcatatccacaagaagaggccactctgaacgagatgttccgcgaagtcgaggaactgatggaagacacacaacataagctccgctctgctgttgaggaaatggaggctgaggaagccgcagcaaaagcctcatctgaagtgaacctagcgaatctgccgccttcttaccacaatgaaacgaacaccgatacgaaggtggggaataacaccattcacgtgcatcgagaaattcataaaattaccaataaccagactggccaaatggtgttctccgagactgttattacatccgttggggatgaggagggcagaagatcccacgagtgtatcattgatgaagactgtggcccatctatgtattgccagttcgcttctttccaatatacctgtcagccatgtagaggacagcggatgctctgcacgagggactccgagtgttgtggcgatcaactctgcgtgtgggggcactgtaccaagatggcaacccgtggcagtaatggaacgatttgtgataatcagagagactgccagccagggctatgctgcgctttccaacgaggcttactttttcccgtgtgtacaccactcccctag

SEQ ID NO: 31886 - RNA, 972 nt, synthetic construct
  misc_feature 1..972: note = Description of Artificial Sequence: Synthetic coding sequence
  source 1..972: mol_type = other RNA
atggatcccggtaaagacaaagaaggtgtccctcagcctagcggaccacctgctcgcaaaaagttcgtcatccctctcgatgaagacgaagtcccacccggcgttgcaaaacccctcttcagatccacccagtcactacctacagtggatacatcggcccaagctgctcctcaaacctatgctgagtacgccatcagccagcccttggaaggggcgggcgctacttgcccaactggctccgagcctctcgcaggcgaaactcccaaccaagccttaaagcctggagctaaatccaactccataatcgtgtcccctcgccagcgtgggaacccggtgctaaagttcgttcgtaacgtcccttgggagtttggcgacgtcattccggactacgttctcggccagtcaacgtgtgcccttttcctctccctcaggtatcataacctacatcccgactatatccatggcagactacaatccttaggaaaaaatttcgcccttcgcgtgcttctggtccaagttgatgtaaaagatccccagcaggcccttaaggaacttgcaaagatgtgcatcctggctgattgcaccttgattcttgcctggtctcctgaggaagccggcagatacctagagacttataaagcttacgagcagaaacccgccgatctgctcatggagaaactggaacaggatttcgtgagccgcgtgaccgagtgtttgacaactgtgaaaagcgtcaacaagactgatagccagacactgcttactacatttggatccttagaacagctgatcgcagcgtctagagaagacttggcactctgtccaggactcggcccacagaaagtcagagccctcggtaagaacccccgttcctggggaaaggaacgagcgcccaacaagcataacttgcggcctcagtcattcaaggtaaaaaaagaacccaaaactcgtcactccggctttagactttag

SEQ ID NO: 31887 - RNA, 384 nt, synthetic construct; identical to SEQ ID NO: 31706
  misc_feature 1..384: note = Description of Artificial Sequence: Synthetic coding sequence
  source 1..384: mol_type = other RNA

SEQ ID NO: 31888 - RNA, 846 nt, synthetic construct
  misc_feature 1..846: note = Description of Artificial Sequence: Synthetic coding sequence
  source 1..846: mol_type = other RNA
atgcagcaaccctttaattacccctatccacaaatctactgggtcgattctagcgctagttccccttgggccccacccggaaccgtcctcccttgtcctacctctgtgccacgccggcctggacaacgtcgaccccccccgccccctccgcccccgccactgcctcctccaccgccgcctcccccgttacctcccctgcctctgccacctctgaagaaacgtgggaatcactccactggcctttgcctcctggttatgttttttatggtgctagtcgcccttgtggggctaggtttgggaatgttccagcttttccacttgcagaaagagttagcagagctcagagaatccacaagccagatgcatacagcttcatccctggagaagcagatagggcacccatcacctccacccgaaaagaaggagcttaggaaagttgcccatctgaccggtaagtcaaattcccggagcatgccactcgagtgggaggacacatacggaatcgtgttgctgtctggtgtcaaatacaagaagggcgggctagtaataaatgagacgggtctttacttcgtatattccaaagtttacttccgaggccaaagctgtaataaccttccactgtctcacaaagtttatatgcgcaattctaaatatcctcaggatctggtgatgatggaggggaaaatgatgtcctactgcactactggtcaaatgtgggcgcgatcctcttacctcggagctgtgttcaatctgactagcgctgaccatctgtatgttaacgtctctgaactgtcacttgtgaattttgaagagtctcagaccttttttggcctctataaactttag

SEQ ID NO: 31889 - RNA, 585 nt, synthetic construct
  misc_feature 1..585: note = Description of Artificial Sequence: Synthetic coding sequence
  source 1..585: mol_type = other RNA
atgcacaagtggatcctgacatggattctacccaccctactgtatcgaagttgctttcatattatttgtctcgtcggcacaatcagcctcgcctgtaacgatatgactcctgagcagatggccacaaatgttaattgtagctctcccgaaagacacacgcgatcctacgactacatggaggggggtgatattcgggtacgaagactcttttgcagaacacagtggtatttgcgtatcgacaaacggggaaaggtcaagggcacccaggaaatgaaaaataattacaatatcatggaaattcgaacagtggcagtcggcatagtcgctataaagggagtggagtccgaattctatttagccatgaacaaggagggcaagttgtatgccaaaaaggagtgtaatgaagactgtaactttaaggagctaattctcgaaaaccactacaatacctacgctagcgcaaaatggactcataatggaggggaaatgttcgttgccttaaatcaaaaaggcattcctgtcaggggtaaaaaaacaaagaaggaacagaaaactgctcacttcctgcctatggcaataacttag

SEQ ID NO: 31890 - RNA, 585 nt, synthetic construct
  misc_feature 1..585: note = Description of Artificial Sequence: Synthetic coding sequence
  source 1..585: mol_type = other RNA
atgcataaatggatattaacttggattctgcctacccttctgtatagaagctgttttcacatcatctgcctcgttggcactatttctctggcttgtaacgatatgacacctgaacaaatggctaccaacgttaattgcagttcacctgaacgtcacacacgatcctacgattacatggagggcggagacatcagggtgagacgtctgttctgtagaacccagtggtacctgagaattgacaagcgcgggaaagtgaagggcacccaagaaatgaagaataattataacattatggagattaggactgtcgctgtgggaattgtggctatcaaaggggtggagagcgaattttatctggccatgaataaagaaggcaaactatacgcaaaaaaagagtgtaatgaggattgcaattttaaggagcttattctggagaatcattacaacacctacgcttccgcaaaatggacccacaacggaggggagatgttcgttgccttaaatcagaagggtatacctgttcgggggaaaaagacgaagaaagagcagaagacagctcatttcctgccaatggctataacttag

SEQ ID NO: 31891 - RNA, 7164 nt, synthetic construct
  misc_feature 1..7164: note = Description of Artificial Sequence: Synthetic coding sequence
  source 1..7164: mol_type = other RNA
atgctaagaggtccaggacctggcctattgctgttagcggtccaatgcctggggaccgcagttcccagtaccggcgcgtccaagtccaagcgacaagcacagcagatggtgcagccccaatctcccgttgcagtgtcacagagtaagcccggatgctatgataacggcaaacactatcagatcaaccagcagtgggagcgcacatacctcgggaacgcattagtatgcacttgctatggaggcagtcgcgggttcaattgcgagtcaaagccagaggcagaggagacctgttttgataaatacaccggaaacacctatagagtcggggatacctacgagaggccgaaagattctatgatctgggactgtacttgcataggggctgggaggggtcgtatctcatgtaccatcgccaatagatgccatgagggggggcagagttacaaaatcggggacacttggcggaggccacatgagaccggaggatacatgctggagtgcgtctgtttgggaaatggtaaaggagagtggacttgtaaacctatcgccgaaaagtgttttgatcatgccgcgggaacttcttacgtggttggagagacatgggagaaaccataccagggctggatgatggtggactgcacttgtctaggagagggatctgggcggattacttgtacaagcaggaatcggtgtaatgatcaggataccaggaccagttaccggatcggggatacgtggtccaagaaggataacagaggaaacctcttacaatgtatctgtacagggaatggtaggggggaatggaaatgtgagcggcatactagcgtgcagacgacttcatctggctccggacccttcacagacgttcgagccgccgtctaccaaccacaaccgcaccctcaaccacccccctatgggcactgcgtcaccgacagcggcgtcgtatactcagtgggcatgcaatggttgaaaacgcagggcaacaaacagatgttatgtacatgtctaggcaacggcgtgtcatgtcaggagacagccgtgacccaaacttacggcgggaacagcaacggagagccatgcgtccttcccttcacttataacggcaggactttttacagctgcactacagagggacggcaggatggccacctttggtgctcgaccacctctaactacgagcaggatcagaaatatagtttctgcaccgaccatacagtcttagtgcaaaccagggggggtaacagcaacggcgcactgtgccactttccgtttttatacaataatcataattacacagattgcacttcggagggaaggcgcgacaatatgaaatggtgcggtaccacacagaattacgatgccgaccagaaattcggattttgtcccatggccgcgcacgaggagatatgtactacaaacgaaggagtaatgtatcgcataggagatcagtgggataagcagcacgacatggggcacatgatgagatgtacatgtgttggcaacggacgcggtgagtggacatgtatcgcttatagccaactgagagaccaatgtattgtggatgacattacgtacaatgtaaacgatacttttcataaaagacacgaagaaggccacatgttgaattgtacttgtttcggccagggccggggaagatggaagtgtgacccggtggaccaatgccaagacagtgagacaggcaccttctaccaaattggtgatagctgggagaaatatgtccatggagtgagatatcagtgttattgttacgggaggggaataggcgagtggcactgccagccactgcagacatacccttcctcatcaggaccagtggaagtattcataaccgaaacaccaagccagcccaatagccatccaattcagtggaatgccccacagccatcacatatttccaagtacatcctgcgatggcggcctaaaaatagcgtcggcagatggaaggaagctacaatccctggacatttgaatagttataccatcaaaggcttgaagccaggcgtcgtttatgaaggacaacttatatctatccagcagtatggccaccaagaagtcacccggtttgactttaccactacctctacaagcacaccggtgaccagcaacacagtgacaggcgaaaccactccattctcacctctcgttgcaacttccgagagcgttacagaaatcacagcatcttccttcgtcgtttcttgggtttccgcttcagacactgtctcaggctttcgcgtcgagtacgaactgagtgaggagggagatgaaccccagtatctcgacttaccatccactgctacgtcagtcaacatccccgatctcctacccggccgtaagtatattgttaacgtgtatcaaatcagcgaggatggcgaacagtctctcatcctcagcacttcccagacgacagcacccgatgccccaccggataccaccgtagatcaggtagatgacacatcaatcgttgtgaggtggtcacgaccgcaagcccctattacgggttacagaattgtgtactcaccctctgtagaagggtctagcaccgaactgaacctgccagaaaccgcaaacagcgtgactctttcggatctgcaacctggagtgcagtacaatatcaccatttacgccgtagaagagaatcaggaatcaaccccagtcgtaattcagcaagaaaccaccggtaccccgcggtccgacaccgtgccatcaccacgagaccttcagttcgtcgaagttacagatgttaaggtcacaatcatgtggacaccaccagaaagcgccgtcacaggatacagagtcgacgtcatcccagttaatttacctggagaacacggtcagcgactgcctattagcaggaatacctttgctgaggttaccggcctaagccccggcgtgacttattacttcaaagtgtttgctgtctcccatggaagggagtccaagccattaaccgcccagcagacgactaaactggacgccccgaccaacctccaattcgtcaatgagaccgattctacagtactggtcagatggacaccccctcgtgcccagattaccggatatcgcctcactgtcggcctgactcggcgggggcagcccagacagtacaacgtgggcccctccgtaagtaagtaccctctcaggaacctgcaacctgcatccgagtataccgtgtccctggtggccattaagggaaatcaggagtcccctaaagctacaggcgttttcacaacactacaacctgggtcttccatccctccctataacacagaggtaaccgaaaccacaatcgtgatcacttggacgcccgccccccgcattggtttcaagttaggagtgagacctagccaaggcggggaagctccgcgagaagttacttctgacagcgggtctatagtagtttctggcttgactccaggcgtggagtatgtttataccattcaggtcctgcgcgatgggcaagaacgagacgctccaatagtgaataaagttgtcacccccctgtctccccccacaaatcttcatctcgaggccaatcctgacacaggtgtattgacggtcagctgggaaaggtctacaacaccagacatcaccggctatagaattaccaccacccccactaatggacagcagggcaatagcttagaagaagttgttcatgcagatcagagctcttgcacattcgacaacttaagtccaggcctggaatacaatgtgtctgtctatacggtgaaggacgacaaagagagcgttccaatatctgacaccattatccccgaagtcccgcaactgacagaccttagtttcgttgacattaccgacagctctattggactgcgctggactcccctgaactcatccacaattattggttatcgaatcaccgtcgtggctgctggagaagggattcctattttcgaggacttcgtagattcctctgtcggatactatacagttaccggcttggagcctggaatcgactacgatattagtgtcattacgttaatcaatggcggagaaagtgcccctaccacgctcactcaacagaccgccgtacccccacccaccgatttacgtttcttctcagacatcacagcaaattcttttacagttcactggatcgcacccagagcgaccattactggctatcgaattaggcaccatcccgaacatttttcaggacgccctcgagaagaccgcgttccccatagtcgaaacagcatcacgctcacaaatctgactcccggcactgaatatgtggtcagcatagtggccctcaatggcagggaagaatccccacttctaattggtcaacaatctacggtctcagacgttccacgagatctcgaggtcgtggctgcgaccccaaccagccttctcatctcttgggatgccccggccgtgactgtccgatactacagaattacttacggagaaaccggaggcaattcccctgttcaagagttcaccgtacccggaagcaaatctacagcaactattagcggcctgaaacccggcgtcgattacactatcacagtctacgcagttacaggacggggggacagcccggcatcttcaaaacccattagcatcaactatagaaccgaaattgacaaaccatcccagatgcaagttacagacgttcaagataattcaatcagcgttaaatggctgccatcatccagcccagtcacaggctacagagtgactacaactcccaaaaatggacccggtccgaccaaaacgaaaactgccggcccagaccagactgagatgaccattgaaggcctacaaccaacagtcgaatacgtcgtcagcgtgtatgctcagaatccgtcaggagagtcgcaaccccttgtgcagacagcagttaccaacattgataggcccaaaggcttagcctttaccgacgtggacgtagactcgatcaagatcgcctgggaatcacctcagggacaagtttctcggtaccgtgtcacctatagttcaccggaagatggcatccatgagctgttcccagcccctgacggagaggaggacacagcagaattacagggattgcggcctggaagcgagtatacagtgtccgttgttgcacttcacgatgatatggagtctcaacccctcattggtactcagtccaccgccatacccgccccgaccgatcttaaatttacacaggtcacaccgacctcactgtccgctcaatggacccctccaaatgtccagctgaccgggtacagggtacgagttacgcctaaagaaaagacagggcctatgaaggaaatcaatctggctccagactcaagcagtgttgtagtcagtggactaatggtagctaccaagtacgaagtctccgtttacgctttgaaagacacgctcacctcacgaccggcccagggggtcgtaacgactcttgagaatgttagtccacccaggagagctcgggtgacagatgctacagagactacgatcacaatatcttggagaacaaaaacagaaaccattaccggctttcaggtcgatgctgttccagccaacgggcagactcctattcaacgcactatcaagcccgatgtacgcagctatacaattacaggacttcagccaggtaccgactacaagatatatctgtatacactgaacgataacgcacgcagctcccctgttgtgatagacgctagcaccgcaatcgacgcccccagcaacctgagattcctcgccactacgcccaacagcctattagttagctggcaaccacctcgagctagaattacgggttacataatcaaatacgagaagccaggttctccacctcgcgaagttgtcccccgacctagacctggagtgacagaagctaccataactggcctggagcccggcaccgagtatacaatttacgtgattgccctgaagaacaatcaaaaatccgaacccttgatcggtagaaagaagaccgatgaacttccgcagctagtgactctcccacaccccaatttgcatgggcccgagattctggacgttccctctacagttcaaaagacaccgttcgttactcatcccggttacgacaccggaaatggaatccagttacccggcacctctggccaacaacccagcgtaggacagcagatgatctttgaagagcacggctttcgaagaaccacacctcctaccaccgccacacctatacgacatagacccaggccctacccccctaacgtgggtgaagagattcaaattggccacatccccagagaagacgtggattatcacctctatccacatggaccaggcttgaaccccaacgccagcaccgggcaggaagccctcagccaaacaaccatctcatgggcccccttccaggatacgtcagaatacataatctcatgccaccctgttggtactgacgaagagcccctgcaattccgcgtgccaggcacttccactagtgccacgctgactggactcaccaggggggcgacctataacgttatcgtcgaagcactcaaagatcagcagagacacaaagtgagggaagaagtagtcacagtgggaaattccgttaacgaaggactgaatcagcctacagacgactcatgcttcgatccatacactgtgagccattacgcagtgggagacgaatgggaaagaatgtccgagagcggctttaagcttctgtgtcagtgcctcggttttggttccggtcatttcagatgcgatagcagtagatggtgccacgacaatggggttaactacaaaatcggagaaaaatgggacagacagggagagaacggccagatgatgtcatgtacatgcctcgggaatggtaagggcgaattcaaatgcgatcctcatgaggccacatgctatgacgacggtaaaacttaccatgtgggcgaacagtggcagaaggagtatttaggagcaatatgctcttgcacttgtttcggcggtcaacgaggttggagatgtgacaactgcaggcgtcctggcggtgaacctagccccgagggcactaccggccaaagctacaatcagtactcacagaggtaccatcagagaactaacaccaatgtaaattgtccgattgagtgttttatgccccttgacgtgcaggcagatagagaagactcaagagagtag

SEQ ID NO: 31892 - RNA, 7341 nt, synthetic construct
  misc_feature 1..7341: note = Description of Artificial Sequence: Synthetic coding sequence
  source 1..7341: mol_type = other RNA
atgctgagaggacccgggccgggtctcctactcctcgccgtccagtgtctgggcactgccgtacctagcactggtgcctcaaaatctaaacgccaggcgcagcaaatggtacaaccacagagtcccgtggcagtgtctcaaagtaaaccaggttgttacgataatgggaaacactaccaaataaatcagcagtgggagcgaacctacttgggaaatgctttagtttgcacgtgttacggcggaagcagagggtttaattgtgagagcaaacccgaagcggaagaaacatgctttgataagtacaccgggaatacttatagagtcggcgatacctatgagagacctaaggacagtatgatctgggattgcacatgtattggtgccggaagaggccggataagctgtacaattgctaacaggtgtcacgaaggtggacagagttataaaatcggcgatacatggcgcagaccacatgaaacagggggttacatgctcgaatgtgtgtgcttagggaacgggaagggggaatggacatgtaaacccatagcagagaaatgtttcgaccacgccgccgggacctcatatgtcgtgggggaaacttgggagaagccgtaccaaggatggatgatggtggactgtacttgtttaggagaaggttccggacgaatcacttgcacatctcggaatagatgtaatgatcaagatactagaacctcttatagaatcggggacacgtggagtaagaaggataaccgcggcaacctcctgcagtgcatctgcacaggtaatggtcgcggagagtggaaatgtgaacgccatacctctgtgcagacaacttcgagtgggagcggaccttttactgatgtcagggctgctgtgtaccagccccagccacacccccaacctccaccctatgggcattgcgttaccgattccggagtggtttatagcgtcggaatgcaatggctgaaaacacagggtaataagcagatgctctgcacttgtttgggaaatggggtgagctgtcaggaaaccgctgtaacacagacgtacggggggaattcaaacggcgaaccatgtgtgttaccgttcacgtacaatggaaggacattctactcgtgcactacagaagggcggcaggatgggcacctttggtgttccacgactagcaattatgaacaggaccagaagtacagcttttgcactgatcacaccgtactcgtgcagactcgaggaggaaattcgaatggagctctctgccactttccatttctgtataataaccataattacaccgattgtacgagcgaaggccgcagagataatatgaaatggtgcggtactacacagaattacgacgccgaccaaaaattcggtttctgccccatggcagcccatgaagagatatgtaccacgaacgagggcgtcatgtacagaattggtgaccaatgggacaagcaacatgacatgggccacatgatgcgctgtacttgcgtgggaaacggtaggggtgaatggacttgtatagcttactcacaactgagagaccagtgtatagtcgacgacattacatacaacgtgaacgacactttccacaaacgccacgaggaggggcatatgctgaactgtacttgctttggacagggccgcggacgttggaaatgcgacccagtcgatcagtgccaagacagcgaaacgggaaccttctaccagatcggggactcatgggagaagtatgttcatggagtgcgttatcagtgttactgttatggccgggggatcggtgagtggcactgccaacctttacagacttaccctagttccagcggacctgtcgaagtattcataacagagactccgtcccagcccaattcccaccccatacagtggaacgctccccagccgtcacacatctccaaatacatccttagatggaggcccaaaaatagcgttggtagatggaaagaagcaaccatccctggccatcttaatagttatacgatcaagggcttaaagcctggagtcgtttacgaaggtcagctaattagcatccaacagtatggtcatcaggaggttaccagatttgattttacaactacgtctacttccacccctgtcacgagtaacactgtcactggcgaaactaccccttttagtccactcgtagcaacatccgagtctgtgaccgagatcaccgccagttcctttgtggttagctgggtgtccgcgtccgatacagtgtctggattccgagtggagtacgagctctccgaggagggagatgaaccacagtatctcgatctgcctagcaccgccacttctgttaatatccccgatctgcttccaggacgaaagtatattgtcaatgtctaccaaatctccgaggatggcgagcagtcccttattctgtccacttcccagaccacagcccccgatgctcctcccgacaccacagttgatcaagttgatgatacgagcattgttgtgagatggtccagacctcaagcgcccattacggggtatcgcattgtttatagcccatctgtcgaaggttccagcacagaacttaacctgccagagaccgccaattcagttactcttagtgatctgcagccaggcgttcagtacaacattacaatctatgccgtggaggagaatcaggagtcgacccctgtcgtaatacagcaggaaaccacaggcacaccccgatcagatacagtaccttctcctcgtgatttacagtttgtggaagtgacggacgtaaaggtcacaatcatgtggaccccaccagagagtgcagtcacaggctatagagtggatgtcatcccggtaaacttaccaggcgagcacggtcagcgcctccccatttctagaaatacgttcgcggaggtgacaggtctgtccccaggggtaacatactatttcaaggtatttgccgtgagccatggacgagaaagcaaaccccttaccgcccagcagacgaccaagctggacgcccccactaatctccagtttgttaacgagacagactcaaccgtactggtaaggtggacacccccacgagcccagattacaggctatagactcactgttggtttgactagaagaggacagccacggcaatacaacgtgggaccctctgtctccaaatatccgcttcgaaatttacagcccgcatccgagtacaccgtgagcctcgtggcaataaagggcaatcaggagtcgccaaaagcaacgggagtatttaccaccctccaaccaggcagttccatccccccatacaacactgaagtcaccgagacaactatagtcatcacctggacaccagcgccgcgaataggcttcaaattgggagttcgtccttctcaaggcggtgaagctcctagggaggtaacatctgactctggatccatagtcgtttccggactcacacctggagtggaatatgtgtatacaatccaggtactaagggacggccaagagcgcgacgccccaatcgttaacaaagtggttaccccactatcccctcccaccaatttgcatctcgaggcaaatccagacaccggcgtcctgaccgttagctgggaaagaagcacaactcccgatatcactggctacagaatcacgaccacccccaccaatggacaacagggcaattcattggaagaagtggttcacgccgaccagagtagttgcactttcgataatttgtccccaggactggaatacaatgtatcagtgtataccgtgaaggacgacaaggagagcgttccaatctcagacacaatcataccagaggtgccgcaacttacagacctgtcattcgttgatatcacagactctagcatcggactgagatggacacccttgaactcatctacaattattggctacaggattaccgttgtggctgctggagaagggatccccatcttcgaagatttcgtagactcttccgttggttactacacagttacaggactggaaccaggcatagactatgacatctcagttatcacacttataaatggtggagagtccgcacctactaccctgactcagcagaccgccgttcctccccccaccgaccttcgtttcaccaacatcggccccgacacgatgcgcgttacctgggctcctccaccatcaattgacctgacaaattttctagtaagatactctccggtgaagaatgaagaagatgttgcagaactctccatatccccctcggacaatgccgttgtactgacaaatctcctgcctggaacggagtatgtcgtgtcggtgtcaagtgtgtatgaacagcacgaaagcacgcccctcagaggaagacagaagaccggattagactcaccaactggaatagattttagcgatatcaccgcaaacagcttcactgtgcactggattgcgcccagggccaccatcactggataccggatcagacaccacccggagcacttctctggtcgcccgagagaagaccgtgtaccccattctcggaattcaatcacccttactaatctaacacccggtaccgaatatgtcgtcagtattgtcgcactgaacgggcgtgaggagagtcctctgctgatagggcaacagagcaccgttagcgatgtccccagggacttagaagttgttgctgccacacctacatctttgctcatttcttgggatgctcctgccgtgacagttcgctattacagaatcacatatggagagacaggaggaaactcaccagtacaggaatttacagtgcctggttctaaaagtaccgccacgatctctggactgaagccaggagtggactacacaatcacagtctacgcagtcaccggcaggggtgattctccagcaagttccaagcctatcagcatcaactatagaacagagatcgacaagcccagccaaatgcaggtcactgacgtacaagacaacagcatcagtgtaaaatggttaccgtcatctagtccagtcaccggctacagggtcacaactacacctaaaaacggccccggccctacgaagactaagactgcaggcccagaccagacagagatgaccattgagggactgcaacctacggttgaatatgtggttagcgtatatgcccagaacccttccggcgaatctcaacctttagtccaaaccgcagtgaccaacatcgacagacccaaaggcctggcgttcactgacgtcgatgtagattccataaaaattgcgtgggaatccccacaaggccaagtctccagatacagagtaacatactctagtcccgaagacgggattcatgaacttttcccggcccccgacggcgaagaggacactgcagagctccaggggttaagacccggtagcgaatacaccgtgtctgtagtcgcactgcacgacgatatggagagtcaaccacttataggaacccaatcaacagcaatacccgcacccacagaccttaaatttacacaagtgacaccaacctctttgagcgcccaatggaccccccccaatgttcagttgacaggctatcgtgtcagggtcacacccaaggagaagacaggaccgatgaaagagattaacctggctccagactcctcgtctgtggttgtaagtggcctgatggtggcaaccaagtacgaggtctctgtgtatgcactgaaagacaccctaacatctcggccagcccaaggtgttgttaccactctggagaacgtatcaccacctagaagagcaagagtgacagatgcaactgaaaccaccatcacaatatcttggagaaccaaaaccgaaactattacagggttccaggtggatgccgtaccagctaacggccagaccccaattcagcgaaccatcaaacccgatgtaagatcgtacaccattactggcctgcagccagggacagactataagatctacttgtacactttaaatgataatgcccggtcctcacctgtggtaatagatgcaagcaccgctatcgatgcaccatcaaatctgagattcctggctaccacccctaacagcctgctagtttcctggcagccaccacgcgctcgaatcacagggtacataataaagtatgaaaaaccgggatcacctcccagagaggttgtgccccgaccccggcccggcgtgacagaagcgacaattactggcctggaacccggtaccgaatacacaatttacgtcatagcactcaagaataatcagaagtccgaaccccttataggacgaaaaaagactgacgagttgccacagttggttaccctccctcacccgaacctccatggccctgaaattttggacgttcccagcacagtacagaaaacgccatttgttacccaccctggctacgatacaggtaatggcattcagttacccggcacgtccggccagcagccaagcgtcggccaacaaatgatcttcgaggagcatgggttcagacgaactacgccccccactaccgctacccctatccgccatagacctcgcccttacccccctaacgttggtcaagaggctctctctcagaccacaatttcgtgggctccgtttcaggatacatccgaatatattatctcttgccacccggtcggaacagatgaagagccactccaattcagagtgcccggaacaagcacctcagcaaccttaacaggactcacgagaggtgcaacttacaacgtgatcgttgaggctctgaaggatcagcagagacataaagtgagggaagaggtcgttacggtggggaacagtgttaatgaggggctcaaccagcctaccgacgattcctgttttgacccatataccgttagccattacgcagtcggggacgaatgggagaggatgtccgagtctggatttaagttactatgccagtgtctgggtttcggatcaggccatttccgatgtgacagctcaagatggtgccatgacaacggggtgaattataaaatcggcgagaagtgggaccggcagggagagaatggacagatgatgagttgtacatgcctgggaaacggtaagggggaatttaagtgcgatccccacgaagcgacatgctacgatgacggcaaaacatatcatgtgggggagcaatggcaaaaggagtacttaggcgctatttgcagttgtacatgcttcggaggtcagcgggggtggagatgcgataactgtcgtagacccgggggagaaccttctcccgaaggcaccacaggacagtcctacaatcaatacagtcaacgctaccatcaaagaactaacaccaacgttaattgccctatagaatgtttcatgcccctggacgtgcaggccgaccgcgaggacagtcgcgaatag

SEQ ID NO: 31893 - RNA, 7068 nt, synthetic construct
  misc_feature 1..7068: note = Description of Artificial Sequence: Synthetic coding sequence
  source 1..7068: mol_type = other RNA
atgctgcgaggacccgggccgggcctgttactcctcgctgtgcaatgtctgggaactgcagtgccctccacaggcgcttctaaaagtaaaaggcaagctcagcagatggtccagccacagtcacctgtagccgtttcacagagtaagcctggatgttacgataacgggaagcactatcagatcaatcaacagtgggagaggacatacttggggaacgcacttgtctgtacatgttatggcgggtcccggggatttaattgtgagagtaaacccgaagccgaggaaacgtgttttgataagtatacaggaaatacatatagggttggagatacgtacgaaaggccaaaggatagcatgatttgggactgtacatgcattggagctggacgagggcgaatctcatgcactatagcaaacagatgtcacgagggagggcagtcttataaaataggtgacacatggagaaggccacacgagacgggcggatatatgcttgaatgtgtgtgcctgggcaacggtaagggcgagtggacttgcaaacctattgccgaaaagtgtttcgatcacgcagcaggtaccagctacgtcgtgggagagacttgggaaaaaccctaccaaggatggatgatggtagactgtacgtgcctgggagagggctctggccgtatcacatgtaccagccgaaatagatgtaatgaccaggacactcgaacttcctaccgcatcggcgatacttggtctaagaaagacaatcgggggaatctgttacagtgtatctgtaccggaaatgggcggggggaatggaaatgtgaaagacatacaagcgtgcagacaacgtcctcaggatctgggccttttaccgacgttcgcgcagccgtgtaccaacctcaacctcatcctcagcccccaccctatgggcattgtgtaacagacagcggagttgtctattcagtaggaatgcagtggctaaaaacgcagggaaacaagcagatgctttgcacttgtctcggaaacggagtgtcctgtcaggagacagccgtgacccaaacgtatggagggaatagcaatggcgagccttgtgttttacctttcacttataatggacggactttctactcatgtacaaccgagggcaggcaggacggacacctctggtgcagtacgacctccaattacgaacaggatcagaagtatagtttttgtacagatcacacagtactcgtgcagacacggggcggaaattctaacggcgcattgtgtcacttcccttttctttataataatcacaactatacagattgcacatccgagggccgacgtgataatatgaagtggtgtggcacaactcaaaattatgacgctgaccagaagttcggtttttgcccaatggcagcacacgaagagatatgtactacgaatgagggggttatgtaccggattggggaccagtgggataaacagcatgacatgggccacatgatgagatgcacctgcgtgggaaacggacgtggcgagtggacatgtatagcatatagccagttaagggatcagtgtattgtggacgacataacctataacgtaaacgacacattccacaagcgacatgaggaaggccatatgctgaattgtacgtgttttgggcaggggaggggccggtggaaatgtgatcctgtcgaccaatgtcaagacagcgaaactggcacgttttatcagatcggcgatagttgggagaaatacgttcacggggttagatatcaatgctactgctatggcagaggcatcggagagtggcactgtcagccccttcagacttatccaagcagctccggaccggtggaagttttcattacagagaccccctcgcagcctaactcgcacccaattcagtggaacgcgcctcagccctcccacatcagcaagtatatcctgcgctggcgacctaagaactcagtagggaggtggaaagaagctaccataccaggacacctcaatagttatacaatcaaaggactcaaacctggagtcgtctatgaaggccagttgatttcaatccagcagtacggacaccaggaggtaactagatttgattttaccaccactagcacgagtacccccgtgacctccaacacagtcacaggtgagacaacccctttttctccattggtggccacctcagaaagtgttactgagatcactgcatctagctttgtggtcagctgggtcagcgcgtctgacaccgtgtcaggattccgtgtggaatacgaactaagcgaggaaggagatgaaccccagtacctggacctcccctctacagcgacatcagtcaatattcccgatctgttacctgggcgtaagtacattgtcaacgtctaccaaatttcagaagatggcgaacagagcctgatcttgtcaacctcccagaccacagctccagacgctccgcccgacacaaccgtggatcaagttgacgataccagtatcgtagttagatggagccgacctcaggcgccaattaccggatataggatagtgtattctccttccgttgaaggatcttccacagaactgaatctgccagagaccgctaactcagtgaccctgtctgaccttcagccaggagtccaatataacatcacaatttacgcagtcgaagaaaaccaagagtctacccctgtggtgatacagcaggaaacaaccggtacaccccgtagtgacacagtgccaagccccagagacctacaattcgtggaggtcactgacgttaaggtgactattatgtggacaccacccgaatcggccgtgaccggctaccgtgttgatgtaatcccagtgaatcttcccggtgaacacggacagagacttcctatctcaaggaacacatttgccgaggtgaccggattaagccccggggtcacctattatttcaaggtgtttgcagttagccatggaagagaatcaaagcccctgacagctcagcagaccactaagcttgatgccccaaccaatttgcagtttgtgaatgaaactgatagcaccgttcttgttcgatggactccccctagagcacagattacagggtataggctcaccgttggattaacacggagaggccagccccgtcagtataacgttggcccgtctgtctctaagtaccctctgcgcaacttacagcccgcatctgaatacactgtgtctctcgtggctattaagggcaaccaagaaagccccaaggcaacaggcgttttcacaaccctgcaaccaggtagtagcattcctccctacaataccgaagtaacggagaccaccatcgtgatcacctggacacctgctccccggataggcttcaaactcggcgtcagaccatcacaagggggtgaagcaccaagggaagtaacgagcgactctggttctatcgtagtctctggcctcacacctggcgtggaatacgtatacaccatccaggtcctacgggatggacaagagcgcgacgcccctattgttaacaaagtggtcactccattgtctcctccaacaaacctgcacctcgaggctaatccagatacaggggtactcaccgtgagctgggaacgcagtaccacacccgatatcactggttaccggatcacaacaacgcctacgaatggacagcagggcaatagccttgaggaagtcgtgcacgccgaccaaagcagctgcactttcgataatctgtctccaggcctcgaatacaacgtctctgtctatactgttaaagatgataaagagagtgtgccaatatccgataccatcatacctgccgtgccaccacccacagaccttcgtttcacaaatattgggcctgacaccatgcgagtcacctgggccccacccccaagtatagatcttacaaactttctagtacgttattccccagtgaaaaatgaagaggatgtcgccgaactgtccatatctccatctgacaatgcagtggttctgaccaatctgttgccaggtacagaatacgtggtcagcgtgagcagtgtctacgagcagcacgaatccactccactgagaggcaggcagaagactggactggactcaccgaccgggattgacttttccgacataacagccaactcatttaccgtgcattggattgcaccgagagccaccattaccggctatagaattcgccaccaccctgaacacttttccggccggccacgcgaagaccgagtccctcattcacgaaactccatcaccttaacaaaccttacccccggaaccgagtacgttgtctccatcgttgcgctgaatggaagggaagagtctccccttctgataggccagcagtctacagtttctgacgttccccgtgacctggaagtggtggccgctacacccacaagcctgttgatatcgtgggatgccccagcagtcacggttagatactaccgcattacatacggcgagaccggcgggaatagtccagtccaagagtttaccgtcccaggctcgaaaagcactgccaccatctccggactaaagccaggtgttgactatactattacggtgtacgcggtgacaggccggggcgactccccagcaagctcaaagcccatcagcatcaattataggacagagattgacaaaccttcccagatgcaagttacagatgtccaggataatagcatatctgtcaagtggctcccttccagttctcccgtcactggctacagagtcaccactacgccaaagaatggtcccggccccacaaaaaccaagacagcaggaccagaccagaccgaaatgaccatcgaagggctccagcccaccgtggagtatgtagtttccgtgtacgcccaaaatccatcaggcgagtcccagccacttgttcagacagccgttactaatattgacagacctaagggcttggcatttactgatgttgacgtcgattctattaagatcgcttgggaatctccacagggtcaggtatcaagatacagagtcacctatagcagtcccgaggatggaattcatgaacttttccccgcccccgacggggaggaagacacagccgaactacagggcctcaggccgggaagcgaatacactgtttccgtggtcgctttgcacgacgatatggaaagccagcccctcatcggaacacaaagcacagccattccagctcccaccgatctcaagtttacacaggtgactccaacctctcttagcgctcaatggacacctcccaacgtccagttgaccgggtacagggtcagagtgaccccaaaagaaaagaccggccccatgaaagaaatcaatctggctcccgattcaagtagtgtagtggtctctggtctcatggtagcgaccaagtacgaagtctccgtttacgcccttaaggatacactcacaagccgaccagcccagggagtcgttacaaccctcgaaaacgtttctccaccccgacgtgcaagagtgacagacgccaccgagacaaccattacaatatcctggcgcacgaagacagagactatcacaggctttcaggttgacgctgtccccgccaacgggcaaacgccgattcagagaactatcaagcctgatgtaagatcatatacaatcacaggacttcagcccggcaccgactacaaaatctacctctacacgctcaatgataatgctagatcctctccagtcgtaatagatgcctcaaccgccatcgacgccccttccaacttacggttcctggctacaactccaaatagcctgctggtctcttggcagccaccacgcgctagaattacaggttacattatcaaatacgaaaagcctggaagtccacccagagaagttgtcccaagacctcggcctggcgtgactgaagctacaataactggactggaacccggcaccgagtataccatatatgtaattgccctgaaaaacaatcaaaaaagcgagcccctgattggacgcaagaagaccgacgagctccctcagctggtgaccctgcctcaccccaacctgcacggaccagaaattctagatgtgccttcaaccgtccagaagactccttttgtcacccacccaggctatgatacaggaaacggtatccagctcccaggcacaagtggccagcagccatccgtaggacagcaaatgatttttgaggagcacggctttcgaagaactacgccccccaccaccgccacccctattaggcaccgccctagaccttatccccctaacgtcggacaggaagcgttgtctcagactacaatctcttgggccccgtttcaagataccagtgagtatattatttcctgccatcccgttggaaccgatgaggagccacttcagtttagggtaccaggtacatcgacttccgccactttaacagggttaactcgcggtgccacctacaatgtaatcgttgaggcacttaaggatcagcagcggcacaaggtcagagaggaagtggtgactgttgggaacagtgtgaacgaaggattaaatcaaccaactgacgatagctgtttcgacccatacacagtaagtcactacgccgtcggtgatgagtgggagagaatgtcagagtctggttttaagctgctgtgccaatgtcttggattcggatccggtcactttcggtgcgactccagcagatggtgtcatgacaacggggtgaattataagataggggaaaagtgggatagacagggagagaacggccagatgatgagctgtacctgtctcggaaatggcaaaggcgagtttaagtgcgacccacacgaggccacttgctacgatgacggcaaaacgtatcacgttggagagcaatggcagaaggaatatttgggtgcaatatgtagctgtacatgtttcggagggcaaagaggatggagatgtgacaactgtcgcagacccgggggcgagccatctcctgaaggcacaactggccagagttacaatcaatattcgcagcgctatcatcaaagaacaaataccaatgttaactgtcccattgaatgcttcatgccacttgacgtgcaggccgacagggaagattcaagggagtag

SEQ ID NO: 31894 - RNA, 6555 nt, synthetic construct
  misc_feature 1..6555: note = Description of Artificial Sequence: Synthetic coding sequence
  source 1..6555: mol_type = other RNA
atgttgagggggcctggccccggtctcttgttgcttgccgttcagtgtttagggactgccgtgccaagtaccggagcatccaagtctaaacgtcaggcccagcagatggtgcaaccccaatcaccagtcgcggtatctcaaagtaagcccggctgctacgacaacggaaagcattatcagattaaccagcaatgggaaagaacttaccttggcaatgcattagtgtgcacctgctatggagggtccagaggatttaactgtgagagcaagccagaagctgaagaaacctgcttcgacaagtatactggaaacacctatcgggtgggcgacacatatgagcgcccaaaagattctatgatatgggattgtacctgtattggagccggaagaggccggatcagttgcacgatagccaatcgttgtcatgaaggcggacagtcatataagattggtgatacttggagaagacctcacgagaccggtggctatatgctggaatgtgtctgtctgggtaatggaaagggagagtggacttgtaaacctatagctgagaaatgcttcgaccacgctgcaggaaccagttacgttgtgggcgagacctgggagaagccgtatcaagggtggatgatggtagactgtacatgcctaggggaaggctcaggaagaataacatgcacaagcaggaatcggtgcaatgaccaggatactcgaacctcatacagaataggcgacacgtggagtaaaaaagataatagaggtaatctactgcaatgtatctgtactggtaatggtcgcggagaatggaaatgcgaaagacatacctcagtgcagaccacctcaagtggaagcggccctttcaccgacgtgcgcgctgcagtgtaccagccacagccccatcctcagccccccccttatggacactgcgtgaccgattccggcgtggtctattcagtaggtatgcagtggctgaaaacccagggcaataagcagatgctgtgtacatgccttgggaatggcgtttcatgtcaggagactgccgtgactcaaacttatggcggtaactctaatggcgaaccgtgcgtgctccctttcacttacaatgggagaaccttctattcttgtaccactgaaggacgtcaagatgggcacctctggtgcagtactactagcaattatgaacaggatcaaaaatacagtttctgcacagaccacacggtgctcgtacaaacgcggggaggtaacagcaatggtgcactatgtcattttcccttcctctacaacaaccacaattacactgactgtacctccgaaggaagacgggacaatatgaaatggtgcgggacgacacagaattacgacgcagaccagaagtttggattctgtccaatggcagctcatgaagaaatatgcacaacaaacgagggtgttatgtacagaatcggagatcagtgggacaaacaacatgatatgggccacatgatgagatgtacctgtgtgggaaatgggaggggtgaatggacatgtattgcctacagccagttgagagaccagtgtatcgtggacgacattacgtataatgtgaatgacaccttccacaaacggcacgaagaagggcatatgctaaattgtacctgtttcggccagggaagagggaggtggaaatgcgatcctgtagaccagtgccaggatagcgagacagggacattctatcagattggggactcctgggaaaaatacgttcatggggttaggtatcaatgttactgttatggaagaggaatcggggaatggcactgtcagcctctgcagacctacccttcctcctctgggccagtcgaggtcttcatcacagagacaccaagccagcctaacagccaccccatccaatggaatgccccacaacccagtcatatttcaaaatacatcctgagatggcgtccgaagaatagtgtcggtagatggaaagaggctacaatacctgggcacctgaatagctacacaattaaaggtctaaaacccggggttgtttatgaaggccaactcatcagtattcagcagtacggtcaccaggaagtaactagatttgactttactacaacttcaaccagtaccccagtaaccagtaatacggtaacaggcgagaccactcctttcagccctcttgtggccaccagcgagtcagttactgagatcactgcctctagcttcgtggtgtcttgggtttcagcatccgacacagtgtctggatttagagtcgaatatgagctgagcgaagaaggcgacgagccacagtacctggacctcccttcaaccgccacctctgtgaatattcctgatcttcttcctggtcgtaaatacattgtgaacgtctaccagataagcgaggacggcgaacagtccctcattctttccacttcacagaccaccgctcctgatgcaccacccgacactaccgttgaccaggttgatgacacttccatagttgtccgatggtcacgccctcaggcacctatcaccgggtaccgcatagtgtatagcccctctgttgaaggaagttccactgaactgaatctgccagagacagccaactccgtgactctctccgatctgcagccgggcgtgcaatataacatcaccatctacgcagttgaggaaaaccaggaatctactcccgttgtgattcaacaggagacaactggcactccgcgaagtgataccgttccctcacctagggacctgcaattcgttgaagtcacagacgttaaagtgacgatcatgtggaccccgcctgaatctgcagtcacaggatatcgtgtggacgtgataccagtgaatttgcccggagaacatggacagcgcctaccgatctctaggaacactttcgccgaagtaactggtcttagccccggtgtgacgtactatttcaaagtgtttgccgtttctcacggcagagagtctaaacccctcactgcgcagcaaacaactaaactcgatgcgcctactaacttgcagtttgtcaatgaaactgacagcaccgtgctggtgcgatggacacctccacgtgctcagattaccgggtatcggttaacagtaggactcacccgccgcggtcaaccacgccagtataatgttggtccatctgtaagtaagtaccccttaagaaacctacagcctgcctcagagtataccgtctccctcgtcgctatcaaagggaatcaagagtcccccaaggcaaccggagtgttcaccacattgcagccaggctcctctatcccaccctataacacagaagttactgaaaccacgattgttattacctggacccctgccccaagaatcggcttcaaactcggcgttcgtcctagtcagggtggagaggcaccccgtgaggtcacatcagattcggggagtatcgtcgtaagtggattgacaccgggggtggagtacgtatatactattcaggtgctgcgggatggtcaggagagagatgccccgattgtcaataaagttgtgacacccctaagccctcccacgaacttgcatttggaagctaaccccgacacaggtgtgctgaccgtgtcctgggaaagatccaccacccctgacattactggatatagaatcaccacgacaccaaccaatgggcaacaaggaaattcgctcgaagaagtggtgcacgccgaccaatctagctgcacattcgataacttgagtccaggccttgaatataacgtgtccgtgtatactgttaaggacgacaaagaaagcgtgccaatttccgatacaatcatcccagccgtgccccctcccacggacttaaggtttaccaatatcggccctgacaccatgcgcgttacttgggcaccacccccatccattgatctgacaaatttcttagtgcgatattcacccgtcaagaacgaggaagacgtggcagagttgtcaatctccccttcagacaatgccgttgtactcaccaacctcttaccaggtaccgaatacgtagtgagcgtgtcctctgtgtacgaacagcacgagtctacgcctctcagaggtaggcagaaaacaggccttgattcgccaactggtattgacttttcggatatcactgctaactccttcaccgtccattggatcgctcctagggccaccattactggctatcgaatccgtcaccaccctgagcatttctccggcagacccagagaggaccgggtgccacacagtcgaaattccatcacgctaacgaatttaactccaggtaccgaatatgttgtgagtatcgtagccctaaacggaagggaagaatccccattacttatcggccagcagagtaccgtcagtgatgtacctcgtgatcttgaggtcgtggctgctacaccaacgtccctgttgatctcttgggacgctcccgccgtgaccgtgcggtactatcgaattacatatggagagaccggcggcaactctcccgtccaggagtttaccgtaccaggatcaaagtcaacagccacgatatccggactgaagcccggagtagattacaccataacagtttatgccgttacaggacgtggagactctccggcttctagcaaacctatctccatcaactatagaacagaaatcgacaagccttcccagatgcaggtgaccgacgtccaggacaactctatatctgtcaagtggcttccgtcaagtagtcccgttaccggctatagagttacaactaccccaaagaacggccccggtcctaccaaaaccaaaacagccgggcctgaccagacagagatgacgatcgaaggactccagccaactgtagagtacgttgtgtcggtctacgctcagaatccctccggagaaagccagccactggttcaaactgctgttacaaatatcgaccgccccaaaggcctggctttcacagacgtggacgtcgattctataaaaatcgcttgggaaagtcctcagggccaggtgtcccgctatcgagttacctacagttctcccgaggatggcatccatgaactgttccccgcaccagacggagaggaagatacagctgaacttcaagggctcagaccaggatccgagtacacagtcagcgttgtggcactgcatgatgatatggaaagccagcctctcataggaacccagtcaacagctattcccgctccaactgacctcaagtttacacaggtgaccccaacctccctgagcgcccagtggacaccacccaacgtacagttaaccggctaccgcgtaagggttacacccaaagagaagaccggacctatgaaagagattaatttggccccagactccagctccgtagtggtcagtgggttaatggtggcaacgaagtatgaggtgtccgtgtatgccctgaaagatactctcacctccagaccagcccagggagttgtgacgactctggaaaacgtctcccctccacgtagggcaagggttactgatgccaccgagacaactattaccataagttggcgcaccaaaaccgaaacaatcaccggtttccaggtggacgctgtccccgcaaatgggcaaactccaatccaaagaactattaagcctgacgtcaggagctataccatcactggactccagccaggaaccgattacaagatttacctgtatacccttaacgataatgcacgctcatcacccgtggtgatcgacgcaagcactgctatcgatgctccctctaacctccgattcctcgctactacccccaacagcctgctggtttcttggcagccccccagagccagaattactggatatattattaagtatgagaagcccggatctcccccacgcgaagtcgtcccacgaccgagacctggcgttactgaggcaactattacaggcctggaaccaggcacagaatacaccatatacgtgattgccttgaagaataatcaaaagtccgagccactgattggaaggaagaaaacggttaatgaaggcctgaaccaacctacagacgattcatgctttgatccttacactgtttcccactacgccgtaggggacgaatgggagcgcatgagcgaaagtggcttcaaacttttatgtcagtgcctgggattcggatccggccatttcagatgcgactcatctcgctggtgccacgataatggagtgaattataagattggggaaaaatgggatagacagggtgagaatgggcaaatgatgagctgtacatgtttgggcaatggaaaaggcgagttcaaatgcgatcctcacgaagccacatgttatgatgatggcaagacgtaccacgtcggtgaacagtggcaaaaggagtatctgggcgctatctgctcctgcacctgctttggagggcagcgagggtggaggtgcgataactgtagaagacccggaggtgaaccctcacctgaaggaaccacgggccagtcctacaaccagtattctcagcggtaccatcagaggaccaataccaacgtcaattgccccatcgaatgttttatgccccttgatgtgcaggcagacagagaagactctcgcgaatag

SEQ ID NO: 31895 - RNA, 6636 nt, synthetic construct
  misc_feature 1..6636: note = Description of Artificial Sequence: Synthetic coding sequence
  source 1..6636: mol_type = other RNA
atgctccgcgggccaggcccagggttgctcctgcttgccgttcagtgtctgggcaccgcggttccgtcaacaggggctagcaaatcaaagagacaggcacagcaaatggtccaaccccaatcgccagtggccgtgagtcaaagtaagccgggatgttatgacaacggcaaacactatcagataaaccagcagtgggaaagaacttatctgggtaacgcactcgtctgtacatgctatgggggatcacgtggatttaattgtgaatctaaacccgaagcagaagaaacttgtttcgacaagtacacagggaacacctatagagtaggcgacacatatgaaagaccaaaggattctatgatctgggattgtacctgcataggcgcagggcgcggaaggatatcatgtacgattgctaacagatgccacgagggggggcagagttataaaattggggatacatggagaagaccgcacgaaaccggagggtacatgttagagtgtgtgtgtttgggtaacgggaagggggagtggacctgcaaaccaatcgctgaaaagtgcttcgaccacgccgccgggacctcgtacgtagttggcgagacctgggaaaagccttaccagggatggatgatggtcgactgtacatgtctgggagaggggtcagggcggattacctgtacttctcgaaacagatgtaatgatcaagatacacgaacaagttatcgcatcggagacacttggagcaagaaggacaacagaggaaacttactacagtgcatatgcactggcaatggaagaggggaatggaagtgcgaacgacacactagtgtccagactacatcatccgggtcaggaccgttcacagatgtgcgtgctgccgtgtaccaaccacagcctcatccacagcctcccccttacggtcactgcgtgactgactccggcgtcgtgtattctgttggcatgcaatggctaaagactcaaggcaataaacaaatgctctgcacctgcttgggaaatggcgtgtcatgtcaggagacagcagtgacacaaacatatggcggtaactcgaatggagaaccttgtgtgcttcccttcacatacaacggccgaacattttactcatgcaccaccgaaggcaggcaggacggccacctgtggtgtagcactacaagtaattatgaacaggaccaaaagtattcattctgtacagatcacacagtgcttgtgcagaccagaggaggaaattctaacggcgctttgtgtcatttcccatttctctataacaatcacaactacaccgattgcacttctgaaggtagacgggacaatatgaaatggtgtggaactacccagaattacgacgctgaccagaagtttgggttttgccctatggctgcccatgaggagatttgtaccactaatgaaggcgtgatgtaccgcataggagatcaatgggacaaacaacatgatatgggacacatgatgaggtgtacttgtgtgggaaacggcagaggcgagtggacctgtatagcctatagtcaactacgcgaccagtgtatcgtggatgacatcacctacaatgtgaacgatacctttcacaagcggcacgaggaaggacacatgttgaactgtacatgttttggtcagggaagaggaaggtggaaatgcgaccccgtggatcagtgtcaagactccgaaaccggcacgttctatcagatcggggactcttgggaaaagtatgtacacggcgtgagatatcaatgttattgctacggcaggggaatcggtgagtggcactgtcagcctctgcaaacatacccttcctcatctggaccagtcgaggttttcatcaccgagacacccagtcagcctaacagccaccctattcaatggaatgctcctcagccatcacacatctccaaatacatcctgcgatggaggcctaaaaattccgtagggcgatggaaggaagcaacaattccagggcatcttaatagctatacaatcaaaggccttaaacccggagtggtatatgaaggacagcttatttcaatccagcagtacgggcatcaggaagtgacacggtttgatttcaccacaacctctacatctaccccagtgacctctaataccgttaccggtgaaacaacccctttttcccctctagtcgcgacatctgaaagtgtcacagaaatcactgcctcctctttcgtcgtgtcctgggtctcagcttctgacacggtgtccggatttcgtgttgaatatgaactttcagaggaaggtgacgagcctcagtatctagaccttccttctaccgccacaagcgtgaatatccctgatcttttaccaggtagaaagtacattgtaaatgtttatcagatctccgaagatggcgaacagtcactcatcttatcaacctcccagaccacagcacccgacgcgccaccagacacgactgtggaccaagtcgacgacacttctattgttgtgagatggagtagacctcaggcccctattaccggctatcgcattgtttattcaccttccgttgaaggtagctctaccgagcttaatctgccagagacagcgaattccgttaccttgtccgacctgcagcccggtgtgcagtacaacattaccatctatgccgtggaggaaaaccaggagagcacacccgtggtaatccagcaagagacgaccggcacccccagatctgacaccgttccctcgcctcgggacctgcaattcgtagaagtgactgatgtcaaggtgactataatgtggacccctcctgaaagtgccgtaactgggtacagagtcgacgtgatccccgtaaacctgcctggcgaacatgggcagagattgcctatctctagaaatacctttgccgaagtgactggactttcaccgggcgtgacatactacttcaaggttttcgcagtaagccacggaagggaatcgaaaccattaactgctcagcagacaaccaagttggacgcccccaccaacctgcagtttgtaaacgagacggactccaccgtgcttgttagatggacacctccaagagcccaaatcactggctataggctcaccgtcggtctcactcggcgaggacagcctagacagtacaatgtcggcccctccgtaagcaagtatcctctgcgcaatctccagccagcgtccgaatacactgtctctcttgtggcaattaagggcaatcaggaatccccaaaggctactggggtcttcaccaccttacaacccgggtcatcgatacccccctacaacactgaagtcaccgagactacaatagtgatcacgtggacacctgccccaagaataggctttaagctcggcgtgcgcccctcccaaggaggcgaggccccaagagaggtcacatccgactctggatcgattgtcgtgtctgggctgacccctggagtcgagtacgtctatactatacaggtcttaagagacggtcaagaaagggatgccccaatcgtgaataaggtcgtgacacctctgagcccccccactaatctacatcttgaggcaaatcctgacacaggcgtgctgaccgtttcatgggagcgatccacaactccagacataaccggctaccgtattacaacgacccctaccaacggtcagcagggcaattcgctagaggaagtggttcacgcagatcagtcttcctgtacctttgataacctaagcccaggacttgagtataatgtcagtgtatatacagtgaaagatgataaggaaagcgtcccgataagtgacacaatcatccccgccgtcccgccgcccacagatctgagatttactaatatcggtcccgacaccatgcgcgttacttgggctccacccccatcgattgacctgactaattttttggtgaggtattctccagtaaagaacgaagaggacgtcgccgaactgtccatcagcccaagtgataacgctgtagtgcttacgaatctgctgccaggcactgaatatgtggtttctgtgagctccgtgtatgagcaacatgaatcaacccctctgagaggccgacagaaaactgggctcgactcccccacaggcattgacttcagtgatataactgccaattctttcaccgtgcactggatcgccccgcgcgccactatcaccggctatagaatcagacatcaccctgagcacttctccggtcgtccccgcgaagaccgcgtgcctcacagtcgcaatagtattacattaactaatctcacacccggtacagagtacgtggtctccattgttgccctgaatggacgggaggaatcccctttgctaattggccagcagagcactgtttcagatgtgccacgagatctggaggtggtcgcagcaaccccaacaagtttattgatatcctgggacgcacctgcggtgaccgtgaggtactaccgaataacgtacggagagaccggaggaaattcgccagttcaagagtttacggtgcccggcagtaaaagcaccgctacgatttcaggactgaaacccggggtggactataccatcactgtctacgctgtaacaggaagaggcgatagtcctgccagttcaaaacctatctccattaattacagaaccgaaattgacaagccatcacaaatgcaagtaacagacgtgcaagacaatagcatatctgtgaagtggcttccctcttcatcacctgtgactgggtaccgcgtcaccacaactcccaagaacggccccggacctactaaaacaaaaactgccgggcccgaccaaaccgagatgaccatcgagggcttgcagccgactgtcgaatatgtcgtttccgtatatgctcagaatccaagcggggagagtcaaccgttggttcagacagccgttaccaatatcgataggcccaaaggactcgcttttactgatgttgatgtggactccattaagattgcctgggagagcccacaagggcaagtgtcgcggtatagagtgacttatagcagtccagaagacggtatacacgaactttttccagcaccggatggagaggaggatacagccgagctccagggtctcaggcccgggtctgaatacaccgtgagcgtggttgccctgcacgacgatatggaatctcagcctcttataggaacccagtcgaccgctatcccagcacctaccgacctgaaattcacccaggtcacgcctacctcattaagcgcccaatggactccacccaacgtacagcttaccggataccgcgtgcgtgtgacaccaaaagagaagaccggcccaatgaaggagatcaatcttgcacctgacagctcaagtgtggtggtatctggtctgatggtggctacaaaatatgaagtttcagtttacgctttgaaggacaccctgacgtccaggccagcccaaggcgtggtcacgacactcgaaaatgtgagtcccccccggagagctagggtgacagacgctactgagaccacaatcacaatttcatggcggacaaaaacagagacaattactggcttccaagtagatgcagtccccgcaaatgggcagacccccatccaaagaacaataaaacctgacgtgcgcagctataccatcaccggactccagcctggtacagattacaagatttacctctatactcttaatgacaacgcacgttccagtcctgtagttattgacgcgagcactgcaatagacgctccctccaatctgcgctttcttgcaactacacctaactctcttctcgtctcatggcagcctccaagggccagaattaccggctatattattaaatacgagaaacctgggtcaccaccaagagaagtcgtgcctcgaccccgacctggggtgacagaggcaactattacaggtctggaacctggaacagagtacaccatttacgtcatagctcttaaaaacaaccagaaaagtgaacccttgataggacgaaagaaaaccggtcaggaagccctctctcagactactatctcctgggctccctttcaggatacaagcgagtatattatctcatgtcatcccgtgggaaccgatgaggagccgcttcaattcagagtgcctggaacctccactagtgcgacgcttaccggccttacccgaggagcaacctataatgtaatagtagaagcactgaaagaccagcagagacataaggtgagggaagaggtagtgacggtaggaaattcaggttggtgtcacgacaatggggtgaattacaaaattggcgagaaatgggacaggcagggggagaatggccagatgatgagctgtacctgcctgggtaatgggaagggcgaatttaaatgtgaccctcacgaggcgacatgttacgatgacggcaaaacatatcatgtgggcgaacagtggcagaaagaatacctgggcgcaatctgtagttgcacgtgctttgggggtcagcgagggtggagatgcgacaattgcagacgaccagggggagaacctagtcccgagggaacgactgggcagtcctacaatcagtatagccaaaggtaccaccagagaacaaacactaacgttaattgccccatcgaatgtttcatgcccctcgatgttcaagctgatagagaggattcaagggagtag

SEQ ID NO: 31896 - RNA, 7434 nt, synthetic construct
  misc_feature 1..7434: note = Description of Artificial Sequence: Synthetic coding sequence
  source 1..7434: mol_type = other RNA
atgttgcgggggccaggtccagggcttttactgctggccgtgcagtgcttgggcacagccgtcccttccaccggagcatctaagagcaaaagacaggcccagcagatggtgcaaccacaatctccagtggcagtatcacagtctaaacccggttgttacgacaatggcaagcattatcaaataaatcaacagtgggaaagaacttacctgggcaacgcgttagtctgcacatgctacggggggagtaggggttttaactgtgagtctaaacccgaagctgaggaaacatgtttcgacaagtacacagggaacacctatcgagtgggagatacttacgaacggcccaaagatagtatgatttgggactgcacatgtatcggtgccggccgggggcgaatttcttgcacgattgctaatagatgccatgaaggagggcaaagttataagattggagatacctggagacgaccacatgaaaccggcgggtacatgttggaatgcgtatgcttgggcaacggaaaaggtgaatggacgtgtaagcccatcgccgaaaaatgcttcgaccatgctgctggaacaagttacgtggtaggggaaacatgggaaaaaccttaccagggttggatgatggtggattgtacttgtttaggtgaaggtagtggccgcataacatgtacatctcggaatcgctgcaatgaccaagatacaagaacctcttatcgtattggtgatacttggagcaagaaagataacaggggtaacctcctccagtgcatttgtacaggaaatggacggggagaatggaagtgcgagaggcatacttctgtacagacaactagtagcgggtctgggccatttacggacgttagagccgctgtttatcagccccagcctcacccacaaccaccaccttatgggcattgcgtaacagactctggggtcgtttattcagtcggcatgcagtggctcaaaactcagggcaataagcaaatgctctgtacgtgtcttggaaatggggtgtcctgccaagagaccgccgtcactcagacatacggtggcaattctaacggcgagccatgcgtacttccatttacctacaatggacgaaccttctactcgtgcaccactgaaggtaggcaagatggtcacctgtggtgcagcacaacaagcaattacgaacaagatcaaaagtattcattttgtacggatcataccgtcctagtccaaacacgaggtggaaacagtaatggcgctctctgccactttccattcttatacaacaaccataactatactgactgtacctctgaggggaggcgtgataatatgaaatggtgcgggacgactcaaaattatgatgccgatcagaaatttgggttttgtccaatggccgctcatgaagaaatctgtaccactaatgaaggcgtgatgtatcggattggagatcaatgggacaagcaacatgatatgggccacatgatgcgatgtacatgcgtgggcaatggccgtggcgaatggacctgtattgcatattcgcaattgagagaccagtgcatagtggacgatattacttataatgtgaacgatacatttcataagcgccatgaagaaggacacatgctaaactgtacctgttttggtcaggggagagggagatggaaatgcgatccagtagaccaatgccaggattcagagacgggcacattttatcagatcggcgacagctgggaaaaatacgtgcatggggtaagataccagtgttattgttacgggagagggatcggggaatggcattgccagcctctgcagacataccctagcagtagcgggcccgttgaagttttcatcaccgagaccccctcacagccgaatagtcatcccattcagtggaacgccccccagccaagccacatttccaaatatattctgagatggcgacccaaaaactcggtgggacggtggaaagaggcaaccattcccggacatctgaacagctatactataaaaggtcttaaaccaggagtcgtatacgagggacagttaatcagtatccaacagtacggacatcaggaagtgacgcggttcgatttcaccactacatctaccagcacccccgtgacctctaacaccgttacaggagagaccactcctttcagtccgttggtggctacctccgaatccgttaccgaaatcacagcttcatcattcgtcgtgtcctgggtgtccgcatccgatacagtgtctggatttcgcgtagaatacgagctatctgaagagggtgatgagccacaatatttagacctgccatctactgcgacctccgtgaatatacccgacctcctgcccggtaggaagtacatcgtgaacgtttatcagatatctgaagatggcgaacagtccctcatattaagcacgtctcaaacgaccgctcccgacgcacctcctgacaccaccgtcgaccaagtggatgacacctcaattgtggttaggtggtccaggcctcaggcacctatcacaggctataggattgtatatagcccctcagtggagggatcatccacggaactaaatctacctgaaaccgctaatagtgtgacactcagtgatctccagccaggcgtccagtataacatcaccatttatgccgtcgaggaaaatcaagaatccacgcccgttgtcattcaacaggaaaccacaggaactcctagatccgataccgtgccctccccccgggacctgcagtttgtcgaagtaacagatgtgaaggtgactataatgtggaccccccctgaaagtgccgtcacaggatatcgagtcgatgtgatacccgtgaatctgccaggcgaacacggacaaaggctgcccattagtcgtaatacttttgcggaggtgaccggactgtctcccggcgtgacctactacttcaaggtgttcgcagtgtcccacggaagagagtctaagccactgacagcacagcagacgaccaagctggacgctcccacaaaccttcagtttgtgaatgaaaccgactctacagttctagttcggtggacaccccctagagcccagatcaccggatatagattgactgttggcctgactagaagaggccagccgagacaatacaatgtgggccctagcgtcagtaaataccctctcagaaatctgcagccagcatcagagtacactgtgtctcttgtggctatcaaaggaaaccaggagtcccccaaagctaccggtgtctttacaactctccaacccggatccagtattcctccctataacactgaagtaactgaaaccactatcgttattacatggacacccgcaccgaggatcgggttcaaactgggcgtcagaccctctcagggaggcgaagcaccacgggaggtgacctctgactcaggttctattgttgtgagtgggctaactccaggagtagagtacgtttataccatacaggtgttaagagatggccaggaaagggacgccccaatcgtgaacaaagtcgtgacgcctctgtccccacctactaatttacacctagaggccaacccggacacaggcgtcctcactgttagttgggaacgcagcactacacccgacattacaggttatagaatcaccaccactcccaccaatggccaacagggaaacagtcttgaagaagtcgtgcacgcagatcagagcagctgtacatttgataacttgagccccgggctggaatataacgtttctgtgtataccgtcaaggatgataaggaatccgtgccaataagcgacacaatcattccagaagtgcctcaacttaccgacctgtctttcgtggacattaccgactcatctattggcctccgatggactccattaaactcatccactatcatcggctaccggattaccgtagttgcagctggtgaaggaattcctatctttgaggattttgtagattcttcagtgggatactatactgtcaccggcctcgagccgggcatcgactatgacatctccgtgattacgcttattaatggaggcgaaagcgctcccactacattgacccagcaaaccgccgtcccaccgcccaccgacttacgattcactaatataggtcctgatacgatgcgggttacctgggctccccccccatcaatcgatctgactaactttctagtacggtactctccagtgaaaaatgaagaagacgtcgccgaactttcgattagcccatcggacaatgctgtggtcctgactaacttgctgcccggaacagagtatgttgtgtcagtctcaagtgtctatgaacaacatgagtccacgcctctgagaggacgtcagaagaccggcctggatagccccactggaatcgacttctccgacataactgctaattcctttactgtgcactggattgctccccgcgccactattacagggtatagaattagacatcatcctgagcatttctctggacgtccccgggaagatagggtgccccattcccgcaacagtataacactgacaaacctaacccccgggaccgagtacgttgtctctatcgtggcgcttaacgggcgcgaggaaagcccactgctaatcggtcagcagagtacagtgtcagacgtaccccgagacctggaagtagtcgctgcaactcccacctccctgttaatttcgtgggacgccccagcagtgaccgtgcgctactacagaattacttacggagaaacagggggaaacagtccagtgcaagaattcaccgtccccggctcgaagtccacggccaccataagcggactgaaacccggggtcgattacacaataaccgtatacgccgtaaccgggagaggtgactcaccagcatcaagcaagccaatttcaattaattaccgaaccgaaatagacaaaccttcccagatgcaggtcaccgatgtgcaggataatagtataagtgttaagtggctgcccagttcctcccccgttacgggctacagagttacaactaccccaaagaacggtcctggacctacaaagaccaaaaccgccggcccagaccagaccgagatgaccatcgaaggccttcaaccgaccgtggagtatgtcgtcagcgtatacgcccagaacccctccggcgaatcccagcctctcgttcaaacagcggtaaccaacattgaccgacctaagggactggcatttacggatgtggacgtagacagtattaaaatcgcatgggaatctccccagggacaagtgagccggtatagggttacatattctagtccagaagacggcattcacgagctgtttccggcaccagatggcgaggaagacacagccgagctccagggtctccggccaggttccgagtatacagtgagcgtggtcgccctgcatgacgatatggaaagccagcccttaataggcacccaatctacagcaatcccagcacctacagatctgaagtttactcaggtgacacccacatcactgtcagctcaatggactccgcctaacgtccagctgactggctaccgcgttagagtaaccccaaaggagaagacaggaccaatgaaggagatcaatctagcgccggacagctcttctgttgttgtgtctggtctgatggtcgctaccaaatatgaggtttcagtatacgccttgaaagatactttgacatcaagacctgcccagggggtcgtgaccaccttggaaaatgttagtccacctaggcgggcccgagtgaccgacgctaccgaaacaaccattaccatctcttggagaacgaaaactgaaacaattactggcttccaggtggacgctgtgcccgctaacggccaaactccaatccaaagaactatcaaaccagatgttagaagttatacaattacaggtctccagccaggaaccgactacaaaatttacctctacacactgaacgacaacgcgcgtagtagcccggtcgtgatcgatgccagcaccgccattgacgccccctctaatctccggtttttggccactacaccgaactctctacttgtctcctggcagccgccgcgcgcgcgaataacaggttatatcataaagtatgagaaacccggatcccccccacgagaggttgtgccaagacctagacccggtgtaactgaagcaactatcacaggacttgaaccggggactgaatacaccatctatgttattgctctcaagaataaccagaaatcagagccgctgatcggacgcaagaagactgatgaactgccacagctcgtcacgctgccccatcctaatttacatggacccgagattctagacgtgccttccactgtgcaaaagacgccattcgtaacgcacccaggctacgacaccggcaacggaattcaactgcctggtacgtcagggcagcaaccaagtgtcgggcagcaaatgatctttgaagagcacggcttcagaaggacaactcctccaaccaccgccacacctattcgtcatagacctagaccttatcctcctaacgtcggcgaggaaattcagatcggtcacatcccaagagaagacgtggactatcatctgtatccgcacggcccaggactcaaccccaacgcatctaccggccaagaagctctcagccagacgactatttcatgggctcctttccaggatacgtctgagtacatcattagctgtcaccccgttggaacagacgaagaacctctccagtttcgagtgcctggcacaagtacttcggccaccctgacagggctgacaagaggagcgacctacaacgttatcgtggaagctctcaaggatcagcagaggcataaggtcagagaagaagtggtgactgttgggaacagtgtgaacgaaggcctgaaccagcctacagatgacagctgttttgacccctatacggtctcccattatgcggttggagatgagtgggagagaatgtctgagagcgggttcaagctcctctgtcagtgccttggattcggatccggccattttaggtgtgatagttctagatggtgtcatgataacggagtgaactataagattggagaaaagtgggatcggcagggagagaatgggcaaatgatgtcctgtacttgcttagggaacgggaaaggcgaattcaaatgtgaccctcacgaagcaacatgttatgatgatggaaagacctaccacgtgggcgaacaatggcagaaggagtatctcggtgccatctgctcttgcacttgctttggaggacaaagagggtggagatgcgacaattgcaggagacccggcggagaacccagccccgaagggactactggtcagagttataatcagtacagtcagcgctaccaccagaggacaaacactaacgtaaactgccctatagaatgtttcatgcccctggacgtacaagccgaccgcgaagacagtcgcgagtag

SEQ ID NO: 31897 - RNA, 6891 nt, synthetic construct
  misc_feature 1..6891: note = Description of Artificial Sequence: Synthetic coding sequence
  source 1..6891: mol_type = other RNA
atgctgcgcgggccaggccctggattactgctgctggccgtgcagtgtctgggaacagctgtcccatccaccggcgcttcgaaatctaagcgacaggcgcagcagatggtgcaacctcaatctcctgtcgccgtgtcacaatcaaagcctggttgctatgataacggaaagcactatcagataaatcaacagtgggaaagaacatatttgggcaatgctttggtgtgcacttgttacggaggatcccgcggatttaactgcgagtccaaaccagaggccgaggagacatgttttgataaatacaccgggaatacttacagggtaggagatacttatgaacgtcccaaagactctatgatctgggactgcacatgcattggcgccggaagaggacgaatttcttgcactattgcgaacagatgccatgagggggggcagagttataagatcggagatacttggcgccggccccacgaaacagggggttacatgctagaatgcgtctgtttgggtaacggaaagggcgaatggacatgcaaacctatagccgaaaaatgttttgatcacgccgccggaaccagctacgtagtgggcgaaacatgggagaagccatatcagggatggatgatggtggattgtacttgtctcggagaaggttctggccggatcacctgcaccagtcgcaacagatgtaatgaccaagatacaagaacatcataccggatcggggatacttggagcaaaaaggacaacagaggtaatctgctacagtgcatctgcacaggaaatggacggggcgagtggaaatgtgagaggcacacttcagtgcagaccacaagctcaggatctgggccctttacagatgtgcgtgcagctgtttaccagcctcagcctcaccctcagccaccaccttacggccactgtgtaaccgattctggtgttgtgtattcggtgggcatgcagtggttgaaaactcagggcaataagcagatgctatgtacatgtctgggaaacggggttagttgtcaggaaacagccgtcacccagacctatggtggaaattcaaacggggagccttgcgtactaccattcacttataacggcagaacattttactcttgcacaacggaaggccgccaagatgggcatctctggtgttccacaaccagtaactatgagcaagaccagaagtatagcttctgtacagaccatacggtgttggttcaaacccgcggcggcaatagcaacggtgccctctgccactttccattcctctacaataatcacaactataccgactgcacatcagaagggcggcgggataatatgaaatggtgcggtactacgcaaaactacgacgcagatcagaagttcgggttctgccctatggcagcgcatgaagagatatgtaccacaaacgagggcgtgatgtatagaataggcgatcaatgggacaaacaacatgacatgggccatatgatgagatgcacctgtgttggcaatggccggggagagtggacctgcatagcatactcccagctcagagaccaatgtattgtagatgatataacatataatgtgaatgatacattccataagaggcatgaggaaggccatatgctcaattgtacctgtttcgggcagggaagggggagatggaaatgcgaccccgttgatcaatgtcaggacagcgaaacgggcaccttttatcagattggggattcatgggagaaatacgtgcatggcgtacgttaccagtgctattgttacgggaggggcataggcgaatggcactgtcaacctctccagacatacccttcatcttccgggccagtggaagtgttcatcacagagacacctagtcagcctaatagtcacccgatacaatggaatgcaccccaaccttcccacatctccaagtacatactccgttggaggcctaagaactcagttggccgctggaaggaagccacaatcccaggacacttgaattcctacactattaaaggcctcaaaccaggcgtggtctacgaagggcagttgatttcaatacaacagtacggccaccaggaagttaccagatttgattttactactacgagcactagcacacccgtgacatctaacacggtcaccggtgaaactacccccttctctcccctggtggctactagcgagtccgtcacggagatcacagcatcatctttcgtcgtttcttgggtcagtgcatcagatacagttagtgggtttcgtgttgaatacgagttatctgaagaaggcgatgaacctcagtacctcgacctcccatccacagccacaagcgtgaacatccccgatctgctacccggccggaagtatatcgtgaacgtttaccagattagcgaggatggtgaacagtcgcttatcttatctacatcgcaaaccacagcacccgatgccccccccgatactaccgtagatcaggtggatgacacgagcattgtggtacgttggtctagaccccaggcaccaattaccggataccgcatcgtatactctccaagtgtcgaaggcagcagcaccgagctcaatcttccagaaactgccaacagtgtaaccctgagtgacctgcaaccgggtgttcagtacaatataacgatctacgcagttgaggagaatcaagagagcacaccagtggtgatccagcaggagacaacaggcaccccccgttctgacacggtcccttctcccagagacctgcagtttgttgaggtcaccgatgttaaggtaaccataatgtggactccacctgaatctgccgtgacgggctatcgtgttgacgtgattccagttaatctaccgggagaacacggacagaggctgcccatatcaaggaacactttcgccgaagtgaccggactaagcccaggcgtgacttattatttcaaagtttttgcagtttcccacggtcgagagtccaaaccattgacagcccagcaaactacgaagctggacgcccccaccaacctccagttcgtgaatgaaactgattctaccgtgctggtaagatggactccaccacgcgctcagatcacaggttacaggctgaccgtgggattgacaaggagaggccaacccagacagtacaatgtaggcccttcagtttcaaaatacccactgaggaacttacagccggcaagtgagtacaccgtaagtctcgtggcaattaaaggcaaccaggaatcccccaaagcaacaggagtgttcacaaccctgcagcccggatcctccattcctccctacaacaccgaagtaacagaaacaacaatcgtaatcacttggacacccgcccctcgaataggcttcaagctgggcgtgcgaccctctcagggcggcgaagccccccgtgaggtgacctcagattctggttctatcgtagtgagcggactgactccgggcgtcgaatatgtctacactatccaggtcctccgagatggccaagagcgagatgctccgatcgtgaataaggtggttactcccctgtctccgccgacaaatcttcaccttgaggccaatcctgacacaggagtgcttaccgtgagctgggaaaggagcaccacccccgatattacaggatacagaataaccacaacacccacaaatgggcagcagggcaactctttagaagaagtagtgcatgccgaccagagctcttgcactttcgataacctctctcctggcctggaatacaatgtgtctgtgtatactgttaaagacgacaaggaatctgttccgattagtgataccattatcccagctgttcccccccccactgacctgcgctttactaacatcgggcccgacactatgcgcgtaacatgggcgccacctccctccatagatttgacaaactttctggttcgctattccccggtgaaaaatgaagaagacgtcgccgagttgtcaatatctccttctgacaatgctgtagtcctcacaaacttactccctggaaccgaatatgtggtcagcgtcagtagcgtgtacgagcagcatgaaagtacccctttacgcggcaggcaaaagaccggcttagactcaccaactggtattgatttcagtgatatcactgcaaactccttcactgtacattggatcgctcccagagcgactatcacaggatataggatccggcatcaccctgagcacttttccggacggccacgggaagacagagtgcctcactcaagaaacagtattacactgacgaacttgacccccggaacagaatatgtcgtatcgatcgtggccctgaatggaagagaggagtcaccattgctcatagggcagcaatctacagtgagtgatgttcccagagatctcgaagttgtggcagctacacctacttctcttttgatctcctgggatgcccccgccgtgacggttcgctactaccggataacttacggagaaacaggaggcaatagccctgtccaggaatttaccgtgccaggtagcaagagtaccgctacgatcagtgggttaaaacccggcgtggattacacaatcacagtttatgcagtcaccggcagaggggactcacctgcttccagcaaaccaatcagcattaattaccggacggagattgacaagccatcacaaatgcaggtgaccgatgttcaagacaattccatcagtgttaagtggttgccttccagctccccagtgacaggctacagagttacaacaactcccaagaacggtccagggcccaccaaaaccaaaactgcaggcccagatcagaccgaaatgaccatcgagggactccaacccacagttgagtacgttgtctccgtttacgctcaaaacccatccggcgaatcacaacccctagtccaaactgctgtgaccaccattcccgcgccgactgaccttaaattcacacaagtcaccccaacgtcgctctctgcacagtggacgcctcctaacgtacagctgactggttacagagtgagggttacaccaaaggaaaagaccggacccatgaaagagatcaatttggctcctgacagttcctctgtggtggtgtcgggtctgatggtggctaccaaatatgaggttagcgtgtacgccctcaaggacacactgacttcccggccagctcagggcgtggttacgactttggaaaatgtatccccacccagacgtgcacgtgtgactgacgcgacagagaccaccatcaccatcagctggcgaactaaaaccgaaacaatcacaggctttcaggtagacgccgtgcccgctaacggacagacacccattcaacgtacaatcaaacccgatgtgagatcatataccatcaccggtctccaaccaggaaccgattacaagatctacctttacacactcaacgataatgcacgtagttccccggtcgttatagatgcaagtaccgcaatcgacgccccatctaatctccggttcctcgccactacccctaactccctgctcgtgtcctggcagccaccacgcgcgagaattaccggatacattatcaagtatgagaaaccgggctcaccaccaagagaagtagtgccccggccacgccctggagttactgaagcaacaatcacaggcttggaacccggcacggaatacactatttacgttatcgcactcaagaataaccagaaatcagaacctcttattggtagaaagaagaccgacgaactgccacagctcgtgactctgccgcatcccaacctccacggtcccgagattctggatgtgccttctaccgtccagaagacaccctttgttacacatcccggctacgacacagggaatggtatccaactgccagggacatctggccagcaaccatcagtgggccagcagatgatattcgaagaacatggattcagacgtacaactccacccactactgccactcccatcagacatcgaccaaggccctatcctcccaatgttggcgaagagattcaaatcggtcatatcccaagagaggatgtcgactatcacctataccctcacggaccaggcctaaatcctaacgctagcaccggacaggaggccctgtcccagacaacaattagctgggcacccttccaagatacttctgaatatatcatctcatgtcatcccgttgggactgatgaggagccgttacaatttcgcgttcccgggacatccaccagcgcaactctgacggggctaacaaggggagcaacctacaatgttattgtcgaggcattaaaggaccagcagagacacaaagtgcgcgaagaggtggtcacagtgggcaactccgtcaatgagggtctcaatcagccgaccgacgactcatgttttgatccttatacagttagtcactacgctgtgggggatgagtgggaaaggatgagtgaaagcggctttaagctactatgtcaatgcctaggatttggatctgggcacttcagatgtgatagttcacgctggtgtcacgataacggggtaaattataagattggggaaaagtgggatagacagggggagaatggacagatgatgtcatgtacgtgtttaggaaacggaaagggcgaattcaaatgtgacccccacgaagcaacctgctacgatgacggaaaaacctaccacgtgggagaacaatggcaaaaagagtatttaggcgcaatctgctcatgtacttgttttggcggccagcggggttggcgttgtgacaactgtcgccgtccagggggcgaaccctcacctgaaggtaccactggccagtcctataaccagtatagccagagataccaccagcgcacaaataccaatgttaactgccctattgaatgttttatgccactagacgtacaggctgatagagaggacagccgagagtag

SEQ ID NO: 31898 - RNA, 6096 nt, synthetic construct
  misc_feature 1..6096: note = Description of Artificial Sequence: Synthetic coding sequence
  source 1..6096: mol_type = other RNA
atgctccgcggacctggacctgggctcctgttactggccgtccagtgcctaggcaccgccgtcccgtctaccggcgcgtccaagtccaaaaggcaagcccagcagatggtgcagccacagtcgcccgttgccgtgtctcaatctaagccaggctgctatgataatggaaaacactatcagatcaatcaacaatgggaaagaacctaccttggcaacgctctggtgtgtacctgttacggggggtctagagggtttaattgtgagtctaagcctgaggcagaagaaacctgctttgataaatatacaggaaatacttacagggtgggagacacgtacgagcgccccaaagactcaatgatttgggattgtacttgcattggagccgggagaggcagaatctcatgtactatcgcaaacaggtgtcacgaaggagggcagagttacaagatcggcgacacatggagacgccctcacgagacaggaggttacatgctggaatgtgtgtgtctgggaaatggaaagggcgaatggacttgtaaacccatcgccgaaaagtgcttcgatcacgccgcgggcactagctacgtagtcggtgaaacttgggaaaaaccatatcaaggttggatgatggtcgattgtacgtgcttaggcgaaggcagtggtaggattacatgtacctcaagaaatcgctgcaatgaccaggatacacgtacttcataccgcatcggggacacatggtcaaagaaggataaccggggaaacctgctgcaatgtatatgtaccgggaatggtagaggagagtggaaatgtgaacggcataccagcgtacagaccacatcatccggtagcggaccttttaccgacgtgcgagccgctgtataccaaccacaacctcatcctcagcccccaccatatggccactgcgtgactgattccggtgtagtgtatagtgtcggaatgcagtggctgaagactcaagggaataaacaaatgctgtgtacatgcttgggtaacggagtgagctgtcaggaaaccgcagtgacacaaacctatggcggcaattctaatggcgagccctgcgtgctcccattcacatataatgggcgaaccttctatagctgtactaccgagggcagacaggacgggcatctctggtgtagcacaacttctaattatgagcaggatcagaagtatagtttttgtaccgatcacaccgtgctagtgcagacaagggggggcaattccaacggggcactgtgtcactttccgtttctctacaataaccataattacacagattgcacctccgaaggaagacgcgacaacatgaaatggtgcggcacaacccaaaattatgacgccgatcaaaaattcggattttgcccgatggctgcacacgaagaaatctgcaccactaacgagggcgtcatgtacagaattggtgaccaatgggataagcaacacgacatgggccatatgatgagatgcacttgtgttgggaatggacgcggagaatggacttgtatcgcctatagccaattgagggatcaatgtatcgttgatgacatcacatacaacgtaaatgatacgtttcataaaagacacgaagagggccacatgttaaattgtacttgttttggacagggaaggggaagatggaaatgcgatccagttgaccaatgccaggactccgagacgggcaccttctaccagatcggcgactcttgggagaaatatgtacacggcgtcagatatcaatgctactgctatggccgaggcattggggagtggcattgtcagcccctgcaaacctacccatcctccagcggaccagtcgaagtatttatcaccgaaaccccatctcagcctaacagtcaccccatccagtggaacgctccccagcctagtcatatctccaaatacattctgcgatggcgacctaaaaacagcgtagggagatggaaggaggccacaattccagggcaccttaattcctatacaattaaaggcctgaaacccggagtagtgtacgaaggacaactgatctcaatccagcagtacgggcaccaagaggtgacacgctttgactttactacaacttccacttccacccccgttacttccaatactgtaactggcgagacgaccccatttagcccacttgtggccacctcagagagcgtgaccgaaatcaccgcatcttccttcgtggtaagctgggtgtccgccagtgacactgtgtcaggttttagagtggaatatgagctcagcgaagaaggtgatgaaccacagtatttagatcttccctccacagcaacatccgtcaatatccccgacctcctgcctggcagaaagtatatcgtgaatgtgtatcaaatcagtgaagatggagagcagtcactaattctttctacatcacagacgactgctcctgatgctcccccagatacaacggtggatcaggtcgacgatactagcattgtagtacggtggtctagaccccaggccccaattactggctaccgtatcgtatattcacccagcgttgaaggatcttcaacagaactcaatcttccagagaccgctaacagtgtaaccctctccgaccttcagcccggcgttcagtataatattacaatttatgccgtcgaagaaaatcaagagtccacacccgtcgttattcagcaggaaactaccggtacccctcgatcggatactgttcctagcccacgagatcttcaatttgtagaggtgacagacgttaaagtcactatcatgtggacccctccagaaagcgcagtgaccggttacagagtggacgttatccctgtcaacttgccaggagaacatggccagaggcttcctatttccagaaatactttcgccgaggtgaccggtctgagtccaggcgttacatattattttaaagtctttgccgtttcccatggccgcgaaagcaagccactgacagcacagcaaacaacgaaactggacgcaccgacaaatctccagtttgtgaatgagacagatagcaccgtgctggttagatggacacctccgcgggcacagattaccggataccggctgaccgtcggcttaacacgacgtggacagcctcgccagtataatgttggaccatccgtctcaaaatatccgttgcgaaacctgcagccagcatcagaatatactgtgtccctcgtagccatcaagggaaatcaggaatcacctaaagccacaggcgtatttaccaccctccaacccggcagttcgattccaccttacaataccgaagtgaccgaaactacaattgttatcacttggactcctgctccacggatcggttttaagctgggtgtgcggccctcccaaggaggtgaggctccacgcgaggtcacatcagactctggctccatcgtggtgtcgggtttaactccaggcgtggaatatgtgtacacaatccaagtactcagagacggccaagagagagatgcccctattgtgaataaagtggtgacaccactaagccccccgacaaatcttcatctggaggccaaccccgataccggagtattaacagttagctgggaaaggtcgaccacacccgacataaccgggtacagaatcacaacaacgccaaccaatggccaacaaggaaattctctggaagaggttgttcacgcagatcagagcagctgtactttcgacaatctgagtcccgggctggagtataacgtttcagtttacacagtgaaggatgataaggagtctgtccccatctctgatactattatccctgccgttcctcctcctactgacctccgcttcaccaacatcggtcctgatacaatgcgcgtcacctgggcccccccgccctccatcgacctaacaaactttttagtgcgatactcccctgtgaaaaatgaggaggacgttgctgagttaagtatcagcccaagcgacaatgcagttgttttgacaaacctgctcccaggcaccgaatatgttgtgtctgtttcgtccgtgtacgaacaacatgaatcgacccccttgagaggacgccagaagacaggcctggacagccctacaggcattgatttttctgatatcaccgctaactccttcaccgtccattggattgcccctagagcgactattaccggctatcggattcgccatcaccccgaacacttcagcggccgacctagagaggaccgcgtgccccattccagaaactctattactctcactaacctgacgcctggcactgagtatgttgtgtctatagtcgcccttaatggacgcgaagagtcacctctcttaataggacagcagtctacggtgagcgatgttccccgtgatctggaggtggtggcagcaacgcctacatccttgcttatctcctgggatgctccagccgtgaccgtcagatactacagaatcacatacggagaaacaggaggaaattctcccgttcaggaatttactgtgcccggaagtaaatcgaccgcaaccatctccggattaaaacctggggttgactacacaatcacagtctacgccgtgactggaagaggcgactcccccgctagctccaaacccatctcgataaactataggaccgagattgacaagccatcacagatgcaagtgacagacgttcaggataattccatctcagttaagtggctgccttcctccagccccgtgaccggctaccgggtgactacgactcctaagaacggcccaggtcctactaaaaccaaaaccgcaggccccgaccaaacggaaatgaccattgaggggctgcagccgaccgtcgaatatgtggtaagcgtgtatgcgcaaaatccatccggagagagccagccactcgttcagacagccgtgacaaacatcgatcgccctaaaggtctagcattcactgatgtggacgtggacagtataaagatcgcctgggagtctccacaagggcaagtcagccgatatagagtgacctactcaagtcccgaagatggtatccatgagctgtttccagcccctgatggggaagaagacactgctgagctgcaaggcttacgtccaggtagcgaatacacagtttctgtcgtcgcactccatgacgatatggagtctcaacccctgattggtacgcagagtacggccattcctgcccctacagacctgaaatttacacaagtcacacccacctcgctgtcagctcaatggacacctccgaacgtgcagcttactggataccgcgtacgggttacaccgaaggagaaaaccgggcctatgaaagaaattaatcttgctcccgattcctcctcagtggtagttagcggtctgatggtcgccacaaagtatgaggtcagcgtgtacgcactgaaagataccttaacttcccgccccgcacagggcgtcgtcacaactcttgaaaatgtgtccccacccaggcgcgcccgagttaccgatgccacagagaccaccatcaccatctcatggcggactaagacagaaaccattacaggcttccaggttgatgccgtgccagcaaatggacaaaccccaatccagaggaccattaagccagatgtgagatcatacacaataactggacttcagccagggactgactacaagatttatctatacacattgaatgataatgcaagaagtagcccggtggttattgacgctagcacagccattgacgccccctcaaatcttaggttcttagcaacaaccccaaacagcctcttagtgagctggcagcccccaagagctagaattactggctacattatcaagtatgaaaaacctggatccccccctcgagaggtcgtgcctcgacctaggcctggtgtgacggaagctactatcacagggctggagcccggaacagaatacaccatatacgtgatcgccttgaaaaacaaccagaagtcggaacccttaatagggagaaagaagaccgggcaggaagcacttagtcagactactatcagctgggcacccttccaggacacctcagaatacataatttcatgccacccggtcggaactgatgaagaacccttacaaagcacaaaagcttag

SEQ ID NO: 31899 - RNA, 6531 nt, synthetic construct
  misc_feature 1..6531: note = Description of Artificial Sequence: Synthetic coding sequence
  source 1..6531: mol_type = other RNA
atgttaagaggacccgggccaggcctactcctgctggcagtgcaatgcctcggcactgcagtcccatccactggagcctccaagtcaaagcgccaggcacaacagatggtacagccccaatccccagtggcagtttcgcaaagtaaaccaggttgctatgacaatggaaagcactaccagatcaaccagcaatgggagcggacctatcttggcaacgccctcgtctgtacatgctatggcggaagcaggggttttaattgtgagtccaagcctgaggctgaagagacatgttttgataagtatactgggaatacgtacagggttggtgatacctacgaaagaccaaaggatagcatgatatgggactgtacatgcataggagcggggagaggcaggatctcatgtaccattgcaaatagatgccacgaaggcgggcagagttataaaataggggacacttggcgacggccacatgaaactggaggctacatgctggaatgtgtgtgtttaggaaatggcaaaggagaatggacgtgtaagcccatagcagaaaagtgttttgatcacgccgcaggtacaagttatgtggttggagagacatgggagaagccatatcaaggctggatgatggtggactgtacctgtttgggtgagggatcaggtagaatcacttgtacatcacgtaacagatgcaatgatcaggacacgagaacaagttataggataggcgacacctggtcaaaaaaagataacagaggcaatttactccaatgcatatgcaccggtaatgggaggggggaatggaaatgtgagagacacactagtgttcaaacaacaagctctggcagcggccccttcacagatgtacgggccgctgtctaccagccacagccccaccctcagccccccccatatgggcactgtgtcactgacagcggcgtggtgtatagcgtcggaatgcaatggttgaaaacccaagggaacaaacagatgttatgtacttgcttaggaaatggtgtgtcatgtcaggaaactgctgtgacacagacatacggtggaaactctaatggcgaaccgtgcgtgttgccctttacttacaacggtaggaccttctattcttgcacgacagagggaagacaggacggacatttgtggtgctctacaacatctaactacgaacaggaccagaagtattctttttgtaccgatcataccgtcttagtccagactcgaggggggaacagtaatggtgctctgtgtcatttccccttcctttacaataatcataactacaccgactgcacatccgaggggaggcgggataacatgaaatggtgcggaaccacacaaaactacgatgcagaccaaaagtttggcttttgtccaatggctgcacatgaagaaatctgtacaacaaatgaaggagtgatgtatagaatcggggatcagtgggataagcagcatgacatgggacatatgatgcgatgcacatgcgtgggaaatggccggggggaatggacctgtatcgcctatagccagctcagagaccaatgcattgtcgacgatattacttacaacgtaaatgatacctttcacaagagacatgaggaagggcatatgctgaactgtacatgttttgggcagggtagggggaggtggaaatgtgatccagtagaccagtgccaagactccgaaaccggcacgttctatcagattggggactcctgggaaaagtacgtacatggcgtgcgctatcagtgttactgttacggcagagggataggggagtggcattgccaaccactgcagacctacccgtcatcttctgggccagtggaggtctttataacagaaacaccatcccaaccaaattctcaccctatacagtggaatgcgccccagccttcacacatctcaaaatacatcctgcgatggagaccaaaaaatagcgtaggaagatggaaagaagcgaccatccccggccacctgaattcttacactatcaaaggtctgaaacccggggtggtctatgaaggacaattaatctcaattcagcagtatggacaccaggaagttacaagatttgattttactacgacaagcacttccacaccagtcacaagcaatacagtcaccggcgagacgacccctttcagccccttagtcgccacaagtgaatccgtcacagagataaccgcttcctcatttgtcgtttcgtgggtcagcgcatcggatacggtctctggctttagagtggaatacgagctgtccgaggagggagacgaaccacaatatctggatctccctagtactgccacctccgttaacatccctgacctgttacccggccgtaagtacatcgttaatgtgtatcagatttccgaggatggagagcagtctttgatccttagcacctcacagactacagcaccagacgcaccacccgatacaacagttgaccaggtagacgacacaagcatcgttgtccggtggagtagacctcaagccccaatcaccggatatagaattgtgtactcaccaagcgtggaaggctccagcaccgaactgaacctcccagagactgctaatagcgtgaccctctcagacctgcagccaggcgtgcaatacaatattaccatttacgccgtcgaagagaatcaggagtctacaccagtagtaatccaacaggagacaacaggcacaccacgatcagacaccgtgccttcccctagagacttgcaatttgttgaagtaacagacgttaaagtcaccatcatgtggactcctcccgaatcagcggttactggatatagagtggacgtgatacctgtgaacttgcctggcgagcatggccagcggctgccgattagccgcaatactttcgccgaagtgactggactttcccctggcgttacatactatttcaaggtgttcgccgtgtctcatggtagggagtctaagccgcttaccgcccagcagaccactaaactggacgcccctacgaacctccagtttgtgaacgaaacggacagtaccgtcttagtaagatggacacctccccgcgcccagattaccggctatcggctgactgtgggcctaaccagaagaggacagcctcgccagtataacgttggaccctctgttagcaaatatcccctgcgcaatctgcagcctgcttctgaatacactgtctcactggttgctatcaagggaaaccaagaatcccccaaggctacaggcgtttttaccactctccaacctggaagcagcatccccccctataataccgaagtgacagagaccacaattgtgataacatggaccccggccccacgaattgggttcaaactcggcgtccgaccaagccagggtggcgaggctccaagagaggtgacatcagactccggttcaatcgttgtttcagggctcacccctggtgtggaatatgtctatacgatccaagtattgcgggacggccaagagcgcgacgccccgatcgtcaataaagttgtgaccccattgtccccacccacgaatctccatctggaagccaatcccgacacaggtgttcttactgtatcttgggagcggtctacaacccctgacattacaggctacaggattactactaccccgaccaacggtcagcaaggcaactctcttgaggaggtggtccacgctgatcagagttcatgcacattcgataacttatccccaggcctggaatataacgtatccgtctatactgtcaaagacgacaaagagtcggtgccaatatcagacactatcattcccgcagtgccccctcctacagacctgagatttactaatatcggcccagatacaatgagagtcacatgggcacctcccccatctatcgacctgaccaatttcctagttaggtactccccagtgaagaatgaggaagacgttgctgaactatcaatttccccctctgataacgctgttgtcctgaccaatctgctccctggaaccgaatatgttgtgtctgtttcctcagtgtatgaacaacacgagtccactccactacgcggccgtcagaagacaggcctagacagtcccactggcattgacttctctgacattacagctaatagctttaccgtccattggattgccccacgcgctacaattacaggatacaggattagacaccatcctgagcatttttctggcaggccccgggaagatcgagtgcctcatagcaggaacagcatcaccctaacaaatctgacgcccggcaccgagtatgttgtctcaattgttgccctcaatggtagagaagagtcgcctctcttaatcggacaacagtccacagtatccgacgttcctcgggaccttgaagttgtggccgcaactccgacatctctgctgatatcatgggacgctccggccgttaccgttcgttattatcgcataacttacggcgagacaggagggaactcacctgtgcaagagtttactgtgcctggatccaagtcaaccgctaccatctctgggctcaaacctggagttgattataccatcacagtttacgctgttaccggacgtggcgacagtcccgcttctagtaagcctatttctataaattacagaaccgagatcgacaaaccctcacaaatgcaagtgaccgatgtgcaagataactcaatctccgtcaaatggctgcccagttccagccctgtgacaggctacagagtgactacaacaccaaagaatggacccggcccgaccaagacaaaaacagcgggacctgaccaaaccgaaatgacaatcgaaggtctacagcctaccgttgaatatgtggtgagtgtatatgctcagaacccatcaggcgagtcccaaccactggtgcagacggccgtaacaacaatacctgcacctacagatctaaagttcacccaggtgacccccacgtccctgagcgcccagtggaccccccctaatgtgcagctcactggatatagagtgcgtgttacccccaaggaaaagacaggacctatgaaagagataaatctggcccccgactcctcaagcgttgtagtttccggacttatggtcgccaccaaatacgaggtgtcagtttacgcccttaaagatacacttactagcagaccagcccagggagtcgtaaccacactggaaaatgttagtccgccacgacgagctcgagtgacagacgctaccgaaacaacaatcaccatctcatggagaacgaaaaccgaaactataactggctttcaggtggatgcggtgcctgctaatggacagacacccatccagcgtacaatcaagcctgacgtgcgaagttacaccattactggccttcaacctgggaccgattacaaaatctatctgtacacacttaacgataacgcccgctccagccccgttgttattgatgcatctaccgctatcgacgcccccagcaacctacgctttctagcaacaacacccaatagcctgttagtttcttggcagcccccaagagcccggattaccggttacattattaaatatgagaagcccgggagccctcctcgcgaagttgtgcctcggccacgaccaggagtgaccgaagctaccatcacaggcctcgagcctggcaccgagtacacaatctacgtcattgccctgaaaaacaatcaaaagagtgaacctctcattgggcgcaagaaaacaggccaggaagccttatctcagacaaccatctcctgggccccatttcaagatacatccgagtacatcatttcttgccaccccgtgggaaccgacgaggagcctttgcaatttagagtaccggggacgtccacaagtgcgaccctgaccggactgaccagaggagccacctacaatgtgatagtcgaagcgttaaaagatcagcagcgccacaaagttagagaagaagtcgtaactgtcggaaattctgtgaatgagggtttaaaccagccgacagacgattcgtgcttcgacccatatacagtgtcccattacgccgtgggggacgaatgggagaggatgagtgagagtggttttaagctgctgtgtcagtgtctgggatttggtagcggacactttaggtgtgatagcagcagatggtgtcatgataacggcgtaaattacaagataggcgaaaaatgggataggcaaggagagaacggacaaatgatgagctgtacgtgtctgggaaatggcaagggcgagttcaaatgcgatccacatgaggcgacttgttacgacgacggcaagacatatcacgtgggtgaacaatggcagaaagagtacctaggggccatttgttcttgcacatgttttggaggccaaaggggctggagatgcgataactgtcgccgccccggaggcgaaccttcccccgagggtaccacaggtcagagttataatcagtatagtcagcgctaccatcaaagaaccaataccaacgtcaactgccctatagaatgttttatgcctctcgatgtacaggctgacagggaagactcacgggagtag

SEQ ID NO: 31900 - RNA, 7161 nt, synthetic construct
  misc_feature 1..7161: note = Description of Artificial Sequence: Synthetic coding sequence
  source 1..7161: mol_type = other RNA
atgctgagagggcccggaccaggcctcctccttctcgccgtccagtgtctgggcaccgccgtgccctcaacgggagcctctaagtccaaacgccaggctcagcaaatggtgcagcctcagagccctgttgcagtttcccaaagcaaaccaggttgttacgacaacggaaagcactaccaaatcaaccagcagtgggaacggacttacctgggcaacgcactcgtatgtacatgctatggtggatctagaggatttaactgcgaatcgaagccagaagctgaagagacatgctttgataagtatactgggaatacttacagagttggagatacgtatgaacgccctaaggactctatgatctgggattgcacctgcattggagctggaagaggccgcatcagctgtaccatagctaaccgctgtcatgagggcggccagtcgtataagatcggagatacgtggagacgcccacacgaaactggtggatatatgctggagtgtgtctgtctggggaacggaaaaggggagtggacatgtaagccaatagccgagaaatgcttcgaccacgccgcaggtacttcgtatgttgtaggcgaaacttgggagaagccataccagggatggatgatggttgactgtacgtgcttaggtgagggcagtggccgaataacctgtacaagccgaaacaggtgcaacgaccaggacactcgtactagttataggattggtgatacatggagcaaaaaagataaccggggcaacctcctgcaatgtatctgtacaggcaacggacgtggcgagtggaaatgtgagagacatactagcgtgcagaccaccagtagcggttccggcccatttactgacgtaagagcagccgtgtatcagccccagccccacccccagcccccgccgtatggtcactgcgttaccgattccggtgtagtgtattcagttgggatgcaatggctaaaaacacaagggaataagcagatgttatgtacatgcctgggcaatggagtgtcttgtcaagaaaccgccgtgacccagacttacggcggtaactcaaatggtgaaccttgcgtgctgccattcacttataatgggaggacgttttacagctgcactaccgagggacgtcaggatggacatttatggtgctctacaacaagtaattacgaacaggatcagaagtatagcttttgtacagaccacaccgtactggttcagacaaggggggggaatagcaacggggcactctgccactttcccttcctctataataaccataattatactgattgcacaagcgagggcaggcgagacaatatgaaatggtgcggcaccacacagaactacgatgctgatcagaaatttggtttttgcccaatggctgcacacgaggaaatctgtaccactaatgagggagttatgtatagaatcggggaccagtgggacaagcaacatgatatgggccacatgatgaggtgtacttgcgtcgggaatggacgcggtgaatggacctgcatcgcctactcccagttgcgtgatcaatgcattgtcgacgacattacttacaacgtcaacgataccttccacaaaagacacgaagaagggcatatgcttaattgtacttgctttggtcagggaaggggaaggtggaagtgtgatcccgtggatcagtgtcaagatagcgaaaccggaaccttttatcaaatcggagattcttgggaaaaatacgtgcacggagtaaggtaccagtgctactgctatggcaggggaatcggcgaatggcattgccaacccttacagacatacccctcttcatcaggccccgtcgaagtcttcatcaccgaaacgcccagtcagcctaattctcacccaatccagtggaatgccccccagccatcacatatctcaaagtatatcctgcgctggaggcctaaaaacagcgttggccgctggaaggaagccaccataccaggacacctcaattcgtatacaattaaaggcttgaaacctggtgtcgtctacgaggggcagctcatctcaattcagcaatatggccatcaggaagtaactcggttcgatttcaccacgacctcaacatcaacacctgtaacgtcaaataccgtgactggcgaaacaaccccattcagccccctagtggccactagcgagtccgtgactgaaattaccgcaagcagctttgtagtgagctgggtgtccgcgtcagataccgttagcggatttagagtcgagtacgaactctcagaagaaggtgacgaaccccagtatctggacctcccctctactgctacatccgtgaacattcccgacctcctgcctggaagaaaatacatagtcaacgtgtatcagataagtgaggacggtgagcagagcttgattttatctacaagtcaaaccaccgcccctgacgcaccccccgacacaactgtggatcaagtcgacgatactagcattgttgtgagatggagcaggccacaggctcctattactggctacagaatcgtatactcgcctagcgttgagggatcctccacagaacttaatctaccggaaactgccaatagtgtaacattatccgatctgcagcctggcgtgcagtacaatatcaccatctatgccgtagaggagaatcaggaaagcacaccagtggtgattcagcaggaaacaaccggcactccccgttccgataccgtccccagccccagagatctacaatttgttgaggttaccgacgttaaagtgaccattatgtggacaccaccagagtcagccgtcactggctaccgcgtggacgtgatccctgtaaacctcccaggcgaacacggacagaggcttcccatctctcgaaacacatttgctgaggtgaccggccttagccccggggtcacctactatttcaaagtattcgccgtaagccacgggagagagagcaaacccctgactgcccaacaaaccaccaaattggatgcacctacaaatcttcaattcgtgaacgagaccgactcaaccgttttagtacgctggactcctccccgcgcacagattaccgggtacagactgacagttgggctcactaggaggggccagcctagacaatataatgtggggccaagtgtgtccaaatatcccttaagaaacctgcaaccggcttcagagtacaccgtgtcattagttgctataaagggcaaccaggaatcacctaaggcaaccggagtattcactaccctgcagccaggctcttccattcctccctacaatacagaagtgaccgaaaccacaatagtgattacatggaccccagctccaagaataggtttcaagttgggagtcaggcccagccagggaggcgaagcaccccgagaagtgacatctgattctggctcaatcgtcgtttcaggtctgactcccggcgtggagtacgtctacaccattcaggtattacgcgacggacaggaacgcgacgctccaattgtaaacaaggtagttacgccactatcaccgcctactaacctgcatctcgaagccaatcctgataccggcgtgctgactgtgtcctgggaaagaagtacaacgcccgacattacaggatatcgaatcaccaccactcccacgaacggacagcaaggaaatagtttagaagaagtggtgcacgccgatcaatcctcatgcactttcgataacctgagtcctggactggagtacaatgtctctgtctacactgtcaaggacgataaagaatcagttccaatttcagacaccataatccccgctgtgccaccccccactgacttgcgatttactaacattggccccgatacaatgagggtcacatgggctccaccccccagcattgatctgaccaatttcctcgttagatactcacccgtaaagaacgaggaagacgtcgccgagctgtcaatttccccatccgataacgctgtcgttctgaccaatctattacccggaaccgaatatgtggtcagcgtgtcttccgtctacgagcagcatgagtctacacctctgagaggcaggcagaagaccggcttagactccccgaccggcatcgattttagcgacataacggctaattcattcactgtacactggattgcaccaagagcaaccatcaccggctaccgcataaggcaccaccccgaacactttagtggacgtccaagggaagacagggtgccccactctcgcaatagcatcacactgactaatctgacaccggggactgaatacgtcgtgtctatagtggcgctaaatggtcgagaagagagtccattactcataggacagcaatcaacagtcagcgacgttccccgagatctcgaagtggtagccgctactcccacctccctgttgatctcctgggacgctccggctgttacagtgcgctactacaggattacctatggggaaacaggagggaacagcccagttcaagagttcaccgtaccaggaagcaagtcaactgccaccataagtgggctgaaaccgggagtcgactatacaatcacagtctatgccgttaccggccgaggcgattctccagcttcctccaagccgatcagtattaactataggacagaaattgacaaaccatctcagatgcaggttacagatgtgcaggacaattcaataagcgtgaaatggcttccttcatcctctcctgtgacaggctacagagttacaactactcctaaaaacggaccaggccctactaaaactaagaccgccggaccagatcagaccgagatgaccatcgagggacttcaaccaacagtcgagtacgttgtgtcagtgtatgcccagaacccaagtggggaaagtcaaccacttgtccagacagccgtgactaatattgatcgccccaaaggtctcgcttttactgatgtggatgtggattcaatcaaaattgcatgggaatccccccaagggcaggtgtctagatatcgggtcacatactcgtcccccgaagacggcattcatgaactttttccagctccagacggtgaggaggacaccgccgaacttcagggcctccgcccagggtcagagtatactgtgagcgtcgtcgccctccacgatgatatggaatctcaaccacttataggaacccagagcaccgccattccagcccccaccgacctcaagttcacacaagtaacccctactagtctgtctgcccaatggactcctcctaatgtccagctgacaggatatcgtgtgcgagttacgcccaaagagaagactggacctatgaaggaaatcaatctggcccctgattcttctagtgtggtagtcagcggactgatggtggctactaagtacgaagtgagcgtctatgccctgaaggacacactaacatcaaggccggctcagggcgtagtcactacactagaaaacgtatcccctcctcgccgagcaagagtgacagatgcaacagaaacaactatcacaatctcctggcggacaaagactgaaaccatcaccggattccaggtcgatgccgtgcccgcgaacggccagacgcctattcaacggactattaagccagacgtgcgcagctataccataaccggcctgcagcctggaacagattacaagatttacctctacacactcaacgataatgcaagatcttctcctgtggtcatcgatgcgagcacagcaattgatgccccatcaaatctgcgcttcctggcgacgacaccaaattccctgctagtcagttggcaacctccacgagcccgcatcacaggatatatcattaagtacgagaagcccggttctcctcccagagaggtggtacctagacctcggcctggcgtcacagaagcaaccattacaggcctcgagccggggacagaatacaccatctacgtgatcgcccttaagaataaccagaagagtgaaccccttatcggccgtaagaagactgatgaactcccgcagttggtcaccctcccccatcccaatctgcatggaccagagattctagatgtgccctcgactgttcaaaaaactccctttgttacccatccgggatatgacactggaaatggcatccagctgccaggcacctccggccagcagcccagcgtgggacaacagatgatctttgaagaacatggcttccgtcggacaacgcctcctaccaccgcaacccctattcgccatagaccaagaccctacccccctaacgtgggcgaggagatccaaatcggccatatcccaagagaggacgtggattaccacctgtatccccatggacccggcctcaatcctaacgccagcacagggcaagaagcactttcacagacaacgatctcttgggctccttttcaggacacaagcgaatacattataagctgccatcccgtgggtacagatgaagaacccctccagtttcgtgtacctggtacctcaacaagcgctactctgactggtctgactaggggggccacttacaacgtgattgtggaagccttgaaagatcagcagcgacacaaggtgagagaggaagttgttacagtcgggaatagcgtgaatgaaggtttgaaccagcctactgacgactcctgtttcgatccttacacggtgtcacattatgctgtcggagatgagtgggaaaggatgagcgagtcgggatttaagctactatgccagtgcctcggttttgggtcaggacatttccgctgcgattcaagtcgttggtgccacgacaatggggtaaattataagatcggcgaaaaatgggacaggcagggcgagaatggacagatgatgagctgtacttgcttaggaaacggtaaaggcgagttcaagtgtgatccacatgaagcaacgtgctacgatgacggtaaaacctatcatgtgggggagcaatggcaaaaagaatacctaggagctatctgcagttgtacttgctttggcgggcaacgtggatggagatgcgacaattgcagaagaccaggcggcgagccctccccagaaggcaccacaggtcagtcctacaatcagtactcgcagcgttaccatcagagaacaaatactaacgttaactgcccaattgagtgcttcatgccactcgatgtgcaggccgacagagaggacagtcgggaatag

SEQ ID NO: 31901 - RNA, 6723 nt, synthetic construct
  misc_feature 1..6723: note = Description of Artificial Sequence: Synthetic coding sequence
  source 1..6723: mol_type = other RNA
atgctgcgggggcctggtcccggcctccttctcctagcagttcaatgcctcggtacagcggtacctagtacaggcgcgtcaaaatcaaagagacaagcccaacagatggtccagcctcagtctcctgtcgccgtctcccaatcaaagccagggtgttacgacaatgggaagcattaccaaatcaaccagcagtgggagagaacctatctaggaaatgctcttgtgtgcacatgttacggaggatcacggggctttaattgtgagagcaaacctgaagccgaagaaacttgcttcgacaagtacaccggcaatacctatagagttggagatacatatgaaaggccaaaagattccatgatctgggattgtacatgtatcggagccggtcgcggaagaatttcctgcaccattgctaatagatgtcacgagggcgggcagtcgtataagattggcgatacatggcggagacctcacgagacaggcggatatatgctggaatgcgtttgtttgggcaacggaaaaggagaatggacctgtaagcctattgctgaaaaatgttttgaccatgctgccggaacttcatacgtagtcggggaaacctgggagaagccttaccaagggtggatgatggtcgactgtacttgtctcggagaaggtagtggtaggattacttgtacatctaggaaccggtgcaatgaccaggacactaggacttcctatcgcataggggacacgtggagtaagaaggataacagagggaatctgttacaatgcatctgcactggaaacggtcgaggagagtggaagtgtgaaagacacaccagcgtgcagaccacttcaagcgggtcgggcccctttactgatgttagagctgccgtgtaccagccacagccacacccgcagccgccaccctacgggcactgtgttacagattccggcgtcgtatattcagttggcatgcagtggttaaaaacgcagggtaataaacaaatgctctgcacttgtctcggtaacggagtttcttgccaggaaaccgccgtcactcaaacatatggaggtaactcgaacggggagccttgtgtgctgcccttcacttacaatggtcgaacgttctacagctgcaccacggaaggcaggcaagatggccacctatggtgctcaacaacatccaattacgagcaggatcaaaagtactctttctgtaccgatcataccgtcctagtacagacaagaggcggaaactcaaacggcgccctgtgccattttcctttcctttacaacaaccataactacacagactgcacaagcgaggggaggcgcgacaatatgaagtggtgcggcacaacacagaactacgacgccgatcagaagtttggattttgtccaatggcagctcacgaggaaatctgtacgaccaacgaaggagtgatgtatcgaatcggtgaccaatgggacaaacagcatgacatggggcacatgatgagatgtacctgcgtggggaacggtagaggcgaatggacttgcattgcatactcacagctccgggaccaatgcatcgtggacgacataacatacaatgtgaatgacaccttccacaaaaggcacgaggaagggcacatgctaaactgcacctgtttcggacaaggacgtggtagatggaaatgtgacccagtggaccagtgccaagacagcgagactggaaccttttatcagatcggcgactcatgggagaagtacgtccatggcgtgcgatatcagtgctattgttatggccgtgggattggtgaatggcattgccagccactgcagacatatccgtctagttcagggccagtagaagttttcatcacagagactccaagccaaccaaattcccatccgatccaatggaatgctcctcagccttctcacatttctaaatatattttacgatggaggccaaagaatagcgtgggcagatggaaggaagctacaatcccaggacatcttaacagctacactattaagggcctgaagccaggcgtcgtatatgaagggcagctgatcagcatacaacagtacggacaccaagaagtgactaggtttgacttcacaacgacctccacttctactccagtcacctcgaacaccgtgaccggtgagaccaccccatttagtcccctcgtggcaacctccgagtctgtgaccgagattaccgcatcctctttcgtggtaagttgggtgagcgcctccgacacagtgtccggttttagggttgagtatgagcttagtgaagaaggcgatgagccacagtacctggaccttccctctactgctacctctgtaaatatccctgatctgcttcccggacgaaagtatattgtgaatgtctatcaaataagcgaagatggcgaacagtcgctgatcctgagcacctcccaaacaaccgcccccgatgcacctcctgacacgactgttgaccaggtggacgacacttctatcgtcgtgcgctggagccgcccccaagcccccatcacaggataccgcattgtttattctcccagcgtcgaaggttccagcacggaacttaaccttcccgagaccgccaactccgtcacgctgagcgatctgcagccaggagtccaatataatatcactatctatgcagttgaggaaaaccaggaatcgaccccagtagttattcagcaagaaacaacaggaactcccagatccgacaccgtacccagccctagggatttacaatttgtcgaggtcacagacgtaaaagttacaataatgtggacgccacctgagagcgcagtgaccggttacagggtcgacgtaattcccgttaatctgcccggtgaacacggccagcgcctgcccatctcccgtaacacattcgctgaagtgaccggtttaagccccggcgtgacttactattttaaagtgttcgccgtgtcacacggaagggaatcaaagcccttaactgcacaacagactaccaagttagacgcacctaccaatctacagtttgttaatgaaactgacagcacagtcttggttcgatggactccacccagagcccagattacgggttacagattgacagtaggtctgacaagacgcgggcagccacgacagtacaatgtcggtcctagcgttagtaagtacccattgcgcaacttacaaccagcctccgagtataccgtttccttagtagctatcaaagggaaccaggaaagccccaaagccactggcgtgttcacgacacttcagccgggcagcagcatacctccctacaacacagaagtcaccgagaccactattgttatcacatggacccccgcgccacgcatcggattcaagctcggcgtacggcccagtcaaggaggagaggcaccacgagaagtgacatcagactccggctccattgtcgtgtccggtcttacacctggggtggagtacgtgtataccatccaggtcctgcgtgacggacaagagagagatgcgccgatagtcaataaagttgtaaccccactgtctccaccaaccaatttacatctggaggctaacccggacaccggagtgctcacagtgtcatgggaacgcagcacaacgcccgacatcaccggatacagaattacgacaacccccaccaacggacaacagggcaacagcctagaagaggttgtgcacgcggaccagtctagctgtacatttgataacctgtcacccggactcgaatataatgttagcgtctatactgtcaaagacgataaagagtctgtccccattagtgatacaatcattccagccgtccctcctccaactgacttgcgctttaccaatatcggaccagacaccatgcgtgttacgtgggctcctccaccatctattgacttaactaattttctggtgaggtactcacccgtgaaaaacgaggaagatgtagcagaattatccatcagcccctcagacaatgccgtggtgttaaccaacttgctcccaggcaccgaatacgtagtgagtgtgagctcagtgtacgagcagcatgaatccactccacttcgaggcaggcagaaaactggtctggattctcctaccggtattgatttttctgatataaccgctaactcatttactgtacactggatagcccctcgcgccacaattacaggctaccggatcagacaccacccagaacacttttccggcaggcctcgcgaggacagagtgccacactcccggaactctatcacccttaccaaccttacccccggcaccgagtacgtggtcagcatcgttgccctcaacgggagagaggaatctcctctcctgatcggacaacagtctactgtctcagacgttcctcgggatttggaagtggtagccgcaacaccgacctccctgcttatctcttgggatgctcctgccgtcacagtccgctattatcgaattacttacggggaaactggaggcaattcgcccgtgcaagaatttaccgtacctggctccaaatctacagccactataagcggtctcaaacctggagtcgactacacgatcacggtctacgccgtgacagggagaggcgatagtccagcttcatccaagcccatttctataaattatcgcacagagatcgacaagccttcacagatgcaagtgacagatgtccaggacaactctatcagtgtcaaatggctgccatctagctccccagttacagggtatcgcgttacaacaacccctaagaacggcccaggccccactaagactaagacagcaggccccgatcagacagaaatgacaattgagggcctccagcccactgttgaatatgtagtaagtgtctatgctcaaaatccaagcggggagtcacaacctttagtccaaactgcagttactaccatccctgccccaactgatctgaaattcacacaagttacacctaccagtttgagtgcccagtggaccccacctaacgtgcagctgactggatacagagttcgagtgacacctaaggagaaaaccgggcccatgaaagagatcaatctggctcctgactcatcttctgtcgttgtctccggattgatggttgccaccaagtacgaagtttccgtgtatgctttgaaggatacattgacttcccggcctgcccaaggagtcgtgactaccctagaaaacgtgtcccccccgagacgagcccgcgtgacggacgctaccgaaacaaccatcacaattagttggcgcaccaagaccgagaccattaccggattccaggtggacgcggtcccagccaacggacagacacccattcagcgcacaatcaaaccagacgtaagaagctatacaatcactggactacaacctggaaccgattataaaatctatctctatacattaaacgataacgctaggtcctcacccgttgtgatagacgctagtaccgcgattgatgccccaagcaatttaaggtttttagccactactccaaatagtctgctcgtcagctggcaaccccctcgcgcccgcatcactggatatattataaaatacgaaaagccaggatctccgcccagggaggtcgtgccccgtccccgacctggcgtcactgaggcaaccataaccggccttgaacccgggacagaatacactatctacgtgatcgctctcaaaaataaccaaaaaagcgagccccttattgggagaaagaaaacagtgcaaaagactccatttgtgacacacccgggatacgacactggtaacgggatacagctccccggtacaagtggacagcaacctagtgtggggcaacaaatgatcttcgaggaacatgggttcagacgcaccacccctccaacaacagcaacacccatcagacataggccgagaccatatcctcccaacgtcggccaggaggccctgtcacaaactactatcagctgggctcctttccaggatacttcagaatacatcatctcctgtcatcctgtcggcacggatgaagaacctctgcagtttcgagttccgggaacgtccacaagtgccacactaaccggtctgacacgcggagctacctataatgtgattgtggaagctctgaaggaccagcagagacacaaggtgagagaggaagtggtgacagtcggaaatagcgttaatgaggggttaaaccagcctacagatgacagttgcttcgacccatacaccgtgagtcactacgccgtgggtgatgagtgggagcggatgagcgaatctggattcaaactgctctgccagtgcttaggtttcgggtcaggacattttaggtgcgattcgagcagatggtgtcatgataatggggtgaactacaaaatcggggaaaaatgggacagacagggagagaacgggcagatgatgtcctgcacctgcttagggaatgggaaaggcgagtttaaatgcgacccgcacgaggcgacatgttacgatgacggcaagacctaccacgtgggagaacagtggcaaaaggaatacctcggcgctatatgcagctgtacatgctttgggggccagcgagggtggcgctgcgacaattgcagaaggcccggaggtgaaccaagcccagaaggaacaactggacaaagttataaccagtacagccagcgttatcatcaaagaaccaacacaaacgtgaattgtcctatcgaatgtttcatgccgctcgacgtccaggccgaccgcgaagacagtagggagtag

SEQ ID NO: 31902 - RNA, 1974 nt, synthetic construct
  misc_feature 1..1974: note = Description of Artificial Sequence: Synthetic coding sequence
  source 1..1974: mol_type = other RNA
atgctgaggggaccgggccctggcctcctgttattagccgtacaatgtctgggcacagccgttcctagcacgggagcatcaaagtctaagcgccaggcacaacaaatggtccagccccagtctcccgtcgccgtctcccagtccaaaccaggatgctatgacaatggaaaacactatcagatcaaccagcagtgggaacggacatacctgggcaatgccctcgtctgcacctgttatggaggttctaggggcttcaattgtgaatctaagcctgaggcggaggaaacctgcttcgataaatatactgggaatacataccgcgtgggggacacatacgaacgaccaaaggacagcatgatctgggattgtacttgcatcggagccggtcgcggcagaatatcatgtactattgccaatcggtgccatgaaggaggccaatcttataaaattggcgatacatggagaagacctcacgagactggggggtacatgcttgagtgcgtgtgcctgggaaatggaaagggcgaatggacttgtaaaccgatcgcggaaaaatgctttgatcacgccgcagggacatcttatgtggttggagagacctgggaaaagccataccagggatggatgatggttgactgcacatgtctaggagaagggagtgggcgcattacatgtactagcaggaatcgttgtaatgaccaagatacaagaacatcatatcgaattggcgatacatggtctaaaaaagataaccggggaaatctccttcagtgcatttgtacaggaaatggcaggggagaatggaaatgtgaaagacatacaagcgtacagacaacttctagtggatcaggcccattcacggacgtcagagccgcagtgtatcagccccagccacatccccaaccccctccctacgggcattgtgtgacggacagcggggtggtctacagcgtggggatgcagtggctcaagacacaaggaaataagcagatgttatgcacttgtctcggcaatggagtatcatgccaggaaactgcggtgacacagacttatggcggtaattccaacggtgaaccatgcgtattgccatttacatacaacggacgtactttttactcgtgtacaactgaaggccgccaggacgggcacctgtggtgtagcactacaagcaattacgaacaagatcagaagtactccttttgtactgatcacaccgttctggtccaaacaagaggaggtaactcaaacggagcattgtgccactttccattcttgtataacaatcacaactataccgactgtacttctgagggcaggagggacaatatgaagtggtgtggaactactcagaactacgatgcagatcagaaattcggtttctgtcctatggctgcccatgaggaaatttgcacaactaatgaaggcgtcatgtacagaattggagatcaatgggacaaacagcacgatatgggtcatatgatgcgctgtacgtgtgttggaaacggacgtggcgagtggacctgtattgcatattctcagctcagggatcagtgtatagtcgatgatatcacatacaatgtgaacgatacctttcacaagagacacgaggagggacatatgctcaactgtacctgctttggccagggcaggggccggtggaagtgcgaccccgtggatcagtgccaggactcagagactggaacgttttaccagatcggcgacagctgggagaaatacgtgcatggcgtaagatatcaatgttattgttatggtaggggaattggtgagtggcactgccaacccctgcaaacatacccatcctcatccggaccagtggaagtgtttattaccgagacccccagccagccaaatagtcaccctatccagtggaacgcccctcaacctagccatatttccaagtacattctcagatggcgccccgtgtctattcccccacggaacctaggctactag

SEQ ID NO: 31903 - RNA, 6804 nt, synthetic construct
  misc_feature 1..6804: note = Description of Artificial Sequence: Synthetic coding sequence
  source 1..6804: mol_type = other RNA
atgttaagaggccccggccctggcctactccttctggcggttcaatgtttggggactgccgtgcccagtacaggcgcatcaaaatcgaagcgacaagcccagcagatggtgcagccacagtcccccgttgccgtctctcaaagcaaacccggttgctatgacaacggaaagcattatcagattaaccaacagtgggaacgcacgtacctcggtaatgctctggtgtgcacctgttacggagggtccagaggtttcaactgtgaaagcaaacctgaggctgaagagacttgcttcgataagtataccggaaatacgtatagagtgggtgatacatatgagagacctaaagacagcatgatttgggattgtacctgcattggtgccgggcggggtcggatatcatgtaccattgcaaacagatgccacgaaggtggacagagttataaaataggcgacacctggaggcggccacacgaaactggggggtatatgctggaatgcgtttgcctgggaaacggaaaaggggaatggacttgcaagccgatagccgagaaatgttttgaccatgctgccggaacttcctatgttgtcggcgagacttgggagaaaccatatcaaggctggatgatggtggactgtacttgcctcggcgagggctccggtcgaattacctgtacatcccgcaaccgatgtaatgatcaagacacgcgcacttcatacagaattggtgacacctggtccaagaaagacaaccggggaaatttactgcagtgcatctgcacaggaaacggacgaggcgaatggaaatgcgaaaggcacacctccgttcagactacaagttcagggagcggcccttttacagacgtacgcgctgctgtctaccagccacagccccatccccaaccacctccttacggacattgcgtgaccgacagtggcgtggtatactccgtcggtatgcagtggctgaagactcaaggaaataaacaaatgttatgcacgtgccttggaaatggcgtatcctgccaggaaactgcagtgacccagacctatggagggaactcaaacggtgagccttgcgttctaccattcacctacaatggacggacattctactcttgtaccacagagggacgacaggacggccacttatggtgtagcaccactagcaactacgaacaggaccaaaagtacagtttctgcacagatcacaccgtactcgttcagacccggggaggtaatagcaacggcgccctgtgtcacttccctttcttgtataacaatcataactacactgactgcaccagtgagggccgccgcgataatatgaaatggtgcggtacaactcagaattatgacgccgatcagaaattcggattctgcccaatggcagcacacgaggagatttgtaccacaaacgaaggggtaatgtatcgcattggagatcagtgggacaagcaacacgatatgggccacatgatgaggtgtacttgcgtcgggaatgggcgcggtgaatggacgtgtatagcgtactcgcagcttcgggatcaatgcattgttgacgatatcacctataacgtaaatgatacttttcacaagagacatgaggaggggcacatgttgaactgcacttgcttcggtcagggccgcggcagatggaagtgtgatcctgtggatcagtgtcaggactcagagaccggaacattctatcaaattggggattcatgggagaagtatgtgcacggcgtgagatatcagtgctattgttacgggagaggaatcggtgaatggcactgtcagcctctgcagacttatccatctagctccggtcccgttgaagttttcatcactgagacgccatcccaacccaactctcaccctattcagtggaacgcaccccaaccctcccatatctccaaatacatcttaagatggaggcctaaaaactcagtcgggcgctggaaagaagccaccataccaggacatttgaacagctatacaatcaagggcctcaaacccggcgtcgtctatgaaggccaacttatttccattcagcagtacggtcaccaggaagtgacgcgcttcgacttcacaactacttctacaagtacacccgttacgtccaacactgtcactggcgaaacgacacccttcagtcctctggtagcaacctctgaaagtgtcacagagattaccgcctcatcattcgtagtgtcatgggtaagcgcatcagacaccgtttcaggctttcgggttgagtatgagctgtccgaggaaggtgatgaaccccagtacctggacctcccaagcacagccactagtgttaatataccggacttacttcctgggcgcaaatacatagtaaacgtctatcagatcagcgaggatggggaacagtcccttattctatccacctcacagacaacggccccagacgccccccctgacactactgtggaccaggtcgacgacacctccatcgtcgtccgttggtcccgcccacaggctccaattacaggctatcgcattgtctatagcccaagcgtggaggggagctcaactgaattaaatttacccgaaactgccaacagcgttacactgtccgacctccaacccggcgtacaatataacattactatttatgccgtcgaggaaaaccaagaatccacccctgtggtcatccagcaagaaactactggcacccctaggtcagacaccgtaccatcgcccagggacttgcagtttgttgaggtgactgatgtaaaagttacaattatgtggactcctcccgaatcagcagtgaccgggtatcgtgtcgatgtcattccagtgaatctgcctggcgaacatggtcaacgcctacccatcagtagaaacaccttcgcagaggttactggcctgtcccccggcgtgacgtactattttaaggtctttgctgtgtcacacggccgcgaatcaaagcccctcacagcccagcaaacaacaaaactggacgccccaacaaatctgcaatttgtcaacgagactgactcaaccgtcctcgttaggtggaccccacctcgcgctcaaattactggatatcgcctgaccgtaggactgacccgaaggggtcagcccagacagtataacgtcggtccgtccgtgtcaaaatatcctctgagaaatctccaacctgccagcgagtacaccgtttccctcgtcgctattaaaggcaatcaggaaagccctaaagccaccggcgtctttaccactctgcagccaggaagctctatccccccgtataacaccgaagtgaccgaaacaacgatcgtgatcacctggacaccagcccccagaatcggtttcaaacttggcgtaagaccttcccagggcggcgaagcccctcgcgaagttaccagtgactcgggtagtatcgtagtatccggtcttacacccggagtcgagtacgtttacacaatccaggtactcagagacggtcaggaacgggatgctccaatcgtgaacaaagtggtgactcctctgagccctccaactaacctgcacctcgaggcgaacccagatacaggcgtgctcaccgtctcgtgggagagaagtacgactcccgatatcacaggctatcggatcacgaccactccgactaacggccagcaaggcaatagcttagaggaagttgttcacgccgaccagtcttcttgcacttttgataatctatcccccggcctcgaatacaatgtctccgtctatacagtgaaggacgacaaagagtctgtccctatttccgacactataattcccgaggtcccccagttgaccgatctgtcttttgttgacattactgactcctcgattggcctccgttggacacccctgaactcatccacaatcattggttaccggataacagttgttgccgcaggtgaaggcattcccatatttgaagatttcgtcgactcttccgttggatattatactgtcactggactggagccagggatagactatgacatcagtgtgatcacccttataaacggcggggaatcagcacccacaactctgacgcaacagactgcagtcccccctcccaccgacctcagattcaccaatatcgggcccgatactatgcgtgttacgtgggctccaccaccaagtatcgaccttacaaatttcctcgtccggtattcaccagtcaaaaacgaagaagacgtggccgaattgagcatttcaccgtccgacaacgcagtcgtactcactaacctcctccccggaaccgaatatgtggtatctgtgtcctcagtttacgaacagcacgaaagcacaccactacgcggccgacaaaaaacgggcctggactctcccactgggattgacttttctgacatcaccgccaacagctttaccgttcattggatcgctccaagagctacaatcacaggatataggataaggcatcatccagagcacttctccggcaggccacgcgaggatagggtcccgcattctcgaaacagtatcactctgactaatctgactccaggcacagagtatgtagtgagcatcgtagctctgaatggaagagaagagtccccattactgatcgggcagcagtcaacagtctcagatgttccccgcgacttggaggtagtcgccgccactcccaccagtctactcatttcatgggatgcacccgccgtgaccgtgcggtactacagaatcacctacggagagaccggaggaaatagcccagtccaagaattcacagtgcctggttccaaaagcaccgcaactatcagcggtctgaaacccggagtcgactacaccataactgtctatgctgtgactggacgtggagatagccctgcctctagtaaacccattagcattaactaccgaactgaaattgataaacccagtcagatgcaagtaactgacgtccaagacaactcaatcagcgtgaaatggttgccaagtagctctccagtgacaggctaccgcgttacaactacacccaagaacggacctggacctaccaaaacgaagacagccggaccagatcagacagaaatgacaatagaaggtctgcagcccacagttgagtatgtcgtctccgtctatgcacagaacccctcaggagagtcccagcccctggttcagacagcagtaacaacgatacctgcacctacggatttgaaatttactcaggttacgcccacatctttaagcgctcaatggacacctcccaatgtgcaactcaccggatatcgtgtgcgggtgacaccaaaggagaagacagggcccatgaaggagatcaatctcgcaccagactcctcttctgttgttgtttccggtttgatggtcgccactaagtacgaagtgagtgtgtatgctctcaaggatacgctgacctcaaggccagcccaaggggtcgtgactacacttgaaaatgtcagcccgcctagaagggccagagtaactgacgccaccgaaacgaccatcacgatttcctggagaactaaaacagaaactatcactggctttcaagttgatgcagtgccagcaaatgggcagacacctatacaacgcacaatcaaacccgatgtgagatcttacacaattactggccttcagcctgggacagattacaagatttacctttacaccctgaacgataatgcaaggtccagtccagtcgtgattgatgcgtcaacagccattgacgctccatctaatctgcgatttctggcaacaactccgaactccctgttagtcagctggcagcccccacgcgctcgaatcactggatatattattaagtatgaaaaacctgggagcccccctagagaagtggtcccacgacctcgcccgggcgttacggaagccactatcactggcttagaacccggtaccgaatacaccatctacgtcattgctttaaagaacaatcagaaatcggaacctttaatcgggaggaagaagaccggacaagaggcactgagtcaaaccaccatcagctgggccccttttcaggacacgtccgagtacatcatttcatgccatcctgtgggcaccgatgaggagccgctgcaattccgagtgccaggaactagtacgtctgctaccctgaccggcctgacccgaggtgcgacttacaatgtgatcgtagaagcgctgaaggaccagcagcgccacaaagttagagaggaggtggttactgtggggaactctgtgaacgaaggtttgaatcagccgactgacgattcgtgttttgatccttataccgtatcccactatgccgtaggagatgagtgggagaggatgtcagagtctggtttcaaactcctatgccagtgcttgggattcggcagcggacactttcgatgtgactcttcaaggtggtgtcacgataatggagtgaactataagatcggtgagaaatgggataggcaaggggaaaatggacagatgatgagttgcacttgcctgggtaatggtaagggtgagttcaaatgcgatcctcacgaggctacatgttatgacgatgggaagacctatcacgtgggggaacaatggcagaaagagtacctgggagcgatctgtagctgtacttgtttcgggggacaacgtggatggcgttgcgacaactgtagacgcccggggggggaacctagccctgagggaactaccggacagtcctacaatcaatacagccagagatatcatcagaggacaaatacaaacgttaattgccccatagaatgtttcatgccattggacgttcaggcagacagggaagattccagagagtag

SEQ ID NO: 31904 - RNA, 6798 nt, synthetic construct
  misc_feature 1..6798: note = Description of Artificial Sequence: Synthetic coding sequence
  source 1..6798: mol_type = other RNA
atgcttcgtggacctggccccggcctgcttttactggccgttcagtgtctcggtacagcagtgccctctaccggcgcctctaaatccaagagacaagctcagcaaatggtgcaaccacagagccccgtagctgtgagtcagtctaagccgggctgctatgacaacggaaaacattaccagattaatcagcagtgggagaggacttacctaggcaacgcattggtttgtacatgctacgggggcagccgaggtttcaactgtgagagtaaaccagaagccgaggaaacctgctttgacaaatatactggaaacacgtaccgggtgggggacacatacgagaggccaaaggacagcatgatttgggattgcacatgcatcggagctggaagaggccgcatctcctgcaccatcgccaatcgttgccacgagggaggtcagtcttacaaaattggggatacatggagaaggccacacgagacgggcggatatatgctggagtgcgtttgcctgggtaacggaaaaggagaatggacctgcaagccaatagctgagaaatgcttcgatcacgccgccggtacttcatatgtggttggagagacctgggagaagccttatcaaggatggatgatggtggactgtacgtgtctaggcgaaggcagcggaagaatcacttgtacaagcagaaatcggtgtaacgatcaggatacacgcaccagctaccggataggggatacttggagcaagaaggataatagagggaatctacttcaatgtatttgtactggtaacgggcggggggagtggaagtgcgagagacatacaagcgtgcagacaacatcctcaggatccgggccctttacagatgtgcgggctgcagtgtaccagccccagccccacccccagccacccccctatggacactgtgtcaccgattcaggcgttgtgtattccgttggcatgcagtggctgaaaactcaaggaaataaacagatgctgtgcacatgtctcggcaatggagtgtcgtgtcaggagaccgctgtgacacaaacatacggaggaaatagcaatggcgagccatgtgtcctgccttttacatacaatgggagaacattctactcatgtactacagaaggtagacaggacgggcacttgtggtgctctacgacgtccaattatgagcaagatcaaaagtattctttctgtactgaccacactgtactggtccagactaggggcggcaactctaatggtgctctgtgccattttccatttttatacaacaaccacaattataccgactgcacgagcgaaggaaggagggataatatgaagtggtgcggcacgactcaaaactacgatgcagaccagaagttcgggttctgtcctatggcagcccacgaggagatttgtacaacaaatgaaggagtcatgtatcgaattggggaccagtgggataaacaacatgacatgggccacatgatgagatgcacttgtgtaggcaatgggcgaggcgaatggacctgtatcgcctactctcagttgcgggatcagtgtattgtcgatgatatcacttacaatgtgaacgacacattccacaagaggcatgaagaaggacatatgttgaattgcacctgttttggacaaggacgcggccgatggaaatgtgatcccgtcgaccaatgccaggacagcgaaacaggtacattttatcagatcggggatagttgggagaaatacgttcatggggtgcggtatcagtgctactgctacggtcggggaatcggcgaatggcattgccaaccactccaaacctatccaagtagcagtgggcctgtggaagtatttattactgagaccccctcacagcccaactcccatccaatccagtggaacgctcctcagccatcacacatctctaagtatattctcagatggcgaccaaaaaattctgtaggccgatggaaagaagccacaatccccggacatttgaattcctataccataaaaggtctaaagcccggcgttgtctacgaaggacaactgatctcaatacagcagtatggacatcaagaggttacaaggtttgactttaccacaacatcgacttccacccctgtgacaagcaataccgtgactggcgaaacaactcccttctcacccttggtagctactagcgagagcgtgactgagataaccgcatcctccttcgtcgtgtcttgggtgagtgcctctgataccgttagtgggtttcgggtagagtatgaacttagtgaggaaggagatgagccccaatatttagatcttcccagcaccgccacgtccgttaacatcccagaccttctccccggacgcaaatatatagtgaacgtgtatcagatttcggaggatggcgaacaaagtctcattctgtcgacaagtcaaacaacagcccccgacgctccccccgacactactgtggatcaggtggatgatacgtctatcgttgttagatggtctagaccacaagcccctattaccgggtaccgtattgtatactctccgtccgtcgaaggatcatctaccgaactcaaccttcctgaaactgcgaactcagtgactctttctgacctgcagccgggcgtgcagtacaatataactatttacgctgtcgaggaaaatcaggaaagtacccccgtcgtgatccagcaagagaccaccggaacgcctaggtccgataccgtgccatctcccagagatcttcaatttgtcgaggtgaccgacgttaaagtgacaattatgtggactccccccgaatcagctgtcactggttacagagtggacgtgatacctgttaacttacccggcgagcacggccagcgcttgccaatatcaaggaatacatttgcagaggtgaccggtttgagtcccggcgtaacctactattttaaggtatttgctgtctcacatggccgcgagagtaagcccttaacagcacaacagactacaaaactcgacgcaccgacaaacttgcaattcgttaatgagacggatagcaccgttttggttcgatggaccccacctagagctcagattacaggatatagactgactgtcgggttaacaaggagaggacagccgcgacagtacaacgttggtccgagcgtcagcaaatacccactgagaaatcttcagccggcgagcgagtatactgtgagtcttgtggcaattaaaggcaatcaggaatcacccaaagcgactggagtctttactactttgcaaccaggatcttccatcccgccctacaataccgaggtgaccgaaacgacaatcgtgattacctggacccctgcaccacggattggatttaaactgggggttcggcctagtcagggcggagaagcaccacgcgaggtgacttctgattcaggcagtattgtagtaagcgggctgactccaggtgttgaatacgtgtataccattcaggtgctccgtgacggacaggagagagacgcccctattgtcaataaagtggttacaccattaagcccccctactaatctccacctagaagccaacccggacaccggcgtgttaacagtctcctgggaacggtccacaactcccgacataaccgggtataggatcaccaccactccaacaaatggccagcagggaaattcattagaggaagttgttcacgctgaccaatcctcctgtacttttgacaatctgagccctggcctggaatacaacgtgtctgtttatactgtgaaagacgataaagagagcgtcccaataagcgatacaatcattccggctgtgcccccccctacagacttacgatttacaaacattggccccgatactatgcgcgtcacttgggcaccaccaccttcaatcgacctgactaattttctcgtcaggtactctccagttaaaaatgaagaagatgtggccgaattgtctatctcaccctctgataacgctgttgttctcacaaatctcctacctgggacagagtacgtggtgtctgtgtcatccgtctatgagcagcacgagtcaacgcctctgagagggcggcaaaagaccggactcgactctcccacaggtatcgatttctctgacatcaccgccaattcctttacagtacattggattgccccccgcgccaccatcaccggttatagaatcagacaccaccctgaacactttagcggacgccccagagaggatagagtgcctcactcacggaacagcattactttgacaaatctgacacccggaaccgagtacgtggtctcaattgtcgccctcaatggaagagaagaaagcccactactgattggacaacaatccacagtctccgatgtacctcgcgaccttgaggtagtcgctgctacacccaccagccttttaatatcatgggacgctcctgctgttaccgtcaggtactaccgtataacctatggcgagacagggggaaatagcccggtgcaagaattcactgtgcccggaagcaagtcaactgccactatctctggactgaaaccaggtgttgattatactataacagtgtacgctgtgacaggccgtggtgactcccccgcaagctcaaagcctatatcaattaattacagaactgagatcgacaagccctcccagatgcaggtcacagacgtacaagataatagcatctcagttaagtggctgccttccagttcccccgtgaccggctatcgagtcacaactacccccaaaaacggccccgggcccaccaaaacaaagacggcaggccctgaccaaacagaaatgaccatcgaaggactgcaacctactgtggagtacgtcgtcagtgtctacgctcagaatccaagtggcgaatcacagccgttggtgcagactgcagtgaccacgattcctgccccaaccgatctcaagttcactcaagtgactccaacctccctctccgcccaatggacccccccaaacgtccaactaaccggttaccgcgtgcgggtgacccccaaagagaaaactggtcctatgaaggagattaaccttgctcccgattcctcttcagtggtcgtgtctggactgatggtcgcaactaagtatgaggtatcagtttacgccctcaaggacactctgacttctaggcctgcacagggagttgtgactacactcgaaaacgtctctccaccccgccgcgccagggttaccgatgcgaccgaaaccaccattactatcagctggagaactaagaccgagacaatcactggattccaggtcgacgcagtgcctgcgaacggccagacaccgattcagcggaccatcaagcccgacgtgcgttcttacacgattaccggattgcagcctggcaccgactataaaatctatctctacacactgaacgataatgcccgaagtagtcccgtggttattgatgcctctacagctattgatgccccaagcaatttgagatttctggccactactccaaactcattgctcgtcagttggcagccacctagggcaagaataacaggatacataatcaaatatgagaagcccggctcgccccctagagaagtcgtccctaggccccggcccggtgtcacagaagccaccataactggcttggaacctggcaccgaatacactatctatgtcattgctcttaaaaacaatcagaagagcgagcctctgatcggtcgcaaaaaaacagatgagctcccccagttggtgactctgccccatcccaacttgcatggacctgagatcctggacgttccgagcactgtacagaagaccccctttgttacacatcctggctatgacaccggaaacggcatccagctccccggcacatctggacaacagccatcagtaggacagcagatgatcttcgaggaacacggattccgccgaacaacgcctcccactactgctacacccatccgccatcgaccaagaccatatccaccgaatgtgggccaggaagcactgtcacagaccactatatcatgggctccattccaggatacctcagaatacataatcagttgccaccctgtcgggacagatgaagaacctcttcagttcagagtccccggaacttcaacgagtgcaaccttgaccggactgactcgtggtgccacatacaacgtaatcgtcgaggctctgaaggaccagcagagacataaggtgcgagaggaagtggtgaccgtcggcaacagtgttaatgagggtctgaaccagccaactgatgattcttgcttcgatccctatacagttagccattacgcagtgggcgacgaatgggagcgtatgtccgaaagcggctttaaactactgtgccagtgtttggggttcggtagtgggcatttccgctgcgactcctctaggtggtgccacgacaacggggtgaattacaagataggcgaaaaatgggacagacaaggggagaatggacagatgatgagctgcacgtgcctgggcaacggaaagggagaatttaaatgcgatccgcatgaagccacatgttacgatgacggcaagacttaccacgttggcgaacaatggcagaaggagtatttgggagcaatctgtagctgcacatgttttggtgggcagcgaggttggcggtgcgacaattgtagaagacctggaggcgaaccatctcccgagggcacaacaggccagagctacaatcagtactcgcaaagatatcatcagcgtactaacaccaacgtcaattgccctatagaatgctttatgcccttagatgtacaggctgacagggaagacagtcgggaatag

SEQ ID NO: 31905 - RNA, 6993 nt, synthetic construct
  misc_feature 1..6993: note = Description of Artificial Sequence: Synthetic coding sequence
  source 1..6993: mol_type = other RNA
atgctgcgcgggcctggacccggcctgcttttattggccgtgcaatgcctcggtacagccgtgccttctaccggagcttctaagtcaaaaagacaagcccagcagatggtgcaaccacagtcccctgtagcagtgagccagagcaagccaggttgttacgataatggcaaacactaccaaatcaatcagcaatgggaaaggacttatttgggcaacgctctggtatgcacctgttacggtggctctaggggctttaattgtgagtcaaagccagaagccgaagaaacctgtttcgataagtacacagggaatacttatagagtgggagatacttatgagagacctaaagactctatgatctgggattgtacctgcattggagctggaaggggccggatatcctgtacaatcgctaatcggtgtcacgaggggggccagtcttataaaattggtgacacctggagacgacctcacgaaacgggggggtatatgttggaatgcgtttgcctcggaaatggtaagggcgagtggacctgcaaacccatcgcggaaaaatgcttcgaccatgccgcaggaacttcatatgttgtaggagagacatgggagaagccttaccagggatggatgatggtggactgtacttgccttggcgagggcagtggaaggatcacctgtactagcaggaatcggtgcaacgaccaagacacacgcactagttacagaattggcgacacatggagcaaaaaggacaatagaggcaacctcctgcaatgcatttgcacagggaacggtagaggagaatggaaatgtgagagacatacgtcagtgcagacaacatctagtgggtctggaccatttacagatgtgcgggccgccgtctaccagccacagccccacccgcagcctccaccatatggccattgcgtgacagacagtggagtggtctactctgtcggaatgcagtggttgaagactcaagggaataaacagatgttgtgtacatgtctgggaaacggggtctcatgccaagaaactgcagtgacacagacctatggagggaactcgaatggagagccttgtgtgctccctttcacctacaatggccgaactttctatagttgtacaactgagggacgccaggatggacatttatggtgctccacaacttccaactacgaacaagaccagaaatatagcttttgtactgatcacacagtactggttcagactagggggggcaattctaatggagcgttgtgtcattttccattcctttataacaatcacaattacacggactgcacttccgagggcaggcgagataacatgaaatggtgcggaacgacccaaaattatgacgcagatcaaaaatttggcttttgtcctatggcagcacacgaggagatctgcacaaccaacgaaggcgttatgtatcgaattggcgatcagtgggataaacagcacgatatgggacatatgatgcgctgtacctgcgtaggaaatggaagaggagagtggacctgcattgcctattcacaactgagagaccagtgcattgtagatgatataacttacaacgtcaatgatacttttcataaaagacatgaagaaggacatatgctcaactgcacatgttttggtcaggggagaggtcgctggaagtgtgaccctgttgatcagtgccaagattctgaaactgggacgttctaccagatcggcgatagttgggagaagtacgttcacggcgttaggtaccagtgttattgctacggacggggcatcggcgagtggcattgtcagccactccaaacctacccttcctcaagcgggcccgtcgaggtgttcatcacggagactccatcacagcctaactcccatccaatccaatggaatgccccacagccatctcatatatccaagtacatcctcagatggagacctaagaacagcgtggggaggtggaaagaggccacaatccctggacacctgaacagctatactattaagggattaaagccgggtgtcgtatatgaaggtcaattaatttctattcaacagtatgggcatcaggaagtgacacgattcgacttcactacaacctcgacaagtaccccagtaacaagcaacaccgtgaccggtgaaactacacccttctcccctttagtggctacttccgagagtgttactgagataaccgcctcttcattcgtagtgtcttgggtttctgcaagcgatactgtaagtggattcagagtggagtacgagctgagcgaagagggagatgaaccccaatacttggacctgcctagtacagcaacctctgtgaatattcccgaccttctccccggcaggaagtacatagttaacgtttaccaaattagcgaagatggagagcaatccctgatcctgagcacctcccagacgaccgcaccagacgcaccgccagatactaccgtagatcaagtagacgatacatccatcgtggtgaggtggtccagaccccaggcaccaatcacaggttatagaatcgtgtactctccatccgtggaaggcagctctaccgagcttaatttacctgagaccgcaaactctgttactctgtccgacctgcaaccgggtgtgcaatataatattactatttacgcagttgaggagaaccaggaatccacccccgtagttatccaacaggagacgacaggcacacccaggagtgacacagtgcccagcccacgtgatttgcagtttgttgaagtgacagatgttaaagttaccattatgtggactcctccagagagcgccgtaacagggtaccgagttgacgtaatacccgtgaacttgccaggtgagcatggccagcggttgcctatttcaaggaacacattcgcagaagtcactggcttgagccccggcgtcacttattatttcaaagtattcgccgtgagtcatgggcgggaatctaaacctctgaccgcccaacagaccaccaaattagatgcaccaaccaacctgcaatttgttaacgagaccgacagtactgtattagttcgctggactcctcctcgcgctcaaatcaccggatatcgtcttaccgtggggctgacaagacgagggcagccaagacaatataacgtcggacctagcgtcagtaagtatccgctgaggaaccttcaacccgcctctgaatacaccgtgtcattggtggctattaaaggaaaccaggaatctccaaaagcaacaggcgtgtttactactctgcaaccggggtcaagcataccgccctacaacaccgaagtgaccgaaaccacaatcgtgatcacatggacacccgctcctcgaatcggatttaagcttggcgtgaggccctctcagggcggtgaggctccgagggaagtaactagcgacagcggcagcatcgtggtgtccggactgacccccggagtagagtatgtatatacaatccaagtgctaagagacggccaggaacgagacgctccaatagtgaacaaagttgtcacccctctctcacctccgaccaatcttcatctggaagccaacccagacacaggcgtgcttaccgtgtcttgggaaaggtccacaacccctgacattacaggctatagaataactacgaccccaaccaacggccaacaggggaactctctcgaagaagtagtgcatgcagatcagtcttcttgcacttttgataatctctctcccggcctggagtacaatgtaagtgtctacacagtgaaagacgataaagaaagcgtacctatcagcgatactattatacctgcagtccctccaccaactgacctccgatttaccaatataggcccggataccatgcgcgtcacttgggctccacctccgagtatagatttgactaacttcctggtgcggtacagcccagttaaaaacgaagaggacgtggccgagttatccatttctcctagtgataatgctgtggtacttacaaacctcttgcctggaacggagtatgtggtaagcgtttcctccgtgtacgagcagcacgagagcacacccctgagaggccggcagaagacaggtcttgactcccccactggaatcgattttagcgacataactgccaactcctttactgttcattggatcgcaccccgagcaactatcaccggctatcgaattaggcatcaccccgaacatttcagcggccgtccaagagaagaccgagtgcctcattcacgtaacagcatcacattgacaaacctaacccccggcaccgagtacgtagtgtctatcgttgctctaaacggccgcgaggagagtccactgttgatcggacagcagtctacggtttctgatgtgcctcgtgaccttgaagtggtagcggctactccgacctcgcttctgatttcctgggacgctcctgccgttacggtccgctattacaggataacttacggcgagacgggtggaaactcccctgtacaagaatttacagttccaggcagtaaaagcaccgctaccattagtggcctgaaaccaggagtggattatactataaccgtttacgctgtcacaggtcgcggcgattcacccgcctcgagcaagcccatctccattaactaccgcacagagatagacaagccgtcccaaatgcaagttactgatgttcaggataatagtatttccgtgaagtggcttccctcgtcttcccccgtcacaggctatagagttactaccacaccaaaaaatggcccgggaccgactaagacaaaaaccgccggccctgaccaaaccgaaatgacaattgaaggccttcagcctacagtggagtatgtggtgtccgtttatgcgcagaaccctagtggagaatctcaacctctcgtccagacagctgttacgaatattgataggcccaagggcctggcttttacggatgtcgacgtcgacagcattaaaattgcctgggagtcacctcagggacaagttagcagatatagggtcacatactcatcccccgaagatggaatccatgaattgtttccagctcccgacggtgaagaagatactgccgagttacagggcctccgtccaggaagcgaatataccgtgagtgtcgtcgcactgcatgatgatatggagtcgcagccactgatcggaacacagtcgactgccatccccgcgccaactgatctcaaattcactcaagtcacaccaacatccctgagcgcccagtggaccccccccaacgtgcagcttaccggctatcgggtcagagtgacaccaaaggaaaagacaggcccaatgaaggaaattaatcttgctcctgacagctcaagtgtcgttgttagcggattgatggtcgccactaaatatgaagtgtctgtctacgcactcaaagacaccttaacttccagacccgctcagggagtcgtgaccaccctcgaaaacgtttctcctcctagacgtgcacgcgtgaccgacgccacagaaactacaataaccatatcctggcgcacgaaaactgaaacaattaccgggtttcaggttgacgccgtcccagctaacggccaaaccccaattcagcggacgatcaagccagacgtacgatcttacacaatcacaggactccagccaggaactgattataagatctacctttacacccttaacgacaacgccagatcctcaccggtcgtgatcgatgctagcacagcaattgacgccccatctaacttgagatttctcgcaacgactcctaactccctgctggtgtcctggcagcctccaagagccagaataacagggtacatcatcaagtacgaaaaacctggtagtcccccccgcgaagttgtaccccgccctaggcctggcgtcaccgaagccaccattactggattggaacctggaactgagtacaccatctatgtaatagccctcaagaataaccagaaatctgagccactaattgggaggaaaaagactgtccagaagaccccttttgtaacccaccctggatatgatacaggcaatggaattcagcttcccggaacgtcagggcagcagccctcagttggccagcaaatgatattcgaagaacatggattcagacgtaccacccctcccaccactgccacacctattcgccacagacctcggccatatcccccaaatgtgggccaagaagccctgtcgcaaactactatttcatgggcaccctttcaagacacctcggaatatattatttcctgtcacccagttggtaccgatgaagagcctctgcagtttcgcgtgccaggaacctcgacatcagcaacgctaactggtttgaccagaggagcaacatacaatgtgatagtggaggcacttaaagaccagcaacgtcacaaggtcagagaagaagtcgtaaccgtaggcaatagcgttaacgagggtctgaaccagccaactgacgatagttgctttgatccatatacagttagccattacgcagtgggagatgagtgggaacgtatgagcgaaagtggctttaaattgctttgtcagtgcctcggttttggaagcgggcattttcggtgtgattcatctcgttggtgccacgacaacggggttaactataagatcggcgagaagtgggatcggcagggagagaacggacaaatgatgagttgcacatgcctaggcaacggcaaaggtgagttcaagtgcgatcctcacgaggctacgtgctatgatgacggaaaaacatatcacgtaggagagcaatggcaaaaggaatatctgggggctatatgtagttgcacgtgtttcggcgggcagcgggggtggcggtgcgataactgcaggaggccaggaggggaaccctcaccagaggggacaaccggacagagttataaccaatacagtcagcggtatcaccaaagaaccaatacgaatgtaaattgtcccatagaatgtttcatgccattggatgttcaagcagaccgagaagacagccgggagtag

SEQ ID NO: 31906 - RNA, 3312 nt, synthetic construct
  misc_feature 1..3312: note = Description of Artificial Sequence: Synthetic coding sequence
  source 1..3312: mol_type = other RNA
ctgcgttggacccccctcaatagtagtacaatcattggctatagaatcaccgtggtcgctgccggagagggcattcccatatttgaggacttcgttgactcttcagtcggatactacactgtgacagggcttgaaccaggtattgactatgatataagcgtcattactctgatcaatggcggagaaagtgcccccacaactctcacccagcagacggctgtgcccccaccaacagacctgagatttaccaatatcggtcctgacacaatgcgcgttacttgggcacctccaccttccatcgacctaaccaactttttggtcaggtatagtcccgtgaaaaatgaggaagacgtggctgagctttcgatttcccctagtgataacgcagtcgtcctaacaaatctcttaccaggcaccgagtatgtcgtcagcgttagtagcgtttacgagcagcatgagagcacccccctccgagggcgccaaaagacagggttggactcaccaaccggaattgactttagcgatataacagcaaactcttttaccgtccattggatcgcaccaagagcaacgattaccggctacaggattcgccatcaccctgaacacttttccgggcgaccaagggaagatcgcgtgccccattctcggaacagtataacactcacaaatcttactccagggaccgaatacgtcgtcagtattgtagcccttaatggacgcgaagagtcccccctactgatcggccaacagtcaaccgtatcggacgtgccacgtgacctcgaagtcgtagctgccacacctacctccctgctgatttcttgggacgcgcccgcagttaccgtgcgatactatcgcatcacctatggggaaacaggcggcaattcgccagtccaggagttcaccgtgcccggcagcaagtctacagcaactatatctggcctgaaacccggtgtcgactatactattactgtctatgcggtgacaggaaggggtgattcgccagcaagctctaaacctatttcaataaattatcgcacagaaatcgataaacctagccagatgcaggtcaccgacgtccaggacaattcaatctcagtaaagtggctcccctcctccagccccgtcaccggctaccgagtgaccacaactcctaaaaacggacccggaccgacaaagaccaaaacagctggccccgatcagacagagatgaccatagagggactgcaacccacagttgaatacgtggtttcagtatatgcccagaatcccagcggggagagccagcccctcgtgcaaactgcagtgacaactatcccagcccctaccgatcttaaattcacccaggttacacctacttcactctccgcgcaatggacaccacctaatgtgcagctcaccggttatagagttcgagtgacacctaaggagaagacaggcccaatgaaggaaatcaatttggcacccgattcctcctcagtagtcgtctccggcttgatggtcgcaaccaagtacgaggtctccgtatacgccttaaaggacaccctgacctcaaggcctgcccagggcgttgtaacaaccttggagaacgtaagcccccctcgcagagcccgtgtgaccgatgcgaccgaaaccacaataacaattagttggaggacaaagacagagacgataacaggcttccaagttgatgccgttcctgccaatggacaaacccccatccagcgtacaatcaaacccgacgtcagaagctatacaatcaccggcctgcagcccggaacagactacaagatctacctgtacaccctgaatgacaacgccagatcatctccagttgtgattgatgcctccacagccatcgacgccccctctaatttgagatttctcgcaaccaccccaaattcgctgcttgttagctggcagcccccccgagctcgaatcactggatacatcattaagtacgaaaagccaggttccccgcctcgtgaagttgttcctaggccccgtccaggcgttactgaggccactatcaccggactcgaacccggcaccgaatacacaatctacgtcatagcgctgaaaaataaccagaaaagcgagccacttattggccggaagaaaacagacgaactaccacaactcgtgaccctgccacatccgaacctacacggacctgagattcttgatgtgcctagcactgtccagaagaccccctttgttacacacccaggttacgatacgggaaacggcatccaactgccgggcacctccggtcagcagccatcagtggggcaacaaatgatctttgaggaacacggctttaggcgaaccaccccacccaccacagccaccccaataagacatagaccccgtccttaccccccgaacgtgggcgaagagatccaaattggccatatccctcgggaagacgtcgattaccacctctacccacacggtccagggctgaatcctaacgctagcaccggccaggaggccctatcccagacaacaatttcatgggctccgttccaagataccagcgagtacattatttcttgccatccagttgggacagacgaagagccattgcaattcagagtgcctggaacttcaaccagtgctaccctcacaggacttacccgtggagctacatacaacgtcatagtcgaggcccttaaagatcagcaaagacataaggtccgcgaagaagtggtgaccgtgggcaactccgttaacgagggactcaaccagccaaccgacgactcttgcttcgatccttataccgtctcacactacgccgtcggagacgaatgggagagaatgtctgaatccgggttcaagctgctatgccaatgtctgggatttggaagcggccactttcgatgtgacagcagcaggtggtgtcacgataatggcgttaattataagataggagaaaaatgggaccgccagggcgagaacggccagatgatgagttgcacatgtctgggaaacggcaagggagaattcaaatgcgacccacacgaggccacatgttatgacgacggcaaaacctaccatgtcggagaacaatggcaaaaagagtatcttggagctatctgttcttgcacctgcttcggagggcagagagggtggcgatgcgataattgccgtagacctgggggagaaccgtcgcccgaaggcaccaccggacagagctataatcaatattctcagcgttaccatcaacggaccaataccaacgtgaactgtcctattgaatgcttcatgccactggacgtgcaggcagacagagaagacagtagagagtag

SEQ ID NO: 31907 - RNA, 1062 nt, synthetic construct
  misc_feature 1..1062: note = Description of Artificial Sequence: Synthetic coding sequence
  source 1..1062: mol_type = other RNA
atggaacttaccgaactgctactagtagtaatgttacttctgaccgctaggcttactctgtcatccccagccccccccgcctgtgatctgagggtcctttccaaactcctccgggatagtcacgtgctgcacagtcgactctcccagtgcccagaagtgcatcccctgcctactcccgttctccttcccgccgtggatttctccctgggagaatggaagacccagatggaggagactaaagcccaagacatcctgggtgccgtaactctgctgttagaaggggtgatggccgcgagagggcagctgggtcccacttgtttgagtagtctgttaggtcagctgagcggtcaagtccgtctgctactgggcgctctccagagtcttctaggcacccaactaccacctcaaggacgcacaactgctcacaaagatcctaatgcaatttttctctcatttcaacacctccttcgggggaaggttaggtttcttatgctcgtcggcggcagcaccctgtgcgtgagaagagcgccacctacgaccgctgtcccttcgaggacatcccttgtattaaccctgaacgaattacctaaccggactagcgggctgcttgaaaccaacttcacagcatctgctagaactactgggtccgggctgctgaaatggcaacaaggcttccgcgccaagattcctggcctgttaaatcaaacctcccgctccctcgaccagatccctggctacttgaaccgcattcacgaactgttaaacggcactagaggcctgttccccggaccttcacgcagaaccttaggagcccctgatatctcctcaggcacttccgatactggctcgctcccacctaatttacaaccgggctactccccaagccccacacacccacctaccggccaatacactctttttccactgcctccaacgctccccactcctgtcgtgcagcttcaccccttattacccgacccctctgctcccactcctacccccacaagccccctgctcaatacctcctatacacattctcagaatctcagccaggaaggctag

SEQ ID NO: 31908 - RNA, 537 nt, synthetic construct
  misc_feature 1..537: note = Description of Artificial Sequence: Synthetic coding sequence
  source 1..537: mol_type = other RNA
atgaccgttctcgccccagcttggtcccctaccacttacttattgctgctactgctgctcagctccggattaagcgggacccaagactgctcgttccaacatagtcccatttcttctgacttcgctgtgaagattcgcgaactaagtgattatctcctgcaggattatcccgtgactgtggccagcaacttacaggatgaagaactgtgcggaggactgtggagattagttctggcacaaagatggatggaacggcttaagacagtggccggatctaaaatgcagggcttgcttgaaagggtaaatactgagatccatttcgtcacaaaatgtgctttccagcctcccccctcatgtcttcgcttcgtgcaaacaaacatcagtagactcctccaggagaccagcgaacagctagtggccctgaaaccctggataacccgccagaacttttcccgctgcctcgagctacagtgtcaacccgtcgagacagtgttccatcgagtcagtcaggacggccttgatctactcaccagctag

SEQ ID NO: 31909 - RNA, 555 nt, synthetic construct
  misc_feature 1..555: note = Description of Artificial Sequence: Synthetic coding sequence
  source 1..555: mol_type = other RNA
atgagcagaacagcctatacagtgggagcacttcttttactcctgggaacactgttgccagccgccgaaggcaaaaaaaaaggtagtcagggggccatcccaccacccgacaaagctcagcacaatgactccgaacaaacccagagcccccaacagcctggatccagaaatcgagggagaggacagggacggggaacagcaatgccaggggaagaggtcctggaatccagtcaggaagccttgcatgttactgagcgcaaatatttaaagcgtgactggtgcaaaacacagcctttgaagcaaaccatccatgaggagggctgtaatagccgaaccataattaaccgcttttgctatggacaatgcaattccttttacattccacgacatatccggaaagaagaagggtcgtttcagtcttgcagcttttgtaaaccaaaaaagtttaccactatgatggtgactctgaactgccccgagcttcaaccaccaactaagaagaagcgagtgacccgcgtaaagcagtgccgatgtatttcgatagacctggactag

SEQ ID NO: 31910 - RNA, 432 nt, synthetic construct; identical to SEQ ID NO: 31729
  misc_feature 1..432: note = Description of Artificial Sequence: Synthetic coding sequence
  source 1..432: mol_type = other RNA

SEQ ID NO: 31911 - RNA, 432 nt, synthetic construct
  misc_feature 1..432: note = Description of Artificial Sequence: Synthetic coding sequence
  source 1..432: mol_type = other RNA
atgtcacgcacagcatatacagtgggagctttgctgctcctgctgggtactctgcttcccgccgcagaaggcaaaaagaagggatcccaaggcgctatacccccccccgacaaggccctacatgtgactgaacgcaaatatttgaagagggactggtgcaaaacacagccgttgaaacaaacaatacacgaggagggctgcaactcccgcaccattatcaacagattttgctacggccagtgcaactctttctacattcccaggcatatacggaaggaagaaggttcttttcaatcttgctccttctgtaaacctaagaaatttacaactatgatggttaccttaaattgccccgaactgcagccaccaaccaagaagaagcgtgtcacaagggttaaacaatgtcgctgtatctctattgatttagactag

SEQ ID NO: 31912 - RNA, 2976 nt, synthetic construct
  misc_feature 1..2976: note = Description of Artificial Sequence: Synthetic coding sequence
  source 1..2976: mol_type = other RNA
atgcacagccctggagccgacggcacccaagtaagtcccggcgcccactactgtagtccaactggagccggttgtcctagaccatgcgctgacaccccagggcctcagccccagcccatggacctgcgagttggtcagagacctcccgttgaaccccccccagaacctacgctgctcgctcttcagcggcctcagagactccaccaccatctgttcctggcgggactccaacaacagcgcagcgtggaacctatgagactctccatggatacccctatgcccgagctgcaggtcggcccacaggagcaggaacttagacaactcctgcacaaagacaaaagcaagaggagcgccgtagcaagcagtgtggttaagcagaagttagccgaagtcatcctcaaaaagcagcaggccgccttggagcgcacggttcaccctaactctcccggaattccctataggacattggagcctctcgaaaccgagggggcaaccagaagcatgctgagtagttttctccccccagttcccagcctcccttccgatccaccagaacatttcccattacgaaagactgtctccgaacccaacctaaagttgcgttacaagcccaaaaagagtctcgagcgaagaaagaaccctctgcttcgcaaagagagcgcccctccttccctgaggcggagacctgctgaaacactgggagattctagcccttcctcatccagtaccccggcctccggctgttcttcccccaacgacagtgaacacgggccaaatccgattctgggttctgaagccttactgggccagaggttgcgactgcaggagaccagtgttgccccattcgctctgcctaccgttagtctgttacctgctataactttaggattgccagcgccagccagggccgattcagaccgccgcacccatcccaccctcgggccccgcgggccaatactgggctctccacatacccccctgtttctaccacacggcctcgagcctgaagccggaggaactcttccttccagactacagcctattctgcttttagaccctagcggctcacatgccccacttttgacagttcccggtcttggccctctgccatttcacttcgcgcagagtcttatgacaaccgagaggttgagcggtagtggcctccactggcctttgagtagaactaggagcgaaccattgcctcccagcgccacagcaccgcccccaccaggacccatgcaaccacgattagagcagctgaaaacacatgtgcaggtgataaaaagaagcgcaaagccctccgagaaacctagattaaggcaaattccaagtgcagaggatctcgaaacagatgggggcggcccaggacaggttgtggacgatgggttagagcaccgagaacttgggcatggacagcccgaagcccgcggccccgctcctttgcagcagcaccctcaggttcttctatgggagcagcagcgactcgccggaagactgcctcgaggctctaccggcgacacagtgctactccctctggcccaaggaggtcatcggccactgtcacgcgctcagtccagccccgctgcccccgcttcccttagtgccccggagcccgccagtcaggctcgcgtcctgtcctcttccgaaactcctgcccgcactctccccttcaccacaggcctgatctatgacagtgttatgttgaaacaccagtgttcatgcggagacaactcacggcaccctgaacacgctgggcggatccaatctatctggagcaggcttcaggagagggggctgagatcacaatgcgaatgtctgaggggacgaaaagcaagtctggaggagctgcagagtgtgcatagtgagagacacgtgttactatacggaaccaaccctctgagcaggcttaaactggataatggcaaactggcaggccttctagcccaacgaatgtttgtaatgctaccttgtggcggtgttggagtggatacagataccatttggaacgaacttcatagcagcaacgcagcacggtgggctgcaggatccgtcaccgaccttgcattcaaggtggccagccgggagctgaagaatggtttcgccgtcgtccgccctcccggccaccacgcagaccattccactgccatgggattctgcttctttaactcagtagccattgcttgcagacaattgcagcaacagtcgaaagcttccaaaatactaattgtcgactgggatgtgcatcacggcaacggtacccagcagacattttaccaagatccgtcagtactctacatctctctgcaccgccacgatgatggaaattttttccctggatcaggggccgttgacgaggtcggcgctggctccggggaaggtttcaatgtgaatgtcgcctgggccggagggctcgatcctcccatgggagatcccgagtacctagcagcatttagaatagtcgttatgccaattgcccgcgaattttcccccgacctagtcttggtgtcagccggtttcgatgccgccgaaggtcaccctgcccctttaggggggtaccatgtaagcgcgaaatgttttggttacatgacgcaacagttgatgaaccttgccggaggagccgtggttctcgccttagagggaggccacgacctgaccgcgatctgtgatgcctctgaagcttgtgtcgcagcattgctgggaaatagggttgaccctttaagtgaagaaggctggaagcaaaaacccaacttgaatgccataaggtccttggaggccgtcatacgggttcatagtaagtactggggctgcatgcagagactagccagttgccccgactcttgggttcccagggttcctggtgcggacaaagaggaagtcgaagccgtgaccgccctcgcctcgctgagcgtagggattttagccgaagacagaccatcagaacagctggttgaggaggaggagccgatgaacttatag

SEQ ID NO: 31913 - RNA, 588 nt, synthetic construct
  misc_feature 1..588: note = Description of Artificial Sequence: Synthetic coding sequence
  source 1..588: mol_type = other RNA
atgggaaaaatctcatctttaccaacacagctctttaaatgttgtttctgtgatttcctcaaggtgaagatgcatacaatgtcctcatcacatctgttttatctggcactttgcctcttgacttttacctctagcgccaccgccggtcccgagacactctgcggcgcagagctcgttgacgccctgcagtttgtttgtggagatagaggattttatttcaataaacccaccgggtacggttcctcttccagacgggcccctcagacaggcattgttgacgaatgttgttttagaagctgcgatctgaggagattggaaatgtactgcgcgccccttaagcctgccaaatccgcaagaagcgtcagggcccagaggcacaccgatatgcctaagacccagaagtatcagccacctagcacaaacaagaacaccaaaagccaacgaaggaagggctggccaaaaacccatccaggcggcgaacaaaaagagggtacagaggcgtccttacagatcagagggaagaagaaggaacaacgccgtgaaattggatcaaggaacgcagaatgtcgcggaaaaaaaggtaaatag

SEQ ID NO: 31914 - RNA, 462 nt, synthetic construct
  misc_feature 1..462: note = Description of Artificial Sequence: Synthetic coding sequence
  source 1..462: mol_type = other RNA
atgggaaaaatttcttctttgccaacacagctgtttaaatgttgtttttgtgattttctgaaagtcaaaatgcacactatgagctccagccatctcttttatcttgctctctgcctcctgacttttacttcgtccgcaaccgccgggcctgagactctgtgcggagccgaactcgtcgatgccctccagttcgtttgcggagatagaggattttacttcaataaaccaaccgggtatggcagcagttctaggcgcgccccccagacaggcatcgtggacgagtgttgtttcagatcctgtgacctgcggcgactcgaaatgtactgcgccccacttaaaccagccaagtccgcccgaagcgtcagagctcaaagacacacagatatgcctaagacccagaaggaagttcacctgaagaatgcatcccggggtagcgcggggaacaaaaactacaggatgtag

SEQ ID NO: 31915 - RNA, 477 nt, synthetic construct
  misc_feature 1..477: note = Description of Artificial Sequence: Synthetic coding sequence
  source 1..477: mol_type = other RNA
atggggaaaatcagtagcttgccaacccaacttttcaagtgttgtttttgtgactttcttaaggtgaaaatgcacaccatgtcatctagccacctgttctatcttgccctttgtcttctcacattcaccagttccgcaacagccgggcctgagacattgtgtggggctgaactagtcgacgccctccagttcgtctgtggcgaccgtggattctacttcaataagccgacaggatatggctcatcctccaggcgcgctccgcaaacaggtatcgtggacgaatgctgctttagatcgtgcgatctgagaaggctggagatgtattgcgccccattgaaacccgctaaatcagcgagaagcgtgcgtgcccagagacatacagacatgcctaaaacacagaagtatcagccccctagcacgaataagaatacaaaatctcagcgtcgaaaaggaagcacttttgaggagagaaagtag

SEQ ID NO: 31916 - RNA, 420 nt, synthetic construct
  misc_feature 1..420: note = Description of Artificial Sequence: Synthetic coding sequence
  source 1..420: mol_type = other RNA
ctgaaggtgaaaatgcacactatgtcatccagccatctgttctacctcgcgctctgcctattgactttcacatccagtgccactgccggacccgagaccctctgtggtgccgaactggtggacgccttgcagtttgtgtgtggcgatcggggcttctacttcaataagccgacgggctatggctcctccagcaggcgtgctcctcaaaccggaatcgtagatgagtgctgcttccgatcatgcgacttacgaaggctagagatgtactgcgccccattaaaaccggccaagtccgcacggtcagtcagggcccaacgccacaccgatatgcctaaaacacagaagtaccaaccccctagtactaacaagaatacaaagtcccagcgtagaaaaggaagtacatttgaagaacggaagtag

SEQ ID NO: 31917 - RNA, 414 nt, synthetic construct
  misc_feature 1..414: note = Description of Artificial Sequence: Synthetic coding sequence
  source 1..414: mol_type = other RNA
atgatcaccccaactgtaaagatgcacacgatgtccagctcacacctgttctacttggccctatgtcttttaacctttacctccagcgccacagctgggccagaaacactgtgtggcgccgagttggtcgatgccctgcagtttgtctgtggcgataggggattttatttcaataagcctaccggatacgggtccagttcaagacgcgcaccacagaccggaatcgtggatgaatgttgcttccgctcctgcgacctacgtagactcgagatgtactgcgcccctctaaagcccgccaagtcagctaggtccgttcgcgcacagagacacaccgatatgcccaagacacaaaaggaggtacatctcaagaacgcctctcgggggtctgccggaaacaaaaattacagaatgtag

SEQ ID NO: 31918 - RNA, 477 nt, synthetic construct
  misc_feature 1..477: note = Description of Artificial Sequence: Synthetic coding sequence
  source 1..477: mol_type = other RNA
atgggaaagattagtagcttaccgacccagttgtttaagtgctgtttctgcgattttctcaaagtcaaaatgcacaccatgtcttcctctcacctgttctatctcgctctctgtcttctgacttttacaagctctgcaactgccggtcccgaaacactgtgtggtgctgagctggttgatgctctacagtttgtttgtggagaccgaggcttttatttcaacaaacccaccggttacggttcaagctcaagacgggccccccagacagggatcgttgacgaatgttgtttccgttcctgcgacctgcgacgactggagatgtactgtgcacctctcaagccggctaagtccgctcgatcagtacgcgcccagagacatacagacatgccaaaaacccaaaaataccagccgccttccactaacaagaacaccaagagccaacggaggaaaggatctactttcgaggagagaaaatag

SEQ ID NO: 31919 - RNA, 876 nt, synthetic construct
  misc_feature 1..876: note = Description of Artificial Sequence: Synthetic coding sequence
  source 1..876: mol_type = other RNA
atgcaaagagctagacctactctgtgggccgccgccctaactctcctggtgttgctgcgcggcccccccgtggctagagctggagccagctccgccggcttgggacctgtggtcaggtgtgaaccctgtgacgctcgtgccttagcccagtgcgcaccccctccagccgtgtgtgcagagttggttagagagcctggatgcggctgttgtcttacctgtgcccttagcgaaggacagccttgtggaatctatacggaacggtgtggcagtggactgcgctgccagccatctcccgacgaggccagacctttgcaggcactgcttgatggccgtggcctgtgcgtgaatgcatctgctgtatcgagattacgcgcataccttcttcccgccccacccgccccaggaaacgcctccgagtccgaagaagatagatcagctggtagcgtggagtctccatcagtgtcctctacacatcgagtcagcgacccaaagtttcatccacttcactctaaaatcattatcatcaaaaaggggcacgccaaagacagccagcggtacaaggtcgattatgaatctcaatcaacagatacccagaacttctcaagcgagtctaagagagagactgaatacggcccatgcagacgagagatggaagacactttgaatcacctcaagttccttaatgtcttgtcccccagaggcgtacatatcccgaactgtgataaaaagggcttctataaaaaaaaacaatgccgcccaagcaaaggtcgcaaaagggggttctgttggtgcgtagacaagtatggccagccactgcccggatataccactaaagggaaagaggacgtccattgctattctatgcagtctaaatag

SEQ ID NO: 31920 - RNA, 894 nt, synthetic construct
  misc_feature 1..894: note = Description of Artificial Sequence: Synthetic coding sequence
  source 1..894: mol_type = other RNA
atgcaaagggcacgtcctaccctctgggcagctgctcttaccctgctggtactcttacggggacctcccgtggctagagcgggcgcctcatccgccggtttgggaccagtggtccgttgcgagccatgtgacgcaagagcccttgctcagtgtgcgccccctccggccgtgtgcgctgaattagttagagaacctggttgcggatgttgtctaacttgcgcattgtctgagggccaaccctgcggaatttatacagaacgctgtggaagtgggctcagatgccagccaagtcccgatgaggccaggccgctgcaggccctccttgacggtcgtggcctgtgtgtaaatgcttctgctgtctcccgtttgagagcctacctactgcctgcccctcccgcccctggagaacctcctgctccaggtaatgcatctgaatcagaggaagatagatccgctggatccgttgagagccctagcgtgtcatctactcatagagtatccgatccgaaattccaccctctacattcaaaaataatcataattaaaaagggccacgcgaaagattcccagagatataaggtagactatgagtcccaatctacagacactcaaaattttagctcagaatccaaaagggaaacagagtacggcccatgcaggcgggagatggaagacacgctcaatcacctcaagttcctcaacgtgctgtctccccgaggcgttcatattccaaattgtgataaaaagggattttacaagaagaaacagtgcaggccatccaaagggcgcaagagagggttctgttggtgcgtggacaaatatgggcagccactcccgggctataccacaaaaggaaaagaagacgttcactgttatagtatgcagtccaaatag

SEQ ID NO: 31921 - RNA, 585 nt, synthetic construct
  misc_feature 1..585: note = Description of Artificial Sequence: Synthetic coding sequence
  source 1..585: mol_type = other RNA
atgcaacgcgctagacctctgcaagcactgttggatggtcggggcctatgcgtcaatgcctccgccgtatcacgcctgagagcctatctactgcccgctccacccgcacccggcaacgcctctgaaagtgaggaagatcggtcagccgggagcgtggaatccccatctgtttcgtcaacccatcgtgtttccgatcccaagtttcatccgctgcactccaagattatcattataaaaaagggccacgctaaagactcccagcggtacaaagttgactacgagagccagagcaccgacacgcagaactttagttctgagagcaagcgggagacggaatacggaccatgtagaagagagatggaagataccctcaaccacctgaagtttttaaatgtgctatccccccgcggcgttcatatccccaactgtgataaaaagggcttttacaaaaaaaaacaatgtcgaccctctaaagggcgaaaacggggcttctgttggtgtgttgacaagtatggccagccacttcccggctacacgaccaaggggaaggaagatgttcactgttattcaatgcagtccaagtag

SEQ ID NO: 31922 - RNA, 462 nt, synthetic construct
  misc_feature 1..462: note = Description of Artificial Sequence: Synthetic coding sequence
  source 1..462: mol_type = other RNA
taaagcgaagaggatagaagcgccggcagcgttgaatctccctcagtcagcagcacccaccgcgtctccgatccaaagtttcatccactgcattctaagataatcattataaagaagggtcacgctaaggactcgcagagatataaagtggattacgaatcacaaagtactgatacacaaaacttctcctcagagtccaagcgggagacagagtatggcccatgccgccgcgaaatggaagacacattaaaccacttgaaattcttgaacgtgttgtctcctcgtggagttcatatacctaattgtgataaaaaggggttttacaaaaagaagcagtgtcgaccatcaaagggaagaaaacgcggtttttgctggtgtgtggataagtacggacagcctcttcctggttatacgacaaagggtaaagaagatgtacattgttactccatgcagtccaagtag

SEQ ID NO: 31923 - RNA, 432 nt, synthetic construct
  misc_feature 1..432: note = Description of Artificial Sequence: Synthetic coding sequence
  source 1..432: mol_type = other RNA
taggagtcacccagtgtgagtagtacacatagagtttcagatcccaagtttcatccactccattccaagatcattatcatcaaaaaggggcatgctaaagacagtcagcggtacaaagtggattacgaatcccagtctactgatactcagaacttcagctctgaatcgaaaagagagaccgaatacgggccctgtagaagagaaatggaagacacgctaaaccacctgaaattcctcaatgtcctgtctcctcgaggagtccatattccgaattgcgataaaaagggcttttacaagaaaaagcaatgtaggccaagcaagggaagaaaaaggggtttttgctggtgcgtggataaatatggacagccgctgcccgggtacacaacaaaaggaaaggaagatgtgcattgctactcgatgcaatccaagtag

SEQ ID NO: 31924 - RNA, 792 nt, synthetic construct
  misc_feature 1..792: note = Description of Artificial Sequence: Synthetic coding sequence
  source 1..792: mol_type = other RNA
atgcaaagagcccgccctacattatgggccgcctgtgaaccgtgtgacgcacgtgcattggcccaatgtgcgcctccccctgcggtttgcgcagaattagtacgggagcccggatgcggatgctgtctgacttgtgccttgagcgaaggacagccctgcggtatttataccgaacggtgcggatccgggttgagatgccagccaagtcccgacgaagcccggccccttcaagccctgctggatggacgcggactgtgcgttaacgcatccgctgtgagtcggctgagagcttatttattgccagcgccacccgccccaggcaacgcatctgaaagtgaagaagacagatccgccggctctgtcgaatctccatcagtttccagtacacacagagtgtccgaccccaagttccaccccctacactcaaagatcatcattatcaagaagggccatgccaaggactcgcagcgatataaagtagactacgaatcacaatcaacagatacccagaatttctccagcgaatcaaagcgcgaaacagagtacggtccctgtcgccgagagatggaggacacgctgaaccatttgaagtttctcaatgtcttatcaccccgaggagtacacatacctaactgtgacaagaaaggattttacaaaaaaaaacagtgtaggccatcaaagggacggaaaagaggcttctgctggtgcgtcgataagtacggtcagcccctgccagggtacactaccaaaggaaaagaggatgttcactgttattcaatgcagtcaaaatag

SEQ ID NO: 31925 - RNA, 834 nt, synthetic construct
  misc_feature 1..834: note = Description of Artificial Sequence: Synthetic coding sequence
  source 1..834: mol_type = other RNA
atgagggcccttaggctcggcgccgaagaccagccattgccggcttggattccccagttacgggcggtttattgtcgacctattccggcccggccagcttgccaggccgcttgtcccggatgccgccgccatgccgccggagcaacacatgcccttgggagatgtgccgacagtgccggcgccgcaccccgagccgcggggggtgcaggttggagagaactgggtggcctgggaagtcgaggtgcactgagagccgtgagacaccttcaccgagcccttctagacggaagaggtctgtgcgtgaacgcgtcggctgtgtcccggctcagagcgtacctactgccagcaccaccagcccccggcaacgccagtgagtctgaagaggatcggtcagccggatccgtggaatccccatcagtgtcatccacccaccgtgtgtcagatccaaaattccacccattgcattcaaaaataattattatcaagaaggggcatgcaaaggattctcaaagatataaggtcgattacgagagccagagcaccgacactcaaaacttttcgtctgaaagtaagcgggagacagagtacggaccttgcagacgcgagatggaggacacactgaatcatttgaaatttcttaacgtgcttagccctcgaggcgtgcatattccaaattgtgataagaaggggttctacaaaaaaaaacagtgcagaccctctaaaggcaggaagaggggcttttgttggtgcgtcgataagtatggtcaaccactccccggctataccactaagggtaaggaggatgtacattgctacagcatgcagagcaagtag

SEQ ID NO: 31926 - RNA, 570 nt, synthetic construct
  misc_feature 1..570: note = Description of Artificial Sequence: Synthetic coding sequence
  source 1..570: mol_type = other RNA
atgcagagagcccgaccaaccctgtgggccgctgccttgaccttgctggatggccgcgggctgtgcgcttatttactcccggcaccccctgccccaggcaatgcttccgaatcagaggaggacagatccgctggctctgtggagtctccatcagtatcctccacccaccgggtttcggacccaaaattccatccactacacagtaagattataatcatcaagaagggacacgcaaaggacagtcagagatataaagtcgattacgaaagccagtccaccgacacacagaatttttcatccgagtctaaaagggaaactgagtatgggccgtgcagaagagagatggaggacactctgaatcaccttaaattcctgaacgtcctgtcaccacgtggtgttcacattccgaactgcgacaaaaaagggttctataagaaaaaacaatgccgaccatctaaaggacggaagagaggcttttgctggtgtgtggataaatacggacagccactgcccggatacacaaccaaagggaaggaagacgttcactgctattctatgcaatctaaatag

SEQ ID NO: 31927 - RNA, 807 nt, synthetic construct
  misc_feature 1..807: note = Description of Artificial Sequence: Synthetic coding sequence
  source 1..807: mol_type = other RNA
atgcaaagggcccggccaacattatgggcagcggctctgactctccttgttcttctcagaggcccacctgtggcccgtgccggagcttccagcgctgggctgggtccagtggtccgcagggaacctggttgcggctgttgcctgacttgcgctctctctgagggacagccatgcggcatttatacggaaagatgtggatccggtctaagatgtcaaccctcccccgatgaagctcgcccactccaggccctgctggacggacggggcttgtgcgtgaatgcatctgccgtttctagactgagagcctatttgctgccagccccccccgcacccggcaatgcatcagaatcagaagaagacagatccgccggtagcgtagaatctccctcggttagctccacccacagagtttcagaccctaagttccatcccctgcacagcaaaattatcattattaagaaaggacatgctaaggactctcagcgctataaggttgattacgagagccagtccaccgatactcaaaactttagttccgagagcaagagagaaaccgagtatggaccatgcaggcgtgagatggaggatacattaaaccatctgaaatttcttaatgttctgagcccacgtggtgtacatatcccaaattgcgataagaaagggttctacaagaaaaagcagtgtcggccgagtaaggggagaaagcggggattctgttggtgtgtggataaatacggacagccattgcccggatatacgaccaaaggtaaggaggatgtgcactgctacagcatgcaaagtaagtag

SEQ ID NO: 31928 - RNA, 2397 nt, synthetic construct
  misc_feature 1..2397: note = Description of Artificial Sequence: Synthetic coding sequence
  source 1..2397: mol_type = other RNA
atgaatctacagccaatattctggatcggcttgatatccagcgtttgttgcgtgttcgcccaaaccgatgaaaatcgctgtctgaaggcaaatgcgaaaagttgcggagaatgtattcaggctgggccgaactgtggctggtgtacaaatagcacattcttacaggaaggaatgccaacatctgccaggtgcgacgacttagaagcactcaagaagaaaggctgcccaccagacgatattgagaaccctagaggcagtaaagacatcaagaagaataagaacgtgaccaacagaagtaaaggaactgcagaaaaactgaaaccagaagatatcactcaaattcagcctcaacaacttgttctgcgtcttagatcaggggaacctcagaccttcactcttaaatttaagagagcagaggactatccaatcgacctgtattacctgatggatctaagctactcaatgaaagacgatctggagaacgtgaagtctttagggacagacctgatgaatgagatgcgccgcattacttctgattttcgtatcggctttggctcattcgttgaaaaaacagttatgccttacatttctactacgccagctaaattacggaatccctgcacttccgagcagaactgcacatctcctttcagctacaaaaacgtgttaagcttgaccaataagggcgaggtgtttaacgaactggtgggaaagcaaagaatatctggcaacctggattcccccgagggtggcttcgatgccataatgcaagtggctgtgtgtggaagcttgatcggctggcgcaatgtcacacgcttgttggtgttctccacagacgctggtttccacttcgctggcgatggcaaattaggtggaatcgtcctgccaaacgatggtcagtgccatttagagaataatatgtacaccatgtcgcactactacgattacccctccatcgcccacctggtccagaagctaagtgaaaacaatatccaaactattttcgccgtaaccgaggagttccaaccagtttacaaggagctgaaaaatttaatccctaagtccgccgtcgggaccctttccgctaacagtagcaacgtaattcagttgattatcgacgcgtataatagtctgtcgtctgaagtcatactagagaacgggaagttaagtgaaggcgttacaattagttataaatcctactgcaagaatggagtaaatgggaccggtgaaaatggaagaaaatgtagtaacatttcaatcggtgacgaggtgcagttcgaaataagcataacatcaaacaagtgcccaaagaaggacagtgactcttttaagattagaccactgggcttcaccgaagaggttgaggtgatcctgcaatacatttgcgagtgcgagtgccaatctgaaggaattcctgaatcccccaagtgtcatgaagggaacggtacattcgaatgtggtgcctgtcggtgtaatgaagggcgggttggtaggcattgtgagtgcagtacagacgaggtaaatagtgaagatatggatgcttactgtaggaaagagaacagcagcgaaatttgttccaataatggtgagtgcgtttgcggacagtgtgtttgtaggaaaagagacaatacaaatgagatttattcgggcaagttctgcgaatgtgacaactttaactgtgatcgaagcaacggattaatctgtggagggaacggggtctgcaaatgtagggtgtgtgagtgtaatccaaactacaccggttccgcctgcgattgtagtcttgacacatccacctgcgaggcctccaacggtcagatatgtaatggtagaggcatctgcgaatgtggagtttgtaagtgtactgatccaaaattccagggccagacgtgcgagatgtgccagacgtgcctgggcgtgtgtgcagaacataaggagtgtgtgcagtgcagggcattcaataaaggagagaaaaaagacacgtgtacccaggagtgttcctattttaatattacgaaagttgaatcccgggataaactgccccagcccgtgcagcccgaccccgtttcccactgtaaagagaaagatgtagacgactgttggttttattttacatacagtgtcaatggaaacaacgaagttatggtgcacgttgttgaaaatccggaatgcccaacaggtccagacatcatccctatagtcgcgggagtcgtggccggaatcgtgctcatcggcttggcacttttgttgatctggaagctgctgatgatcattcatgatcggagagaatttgccaaatttgaaaaggaaaaaatgaatgctaaatgggatactggagagaacccgatatacaagtccgcggtcactaccgtcgtgaatccaaaatatgaagggaaatag

SEQ ID NO: 31929 - RNA, 2478 nt, synthetic construct
  misc_feature 1..2478: note = Description of Artificial Sequence: Synthetic coding sequence
  source 1..2478: mol_type = other RNA
atgaatcttcaacctatattttggatcggactgatcagctctgtgtgctgtgtatttgcccaaaccgatgagaataggtgtttaaaggctaatgcgaagagttgcggagaatgtattcaggcaggcccaaactgcggatggtgcacaaactccacattcctgcaagaaggaatgcctacttcagctagatgtgacgaccttgaagctctgaagaaaaagggatgtccccctgatgatattgagaacccgcggggcagtaaggatattaagaagaacaagaacgtcacaaaccgctctaagggtaccgccgagaaactgaagccggaggatattacacaaatccagccacaacagttagtactgagattaagatccggcgaaccacaaacatttactttgaagtttaaaagagccgaggattatcccatagacctgtactaccttatggatcttagctactcgatgaaagatgatttggagaatgttaaatcactgggcacagacctaatgaatgagatgaggcggattacaagcgactttaggataggctttggcagcttcgtggagaagaccgtgatgccatacatatctaccactcctgccaagctgagaaatccgtgcacctctgagcagaattgtacctcacctttttcttataagaatgtgctgagcctaaccaataagggagaagtgtttaatgagctggtgggcaagcaacggattagcggtaatttagattcacccgaggggggatttgatgccattatgcaagtagccgtgtgtggatccctgatcggctggcgtaatgtaacaagacttctagtgttctcaacagacgcaggcttccatttcgccggcgatggaaaactcggaggcattgttttgcctaacgatggacaatgtcatcttgagaacaatatgtataccatgtctcattattatgattatccatcaattgcacacttggtacaaaagctctctgagaacaacatacagaccatcttcgccgtgactgaagagtttcagcccgtttataaggaactaaagaacttgattcctaagtccgccgtcgggacactctccgccaattccagcaacgtgattcaactaattatcgacgcctataactcattatcttcagaagtgatcctggaaaacgggaagctttcagaaggcgtgactatctcatacaagtcatattgtaaaaatggggtgaatggaactggggagaacggccgtaaatgtagcaatattagcattggagacgaggttcaatttgagatctcaatcacttcaaataagtgccccaagaaggattcagatagttttaagattagaccacttggatttaccgaagaagtggaggtcattctgcaatatatctgcgaatgtgagtgccagtcagaaggaatacctgagtcccccaagtgccacgagggaaacggaactttcgagtgcggagcttgtagatgtaatgaagggcgagtgggcagacactgcgaatgtagtactgacgaggtgaattccgaggacatggatgcctattgccgaaaggaaaactctagtgaaatttgtagcaataatggagagtgtgtgtgtggccagtgcgtgtgcagaaaacgagataatacaaatgaaatctactccggcaaattctgtgagtgtgataacttcaactgtgacagaagtaacggcctgatttgtggaggtaatggcgtgtgtaagtgcagggtttgcgagtgtaatccgaactacaccgggagtgcctgtgactgctccttagacacatctacctgcgaagcaagcaatggacagatttgcaatgggcgaggaatatgtgaatgtggagtgtgtaagtgtaccgatccaaaattccagggccagacatgtgaaatgtgtcagacatgcttaggcgtgtgtgctgagcacaaggagtgcgtgcaatgcagggcttttaacaaaggtgagaagaaggatacatgcacccaggagtgttcatacttcaatattacaaaggtggagtcaagagataagttgccgcaacccgtccagcccgatcccgtctcccactgtaaggagaaagatgtggacgactgctggttttatttcacatattcagtcaacgggaacaatgaggtcatggtacacgtggtcgagaatcctgagtgtccaacaggacctgatataataccaattgtagcgggagtggtcgcagggatcgtcctgatcggcctagcactgctcctaatctggaaactgctgatgattattcacgaccgaagagaattcgcaaaattcgaaaaggaaaagatgaatgctaaatgggacacctctttatccgttgcacaacctggagtacagtggtgtgatataagttccctccaaccattgacaagtcggttccagcagttctcttgcctttccttacctagcacctgggactaccgagttaagatcctatttatccgcgtgccttag

SEQ ID NO: 31930 - RNA, 2397 nt, synthetic construct
  misc_feature 1..2397: note = Description of Artificial Sequence: Synthetic coding sequence
  source 1..2397: mol_type = other RNA
atgaacctgcagcctatcttttggatcggactgatatcttcagtgtgttgcgtcttcgcccagaccgacgagaaccgctgtcttaaggccaacgctaaatcatgcggcgaatgtatacaagctggacctaactgtggctggtgtaccaactccacattcctgcaggaaggaatgccaacatcagctaggtgtgacgatcttgaagcactcaaaaagaaaggatgcccaccagatgatatagagaacccccgggggagtaaggacatcaaaaagaacaagaacgtcactaatagatctaaaggtaccgcagagaagttgaaaccagaagatataacacaaatccagccacagcaactagtcttgaggctcaggagcggtgaaccccaaacctttacacttaaattcaaacgtgccgaagactatcccattgacctttactatctgatggacctgtcctattccatgaaagacgacctagagaacgtcaaatcactgggcacggatcttatgaacgagatgcgcaggatcacctctgacttcagaatcggattcgggtcattcgtggagaagaccgtgatgccctacatttcgaccacaccagcaaaattacgaaatccatgcacgagcgaacagaattgcaccagtccattctcctacaaaaatgtgctttcacttacaaataagggcgaggttttcaacgagctagtgggaaaacaaagaatctcaggcaatctcgactccccagaaggcggatttgacgccattatgcaggtggccgtgtgtggctcgctgattggatggcggaatgtcactcgcctcctagtcttctcaacagatgcgggttttcactttgccggagacgggaagcttgggggtatcgtgcttccgaatgatggccaatgtcatttggaaaataacatgtatacaatgtcacactactatgattacccctctatagcacacctggttcagaagctgtccgaaaacaacatccagactatcttcgcagtcactgaagagttccagcccgtttataaagaattgaagaatctgatacccaagagcgccgtgggtactttgtccgccaactcctctaacgtcattcagttgataatcgatgcttacaattcactgtcaagcgaggtgattctggaaaacggaaaactaagtgagggcgttacaatctcttataaatcttactgtaagaacggcgtcaatggaaccggcgagaatgggcgaaagtgttccaacatttctatcggcgacgaagtgcagttcgaaataagcattactagcaataagtgtcccaagaaagactcagactcttttaaaattaggcccctagggttcactgaggaagttgaggtcatactgcaatatatttgtgagtgcgaatgccagtccgaaggcattcccgaatccccaaaatgtcatgaaggaaatgggactttcgagtgcggagcatgccgctgcaatgaaggcagagttggcagacactgtgagtgctccaccgatgaagtgaatagtgaggacatggacgcctattgccgtaaggaaaactcttcagaaatttgtagtaacaatggcgagtgtgtgtgcgggcagtgtgtgtgtcgtaaaagagataacacgaatgaaatctacagcggcaaattttgcgagtgtgacaactttaactgcgatcgttcaaacggcttgatttgcgggggaaatggggtctgtaagtgcagagtgtgcgaatgcaatcctaactacacaggatctgcttgtgattgctctctcgatactagtacatgtgaggcttcaaacggtcagatatgtaacgggcgtgggatctgtgaatgcggcgtttgtaagtgtactgatcctaaattccagggccaaacatgtgaaatgtgccagacgtgtctaggggtatgtgcagaacataaggaatgtgtgcaatgtagggcattcaacaaaggtgaaaaaaaagatacatgcacgcaggaatgcagttatttcaacatcaccaaagtggaatccagagacaaattaccacagccagtccaaccagatccagtttctcattgtaaagagaaggacgtcgacgactgctggttttatttcacatatagcgtgaacggtaataacgaggtgatggtgcacgtcgtcgagaacccagaatgccctacaggacctgatatcatacctatcgtcgccggcgtcgtggccggaattgtgcttatagggttggcactgctcttgatttggaagctcttgatgattatccacgaccggagggaattcgccaaattcgagaaagaaaagatgaatgcaaaatgggacaccggagagaacccaatttataaatcagcagtaacaactgtagtgaatccaaagtacgagggtaagtag

SEQ ID NO: 31931 - RNA, 150 nt, synthetic construct; identical to SEQ ID NO: 31750
  misc_feature 1..150: note = Description of Artificial Sequence: Synthetic coding sequence
  source 1..150: mol_type = other RNA

SEQ ID NO: 31932 - RNA, 270 nt, synthetic construct; identical to SEQ ID NO: 31751
  misc_feature 1..270: note = Description of Artificial Sequence: Synthetic coding sequence
  source 1..270: mol_type = other RNA

SEQ ID NO: 31933 - RNA, 2406 nt, synthetic construct
  misc_feature 1..2406: note = Description of Artificial Sequence: Synthetic coding sequence
  source 1..2406: mol_type = other RNA
atgaacctccaaccaatcttctggatcggcctgatttcttcagtgtgttgcgtctttgcccaaacagacgagaatcggtgtctcaaagccaacgctaagagctgcggagagtgtatccaggctggtcctaattgcggatggtgcacgaactcaacctttcttcaggaaggaatgcctacttcagcccgatgtgatgacctagaagctttaaaaaagaagggctgccccccagacgacattgaaaatccccgaggatctaaggacatcaagaagaacaaaaatgtgaccaataggtcgaagggaacagccgaaaagcttaagcctgaggatataacccagattcaaccccaacagcttgtgctgcgcctgaggagcggagaaccccagaccttcaccctaaagtttaaacgcgctgaggattacccaattgatctttattatcttatggacttgagttactctatgaaggacgacctggaaaacgtcaagagcctgggaacggacctgatgaatgagatgcgccgcattacttccgacttcagaattgggttcggttcattcgtggagaaaaccgttatgccctacatcagcactacaccagctaagcttaggaacccatgcacaagtgaacagaactgtacaagcccttttagctataagaatgttctatctctgaccaacaagggagaggtctttaacgaactggtcggcaagcagcgtatctcaggcaatcttgattcccctgaaggcggatttgacgccattatgcaagtcgctgtgtgtggctcacttatcggatggcgtaatgtgacccgactgctggtgttcagtacagatgccggttttcacttcgctggcgatgggaaacttggaggaatcgtgctccctaacgacgggcagtgtcacctggagaacaatatgtacaccatgtcacactactatgactatccctctatagcccatcttgtgcagaaattgagcgaaaacaatattcagacaatcttcgctgttacagaagaatttcagcctgtgtataaggaattaaaaaaccttatccccaagagtgccgtaggaaccctcagcgcaaacagttcaaacgttattcaacttattattgatgcatataattcactctcctctgaagtcatactcgagaacggaaaactgagcgaaggagtgaccattagctataaaagctactgcaagaacggagtgaacggaacaggcgagaatggccgcaagtgctccaacataagcataggcgacgaggtacaattcgagattagcataacttctaacaagtgtcctaaaaaggactccgactctttcaaaatcagacctcttggcttcaccgaagaagtcgaagtaatactacagtacatttgcgagtgcgaatgccagagcgaaggtatcccggagtcaccaaaatgtcacgagggaaacggaacgtttgaatgtggggcctgccgttgcaatgagggacgagtgggaagacactgtgaatgtagcacagatgaagtgaattctgaagacatggatgcatactgcaggaaggaaaactctagcgaaatctgtagtaacaacggcgaatgcgtgtgtggacaatgtgtctgtagaaaaagggacaatacaaatgagatttatagcggaaaattttgcgaatgcgataactttaactgcgatcgctcaaatggcctgatctgcggcggcaatggcgtatgcaagtgcagagtttgcgaatgtaacccaaactacaccgggtccgcgtgcgactgctcactcgacaccagcacctgcgaagcttccaatggacagatctgcaacggtaggggaatctgcgagtgcggagtgtgcaaatgcacagatccaaaattccaagggcaaacctgcgagatgtgtcaaacctgcttaggagtgtgtgccgagcataaggagtgcgtacaatgtagagccttcaataaaggtgaaaagaaagacacttgtacccaagaatgctcatattttaacattaccaaggtagaaagtagggataaactaccacaacctgttcaacctgaccccgtgtctcactgtaaagaaaaggacgtggatgactgctggttttacttcacctatagcgttaatgggaacaatgaggtaatggtccacgtagtagaaaacccagagtgtccaacaggcccagatatcatccccattgtggcaggcgtggtggccggtatagttctgatcggcttggcccttttacttatttggaaacttctgatgattatccacgaccgccgggaatttgcaaagtttgagaaagagaagatgaatgctaagtgggacactcaagaaaatcctatctataagtccccgattaacaatttcaaaaaccccaattacggaagaaaagcaggactgtag

SEQ ID NO: 31934 - RNA, 411 nt, synthetic construct
  misc_feature 1..411: note = Description of Artificial Sequence: Synthetic coding sequence
  source 1..411: mol_type = other RNA
atgaacctgcagccgatcttctggataggactgattagctctgtgtgctgtgtcttcgcacagactgatgaaaaccgatgtctaaaggcgaacgcaaagtcctgtggggagtgtattcaggccgggccaaactgtgggtggtgcactaactccacttttctccaggaaggaatgcctaccagcgcgagatgcgacgacctagaggctctgaaaaaaaaaggctgcccccccgacgatattgaaaatccacgcggtagcaaagacattaagaaaaataagaacgttacgaatcgatcaaaaggaacagctgaaaaactgaagcccgaagatatcacccagattcaaccccaacagcttgtgctgagactgagaagtggcgaaccacagacctttactctgaaattcaaatag

SEQ ID NO: 31935 - RNA, 378 nt, synthetic construct
  misc_feature 1..378: note = Description of Artificial Sequence: Synthetic coding sequence
  source 1..378: mol_type = other RNA
atgaacctacaaccaatcttttggataggactaatctccagcgtgtgctgtgtgttcgcccagaccgatgagaacaggtgccttaaagccaatgcaaagagctgcggagagtgcattcaagctggacccaactgtgggtggtgtactaattccactttcctgcaggaaggcatgcccactagcgctagatgcgacgatttagaagcacttaagaaaaaaggttgccctcccgatgacatcgagaaccctagaggctccaaagacatcaaaaaaaacaagaacgtgacgaacaggtcgaagggtactgcggaaaaacttaaacccgaggacattacccagatccagccccaacagcttgtgttaagactccggtcatag

SEQ ID NO: 31936 - RNA, 492 nt, synthetic construct
  misc_feature 1..492: note = Description of Artificial Sequence: Synthetic coding sequence
  source 1..492: mol_type = other RNA
atgaatctacagccgatattctggattggcctcataagtagcgtgtgctgcgtgttcgcccagacggatgagaataggtgcttaaaagccaatgctaagagttgtggggaatgcattcaggctgggcccaactgtggatggtgtaccaactctaccttcttgcaggagggtatgcccaccagtgcccgatgtgatgatttagaagcattgaagaaaaaaggatgcccgcccgatgacatagaaaaccccaggggatccaaagacattaaaaagaacaaaaacgtgacaaatcggagcaagggaactgcagaaaaacttaagcctgaggatataacccaaattcagccccaacaactagtcctacgcctgcgctcgggagaaccccaaacatttacactcaaattcaagcgagctgaagattatcccattgatctctactacctgatggatctgagctattctatgaaggatgatttagagaacgtgaagtag

SEQ ID NO: 31937 - RNA, 459 nt, synthetic construct
  misc_feature 1..459: note = Description of Artificial Sequence: Synthetic coding sequence
  source 1..459: mol_type = other RNA
atgaatctgcaaccaatattctggattggacttatttccagcgtgtgctgtgtcttcgcgcaaaccgacgaaaacaggtgcctgaaagccaatgccaagtcgtgtggagagtgcatccaggccggccccaattgtggatggtgcacaaacagcgtgtccaagaccttcctgcaagaagggatgccaacctcagctagatgtgacgaccttgaagcactcaaaaagaaaggatgcccgcccgacgacatcgagaacccgcgtgggtcaaaagacattaaaaagaataaaaatgttaccaatcgctccaaaggtaccgcagagaaactaaagccggaggacattacacaaattcagcctcagcagcttgtgttacgactccgcagcggcgagccccagacctttaccctcaaattcaaacgcgccgaggactatcccatagatctgtactatttaatgtag

SEQ ID NO: 31938 - RNA, 315 nt, synthetic construct
  misc_feature 1..315: note = Description of Artificial Sequence: Synthetic coding sequence
  source 1..315: mol_type = other RNA
atgaaccttcagcccattttctggatcggactgatttcaagcgtgtgctgtgtgtttgcccaaaccgacgaaaatcgctgtcttaaagcaaacgctaagagctgtggagagtgcatccaagccgggcctaattgtgggtggtgtactaattcgactttccttcaagagggcatgcccacaagtgcaagatgtgacgatttggaggccctgaaaaaaaaggggtgccccccagacgatattgaaaatccacgggggtccaaagatatcaaaaagaacaagaatgtgacaaaccgctcaaagggcacagcggaatag

SEQ ID NO: 31939 - RNA, 432 nt, synthetic construct
  misc_feature 1..432: note = Description of Artificial Sequence: Synthetic coding sequence
  source 1..432: mol_type = other RNA
atgaacctgcagccaatcttttggatcggattgatctctagtgtgtgttgcgtctttgcccagacagatgagaatcggtgcctgaaagcgaacgctaagagctgtggcgaatgtatacaggcaggacccaactgcggatggtgtacgaattccacattcctgcaagaaggcatgcctacaagtgctcggtgcgacgatctagaggccctcaagaagaagggatgcccgcctgacgatatcgagaatccccgcggatccaaggacatcaagaaaaacaagaacgttaccaatcgatcgaagggcacggcagagaaactaaaaccggaggatatcacacaaattcagcctcaacagctagtcctgagactcaggtcaggagaacctcaaacatttaccctgaaatttaaacgcgctgaggattatccaatctag

SEQ ID NO: 31940 - RNA, 570 nt, synthetic construct
  misc_feature 1..570: note = Description of Artificial Sequence: Synthetic coding sequence
  source 1..570: mol_type = other RNA
atggcttctccatttgcccttttaatggtcctcgtcgttctctcgtgtaagtcttcatgttctcttggctgtgacctgccagagacccacagtctcgacaatcgacgtaccctgatgctgctggctcagatgagtagaatttcccccagctcctgcctgatggaccgccacgattttggattccctcaggaagaattcgacggtaatcaattccagaaagctccagcaataagcgtcctccacgagctgatccagcagatctttaacctatttactactaaggattccagcgcagcttgggacgaagatcttttagacaaattctgcacagaactgtatcagcagcttaatgatttggaagcatgtgtcatgcaagaagaaagagtaggagagacccccctgatgaacgccgactcaatcctggccgtgaaaaaatatttccggcggatcaccctctacttaactgagaaaaagtactcaccctgtgcctgggaagtcgttcgggccgagatcatgcgctccttatctctatctacaaatctccaggaacgcctccggcgcaaggaatag

SEQ ID NO: 31941 - RNA, 762 nt, synthetic construct
  misc_feature 1..762: note = Description of Artificial Sequence: Synthetic coding sequence
  source 1..762: mol_type = other RNA
atgtggcctcctggaagcgcgtcccaaccacctccttcccccgcagccgctaccggactgcaccccgcggctcgaccagtgtccctgcaatgtcgccttagcatgtgccctgctcgatccctcctcctcgttgcaacattggtactgttggaccacctgtccctggcccgaaatttgcctgttgcgactcccgatcctggtatgttcccatgtcttcaccacagtcagaacctgctgcgcgctgtctcgaacatgctccaaaaagccaggcaaactctcgaattttatccctgtacaagcgaagaaatcgaccacgaggacataactaaagataaaacaagtacggtggaagcttgcttacctcttgagctgaccaagaatgagtcctgcttgaacagccgcgagacgtcttttattacaaacggctcatgcttagcgtcacgaaaaactagcttcatgatggctctgtgcctgtcatcaatttatgaggatctcaaaatgtaccaggtggaatttaaaacgatgaatgcgaaactgttaatggacccaaagcgccagattttccttgatcagaatatgctggcagtgatcgacgaactgatgcaggcgcttaatttcaacagcgaaaccgtcccgcagaaatcatccctagaagagccagatttttacaaaactaaaattaagctgtgtatcctcctccacgcctttcggatacgggccgtaactattgatcgagttatgtcatacctcaacgcgagctag

SEQ ID NO: 31942 - RNA, 720 nt, synthetic construct
  misc_feature 1..720: note = Description of Artificial Sequence: Synthetic coding sequence
  source 1..720: mol_type = other RNA
atgtggccccctggaagcgcttcccagccaccaccatctccggctgccgccactggattgcaccctgccgctcgaccagtttcgctccaatgtcgcctgtccatgtgtcctgctcgaagcctcctgctagtggcaactctggtgctgctcgatcacctgtctcttgcccgtaatctgccagtggctactcctgatcccggcatgtttccctgcctccaccatagccaaaacttgcttcgcgcagtgtccaatatgctccagaaggctcgacagaccctcgagttctatccctgtacttccgaagaaatcgatcatgaagacatcaccaaggacaaaaccagtaccgtagaagcctgcttaccattagaattaacaaagaatgggtcatgtctcgcctccagaaagacttcattcatgatggcactttgcctgtccagcatctatgaggatctgaagatgtaccaggtggaattcaagactatgaacgcaaagttgctgatggatcctaaaagacagatcttcttggaccagaacatgctcgcagtgatagatgaactgatgcaagccctgaactttaactccgaaaccgtgcctcagaagtcttcccttgaagagccagatttctataagaccaagattaaactatgtatcctgctgcacgccttccggattagagccgtcactattgaccgcgtgatgagctaccttaacgcctcctag

SEQ ID NO: 31943 - RNA, 648 nt, synthetic construct
  misc_feature 1..648: note = Description of Artificial Sequence: Synthetic coding sequence
  source 1..648: mol_type = other RNA
atgtggccacccgggagcgcgagtcagccacccccctccccagcagctgcaactggcctccaccccgctgcccgcccagtgtccctgcagtgcagactttcaatgtgtcctgcccgatccctcttgctggtcgctaccctggtactgcttgatcatctgtccctagcccgtaatcttcctgtcgccacaccggatcccggaatgtttccttgcctgcatcacagtcagaaccttctgcgtgccgtaagcaatatgttgcagaaaaacgagtcttgtcttaacagtagagagacttcttttataacgaacggtagctgcctcgcctctcgcaagacatcattcatgatggccctgtgccttagttcaatctacgaggaccttaagatgtatcaggtagaatttaaaacgatgaacgccaaactgttaatggatccgaagcgtcagatttttctggaccagaacatgttagcggttattgatgagctcatgcaagccctaaatttcaacagcgaaacagtgcctcaaaaaagcagcctagaggagccagatttctataaaacaaaaatcaaattatgcatcctgctacacgctttcagaatcagagctgtaaccatcgatagagtcatgagttatctgaacgcgtcctag

SEQ ID NO: 31944 - RNA, 582 nt, synthetic construct
  misc_feature 1..582: note = Description of Artificial Sequence: Synthetic coding sequence
  source 1..582: mol_type = other RNA
atggcggcagaacccgtggaagacaactgcatcaactttgtggcaatgaagtttattgataacacactctatttcatagctgaagacgacgagaacctggagagcgactacttcggcaagcttgaatctaaactgtctgtgattaggaacctgaatgaccaagtgcttttcatagatcaaggaaataggcccttattcgaggatatgactgattcagactgccgcgataatgctccacgaaccatcttcatcataagcatgtataaagactctcagccccgaggtatggctgtgactatctcagtcaaatgtgagaagatttcgaccctcagctgtgaaaataagataatcagtttcaaggaaatgaatccgcctgacaatattaaagacaccaagagtgatatcatctttttccagcgaagcgtaccaggccacgacaataaaatgcaattcgagagctctagttatgagggatactttctcgcctgtgaaaaagaacgggatttatttaaactcattcttaaaaaagaagacgaactcggggatcggtctatcatgtttaccgtgcagaacgaggactag

SEQ ID NO: 31945 - RNA, 570 nt, synthetic construct
  misc_feature 1..570: note = Description of Artificial Sequence: Synthetic coding sequence
  source 1..570: mol_type = other RNA
atggctgccgaacccgtggaggataactgtataaactttgtggcaatgaaattcatcgacaatacgctgtattttatcgaaaacctcgagagcgactattttggaaaactggagtcaaaactatccgtaatcaggaacttgaatgaccaggtgctgttcattgaccagggaaatcggcccttattcgaagacatgacagattccgactgtcgagataacgccccacgcactatctttatcatcagtatgtataaagattctcagcccagaggcatggccgttacaatttccgtcaagtgcgagaagatttcaacccttagctgcgagaataaaataatttctttcaaagaaatgaaccccccagacaacataaaggacactaaatccgatattatattttttcagaggagcgttcccggtcacgataataaaatgcagttcgaatcatctagttacgagggttactttctagcgtgtgagaaggaacgcgacttgttcaaactgattttgaagaaagaggacgagctaggcgacagatccatcatgttcacagtccaaaacgaagactag

SEQ ID NO: 31946 - RNA, 582 nt, synthetic construct
  misc_feature 1..582: note = Description of Artificial Sequence: Synthetic coding sequence
  source 1..582: mol_type = other RNA
atggcagccgagcccgtagaagacaactgtattaattttgtagccatgaaatttattgataacactttgtattttattgccgaagatgacgagaatttggaaagtgactacttcggaaagttagaaagcaagctgagtgtgatccgcaatctcaacgaccaggtcttattcatcgaccagggcaatcgtccattattcgaagatatgaccgactcggactgtagggacaacgcacctcgaactattttcataatctcaatgtacaaagattcccagccccgagggatggctgtaactatcagtgtgaagtgtgaaaagatttctaccctgtcttgtgagaataaaattattagctttaaagagatgaatccacccgacaatattaaagatactaaaagcgacataattttctttcagcgaagcgtgcccggccacgataataaaatgcagttcgaaagcagcagctacgaaggatactttcttgcctgcgaaaaagaacgtgatctgttcaagttgattctaaagaaggaggacgagctgggcgaccgatccatcatgttcacggtgcaaaatgaggactag

SEQ ID NO: 31947 - RNA, 639 nt, synthetic construct
  misc_feature 1..639: note = Description of Artificial Sequence: Synthetic coding sequence
  source 1..639: mol_type = other RNA
atgaactcgttttctacttccgcctttggacccgtggctttcagtctgggcctcctgcttgtactgcccgccgcttttcccgcaccggtcccaccaggcgaagattcaaaggacgtggcagccccacatagacagcccctaacctcaagcgagaggattgataagcagattaggtacatcctggatggaatttctgcattgagaaaagagacttgtaataagagtaatatgtgtgaatcctctaaagaagccctcgccgagaataacttaaatctccctaagatggcagagaaagatggatgctttcagtcgggatttaatgaagaaacctgtctggtaaagatcatcactgggctgttggagttcgaagtttacttagagtatttacagaaccgtttcgaatcttcagaggaacaggccagagccgtgcagatgtccacgaaagtgcttattcaatttctgcagaaaaaagccaaaaacctcgacgcaatcactacacccgatcctacaacaaacgcatccctcctgacaaagctccaggcgcagaaccagtggctgcaagatatgactactcatctcatcttacgctcttttaaagaatttctccaatcttccttacgagccttgcgtcagatgtag

SEQ ID NO: 31948 - RNA, 369 nt, synthetic construct
  misc_feature 1..369: note = Description of Artificial Sequence: Synthetic coding sequence
  source 1..369: mol_type = other RNA
atgtgtgaaagcagcaaggaggccctggcggaaaataacttaaacctccccaagatggccgagaaggatggctgcttccagtccggctttaacgaagaaacatgtttggtgaaaatcattacaggattgctcgaatttgaagtttacctcgagtacctgcagaatcgctttgagtcctccgaggagcaggcccgggcagtgcagatgagtacaaaggttttaattcagtttttacagaagaaggtcggagtctcatccttcccccaactaggcgttggtgaagaccgacttaaagactccgtcttggacaactcagggatgcagtgccactttcaaaagcgcagattacacgtgaataagcgagtttag

SEQ ID NO: 31949 - RNA, 639 nt, synthetic construct
  misc_feature 1..639: note = Description of Artificial Sequence: Synthetic coding sequence
  source 1..639: mol_type = other RNA
atgaattcattttctacctcagcttttggaccggtggctttcagcctcggcttactgctagtgctcccagctgctttcccggcacccgtgcctcctggagaggactcaaaggacgtcgctgcaccccacagacaacctctcacttcaagcgagcgcatagacaaacagatcagatacattctggatggtatcagcgcattgagaaaagaaacatgcaacaagtcaaatatgtgtgagagctctaaagaagctctagccgaaaataacctgaatctccctaagatggccgaaaaggacggttgcttccagtccggatttaacgaggagacgtgtcttgtcaagatcattactggattactcgaattcgaagtttatttagaatatttgcaaaaccgattcgagtcgtctgaagaacaagctcgggcagtacagatgagcactaaagttttaatacagttccttcaaaaaaaggctaagaacctcgacgccattacaactcccgaccctacaacgaatgcaagcctcctgacgaaactgcaagcacagaatcagtggctacaagacatgactacccatctgatcttaaggagttttaaagagttcctccaatctagcctacgcgcactcagacaaatgtag

SEQ ID NO: 31950 - RNA, 597 nt, synthetic construct
  misc_feature 1..597: note = Description of Artificial Sequence: Synthetic coding sequence
  source 1..597: mol_type = other RNA
atgaatagcttttctacttctgcctttgggccagtggcttttagtttgggtctactgttagtgttacctgccgctttcccagcccctgtacctcccggtgaggatagcaaagatgtggccgcacctcataggcaacctctaacttcctctgagagaattgacaagcaaataagatacatcctagacggaatcagcgcgctgagaaaagaaacctgtaacaagtcgaacatgtgtgagagcagcaaagaagctctggctgagaataatctgaatttacccaaaatggcggagaaagatggatgtttccaaagcggcttcaatgaagaaacttgtttggtcaaaataatcactggattgctcgagttcgaagtatacctggaatatctgcaaaatcgattcgaatcaagcgaggagcaggcaagggccgtccagatgagcacaaaagtgttgatccagttcctgcagaagaaggtgggcgtcagctcttttccccaacttggcgtgggtgaggaccgcctgaaagatagcgttctggataacagcggcatgcaatgccacttccaaaagcgccgactgcacgtaaataaaagagtttag

SEQ ID NO: 31951 - RNA, 759 nt, synthetic construct
  misc_feature 1..759: note = Description of Artificial Sequence: Synthetic coding sequence
  source 1..759: mol_type = other RNA
atgaactctttctccaccagcaaatgcagaaaatctcttgctctggaactgcctgccgcggttgagccatgcgtacgggaaggttgcgtcgcacaagggggtctagcgggtgggcaacaacagagacaggccccttcatgcgctgtaagcagtcctctgcgctctctaccttccggaaccggcgcatttggtcctgtagcctttagcctcggcctactgctggttttgcccgccgcctttcccgccccagtcccacctggagaagattctaaagatgtcgcagcccctcaccgacagcccctgacctcttcagagaggatcgacaagcagattcgctatatcctggacggaatctcagcactacgaaaagaaacgtgtaataaatccaacatgtgcgagagctcaaaggaggccttagccgaaaataatctgaacctaccaaaaatggctgagaaggacggatgtttccaatccggctttaatgaagaaacatgtctggtgaagataatcacagggctgctagaattcgaagtgtatctggagtaccttcaaaaccgatttgaatcctcagaagaacaggcccgagcagtacagatgagcacaaaggtgctgattcaattcctacagaagaaggtcggtgtgagttctttcccccagctcggcgttggcgaggatagactgaaagacagcgtgttggataatagtggaatgcaatgtcacttccaaaagcggcgactgcatgttaataaacgggtgtag

SEQ ID NO: 31952 - RNA, 459 nt, synthetic construct
  misc_feature 1..459: note = Description of Artificial Sequence: Synthetic coding sequence
  source 1..459: mol_type = other RNA
atgaattcattctcaactagcgcgtttggcccagtggccttcagcctcggcctgttattagtactgcccgcagctttccccgcccctgttcctccaggagaggactccaaggatgtcgcagccccccatcgtcagcccctgacttctagtgaaagaattgataagcagatccggtatattctggatggcatatccgcccttagaaaagagacctgtaataagagtaatatgtgcgaaagtagcaaggaagccctcgcagagaacaatttgaacctcccaaagatggctgagaaagatggttgttttcagtctggcttcaatgaggagacctgcctagtgaaaattattaccggccttcttgagttcgaagtttaccttgaatatctacaaaaccgattcgagtcaagtgaagaacaggctagggctgtacagatgtcaaccaaggtgcttatacaatag

SEQ ID NO: 31953 - RNA, 1419 nt, synthetic construct
  misc_feature 1..1419: note = Description of Artificial Sequence: Synthetic coding sequence
  source 1..1419: mol_type = other RNA
atgacaacttgctctagacagtttacaagtagctcttctatgaagggatcatgtggcataggaggcgggattggtggagggtctagtcggatcagctccgtccttgcaggagggagttgtcgcgcacctagtacttacggaggcggtctgtccgtgagcagcagtagattcagtagcgggggggcctgtggactcggaggcggatacggggggggtttttcaagcagctcaagctcattcgggagcggctttgggggggggtatggaggaggcctgggcgccgggctgggtggaggatttgggggaggctttgccggcggtgacggtttactggtcggctccgaaaaagtcaccatgcaaaatctaaatgatcgacttgcaagttacctagacaaggtacgcgcacttgaagaggcgaacgcggacttagaggtcaagattagggactggtatcagcggcaaagaccagcggaaattaaggattactcaccttattttaaaacaatagaagatcttaggaacaaaattctgacagccacggtagataacgctaacgtgctgctccagattgacaatgcaagactggcagccgacgacttccgcacgaagtatgaaacagaacttaacctgcggatgtccgttgaggctgatataaacggccttagacgcgtacttgatgagctgacattagcacgcgcagatttggagatgcagattgaaagcttgaaggaagaactggcctacctgaagaagaatcacgaggaggagatgaacgcgctgaggggccaggtggggggggatgtgaacgtggagatggacgccgctcctggggtcgacctgagcaggattctgaacgagatgagagaccaatacgagaaaatggctgaaaaaaacaggaaggacgccgaagaatggttctttactaagacggaggaactgaaccgggaagttgcgaccaactcagaactagttcagagcggaaagagcgagatctcagaacttcgccgcacaatgcagaatttagaaatcgagctgcagtcccagctgagtatgaaagcatcacttgaaaattctttggaggagaccaagggtagatactgtatgcaactggcacaaatccaggagatgatcgggagcgtcgaggagcaactggctcagcttagatgtgagatggaacaacagaaccaggagtataagatcctcttagatgttaagacgaggctcgaacaagaaatcgccacctacagacgcctcctcgaaggggaggacgcgcacctttctagcagccagttttcctcaggttcccagagctcaagagatgttactagttcttccagacaaattagaacaaaagtcatggacgttcacgacgggaaggtagtctcaacgcacgagcaggtgctgcgaactaaaaattag

SEQ ID NO: 31954 - RNA, 1416 nt, synthetic construct
  misc_feature 1..1416: note = Description of Artificial Sequence: Synthetic coding sequence
  source 1..1416: mol_type = other RNA
atgcaccctggtgtacttgccgccttcctgttcctctcctggactcattgccgggcactacctttgccttctggaggtgacgaagatgacctatccgaagaagatctgcagttcgctgagcggtacttaagatcctattaccaccccaccaatctcgccggtatcctgaaggagaacgccgcctcgtctatgacggaacgtctacgcgaaatgcaatcgttcttcgggctcgaagtaaccggtaagctggacgacaatactctcgatgtcatgaaaaagcctaggtgtggggtaccagacgtaggcgaatataacgtgtttccaagaacccttaagtggtccaagatgaatttaacctaccggatagtcaattatactcctgatatgacgcactcggaagtcgagaaagccttcaaaaaagcattcaaagtatggagtgacgtcacccctcttaacttcacccgcttacatgatggaatagctgatattatgatttcttttggaataaaggaacatggggatttttatccattcgacggaccctctgggctactagctcatgcgtttcccccagggcccaactacggaggtgatgcgcacttcgatgatgacgagacctggacaagttcatcaaagggatataatctgtttttagttgcggcccatgagttcggccactcactcggacttgaccattctaaggatcccggcgctttgatgtttcccatctatacatacacaggtaagtcccatttcatgttgcctgatgatgacgtacagggcattcaaagtctgtatggtcccggagacgaagatcccaaccccaaacaccccaagaccccggacaaatgtgacccaagcttgtccttagacgccattacaagcctgcgcggcgagactatgatcttcaaggaccgcttcttctggcggctgcacccccaacaggtggacgctgaattgttccttacaaagtccttttggccagaactaccaaaccggattgacgcagcttatgaacaccctagccatgatcttatctttatattcagaggaaggaaattctgggcgcttaatggctatgatatccttgagggctacccaaaaaaaataagcgagctggggctccccaaagaggtcaagaaaatttcagctgcggtacattttgaggatactggcaagacactcctgtttagtggaaatcaagtctggagatatgacgatacaaatcatataatggataaggattatccccgcctgatcgaggaagactttccagggattggggataaggttgatgcagtttatgagaaaaatggatacatttacttttttaacgggccaatacaattcgagtacagcatatggtctaatagaatcgtgagagtgatgcctgctaattctatcctgtggtgttag

SEQ ID NO: 31955 - RNA, 1470 nt, synthetic construct
  misc_feature 1..1470: note = Description of Artificial Sequence: Synthetic coding sequence
  source 1..1470: mol_type = other RNA
atgcatcccggcgtgcttgctgccttccttttcctaagctggactcattgccgcgctcttccgttaccatctgggggcgatgaagacgacctaagtgaggaagatctgcaattcgccgaaagatatctcaggagttactaccacccaaccaacctagcagggatactgaaggagaatgccgcctcaagtatgaccgagagactgagagagatgcagtctttctttggactagaagtgactggtaagttagatgacaatacgttggacgtgatgaagaaaccacgctgtggcgtacccgatgtgggtgagtataacgtgtttcccagaacactcaaatggtctaaaatgaatctcacctataggatagtgaattataccccagacatgacacattccgaggttgaaaaggcatttaagaaagcatttaaagtttggagtgacgtcaccccactcaacttcaccagactgcacgacggcatcgcagatataatgatttcttttggaataaaggaacatggcgatttttacccattcgacggccctagtggcttgctcgctcatgcctttcctcctggcccgaattacggcggcgacgctcattttgacgacgacgaaacctggactagtagctcaaaggggtataacctgtttcttgtggctgcacacgaatttgggcacagtctcggtttggaccattccaaggatcctggcgcattaatgtttcctatttacacgtataccgggaaaagccattttatgttaccagatgacgatgtgcaaggtattcagagtctctatggacccggcgacgaagatcctaatcctaaacatcccaaaacaccagataaatgtgatccctcgctttctcttgacgccatcaccagcctcagaggcgaaacaatgatcttcaaggacagatttttttggcgtctccatccacaacaggtcgacgccgaactcttcctgacaaaaagcttctggcccgaactgcccaacagaattgacgccgcttatgagcatccttcacatgatctcattttcattttccgaggcagaaagttctgggcactcaacggttatgacatcctcgagggttacccgaagaagatttccgagcttggactcccaaaagaggtaaaaaagatatctgccgcagtacattttgaagatactggcaagactctcctgttctctggtaatcaagtttggcgctatgacgacaccaaccatatcatggataaagactacccacggctcatcgaagaggatttccctggaatcggagataaagtggacgccgtctatgaaaagaacgaaagccactccgtgacacaggccggagtgcattgccgaaatctgagctcactgcagccccctccaccaggatttaaacgcttcagctgtctgtcgctctggagcagctgggactaccgcttgtacctgttttttcagcggacccatacagtttag

SEQ ID NO: 31956 - RNA, 1152 nt, synthetic construct
  misc_feature 1..1152: note = Description of Artificial Sequence: Synthetic coding sequence
  source 1..1152: mol_type = other RNA
atgcacccaggcgtgttggccgccttcctgtttctgtcttggacacattgtcgtgccctacctctcccctccggcggcgatgaggatgacctgagtgaggaggatctacagttcgcagaaaggtacttaagatcatactatcatcctacgaacctcgcgggaatcttgaaagagaatgctgcctcctccatgacggagcgactgcgcgagatgcagagttttttcggcctcgaagtcaccggaaaactggacgataacacattggacgtaatgaaaaaacctagatgcggcgttccagacgtcggcgagtacaatgtttttcctagaacccttaaatggagtaagatgaaccttacttacagaattgtcaactacacacccgatatgacacactcagaagtggaaaaagctttcaaaaaggcctttaaagtctggtcagacgtaacccctttaaacttcacccggctgcacgatggtattgcggatatcatgataagcttcggtatcaaggaacacggagatttttatcctttcgatggccctagcggactgctcgcccacgccttccctcctggtcccaattacgggggcgatgcacatttcgacgatgacgagacttggacatcctcttcaaaaggctataacctgttcctggtagctgcacacgaatttggacactcactcggactagaccattcaaaagaccctggcgctctaatgtttcccatatatacctatacaggcaaaagtcattttatgctgccagacgacgatgtccaggggattcagtcactatatgggccaggggatgaagatccaaatccaaaacaccctaagactccggacaagtgtgacccttcactctccctcgacgccatcacgagtcttagaggagaaaccatgatattcaaagacaggtttttttggcggctgcaccctcagcaagtggatgctgagctcttcctaactaaaagtttttggccagagctgcctaatagaattgacgccgcgtacgaacaccctagccatgatctgatctttattttcaggggaagaaaattctgggcacttaacggctacgatatactggagggataccctaagaagatcagcgaactcggactaccgaaagaggttaataaactgcagtag

SEQ ID NO: 31957 - RNA, 1743 nt, synthetic construct
  misc_feature 1..1743: note = Description of Artificial Sequence: Synthetic coding sequence
  source 1..1743: mol_type = other RNA
atgccaggatggccatggggcctgttactaacagcaggcacactgttcgcagctctttcaccaggtcctcctgcgcctgccgatccttgccacgatgagggtggagcccctagaggatgtgtgccaggcctggtcaacgccgctctgggccgcgaggtcctcgcctcttccacttgtgggcgcccagccacacgtgcttgcgacgcatctgatccaagacgtgcacattcccccgcactcctgacttcaccagggggcacagcgtcccccctgtgttggaggtctgaaagcttgccacgtgctccgttgaacgtcacgttgaccgtacctttgggcaaggcctttgaactcgttttcgtatcgttgcgcttttgctcagcccctccggcgtcagttgctctgctaaagtcccaggatcatggaagatcttgggcccctctaggatttttttcgtcccattgcgacttagactatggccgtctccccgcaccagcaaatggccccgccggcccagggcccgaagctctgtgttttccggctcccctggcccagcccgacggttccggactcctcgccttctcgatgcaggacagctcgcccccaggcctcgaccttgactcgagtcccgtattacaagactgggtaacagcgacagatgtgcgtgtagtcctgacgcggccaagtacagctggcgacccaagggatatggaggcagtggtgccctacagttatgctgctaccgacttgcaagtggggggtagatgcaaatgcaacggccacgctagcagatgtctcctcgatacccaagggcatctgatatgtgactgccgccatgggacggagggacccgattgtggcaggtgtaagcccttctactgcgaccgaccttggcaacgtgcaaccgcaagggagagccatgcatgcttggcctgctcttgcaacggccacgctcggcgctgccgcttcaacatggagctttatcgattaagtggaaggaggtccggcggggtgtgcctcaactgcagacacaatacggctggccggcattgccactattgtagagaaggattctatcgcgatcctgggagagctttgtccgaccgtcgcgcttgccgcgcttgtgattgtcacccagtaggggccgcaggcaaaacatgcaatcagaccaccggtcagtgtccatgtaaggatggcgtgactggcctgacttgtaatcggtgcgccccgggatttcagcaaagccgatccccagtggccccgtgtgtgaagaccccaataccaggaccaaccgaagacagttcgcccgtccaaccccaagattgtgatagccattgtaagcccgcacggggttcttatcgtatctcactgaagaaattttgcaagaaagactacgccgtccaggtcgcagtgggggctcgtggggaagctcggggtgcctggacacgctttcctgtagccgtgctggccgtctttcgttcaggcgaggaacgtgcccggaggggctcctcagctctgtgggttccagctggcgatgccgcatgtgggtgcccacgacttctgcccggaagaaggtacctgttgttagggggaggcccgggggctgctgctggtggggctggagggagggggcccggtctaatcgcagccaggggttcattggtcctgccgtggcgcgatgcatggacccggcggcttagaaggcttcaaaggcgtgaaagaaggggacggtgtagcgcagcctag

SEQ ID NO: 31958 - RNA, 651 nt, synthetic construct
  misc_feature 1..651: note = Description of Artificial Sequence: Synthetic coding sequence
  source 1..651: mol_type = other RNA
atgcctgggaacctgatgagtcaaacgtcaagagcggtgagtatatggaagttccccgccaaattgggtaaaactcacggccatcgcgccctagaggcgactggtatgatgctgcgtgtgttggtgggagccgttttgccagcaatgcttttggcagctccaccccccataaataaactggcactatttcccgataaatcagcgtggtgcgaggccaagaatattacacagatcgtggggcatagcggatgtgaagcaaaaagtattcaaaatcgcgcctgcttgggccaatgcttcagttatagtgttcccaatacctttccccagagcaccgaatccctcgtgcactgtgacagttgcatgccggcacaatcaatgtgggaaattgtgaccctcgagtgtcccggccatgaagaagtgcccagagtggacaagctcgttgagaagattctacactgctcttgtcaggcttgtggcaaagaaccatcacacgaagggttatctgtctatgtgcaaggtgaagacgggcccggctctcagcccggcactcatccccacccacacccccacccccaccctggtggtcagacccctgaacctgaggacccccctggtgcaccacataccgaagaagaaggcgccgaagactag

SEQ ID NO: 31959 - RNA, 546 nt, synthetic construct
  misc_feature 1..546: note = Description of Artificial Sequence: Synthetic coding sequence
  source 1..546: mol_type = other RNA
atgatgctccgggtcctagtgggcgcagttctcccagccatgcttcttgcagccccaccccccataaataaactagccctcttcccagacaagtcagcttggtgcgaggcaaagaacatcactcaaatagttggccactctgggtgcgaagccaagagcatccaaaacagagcttgcctcggccagtgcttttcatattctgttcctaatactttcccacagtcaacagagtcactcgttcattgtgacagttgtatgcccgcacagtcgatgtgggaaatcgtcaccctggaatgccctggacatgaagaggtcccacgtgttgacaaactcgtcgaaaagatattgcattgctcctgccaagcgtgcggcaaggaacccagtcacgagggcttgagtgtatacgtgcagggagaagatggccccggttctcagccagggacccacccacatcctcatccccacccacacccaggcggacaaacccctgagcccgaagaccctcccggagctccccataccgaagaagaaggcgcagaagactag

SEQ ID NO: 31960 - RNA, 351 nt, synthetic construct
  misc_feature 1..351: note = Description of Artificial Sequence: Synthetic coding sequence
  source 1..351: mol_type = other RNA
atgatgttaagagtcctagtgggcgcagtcttacccgcaatgttactcgctgctccaccccccatcaataagcttgctttgttccctgataaatccgcctggtgcgaagccaaaaacatcacccaaattgtcggacactctggttgcgaagctaagagcattcaaaatagagcatgtctgggccagtgcttctcttactccgtaccaaacacctttccacaatcaactgaatcgctggtacattgcgattcttgcatgcccgcccaaagtatgtgggaaattgtcaccctggagtgtccagggcacgaagaggtaccgagagtggataagttggtggagaagatcctttag

SEQ ID NO: 31961 - RNA, 492 nt, synthetic construct
  misc_feature 1..492: note = Description of Artificial Sequence: Synthetic coding sequence
  source 1..492: mol_type = other RNA
atgttacgggtattagtcggggccgtcctgcctgccatgctcctggccgccccacctcctataaataagctcgcacttttccctgataagagtgcttggtgtgaagctaaaaatatcacacaaatagtaggccactccggctgtgaggcaaaatccatccagaacagggcttgtctcggccagtgtttctcttacagcgtccctaatacgttccctcagtcaaccgagtctctggtgcactgtgactcatgcatgccagcgcaatccatgtgggaaattgttaccctagagtgtcctggtcacgaggaggtgcctagagtggacaaactggttgagaagattcttcactgttcctgccaggcttgcggaaaggaaccaagtcacgaaggattgtccgtatatgtgcaaggtgaagatggacctgggagccaacccggaactcaccctcatccacatccccacccccatccaggaggacaaacgcccgaatag

SEQ ID NO: 31962 - RNA, 354 nt, synthetic construct
  misc_feature 1..354: note = Description of Artificial Sequence: Synthetic coding sequence
  source 1..354: mol_type = other RNA
atgatgctgagagttctcgtgggcgcggttttgcccgctatgctgctcgctgcccccccccctattaacaaacttgcacttttccccgataaatctgcgtggtgcgaagctaagaatattacacaaattgtaggccacagtgggtgtgaagctaaatccatccaaaatcgtgcatgtttgggccaatgcttcagctatagtgttccaaacactttcccacaatctaccgaatccctcgtgcattgtgactcctgtatgcccgcacaatccatgtgggaaatcgtaacactggagtgtcccggccacgaagaagttccgagggtggacaaactggttgaaaagattttgcattag

SEQ ID NO: 31963 - RNA, 330 nt, synthetic construct
  misc_feature 1..330: note = Description of Artificial Sequence: Synthetic coding sequence
  source 1..330: mol_type = other RNA
atgatgctcagagttctagttggcgctgtcctccctgccatgctgctcgccgctccccctccaattaacaaactcgccctcttccctgataaatcagcatggtgtgaggcaaagaacatcacccagatcgttggccactccgggtgtgaagccaagtcaatccaaaaccgtgcctgccttgggcagtgcttttcatactccgtgcctaatacgttcccacagtcgaccgaatctttagtgcattgcgactcttgcatgcctgcacaaagtatgtgggagatcgttactcttgaatgccctggacatgaagaagtaccacgcgtcgactag

SEQ ID NO: 31964 - RNA, 387 nt, synthetic construct
  misc_feature 1..387: note = Description of Artificial Sequence: Synthetic coding sequence
  source 1..387: mol_type = other RNA
atgatgctccgcgtgctcgttggcgccgtgttgcctgccatgctgcttgccgccccccccccaatcaataaattagccctctttccagacaaatccgcctggtgtgaagctaagaacatcactcagatagtaggacactctggctgcgaggccaagtccattcagaatcgcgcatgcctgggacaatgtttctcctattcagtcccaaacacattcccccagtccacagaatccttggtgcattgtgattcatgtatgcctgctcagtctatgtgggagatcgtgacgctcgaatgcccgggacacgaagaggtgcccagggtggataagttagttgaaaaaatcttgcactgcagttgccaagcttgtggaaaggaacccagttag

SEQ ID NO: 31965 - RNA, 543 nt, synthetic construct
  misc_feature 1..543: note = Description of Artificial Sequence: Synthetic coding sequence
  source 1..543: mol_type = other RNA
atgctgagagtcctggtgggtgctgtgctgcccgctatgcttctggctgctcctcctccgatcaataagctcgcattattcccagacaaatccgcttggtgcgaagccaagaatataacccagatcgttggccactccggatgcgaagctaaatccatccagaatcgtgcctgcctgggccagtgtttctcctatagcgtccccaatacttttccgcagtcaaccgaatcgctggttcattgtgacagttgtatgcctgcacagtcaatgtgggaaattgtgacactcgaatgcccaggacacgaagaagtgccgagagtcgataagctggtagaaaaaattctccattgttcctgtcaggcctgcgggaaggagcctagccatgagggactgtcagtatacgttcagggagaagacggacctggaagccagcctggtactcacccccatccccatccacacccccatcccggcgggcagacaccagagcctgaggaccctccaggggcaccacacaccgaggaagagggcgcagaagactag

SEQ ID NO: 31966 - RNA, 534 nt, synthetic construct
  misc_feature 1..534: note = Description of Artificial Sequence: Synthetic coding sequence
  source 1..534: mol_type = other RNA
atggttctgctgagtacactggggattgtatttcaaggcgagggtccccccatctcttcatgcgacacaggaacaatggcaaattgtgaacggaccttcatagcaatcaagcctgatggcgtgcagcgcggactggtaggggaaattatcaagcggtttgagcagaaagggttcagactagtgggactgaagttcatgcaagcttctgaggatttgttaaaggagcactatgttgaccttaaagaccggcccttcttcgccggcttggtaaaatacatgcattccggcccggtggtggcgatggtgtgggagggtttaaatgtggtaaaaaccgggagagtcatgttaggcgaaacaaatcccgccgatagcaaaccaggaactatcagaggagatttctgcattcaagtgggtagaaacattatccatggtagcgatagcgtggaaagtgccgagaaggagatcggtctatggttccaccctgaagagcttgtcgactatacgagttgcgcgcaaaattggatctatgaatag

SEQ ID NO: 31967 - RNA, 429 nt, synthetic construct
  misc_feature 1..429: note = Description of Artificial Sequence: Synthetic coding sequence
  source 1..429: mol_type = other RNA
atgaagtcccctcatgtgcttgtctttttgtgcctgctggtggcgttggtgacaggaaatctcgtgcagttcggcgtaatgattgagaagatgacagggaaaagcgccctccagtataacgattacgggtgttactgcggaatcgggggtagtcactggccggtggatcagacagattggtgttgccacgcccacgattgctgttatgggcgacttgaaaaactaggatgcgagccaaaacttgaaaaatatctgttcagtgtgtccgagagagggattttttgtgccggtcgaacaacatgccaaagactgacatgcgaatgcgataaaagagccgccctgtgcttccgtaggaacctgggaacctataaccgcaaatacgcccactaccctaacaagctgtgtaccggacccacccccccttgctag

SEQ ID NO: 31968 - RNA, 636 nt, synthetic construct
  misc_feature 1..636: note = Description of Artificial Sequence: Synthetic coding sequence
  source 1..636: mol_type = other RNA
atggccgatggagcaaaagcgaacccaaaaggattcaagaagaaagttttagatcgttgtttctctgggtggcgcggaccacgattcggggcatcttgtccttcccgtacctcccggagctctctgggcatgaagaagttttttaccgtcgcaatactggccggatctgtccttagcacagcacatggctctctcttaaacttaaaagccatggtggaagcagttacaggcagatctgccattttatctttcgtgggatacggatgctattgtggactggggggacgcggccaaccaaaggatgaagttgattggtgctgtcacgcgcatgattgttgctaccaagagctgtttgaccagggctgccacccatacgtcgaccattacgaccacactatagagaacaatacagaaatcgtctgctctgacttaaacaaaacagaatgcgacaagcagacttgcatgtgtgataaaaacatggtactttgcctcatgaatcaaacatatagggaagagtatcgcggattcctcaacgtgtattgccagggccctacaccgaactgtagtatttacgaacctccacccgaagaagttacctgctcccaccaatcgcccgcccctcccgccccaccttag

SEQ ID NO: 31969 - RNA, 570 nt, synthetic construct
  misc_feature 1..570: note = Description of Artificial Sequence: Synthetic coding sequence
  source 1..570: mol_type = other RNA
atggctttgttgtctcgccccgctcttaccctgctgctgctgttaatggccgctgtggtgcgatgtcaggagcaggcccagactacagattggagagccactttaaagaccattcgcaatggggtgcacaaaattgacacctacttaaacgcagcactggatctcctcggcggggaagacggactttgccagtacaagtgcagcgacgggtcaaaaccatttcctcgatacggctacaaaccctccccccccaacggctgcggttcaccactgttcggagtccaccttaacataggcatccccagtcttaccaaatgttgcaatcaacatgaccgatgctatgaaacttgtgggaagagcaaaaacgactgtgatgaggagtttcaatactgtctctcgaaaatttgcagggacgttcagaagaccctgggcctcacccaacacgtacaagcatgtgagactacagtcgaacttctctttgattccgtcattcacctggggtgcaagccttatctcgacagccaacgagcagcctgccgatgtcactatgaggaaaaaacagatctgtag

SEQ ID NO: 31970 - RNA, 213 nt, synthetic construct; identical to SEQ ID NO: 31789
  misc_feature 1..213: note = Description of Artificial Sequence: Synthetic coding sequence
  source 1..213: mol_type = other RNA

SEQ ID NO: 31971 - RNA, 477 nt, synthetic construct
  misc_feature 1..477: note = Description of Artificial Sequence: Synthetic coding sequence
  source 1..477: mol_type = other RNA
atggcactcgaggtgttgatgctgttagccgtactgatatggaccggtgctgagaacctccacgtgaagatcagttgttcgttggattggctgatggttagcgtgattcctgtggccgaatcccgaaacctgtacatcttcgccgacgaacttcatctcggaatgggctgtccagcgaaccgcattcacacgtacgtttatgaattcatctatttggtcagagattgcggaattaggacaagagtagttagcgaagagaccctgctgttccagaccgaactctattttacccctaggaacatcgaccatgacccacaggaaatccacctagagtgttcaacctctcgcaaatccgtctggctaactcccgtgtctacagaaaatgagattaagctagacccatcccctttcatagccgattttcagaccaccgccgaggaacttggcctcttatcctcctctccgaatcttttgtag

SEQ ID NO: 31972 - RNA, 1038 nt, synthetic construct
  misc_feature 1..1038: note = Description of Artificial Sequence: Synthetic coding sequence
  source 1..1038: mol_type = other RNA
atgagcctttttggactgttgcttcttaccagcgctttggccgggcaaagacagggaacgcaagccgagtcaaatctgagttcaaagtttcaattcagttccaataaagaacagaacggcgtccaggatccccagcatgaacgaatcattacagtgagtacgaacggttcaatccactcacctcgctttcctcacacataccctcgcaacacagttcttgtatggcgactagtggcggttgaggaaaatgtgtggattcagctaaccttcgatgaacgatttggactagaggaccccgaggatgacatttgcaaatacgacttcgtcgaggttgaagaaccaagcgatggcacaatcctgggtcggtggtgtggaagtggaacggtccctggtaagcaaatctcaaaaggaaatcagattagaatccgttttgtttctgatgagtatttccctagtgaacctgggttttgcatccactacaatatcgtcatgccccaattcactgaagcagtgtcaccctcagtgctccccccctccgctctccccctcgatcttctaaataatgccattaccgcattctcgaccctagaagacctgatcagatacctcgaacccgaaagatggcagttggacctagaagacctgtacagaccgacctggcagctcctgggaaaagcgtttgtcttcggacggaaatcccgcgtcgtcgatctgaacctcctcaccgaagaggtgagactgtattcctgtaccccaaggaactttagcgtcagtattcgcgaagaattgaagcgtactgataccattttctggcctggatgcctgcttgtaaagcgctgtggaggaaattgtgcatgttgcttgcataactgcaatgagtgccagtgcgtgccttcaaaggtaaccaagaagtatcacgaagtgttgcagttacggcctaagacaggtgttagaggacttcataagagccttacagacgtggcattggagcatcacgaggagtgtgattgcgtttgtcgtggaagtacaggaggctag

SEQ ID NO: 31973 - RNA, 549 nt, synthetic construct
  misc_feature 1..549: note = Description of Artificial Sequence: Synthetic coding sequence
  source 1..549: mol_type = other RNA
atgccacagtttactgaggctgtctctccttctgtactgcccccctccgcgcttcccctggatctcctaaataacgccattacagccttcagtactctggaagacctgattcgctatcttgaacctgaacggtggcagctggatctcgaagacctgtaccgcccaacttggcagctcttgggcaaggcttttgtttttggtcgtaaatctcgggttgtagacctcaacctgctgaccgaagaagttcgactctattcttgtactcccagaaacttctctgtcagcattcgcgaagagctcaaacggacagacaccatcttctggcctgggtgtctactcgtcaagagatgcggaggaaattgtgcgtgctgccttcacaactgcaacgaatgccagtgtgtaccctccaaggtgactaagaaatatcatgaagtgttgcagctgcgtcctaagactggagttcggggtctccacaagtctctcaccgatgtcgctcttgagcatcacgaagaatgtgactgcgtttgcagagggtcaactggaggatag

SEQ ID NO: 31974 - RNA, 573 nt, synthetic construct
  misc_feature 1..573: note = Description of Artificial Sequence: Synthetic coding sequence
  source 1..573: mol_type = other RNA
atgatgcagtatacatggctgttaacgaaacagttcaccgaggctgtctctccctccgtcttgcctcccagcgcattacccctggacttgctcaacaacgcaatcacagctttctcaaccctggaagatctgatccgatacttggaaccggagaggtggcagctggatttagaagacctgtaccgacccacatggcaattattgggaaaggcatttgtatttggccgcaagtcccgtgtggtagatctcaatctactcaccgaagaagtcaggctgtatagctgtactccccgcaatttttcagttagcattagggaggaattaaagagaaccgatacaatattttggcctggatgcctactggtgaagcgttgtggtggaaattgtgcctgttgtctgcacaactgtaatgaatgtcagtgcgtcccttcaaaagtgaccaagaagtaccatgaagtcctgcagttaagacctaagaccggcgtcaggggcctgcataagtcactgaccgacgtggctttagagcatcacgaagagtgcgattgtgtgtgccggggatccactggtggctag

SEQ ID NO: 31975 - RNA, 504 nt, synthetic construct
  misc_feature 1..504: note = Description of Artificial Sequence: Synthetic coding sequence
  source 1..504: mol_type = other RNA
atgtccttattcggtctcctgctcctaacttcggctcttgcaggccaacgacagggaacacaggccgagtccaacctcagttcaaaatttcagttcagtagcaacaaagaacagaatggtgtgcaggaccctcaacacgaacgtatcataacagtctctacaaatgggtctatacattcccctagattcccccatacttacccaagaaacactgtgcttgtctggcgtctggtggccgtggaagagaacgtctggatccagctgacatttgacgagcggtttggtttggaagacccagaggatgacatctgtaagtatgacttcgtggaggtcgaagagcccagcgacggtacgattctaggcagatggtgcggcagcggcacagttccaggtaaacaaatttccaagggtaatcaaataagaattagatttgtctcagacgagtacttcccgagtgaaccaagtaaccgtggagggaagatcattcagctgcataccagctag

SEQ ID NO: 31976 - RNA, 636 nt, synthetic construct
  misc_feature 1..636: note = Description of Artificial Sequence: Synthetic coding sequence
  source 1..636: mol_type = other RNA
atgagaacgcttgcctgcctcctgctcttgggatgcgggtatctagcccacgtactcgctgaggaagctgaaatcccccgagaagtaattgaacgactggctcggtcacaaatccatagcatacgcgaccttcaacgcctgctggagattgactctgttggcagcgaagatagtctggatacttccctcagggcccacggcgtacacgctactaaacacgtgccagagaagaggcctctccccatcaggcgtaagagatccatcgaggaagcagtccctgctgtatgtaaaacaagaactgtcatttacgaaatccccagatctcaggttgatcccacctctgcaaatttcctgatctggccaccttgcgttgaagtaaaaagatgtaccggctgctgtaatacctcatccgtgaaatgtcaaccaagcagagtacaccatcgctcagttaaggtggcaaaggtagaatacgttagaaagaaacccaagttaaaggaggtgcaagtccgccttgaggaacacctggagtgcgcatgcgccacaacctcacttaatcccgattaccgcgaagaagacaccggccgcccccgcgagagcggcaaaaaaagaaaaagaaaaagattaaagcctacttag

SEQ ID NO: 31977 - RNA, 591 nt, synthetic construct
  misc_feature 1..591: note = Description of Artificial Sequence: Synthetic coding sequence
  source 1..591: mol_type = other RNA
atgcgaacactcgcttgtcttttattgcttggatgtggatacctggcccatgtgctcgcagaagaagccgagatcccaagagaggtaattgagagattagcccgcagccaaatccatagtattcgggaccttcagcgccttctggagattgactccgtaggttccgaggactctttggacacttccctccgcgcccatggtgtgcacgccaccaagcacgtcccggaaaaacgaccactccccattcgacgcaagcgatcaatcgaagaggcagttccagccgtttgcaaaactcggacagtgatttatgaaatcccgagatcccaggtcgatcccaccagcgctaactttctgatatggcccccctgcgttgaagtgaaaaggtgtaccggctgctgtaacactagctctgtcaaatgtcagcccagcagggtgcatcacagaagcgtgaaggtagccaaagtagaatacgttaggaagaagcccaaacttaaggaagttcaagtcagattggaagagcatctggaatgtgcttgtgccaccacatctctcaaccccgactatcgagaagaagacaccgacgtgagatag

SEQ ID NO: 31978 - RNA, 162 nt, synthetic construct; identical to SEQ ID NO: 31797
  misc_feature 1..162: note = Description of Artificial Sequence: Synthetic coding sequence
  source 1..162: mol_type = other RNA

SEQ ID NO: 31979 - RNA, 1128 nt, synthetic construct
  misc_feature 1..1128: note = Description of Artificial Sequence: Synthetic coding sequence
  source 1..1128: mol_type = other RNA
atgatgaaaaagaacaacagtgcgaaacgcggacctcaggacggaaaccagcagccagcacccccagagaaagtgggttgggtgcgcaagttctgcggcaaaggaatctttcgggagatctggaaaaatcgttatgtggtgctgaagggagatcagttgtatatctccgagaaagaagttaaggacgagaagaacatccaggaggtatttgacctgtccgattacgaaaaatgcgaagaattaagaaagtcaaagtcccgtagtaagaagaatcattcaaagttcacactcgcccactcgaaacaaccaggtaacaccgctccaaatcttatcttcctcgctgtgtctcccgaagaaaaggaatcctggatcaacgccctgaacagcgcaataaccagggccaaaaaccgaatccttgatgaagcctccacctctacctctgatggtatgttgacgttggatctcatccaagaggaggacccaagtcctgaggagccgacctcatgtgctgagagctttcgtgtggatctagacaaatctgtagcccaattagccgggagtaggagaagagctgattccgatcgcattcagccatcagcagacagggcctcatccctctccaggccctgggaaaaaacagacaagggtgctacgtacactcctcaagcccctaaaaaactgacccccacggaaaagggacgttgtgcatccctggaggagattctttcccagcgcgacgccgcatcagctcgaacccttcaacttcgagccgaggagcctcctaccccagccctcccaaatcccggtcagctctctaggatccaagacctcgtagcccgtaaactggaggagacacaagagctgctcgcagaagtccaaggactgggtgatggaaaacgcaaagccaaagatcctccccgctcccccccagacagcgaaagcgaacagctccttctcgaaaccgagcgcctgctgggtgaagccagtagcaactggtcccaggccaaacgcgtccttcaggaagtcagagaactacgagatctttatcgacagatggacttgcaaacacccgattctcacctcagacagaccactccgcactctcaataccggaagagcttgatgtag

SEQ ID NO: 31980 - RNA, 1140 nt, synthetic construct
  misc_feature 1..1140: note = Description of Artificial Sequence: Synthetic coding sequence
  source 1..1140: mol_type = other RNA
atgagtagccccagcctgtccgacttgggaaagagagaaccagctgcggctgccgatgagagggggactcagcaaaggcgtgcctgtgccaacgctacctggaactcgatacataatggcgtcattgcagtctttcagagaaagggcttaccagaccaggagttattttccttaaacgagggagtccgccagcttctgaagactgaacttggctcatttttcaccgaataccttcagaaccaattattgaccaaaggtatggtaattctgagagacaagatccggttttacgagggacagaagctgcttgattctctggctgaaacttgggatttttttttctctgacgttctacccatgctgcaggccatcttttatccagtccaggggaaggagccctccgtacggcagcttgcactgctccacttccgcaacgctatcaccttatccgtaaagttagaggatgcccttgcacgggcccacgcacgagtacctcccgcaattgtgcaaatgttactggttctgcagggggttcacgagagcagaggtgtaactgaagactatttacgtctggagactctagtgcaaaaggtggtaagcccgtatctaggaacctacggcctccatagctccgaaggcccattcacccattcttgcatacttgaaaagagattgttacggagatcgcgctcaggcgacgttctggctaagaatccagtggtgcgtagcaagagttataatactcccttgttaaatccagtccaagaacatgaggccgagggagcagccgcaggaggtacttcgatcaggcgccactccgtgtcagagatgacaagctgccctgaaccccaagggttttccgatccgccaggccagggccccacagggacatttaggtcttcaccggccccccattctggaccatgccctagcaggttatatcctactacacaaccacctgagcagggactggatccaacaagatcgtcattaccccggagttcaccagagaatctcgtagaccagattttagaaagcgtcgatagtgattctgagggtattttcattgactttgggagaggacgcggttctggcatgtcagaccttgaagggagcggcggtagacagagtgttgtgtag

SEQ ID NO: 31981 - RNA, 1032 nt, synthetic construct
  misc_feature 1..1032: note = Description of Artificial Sequence: Synthetic coding sequence
  source 1..1032: mol_type = other RNA
atgaaagagatcaacctgttgccggatcgtgtgttatctactccttcagttcagctggtacagtcttggtacgtgcagagcctcctcgacattatggagttcctagataaagatccagaggaccatcgaaccctctcgcagtttaccgatgcactggttaccatacggaatcgccacaatgatgttgtgccgactatggctcagggggtgctagagtacaaggatacatacggcgatgatccagtgtccaatcagaatatccaatacttccttgaccgcttctacctgagtagaatcagcatacgtatgctcatcaatcagcacactctaatcttcgatggatccaccaatcccgcacacccaaaacacatcggctctattgacccaaactgtaatgtgtcagaggtggtgaaagatgcatatgatatggcaaagctgctgtgcgacaaatactatatggctagtccagatttagagatacaggagatcaacgccgccaattctaaacaaccaattcatatggtgtatgtgccaagtcatctttatcacatgctgttcgagttgtttaagaacgctatgagagccacagtcgagagtcatgagagtagcctgattcttcctccaatcaaggttatggtggcacttggcgaagaagacctcagcattaaaatgagcgatagaggaggaggcgtcccgctgagaaaaatcgagcggctgttttcctatatgtattcgacagcccctacaccacagccaggcacaggaggtacccctttggcaggcttcggttatggccttcccatcagcagactgtacgcaaaatatttccagggagacctgcagttattcagtatggaagggttcggcacagacgccgtaatttacctaaaagccctgagcaccgatagcgtcgagaggctgcctgtctacaataaatccgcctggcggcactaccagactatccaggaagccggagattggtgcgtcccatcgactgaacccaaaaatacttccacctatagagtgtcatag

SEQ ID NO: 31982 - RNA, 4785 nt, synthetic construct
  misc_feature 1..4785: note = Description of Artificial Sequence: Synthetic coding sequence
  source 1..4785: mol_type = other RNA
atgaaactctacgtgttcctggttaataccgggaccactctgactttcgacaccgagctaactgttcaaaccgtcgccgatcttaaacatgctattcaatccaaatacaaaattgccattcagcatcaagtccttgtggttaacggaggagaatgtatggctgcagaccgacgtgtgtgcacatattcagctggcaccgatactaatcctattttccttttcaataaagagatgatcctgtgtgatcgaccccctgccatcccaaaaaccactttctctaccgaaaatgatatggagatcaaggttgaagagtccctgatgatgcccgcagttttccataccgtggctagcaggacccaactggctttagaaatgtatgaggtggccaagaagctctgttccttttgtgagggattggtgcacgatgaacacttgcaacaccaagggtgggccgccattatggctaatttagaggactgttcaaattcctaccaaaaactgctttttaaatttgagtccatttatagcaattaccttcagtctattgaggatattaaactgaaacttactcatcttggcacagccgtcagtgttatggcaaaaattccccttctagaatgtttgactagacattcctacagagagtgtctaggacgattagattcccttccggagcacgaagattctgaaaaggcagagatgaaaagaagcacggaactcgtactgtcccctgacatgccacggaccacaaacgaatccctcctcacatctttccccaaatctgtcgaacatgtcagccccgacacggctgacgctgagagtggaaaggaaatcagagagagttgccagtctacagtacaccagcaggatgagaccaccatagatacgaaagacggagaccttcctttttttaatgtgtcccttttagactggatcaacgtgcaggaccgaccgaatgacgtcgaaagcctggttaggaaatgcttcgattccatgtctaggttggatccccgaattatccggccatttattgcagagtgccgacagacgatcgcaaagttagacaatcagaacatgaaagcaattaaaggcctcgaggaccggctgtatgccctggatcagatgatagcttcctgtggtcgcctagttaacgaacaaaaagagctggctcagggattcctcgcaaaccagaagcgggctgaaaacctgaaagatgcgtcagttctgccagacttatgcctttcgcacgctaaccagcttatgatcatgcttcagaaccacagaaagttattagacataaagcagaaatgcacaacagcaaagcaagagttggcaaataacctccacgttagactaaagtggtgctgcttcgtgatgctgcacgctgatcaggacggggaaaagttacaggccctccttagattggtgattgagctccttgaaagggttaaaattgtagaggcactttctaccgtgccacagatgtactgcctcgctgttgtcgaagtggtcaggcggaagatgttcattaagcattaccgggagtgggccggcgccctcgtaaaggacgggaaaagactgtacgaagccgagaaatctaaacgcgagagctttggcaaactcttcaggaaatcttttctcaggaatcgactgtttcgtggactggacagttggccaccatccttctgcacccagaaaccacgtaaattcgattgtgaacttccagacatatcactcaaagacctacaatttctgcaaagtttctgcccctcagaggtccaacctttcctccgggtcccacttttgtgtgacttcgaacctctgcaccagcatgttctagcactacataatttggtcaaagctgcccaatctctcgacgagatgtcacagacaataactgatctgctttctgaacaaaaggcaagcgtgtcgcagacttctccccagtccgcctctagccccaggatggagtccacagctggcattacaactacaacttcacccagaaccccaccacctttgactgttcaagatcccctctgccctgcggtctgcccccttgaagaactgtctccggactcaatcgacgctcacaccttcgatttcgaaactattccccacccaaacatcgagcagacaatccaccaggtaagtctagacctcgactctctggccgaatctcccgaatccgattttatgtcagccgtgaacgaatttgtgatagaagagaacctatcttcccccaacccaattagcgacccccagagccctgagatgatggtggagtccttgtacagctcagtcattaatgctatcgattcccgcagaatgcaggataccaatgtgtgcggtaaagaagacttcggggatcacacctcactgaacgtgcagctggagcgttgccgcgttgtggcccaggacagccacttttctattcaaactattaaggaggacttgtgccacttccgaaccttcgtacagaaagaacagtgcgacttttccaactccctgaagtgcacagccgtggagattaggaacatcatagaaaaagtaaagtgctcgctcgagattaccctaaaggaaaaacatcagaaagagctgctgagcttaaagaacgaatatgagggcaaactggacggactcattaaggaaaccgaggaaaatgaaaataagattaaaaaattgaagggcgaactcgtttgcctcgaagaagtgctacagaacaaagacaatgaatttgccctggtgaaacatgaaaaagaggccgttatctgcctgcagaacgaaaaggatcaaaaactgctggagatggagaacattatgcattcccaaaattgtgaaatcaaggaactcaaacagtctcgggagatcgtgcttgaggatctgaagaaattgcacgttgagaacgatgaaaaattacagcttcttcgagccgagcttcaaagcctcgagcagagccacctcaaagaactggaagatactctacaagtgagacatattcaggagtttgagaaagtgatgactgatcatagagtctcattagaggagcttaaaaaagaaaaccaacagattatcaatcagatccaggaatctcatgctgagataattcaggaaaaagaaaagcaactgcaagaactgaagttgaaagtcagcgacctcagtgacacaagatgcaaattagaggtggaattggccttaaaggaagcagagacagatgagattaaaatccttctagaggagtctagagcccagcagaaagagactctcaagagcttgctggaacaagaaaccgagaacttgaggaccgagatcagtaagctcaatcagaagattcaggataacaacgagaattaccaggtcgggctagcggagttgcgaacgctgatgaccatcgagaaagaccagtgcatttccgagcttatatccagacatgaagaagagagtaacattttgaaggccgaattaaataaggtaacgtctttgcacaaccaagcatttgaaatcgaaaagaatctgaaagaacagattatagaactgcaatccaaactagatagcgaactctccgccctagagagacagaaagatgagaaaatcactcagcaggaggagaaatacgaagccattatacagaacctggaaaaggacaggcagaaactggtgagctcccaggaacaggatcgcgagcaactgatccagaaactgaactgcgaaaaggacgaagccatccagactgccttaaaagagttcaaacttgaacgtgaagtggtggaaaaagagttgctggaaaaggtaaaacatttggaaaatcagatcgcaaaatcccccgctatagacagcactcgaggagattcctcatcacttgtcgctgaactccaagaaaaacttcaggaagagaaggccaagtttctggagcaacttgaagaacaagagaaaaggaaaaatgaggagatgcaaaatgtcagaacctctctcatagcagaacaacagacgaactttaatactgtactcactagagagaagatgcgtaaggagaatattattaacgatctgtccgataagctgaagtctacaatgcagcagcaggaaagggacaaagatttaatagagagcttgtctgaggaccgggccaggttactagaggagaaaaagaaacttgaagaagaggtatccaagctgagaagtagctccttcgtacctagcccttatgtggccacggcccctgaactttacggggcatgtgcccccgaactcccaggcgaatccgatcgctctgcagtagaaaccgccgatgagggccgggtcgactcagcaatggaaacttctatgatgtccgtgcaggaaaacattcacatgctgtccgaggaaaaacaaaggattatgctcctcgagagaacactgcagttaaaggaagaagagaataaaaggcttaaccagcgcctcatgagtcaatctatgtcgtcagtgtccagcagacatagcgaaaaaatagctatccgcgatttccaagtgggagatctagtcctgataattcttgacgaaagacacgacaactacgtcctcttcacagtgtcgcctaccctttattttctgcatagcgaatccctccccgccctagatcttaagccaggcgaaggtgccagcggggccagcaggcgtccctgggttctgggcaaagtgatggaaaaggaatactgtcaggccaaaaaggcacagaatagatttaaagttccgctgggtaccaaattttaccgtgttaaagctgtaagctggaacaaaaaagtttag

SEQ ID NO: 31983 - RNA, 471 nt, synthetic construct
  misc_feature 1..471: note = Description of Artificial Sequence: Synthetic coding sequence
  source 1..471: mol_type = other RNA
atggcccccgcgcgcgctggcttttgtcccctgctgctgctgctcctactaggattatgggtcgcagagattcccgtttccgcaaagcctaaagggatgacctcaagccaatggtttaagatacagcacatgcagccctccccgcaggcctgtaacagcgctatgaagaatattaacaaacacactaaaaggtgcaaagatcttaacactttcctccacgagccattttcgtctgtcgctgcaacctgccaaactcccaagatcgcatgtaagaatggagataaaaattgtcaccagtctcatggggcagtctcactcacaatgtgcaagttaacaagcggcaagcacccaaactgtagatacaaagaaaaaaggcagaataaatcttatgtcgtcgcctgtaagccaccgcaaaaaaaggactcacagcagttccacctcgtcccggtgcatcttgatcgcgtcctgtag

SEQ ID NO: 31984 - RNA, 471 nt, synthetic construct
  misc_feature 1..471: note = Description of Artificial Sequence: Synthetic coding sequence
  source 1..471: mol_type = other RNA
atggcccccgcccgcgctggattctgccctctgctgcttctgcttctactggggctgtgggtcgccgagatccccgtgtcagccaaacctaagggaatgacctcctctcagtggtttaaaatccaacacatgcaaccatctccccaggcatgcaactccgccatgaaaaacattaacaaacacactaagcgttgcaaagatctcaacactttcctccacgagccttttagcagcgtcgccgcgacctgccaaacccccaagattgcctgtaagaacggcgataagaactgtcatcagtcccacggagcagtaagccttacaatgtgtaagctcacatcaggaaagcatccaaattgccgttataaggaaaaacggcagaacaaatcttacgtcgtagcctgtaagcctcctcagaagaaagactcccaacaattccacctggtaccagtccatctcgatagggtattgtag

SEQ ID NO: 31985 - RNA, 621 nt, synthetic construct
  misc_feature 1..621: note = Description of Artificial Sequence: Synthetic coding sequence
  source 1..621: mol_type = other RNA
atgttaccccccgccatccacttctaccttctgccgcttgcctgcatcctgatgaagtcttgccttgcttttaaaaacgatgccacggagatactctattcccacgtagtgaaacccgtgcccgctcaccctagtagcaactccacacttaaccaggccagaaacggcggccgtcacttttctaatacgggccttgacagaaatactagagttcaggtcggctgtagggagctgcgcagcacaaaatatatctctgacggacagtgcacctcaatctcaccattaaaagagcttgtgtgcgccggcgaatgtctgcccctgcccgtgctgcctaattggatcggtggcgggtatggaacaaagtattggtctcggaggtcatcacaggaatggcgatgcgttaacgacaagacaaggacccagagaattcagctccagtgtcaagacggctcaacccgaacctacaagataaccgtcgtgactgcttgcaagtgtaagaggtatactcggcagcacaacgaaagtagtcacaattttgaatcaatgtcaccagcgaaacctgttcagcatcatcgcgaaagaaagagggctagtaagagtagtaagcacagcatgagttag

SEQ ID NO: 31986 - RNA, 693 nt, synthetic construct
  misc_feature 1..693: note = Description of Artificial Sequence: Synthetic coding sequence
  source 1..693: mol_type = other RNA
atgttgcctccggctatacatttctatctcctcccactcgcatgtatattgatgaagagttgcctggcgtttaagaatgatgccacagagattctgtattctcacgttgttaaacctgttcccgcacacccaagctctaattctacactcaaccaggccaggaatggcggcaggcacttctcaaataccggtctagaccggaaccgtaccgaaagccttactcgacaaaattatttctggttatttcccggagcttttctccgccaactgcaggaggccagggtacaagttggttgcagagagctgaggtcaacgaaatatatctcggacggacaatgtactagtataagtccccttaaagagttggtttgtgcaggggagtgcctgccactcccggtcctgccgaactggataggaggaggttacgggacgaaatattggagccgccgaagcagtcaagagtggaggtgcgtcaacgataaaacgcgaacccaaagaatacagctccagtgccaagatggatctacaagaacctacaagataacagttgttactgcttgcaagtgcaaaagatacacacgtcaacataatgagagctcccacaattttgaatctatgtctccagctaaacccgtgcaacatcaccgcgagcgaaaacgcgcctctaagtcctccaaacattctatgtcctag

SEQ ID NO: 31987 - RNA, 1041 nt, synthetic construct
  misc_feature 1..1041: note = Description of Artificial Sequence: Synthetic coding sequence
  source 1..1041: mol_type = other RNA
atgtttctctcaatccttgtggccctgtgcctgtggttacatcttgctcttggcgttcggggtgcaccctgtgaggcagtaaggattcctatgtgtagacatatgccatggaatatcacaagaatgcccaatcacttacatcactcaacccaggagaacgccatcctcgcgatcgagcagtatgaagagctggtggacgtcaactgttcggctgttctacgcttcttcttatgtgccatgtatgcccccatctgcaccctggaattcctccacgatcctatcaaaccctgtaaaagcgtctgccagcgtgctagagacgattgcgaacccctaatgaagatgtataaccattcctggcccgagtccctcgcctgcgatgagctgcccgtgtacgacagaggagtctgcattagtcccgaggccatcgtgaccgacttgccggaagacgtcaagtggatcgatattactccagatatgatggtgcaggaacgtcccctggatgtcgattgtaagcgcctttctcccgacagatgcaagtgtaaaaaagtcaagcccactttagccacttacttatcgaagaattacagctatgttatacatgccaagataaaggctgtgcagcgctctgggtgtaacgaggtgactacagttgttgatgtgaaagaaatcttcaagagttcttcccctatccctagaacccaggtgccactcattacgaactcctcatgtcagtgccctcacatacttccacatcaggacgtgctaattatgtgctatgaatggcgatcgagaatgatgctgctggaaaactgtttagtcgagaaatggcgcgatcagctgtccaaacggtcgattcaatgggaagaaagattgcaagaacaacgaaggaccgtgcaggacaagaagaaaactgccggccggacaagccgatctaatccccctaaacctaaaggcaagccacccgcccccaagcccgccagccccaaaaaaaatattaagacaagatctgcccagaagcgtacaaatccaaagagagtgtag

SEQ ID NO: 31988 - RNA, 1032 nt, synthetic construct
  misc_feature 1..1032: note = Description of Artificial Sequence: Synthetic coding sequence
  source 1..1032: mol_type = other RNA
atgcgggtcgcaggaagggaggggagattcctttctgcaggtgtggcagctagagagggcagcgcaatgttcctgtctattttagttgcgctctgcttgtggcttcatctcgccctgggggttagaggcgcaccctgtgaagcagtcagaatccctatgtgcagacatatgccatggaacattaccagaatgcccaaccacttacaccattccactcaggagaacgcaatgtatgccccgatttgtacgttggagtttctgcacgatccaatcaaaccctgtaagtcagtgtgccagcgggcccgagatgattgtgaaccgctaatgaaaatgtacaaccactcctggccagaaagtttagcctgcgatgagctgcctgtgtatgatcgcggcgtgtgcattagtcccgaggccatcgtgactgatttaccggaagatgttaaatggatagatattactcccgacatgatggtgcaggagcgcccgctggacgtagattgcaaaagactctcgcctgaccggtgtaaatgcaagaaagtgaagcctacactcgccacatacctctccaagaattacagctacgtaatccacgctaaaatcaaggcggtgcagagaagcgggtgcaatgaggttacaaccgtggttgacgtcaaggagatattcaagtcctcgagccctattcctcgaacccaggtcccccttattactaatagcagttgccaatgtccccatatccttccccatcaagatgttctgattatgtgctacgaatggcgatccaggatgatgttgttagaaaactgcctggtggagaaatggagggatcagctatccaaacgctctatacagtgggaagagaggttgcaggaacagagaagaacagtgcaggataagaaaaaaaccgccggccgcacctctagaagtaatccacctaagcccaaagggaagccaccagcaccaaagccagcaagtccaaaaaaaaatatcaaaactagatcagcccaaaaacgtaccaatccaaaacgcgtctag

SEQ ID NO: 31989 - RNA, 807 nt, synthetic construct
  misc_feature 1..807: note = Description of Artificial Sequence: Synthetic coding sequence
  source 1..807: mol_type = other RNA
atgccacgaagctttctggtgaaaaaacattttaacgctagcaaaaaacctaattattctgagctcgatacccacaccgtcatcatttccccttacctgtatgagtcctacagtatgcctgtgatacctcagcccgaaatcctgtcctccggagcctactcacccatcactgtctggaccacggccgcacctttccacgcccaactcccaaacggtctgagcccactctcaggatactcatcttcacttgggcgagtgtccccccccccccccagcgatacttcttccaaggaccactccggctctgaaagccccattagcgacgaagaagaacgactccaatccaagctcagcgaccctcacgccatcgaagcagagaaatttcagtgcaacctatgcaataaaacctactcgacattctccggtctcgccaaacataaacaactccattgcgacgcccagagccggaaatctttttcttgcaaatattgtgacaaggagtacgtcagtttgggagcacttaagatgcacattcgtacacacacactaccatgcgtctgcaagatttgtggaaaggcctttagccggccctggctgctacagggccatatcagaactcatactggcgaaaaacccttttcttgtccccattgtaatcgggcatttgcagataggtctaatttgagagcccatttacagacccactctgacgtgaagaagtatcagtgtaagaactgctcaaaaaccttctctcggatgtcactcctccacaaacatgaagagagtggttgttgtgttgcacactag

SEQ ID NO: 31990 - RNA, 747 nt, synthetic construct
  misc_feature 1..747: note = Description of Artificial Sequence: Synthetic coding sequence
  source 1..747: mol_type = other RNA
atggagcgggcatccctcattcaaaaagccaagttggctgaacaagcggaaagatacgaggacatggccgcctttatgaaaggtgcagttgaaaaaggagaagagctgtcatgtgaggagaggaacttgctgtcagtggcttataagaatgtggtgggcggacaaagagcagcctggagagttctgagctccatcgagcaaaagagtaacgaagaggggagcgaggagaagggtcccgaagttagggagtatagagaaaaagtggagaccgagctacagggagtgtgcgacacagttttgggtttgctcgatagccacctcataaaggaagcaggcgatgcagaaagcagggtgttctatcttaagatgaagggagactattacaggtatttggcagaagtcgcaactggggacgacaagaagaggatcattgattctgcacgcagcgcttaccaagaggcaatggatataagtaaaaaagaaatgcccccaacaaatcctatcagactgggtcttgctctgaacttcagtgtcttccactacgagatagcaaactccccagaagaagccatctccctggcaaagaccactttcgacgaggcaatggcagatcttcacacactcagcgaagatagctacaaagactcaacattaatcatgcagcttttacgcgataaccttacattatggaccgccgacaatgccggggaagaggggggagaggctccacaagagccacaatcgtag

SEQ ID NO: 31991 - RNA, 651 nt, synthetic construct
  misc_feature 1..651: note = Description of Artificial Sequence: Synthetic coding sequence
  source 1..651: mol_type = other RNA
atggagagggctagtcttatccaaaaggcaaagctggcagaacaggcagaaagatatgaggacatggctgcgttcatgaagggtgccgtggagaagggggaggaactgagttgcgaggagaggaatcttctgtctgtcgcttataaaaatgtggtgggggggcagcgggcagcatggcgggtactcagctccatagaacaaaagagcaatgaggagggaagtgaggagaaagggcccgaggtaagagaatacagagtattttacttgaagatgaagggggactactacagatatttggcagaggtcgcaactggggacgacaagaagcgcataatcgatagcgctcgatccgcctaccaagaagcgatggacatctcaaaaaaggagatgccccccacaaatcctatcagactcggtctggccctgaatttttccgtctttcactacgagatcgccaatagccctgaggaagctatatctctcgcaaagacgactttcgatgaagccatggcagaccttcatacactctctgaagatagttataaagattctaccttgatcatgcagctattgcgcgacaatctcactttatggactgccgataatgcaggagaagagggaggagaagccccacaggagccccagtcatag

SEQ ID NO: 31992 - RNA, 12735 nt, synthetic construct
  misc_feature 1..12735: note = Description of Artificial Sequence: Synthetic coding sequence
  source 1..12735: mol_type = other RNA
atgatgcccgcccaatatgctctcacatcgagcctagtgctcctcgttctgttgtcaactgccagagctggacccttctcttcccgatccaatgtcactttgccagcgcctagaccccccccgcagccaggaggccacacagtcggcgccggcgtgggaagcccatcaagccaattgtacgaacatacggttgagggaggtgagaagcaggtagtgttcactcaccgcatcaatttacctccttccaccgggtgcgggtgccctcccggaactgagccaccagtcctcgcttcagaagttcaggctcttagagtccggctcgagattctggaggaactcgtaaaagggttaaaagaacaatgcacagggggttgctgtccagcctctgctcaagctggcacgggccaaaccgacgtgcggaccctctgttcacttcatggggtatttgatctgtctcgctgcacctgctcttgcgagcccggctggggcggccctacatgttccgatcctaccgatgctgagatccccccgtcctctcctcctagtgcttctggtagctgtccagatgattgcaacgatcaaggacgttgtgtgcggggacgttgcgtttgtttcccaggatatactggcccctcctgtggttggccttcctgccccggcgattgtcagggacgagggcgatgtgttcagggtgtgtgtgtctgcagggcagggttctctggacccgactgcagtcagagatcttgtccgaggggatgttcacagagagggaggtgtgagggcggtagatgcgtgtgcgatccaggctacactggcgatgattgtgggatgcgtagttgccctagaggctgctcacagagaggcaggtgtgagaatgggcgatgcgtgtgcaatcccgggtacactggcgaggattgcggcgtgagatcatgccccagaggttgctctcaaagggggagatgcaaggatggacgctgcgtgtgtgatcctggatataccggagaagattgcggtacgcggagttgcccatgggattgcggcgaggggggtcgatgtgttgatggacgatgtgtgtgctggcctggatatactggggaagactgtagcactaggacctgccctcgggattgccggggccggggccgatgtgaagatggcgaatgcatctgtgatactggttatagtggtgatgattgcggcgtacgttcctgtccgggtgattgtaatcagagagggagatgcgaggacggaaggtgcgtttgctggccaggatacaccggaactgattgcggctccagagcttgcccaagagactgtcgtggacgaggtcggtgtgaaaacggagtgtgcgtctgcaatgccgggtattcaggggaagactgcggagtgagatcgtgccccggcgactgcagagggcgtgggagatgtgagagtggcagatgcatgtgttggcccggctacacaggtcgggattgtggaaccagagcttgcccgggtgactgtcgggggcgcggccgctgtgtcgatggccgatgcgtatgtaatccgggatttacaggggaagattgtggcagtcggagatgcccaggtgattgcaggggtcatggactgtgcgaggatggcgtgtgtgtatgcgacgcagggtatagcggggaagattgtagtacaagatcgtgccctggcggttgtagagggagggggcagtgcctggatggcaggtgcgtgtgcgaggatggctacagtggcgaggactgcggagtacggcagtgtcccaacgattgcagtcaacatggggtctgccaggacggagtctgcatttgttgggaggggtacgtgtccgaggattgttctattagaacctgcccatcaaattgccacgggaggggccgttgcgaagaaggccgctgtttgtgcgaccccggatacacaggaccgacttgtgcaacacgtatgtgtcccgccgactgccggggccggggacgctgtgtgcaaggggtgtgtttgtgccacgtgggctacgggggagaggattgcggtcaggaagagcctcccgcctcagcatgtccaggtggatgcggtccacgggagttgtgccgcgcagggcagtgtgtctgcgtcgagggatttagggggcccgattgcgccatacaaacgtgtcccggggattgccgtggccgaggtgagtgccacgatgggtcctgcgtttgcaaggacggatacgctggagaggattgcggcgaagaggttccaacgatcgagggcatgagaatgcacctgttagaggaaacaacagtacgcacagagtggacccctgcacccggcccagtcgacgcttacgagatccaatttatccctacaacagaaggggcttctccaccatttaccgctcgggtgccatctagcgctagtgcctatgaccaacgtggcttagcacccgggcaagaatatcaggtgaccgtgcgagcgttacggggaacatcttggggcctcccagcatccaaaactattacaacaatgattgatgggccacaagacctcagagtggtcgctgtcaccccaacaacattagaactcggatggctacgaccgcaggcagaagttgaccgctttgttgtgtcatacgtttctgctggcaatcagcgcgttcgattagaagttcctcctgaggctgatgggacactcttaacagacctgatgcccggcgttgagtatgttgtgaccgtgactgcagaaagaggtcgagccgtatcatatccagcgagtgtgagagctaacacaggatcatcacctctgggcctgctcgggacaacagatgaacctcctccatccggccccagcaccacacagggtgcccaggctcccttactgcagcagagaccccaggagctaggtgaactcagagtcttaggcagggatgaaaccggtagattacgcgtggtttggactgctcagcctgatacgtttgcctactttcaattgcgaatgagagtgcctgagggccctggcgcccacgaggaggttcttccaggggacgttcgccaggctctggttccacccccaccaccaggcaccccgtatgagctttcactccatggcgtcccacccggaggcaagccatctgaccccatcatataccagggcattatggacaaagacgaagagaagccaggcaaatcctcaggccctccccgcctgggagaactgaccgttactgacagaactagcgattccctgctccttagatggaccgtgcccgagggagagtttgacagcttcgtaatccagtacaaggaccgtgacggacagccccaagtagtccccgtagagggaccccaaaggagtgctgttataacatcgctcgaccctggaaggaagtataagtttgtcctctatggctttgtgggaaagaagcgccacggccctctggtcgccgaagctaagatcctgccccagtccgacccttccccaggcacacctccccacctcggcaacctgtgggtgacagaccctacccccgactcactccacctctcctggactgtgccagagggacagtttgacaccttcatggttcagtacagagatagagacggcaggccccaggtggtgcccgttgaaggtccagaacggagcttcgtggtgtctagtctcgatccagaccacaagtacagattcaccctgttcggcattgccaacaagaagagatatggcccattaactgccgacggaacaaccgccccggaaaggaaggaggagcctcccagacctgagtttcttgaacaacccctgctcggcgagttaacagtgacaggagttaccccagattctttgcgcttgtcatggacagtagcacaaggccctttcgatagctttatggtacagtataaagacgctcaaggccagccccaggccgttcctgtcgctggggatgagaacgaggtaacagtgcccggactggaccctgatcggaaatacaaaatgaacctctatggtctgcgtgggaggcagcgcgtaggtccagaaagcgtcgtggctaaaaccgcacctcaggaagacgtagatgagactccttcccccactgaacttgggactgaggctccagaatcacctgaagaacctctgttgggagagttgacagtgaccggttcctccccggactcgctatctctgttctggacggtgccgcagggatcctttgattctttcacagtgcagtacaaggatcgagacggaagacctagggccgttagggtgggcggtaaggagtcagaagtgaccgtcggaggactggaacccggccacaaatataagatgcacctgtatggcctgcacgaaggacagagagttggtccagtgtccgcagttggagtcaccgccccgcagcaggaagaaaccccaccagccaccgaatcccccttggaaccaagactgggtgaactcaccgtaaccgatgtcacccccaacagcgtcgggttaagctggaccgtgcctgaaggccaatttgattcatttatcgtgcaatataaagacaaagacggacagccacaggtggtccccgtagcagcggaccagagggaagtaaccgtgtataacttagaaccagagcgaaaatacaagatgaacatgtacggactacatgacggccagaggatgggaccattaagtgtcgtaattgtgacagctcctctgcctccagcgccggccactgaggcaagtaaaccaccactggaaccacgactgggggagctcaccgtgacagacattacacccgatagcgtcggtctctcatggacggtacccgaaggggagttcgatagttttgtggtgcagtataaagatagggatggccaaccacaggtagtgccagttgccgccgaccagcgcgaagtgacaatcccagaccttgaacctagcaggaagtataagtttcttctgtttggaattcaggacggaaagagaagatcccctgtttccgtggaagctaagactgtggctcgcggcgatgcctcgccaggagcgcctccccggttgggggaattgtgggttacagatcctactcctgatagcctgagactatcctggacagtgcctgaaggccagttcgatagttttgtagtgcagttcaaagataaagatgggccccaagtggtccctgtagaagggcacgagagaagcgttaccgtcacaccactggacgctgggcggaaatacagattcctgttatatggacttcttgggaaaaaacggcacggacccctgacggcggatggcactactgaggcgagaagcgctatggacgataccggaaccaaaagaccccctaaacccagactcggagaggagctgcaagtgaccacggttacgcagaactcggtaggtctgtcctggacggtgccagagggacagttcgatagttttgtggtgcagtacaaagaccgagacggacagccccaggtcgtgcccgtcgaaggcagccttagggaagtgtctgtgccaggattggatccagcccatagatacaaactcctcctgtacgggctccaccatggcaagagggtaggccccatttctgccgtagcaatcactgcaggacgcgaagagacagaaaccgagaccacagcccctactccccccgcccccgagcctcatttaggagagttaactgtggaggaagctacaagccataccttacacttgtcatggatggtgacagagggtgaattcgattcctttgaaatccagtatacagatagggatgggcagctccagatggtacgcattgggggtgaccggaatgacatcacactctccggcttagagagtgaccacagatacctggtgacactatacggcttctcagatggcaaacacgtcggaccagtccacgtcgaagccctgacagttcccgaagaggagaaacctagtgagcctcctaccgccactccagaaccaccaatcaaacctagacttggcgagctgaccgtgacagatgcaactcctgactcactatcgctgagctggacggtacccgaaggacaatttgatcatttcttggtgcagtaccgaaatggtgatgggcagcctaaagccgtgcgtgtgcccggacacgaggagggggtgaccattagtggattggagccagaccataaatataaaatgaacctatacggatttcacgggggacagaggatgggaccagtgagtgtggtgggcgtcacggctgctgaagaagaaactcctagccctaccgaaccgtctatggaggcgcccgagcccgcagaagaaccactgctgggagaacttactgtgacagggagttcacccgattctctctcactctcctggaccgtgccacaaggaaggtttgattcttttacagtgcaatacaaagatcgagacggtaggcctcaggtcgtgagggttggtggggaagagtccgaggtgactgttggaggactagagcccggccgtaagtacaaaatgcatttatacggattgcacgagggacgtcgcgtgggacctgtgtccgccgttggggttacggcacccgaggaagaatctccggatgcaccactggccaaactgagactcggtcaaatgaccgtccgcgatataaccagcgactccctctcactgagctggacagtccccgagggccagttcgaccattttctggtgcaatttaagaacggtgacgggcagcccaaggccgtccgcgtgcccggccatgaagacggcgtgaccattagcggcttggagccggaccacaagtataaaatgaatctgtatggttttcacggcggccaaagagtcggacctgtatctgcagtggggttgacggcgcccggtaaagatgaggagatggcaccggctagcaccgaaccaccaacccccgagccccctataaaaccacggcttgaagaacttaccgtgacagacgctacacccgactctctcagtctgtcttggaccgtgcctgaaggacagtttgatcatttcctcgtgcaatacaagaatggtgacggacagcctaaggctacacgtgtaccaggtcacgaagatcgagttactatctccgggctagaaccagataacaaatacaaaatgaacctgtatgggttccacggaggacagagggttggaccagtttctgccatcggtgttacagctgcagaagaagaaacaccaagccctacagaaccctctatggaagcaccagagccaccagaggagccactcctgggagagctgactgtaaccggttcaagtcctgatagccttagtctttcctggaccgtgcctcagggcagattcgattccttcacagtacaatacaaggatagagatggcagacctcaggtcgtgagggtaggaggagaagaatcagaagtcacagtcggtggtctggaacccgggaggaaatataaaatgcatttatacggtctgcatgagggtaggagagttggtcccgtgagcactgtcggtgtgacagccccccaggaagatgtcgacgagacaccaagtcctacagaacccggtaccgaagcccccggaccccccgaagagcccttgttaggcgagcttacagtgaccggctcatctccggattctctcagcctgtcatggactgtgccgcagggaaggtttgactcgttcacagtgcaatataaggatcgggatggacgacctcaggctgtgcgggtggggggccaggagtctaaagtgaccgtgcgcggcctggaacccgggaggaaatataaaatgcatctttacggcctgcacgaaggcagacgcctgggacccgttagtgctgtgggagtaactgaagatgaagccgagactacacaggcggtgcccactatgactcctgaaccacccataaaacccaggctaggtgaacttaccatgaccgacgctacacccgactcactttctcttagctggaccgtgccagaagggcagtttgaccacttcctcgtgcagtaccggaacggcgacggacaacctaaggcagtaagagttcccgggcatgaggacggagtcacaatctcagggctcgagcccgaccacaaatataagatgaatctttatggcttccatgggggacagcgcgtgggacccataagcgtgatcggagtaactgctgccgaggaagagactccatctccgaccgagctttcaacagaagccccagagcctccagaggagcccttgctaggcgagcttactgtgactggtagcagccctgactctttaagtttgtcctggactattccacagggccacttcgactcttttaccgttcagtacaaggacagagatggcagaccacaggtgatgagagtgagaggggaggagagcgaagtcaccgttggagggttggagccgggaaggaaatataaaatgcatctctacggattgcacgaggggagacgcgtcggacctgtgtcaacagtgggagttaccgccccagaagacgaagcagagaccactcaagctgttcctactacaacccccgaaccacctaataaaccacgcctcggcgagctcacagtgacggacgccaccccagattctctatccctcagctggatggtcccagaaggccagttcgaccacttcctagttcaataccgtaatggagatggccagccgaaagtcgttcgcgttcctgggcatgaagatggtgtgaccattagtggactggaaccggatcacaagtataagatgaatttgtacggttttcatggaggccaacgagttggaccaattagtgtgatcggtgtgacagccgccgaagaggagacaccagccccaaccgaaccctcaaccgaggcccctgagccccccgaggaacctctgttaggcgagctcactgtgactgggagcagtcccgatagcttgagtctttcttggacaatacctcagggccggtttgacagctttaccgtgcaatacaaagacagagacggccggccccaggtggttagagttaggggggaggaatccgaggtgaccgtgggaggactcgaacctggttgcaagtataaaatgcacctctatggacttcatgagggacagcgcgtgggacctgtatcggcagtgggtgtcacagccccaaaagacgaggctgaaacgacacaggcagtcccaacaatgacaccagagccacccataaagcctcggctgggggagcttactgttacggacgctacacctgattcacttagtttatcctggatggtacctgaagggcaattcgaccacttcttagtccaatatcggaatggagacgggcagccaaaggctgtaagagtgccaggtcatgaagacggagttactatttccggcctggaacccgatcacaagtataaaatgaatctctacggatttcacggggggcaaagggttgggcctgtctccgccataggggttactgaggaagaaaccccatcacctactgaaccatccaccgaagcacctgaagctcctgaggaacccttattaggcgagctcacagtgaccggatcctctccagattctctctcactctcttggaccgtaccacagggacgattcgattcctttacggtgcaatacaaggatcgggacggtcagcctcaggtagtacgggtgcgtggcgaggaatctgaagtcaccgtgggaggcttggaacctggaagaaagtataagatgcacctttacggccttcacgaaggccagagggttgggcctgtgtccactgttggaataacagctccactgcccactccattgcccgtggagccaagactgggagaactggctgtagctgccgtgaccagcgattctgtgggtctgagctggactgtcgcccagggcccgtttgatagctttttagtacaataccgggatgctcaggggcagcctcaagcggtacccgtcagcggtgacctcagggccgtggcagtaagcggcctggatcctgcccgcaagtacaaatttctccttttcggactgcaaaatggaaagcggcatgggcccgttcctgtggaagccagaactgcacccgatacaaaaccctcccctcgcctcggagaactcacagtaactgacgcaacacccgattctgtgggcctcagctggaccgtccctgaaggggagtttgactcatttgtagtgcaatataaggataaggatggcagattgcaggtggtacccgtcgctgccaaccaaagagaggtcaccgtacagggcttagagcccagccgcaaataccggtttttgctttatggcttgtcgggacgtaagcgactcggacctatctctgctgatagcaccaccgcccccctagaaaaagagttgcctccccacctaggagagttgactgtagccgaagaaacctcatcatccctcagattatcctggacagtggctcaaggacctttcgactcgttcgttgttcagtaccgagacacggatggccaaccacgcgctgtgcctgttgcagcggaccagcgcaccgttaccgtggaagatcttgaacctggcaagaagtataaatttctgctctatggcctgctaggagggaagagattaggccctgtcagcgcactgggcatgactgctccagaggaagacacaccagcaccggaactggcccctgaggcaccggagccaccagaagaacccaggctgggcgtcctgaccgtgaccgatactactccagactctatgcggctttcttggtccgttgctcaaggaccatttgactccttcgtggtgcagtacgaggacacaaatgggcagcctcaagctctgctcgtggacggagatcagagcaagattctgataagcggcctagagccatcaactccatacaggttcctgttgtacggactgcatgaaggaaagcggctcggacccctgtccgcagagggtaccacaggactggctcctgctgggcagacatccgaagagagtcggccccgtctatctcagctgtctgttaccgacgtaaccacctcttccctcagactgaactgggaggccccacctggcgcttttgattcttttctcctcagattcggagttccgtctcctagcacccttgaaccccacccacgtcctctcctccagcgggaactgatggtccccgggacaagacatagcgccgtgctgagagacctgcgtagtggtacattatactctttgacactgtatggtcttcgcggtccacacaaggctgactctattcaaggcactgctcgaacattatcccctgttttggaaagtccccgagatctccaattctcagagattcgtgaaacctccgctaaagtcaattggatgcctccaccatctagagcagactccttcaaggtttcttatcagctcgccgacggaggtgaacctcaatcagtgcaggtcgatggacaggcaaggacccaaaagcttcaggggctgatcccaggagcgcgatacgaggtcaccgttgtcagcgtgcgtggatttgaggagtcagagcctcttactggatttcttacaacagtgccagatggccctactcagcttcgcgccctaaatcttaccgaaggctttgctgtattgcactggaagcccccacaaaacccagtcgacacctatgacgttcaggttaccgctcccggcgcaccacctcttcaggcagagacccctgggagcgccgtggactaccctctgcacgatctggttctgcacactaattatacggcgacagtgcgcggcctgcgcggacctaatctgacttctccagcttccattacttttaccaccgggcttgaagctccacgcgaccttgaggctaaggaagtcacacccagaaccgctcttttgacatggaccgaacccccagtccggcctgccggctaccttctatcattccacacccccggtggtcagaaccaagagattttactgcctggaggaatcacctcccatcaactgctgggcctctttccctcaacctcgtacaatgctcggcttcaggctatgtgggggcagagccttctcccacccgtgagtactagctttaccacaggcgggctaaggatcccatttccccgtgactgcggagaagaaatgcagaatggtgccggagcctctagaacctcaacaatttttttaaacggtaatcgcgaacggccccttaatgttttttgtgacatggaaacagacggcggaggttggcttgtattccaaagacggatggacgggcagactgatttttggagagactgggaagactacgcacatggctttggtaacatcagtggggagttttggttaggtaacgaagcgctgcactcactgactcaggcaggggactacagcatgagggtggatcttcgagccggtgatgaagccgtttttgcacagtatgactcattccacgtggactcggccgcagaatactacaggctgcatctggagggataccacgggactgccggcgactcaatgtcataccatagtggctctgtgtttagcgcccgggacagggatccgaactcgctgttaatttcgtgtgctgtaagttataggggcgcatggtggtaccggaattgtcactacgcgaacttaaacgggttgtacggatcaacagtggatcaccaaggagtcagttggtatcattggaagggattcgagttttcagttccgttcaccgagatgaaactgcggccccgtaattttaggagtccagcaggcggaggttag

SEQ ID NO: 31993 - RNA, 12729 nt, synthetic construct
  misc_feature 1..12729: note = Description of Artificial Sequence: Synthetic coding sequence
  source 1..12729: mol_type = other RNA
atgatgccggctcagtatgcactcacctccagtttagtgttgttggttttattatctaccgctagagccggacctttctccagcagaagcaacgttaccctgcctgcacctcggcctcctcctcagccaggaggtcacaccgtgggggccggtgtgggttcaccctcatcacagctgtatgagcacaccgtggagggcggggaaaagcaggttgtgtttactcacaggattaacctcccaccaagcacggggtgtggatgccccccaggaaccgaaccgcccgtgttagctagcgaagttcaagctctgagggtgagactagaaattctagaggaactggtgaagggactcaaagaacaatgcaccggaggttgctgcccagctagcgcacaggctggtactggccaaactgacgttaggacgctctgctcactccacggggtttttgatctgtccagatgtacgtgttcgtgtgagcccggctggggtggacctacatgctctgaccccactgatgcggaaatcccaccttcgtccccaccatcggcttcaggctcttgtcctgacgattgcaacgatcagggaaggtgtgtgcgtggccgctgtgtttgttttccggggtatacgggcccttcatgtgggtggccttcctgcccaggtgattgccaaggccgcgggaggtgcgtgcagggggtgtgtgtgtgtagggccgggttctcgggacctgattgcagccagcgttcctgtccgcggggctgtagccagagaggtcggtgcgaaggaggaaggtgtgtgtgcgatcctggttataccggagatgattgtggtatgcggtcgtgccctcgaggatgtagccagcgagggagatgcgaaaatggtaggtgtgtgtgcaatccaggttatacaggcgaggattgtggggtgcggagttgtcctcgcgggtgcagccaacggggtaggtgtaaggatggaagatgtgtgtgcgatcccggctacactggagaggattgtgggactcgtagctgcccatgggattgcggcgaagggggcagatgtgtggacgggagatgtgtctgttggccgggctacacaggagaagactgcagcaccaggacgtgcccacgggactgtcgaggccgcggaagatgcgaggatggggagtgcatttgcgataccgggtactccggggacgattgcggcgttcgaagctgcccaggtgactgtaatcaaagagggcgctgcgaagacggaagatgcgtatgctggcctgggtatacaggaacagattgcgggagtcgagcatgccctcgcgattgtagaggccgtggaaggtgtgaaaatggggtctgtgtgtgtaatgcgggatattctggcgaggactgcggcgtccgaagttgccccggtgactgtcgagggagaggcaggtgcgaatcaggcaggtgtatgtgctggcccgggtatactggacgggactgtggcacaagggcgtgcccgggtgactgtcgaggacgtggtcgctgtgtagatgggagatgtgtatgtaacccaggtttcaccggcgaggattgtgggtctaggaggtgtcctggcgattgccggggacatggcctttgcgaggacggtgtgtgtgtgtgcgatgccggctactctggtgaggactgcagcacccgaagctgccccgggggttgcagaggaaggggtcagtgcctggatgggaggtgcgtatgtgaggacgggtattccggggaggattgcggggtcagacaatgccccaacgactgctcacagcatggggtttgccaggacggggtgtgtatctgttgggaaggttacgttagcgaggactgctcaattcgaacttgcccatctaactgtcatggtagaggtcgttgtgaagaaggccggtgcctgtgtgatcccggatatacaggtccgacttgcgcgactcgaatgtgtccagccgactgtcgggggcgaggccgttgtgtccagggggtgtgtctatgccacgtggggtacggcggagaggattgtggacaggaagaaccaccagctagcgcttgcccaggaggctgtggaccacgtgaactgtgtagagccggtcagtgtgtctgtgttgaaggtttccgagggccagattgcgctattcagacctgccctggggactgccggggccgaggcgaatgtcatgatgggagctgcgtgtgcaaggatggctacgccggggaagattgcggtgaggaagttcctacaattgaagggatgagaatgcacttactggaagaaacgacagttcgcacagagtggactcctgcacccggcccagtggatgcctacgagatccagtttatacccacgactgaaggagcatcgcctccatttacagcccgagtcccatcctctgcgtcagcctacgatcagcgaggtctggctcctggacaagaatatcaagtgaccgttcgggcgctgagggggacttcctggggactccccgcttctaaaactatcaccacgatgattgatgggccacaggatctgcgagtggtggctgtcacaccgacaaccttagaattagggtggctaagaccccaggcagaagtggaccgcttcgtagtttcttacgtatctgctggtaatcaaagagtacgtttggaggttcctccagaagctgacggaacccttttgaccgacttaatgccaggggttgagtatgttgtaaccgttactgctgaaagaggtagggcagtctcctacccagcatcagtacgcgctaatactggaagcagccccttaggcctcctaggtactaccgacgagccaccaccgagcggacccagcacgacccagggtgcacaggcgccactgttacaacagaggccacaggaactcggcgaactgagggtgctgggacgagacgagactggcagactgagagtcgtgtggacggcccagcctgatacatttgcatatttccagctgagaatgagggtcccagaaggccctggagcccatgaggaggtactacccggagatgtgagacaagccctggtacccccccctccgcctggaacgccttatgagttatctttacatggagtaccccccggtggtaaaccttctgaccccattatttaccagggaattatggataaggacgaggagaagcccgggaaaagttcaggcccccctagactgggtgaacttaccgttacagatagaacctccgacagcttgctcctgcgatggacagtccctgagggggagtttgacagtttcgtgattcagtacaaggatagagatggtcagccacaggtcgtgccagtggaaggccctcaacgtagcgctgtgattacttctctggacccaggacgaaaatataagttcgtactttatggtttcgtgggaaaaaaaaggcacgggcccctcgtcgcagaagcaaagatactaccgcaatctgaccctagtcccgggactccccctcacctcggtaacctgtgggtaactgatccaacccccgattcacttcacctgtcttggaccgttcccgagggacagttcgatacctttatggtgcagtacagggacagagatggccggccccaggtagtccccgtggagggaccagaacgatctttcgtggtaagtagcctggatcctgatcataaataccgtttcaccctgttcggaatcgccaataaaaagcgttacggccctttaactgctgacgggacaaccgcccccgagaggaaggaggagccacccagaccagagttcctggaacaaccactgcttggcgaactcactgtcacaggtgtcactcccgattctctgcggctttcctggactgtggcccaaggccctttcgactctttcatggtacagtataaagatgcacaaggccaaccgcaagcagttcctgtagcgggcgatgagaacgaggtgacagttcctggactagacccagatagaaagtacaagatgaacctatacggattgaggggacgtcagagagttggtccagaatccgttgtagcgaagaccgccccacaagaggacgtggacgaaacccccagtcctaccgaactggggacagaggccccagaaagtcccgaagagccgctcctaggagagcttaccgtgaccggtagcagcccagactccctttccttgttctggacagtgccccaaggtagttttgactctttcactgttcaatacaaggatagagacggaagaccacgcgctgtgagagtcggaggtaaggagtctgaagttactgttggaggtcttgaaccaggacataaatataagatgcatctgtatggcctccacgaaggtcagagggtggggcctgtctctgctgtaggagtaaccgctccacaacaagaggagactccccctgctacagaatctccgttggagccgaggctgggtgaactgactgtgaccgacgtgacccctaactcagtgggcctttcttggactgtgcctgagggccaatttgattctttcattgttcagtataaggacaaggacggtcaaccacaagtcgtgcctgtagcggctgaccagcgtgaagtgacagtttataacctagagccagagaggaaatacaagatgaacatgtacgggttgcatgacggccaacgaatgggccctctgtcagtcgttatagttactgccccgctgccacccgcccctgctactgaagcaagtaaacctccgctggagcctagacttggagaactaacagtaaccgatatcactcctgattcagtaggcttatcttggacagtacctgaaggcgagtttgatagttttgtcgtccagtataaagatagagacggacaacctcaagtcgtgcctgtagccgctgaccagagagaggtgacaataccggacctcgagccctcccgcaaatataagttcttactcttcggcatccaagacggcaagcgccggtcccccgtgtccgtggaagcaaagaccgtggcgagaggagacgcttcccctggggctccaccacgcctgggcgaactctgggttaccgatcccacccctgacagcctacggctgagctggactgtgccggaagggcaatttgactccttcgtagtacagtttaaagacaaagacggacctcaggtcgtgcccgtcgaaggtcacgagagatctgtgaccgtgactccacttgatgctggacggaagtacagatttttgttgtacgggctgctcgggaagaaaagacatggcccactgacggccgatggaaccacagaggccagatccgctatggatgacacagggacgaaacggccccctaaacctaggttaggagaagaactccaagttactactgtgacccagaacagtgttggcctatcatggacggtgccggagggacaatttgactcctttgtggttcagtacaaggatagggacggccagccccaagtagtaccagtggagggctccctgagggaagtatccgtcccaggtctggatccggcacaccgctacaaattactattgtacggcctacaccatggtaaaagagtgggccccattagcgctgtcgcaatcaccgccggtagagaggagacagagacagaaacgacagcacccaccccccccgcgcccgaaccacatctcggcgagcttaccgttgaagaggccacttctcatacattacatctgtcttggatggtaacagaaggagaatttgactcctttgagattcaatatactgaccgagatggacaattgcaaatggtgagaattggcggggatcgcaacgacattacactgagtggactggagtctgatcaccgctacctggtgactctctatgggttcagcgacggcaagcacgtgggccccgtacacgttgaggcactaaccgtccccgaagaagagaaaccatccgaacctcctacagctacgccggaacctcccattaaacctagactcggggagctcactgtgactgacgccactccagatagcctgtcactgtcgtggaccgtaccagagggacaatttgatcacttcctcgttcagtaccgcaacggtgacggccagcctaaggccgttcgcgtacccgggcacgaagaaggtgtcactatttctggactggagcctgatcataaatataagatgaatttgtatggatttcacggcggacaacgaatgggccctgtgagcgtggtcggcgtgactgctgctgaagaagagacaccctcgccaacggaaccgtcaatggaggcccctgagcccgccgaagaacctctattaggagaattaaccgttacaggtagctctcctgactcattaagtctctcttggacagtcccccagggaaggtttgatagtttcaccgtgcagtacaaggaccgtgacgggcgaccccaggtcgtcagggtgggaggcgaagagagtgaagttacggtcggaggattagagcccggaaggaaatacaaaatgcatctgtatgggttgcacgagggtaggcgggtgggaccagtcagcgctgtgggcgttacagcacccgaagaggaaagtccagacgctcccctggcaaagctcagacttggtcagatgactgtccgcgatatcaccagcgattctttatctctctcatggaccgtgcccgagggccaattcgatcactttctggtgcaatttaaaaacggcgacggccagcccaaagctgtgagagtgcccggccacgaggacggcgtgactatctctggcctggaaccagatcacaaatacaaaatgaacctgtacggtttccatggagggcagcgggttggaccagttagtgccgtgggcctgaccgcacccggaaaggacgaggagatggctccagcttctaccgaaccacctacccccgaacctcccatcaaaccccgactagaagaactgacagtaaccgacgccactccagacagcctgtctctcagctggacggtgcccgagggacaatttgatcactttctcgtgcagtacaaaaatggggacggccagcccaaagcaacccgggtccctggccacgaggaccgcgtgaccatttctgggttagagcccgataacaagtataaaatgaatctatacgggtttcacggtgggcagagagttggaccagtgtcagccatcggagtgacagccgcagaagaggaaacaccatcaccaactgaaccgtccatggaagcccctgagccccctgaagaacctctactcggggaactgacagtgaccgggagtagccctgactcactctctttgagttggacagtaccacaaggtcgtttcgacagcttcaccgtgcaatacaaggatagagacgggcgccctcaagtcgtacgggttgggggagaagaatccgaagtaacggtcgggggcctggaaccaggaagaaaatataagatgcatttatatgggctacacgaaggacgccgcgtcggcccggtgagtacagtgggagtgacggccccgcaagaagacgtggatgagacccccagccctacagaaccaggaactgaggccccaggacctccagaagaaccactgttaggtgaactgaccgtgaccggaagctcccctgatagcttgtctctatcatggactgtcccacaaggtcgctttgattcttttactgtacaatacaaagacagagatggaagaccccaggcggtgagagtggggggacaggagtccaaagtgaccgttcggggattggaaccaggaaggaaatataaaatgcacctgtacggattgcatgagggccgacgactcgggcccgttagcgcagtgggagtaacggaggacgaggccgagaccacccaagccgtccctaccatgactccagaacctccaattaagcctcgcttaggtgagctcacaatgacagacgcgacacctgactcactatcattgtcttggaccgtccctgaagggcaattcgaccattttttagtacaatatcgcaacggagatggccagccaaaagctgtacgagtccccggtcacgaagacggcgtaacaatttctggactggagcctgaccataaatacaaaatgaacctgtacggctttcatggaggtcaacgtgtcgggcccattagcgtaattggagttacagccgccgaagaggaaactccatccccgacggagctcagtactgaagcacccgaaccaccagaggagccccttctgggcgaactgactgtgacaggatctagtcccgactccctctcactgtcctggaccataccacagggtcatttcgattcattcacagttcaatataaagatagagacggccggcctcaggtgatgagagtgcgaggggaggagagcgaagtcaccgttgggggtctggaacctgggaggaagtataaaatgcatttatatgggcttcatgagggaaggagagttggcccggtgagcacagttggcgtgaccgaggacgaggccgagacaacccaggctgtgccaaccacgacccccgagccacccaacaaacctagactcggcgaactgacagtcacagatgctacgcctgattccctatcactgagctggatggtgcctgaaggacagttcgatcacttcctggtgcagtacagaaatggcgacggacagccaaaagtggttcgagttcctgggcacgaggacggtgtaaccatttctggactggagcccgatcataagtacaagatgaacctgtatggctttcacggtgggcagcgcgttggacctattagtgtgattggtgtcaccgcggccgaagaggaaaccccagcacctactgaaccatcgactgaggctcctgaacccccggaagaaccactgttaggtgaacttaccgttacgggctcatcccccgactcactatctctatcttggaccattccccagggacgctttgatagctttaccgtgcagtataaagatcgggacggacggccacaggttgtgcgcgtgaggggagaggagtcagaagtcaccgtaggtggactcgagcctggatgtaagtacaaaatgcacctgtatggcctacacgagggacagcgagtgggacccgtgtcagcggtcggcgtgaccgcgcctaaagatgaggccgaaacaacacaagctgtacccacaatgacccctgaacctcccattaaacccagactgggcgagctgacagttaccgacgcaacccctgactccctaagtctctcttggatggtgcctgaggggcagtttgatcactttttggtgcagtacaggaacggcgatgggcagccaaaggccgtaagagtccctggtcatgaagacggagtcaccatttccggactggagccagatcacaaatacaagatgaatctttatggattccacggtgggcagcgagttggccccgtcagtgccattggagtgacagaagaagaaaccccaagccctaccgaaccatccaccgaagccccagaagcacccgaggaacctctgctaggtgagctgactgttaccggttcctcccccgactctctgagtctgagctggacggttccgcagggccgttttgatagctttaccgtgcagtataaagatagagatggccagcctcaggttgtccgagttaggggggaagaatctgaagtgacagtgggcgggctggagcctggtcgaaagtacaagatgcatctgtatggactccatgagggccaaagggttgggccagtttctacagtcggaatcactgcaccgctgcctacaccattgcctgtagaacctcgtcttggcgagcttgccgttgcggctgtaactagtgactcagtcggcctgtcctggacagtggcccagggaccattcgactcttttctcgtgcagtaccgcgatgctcagggacagcctcaagcagttcctgtgtcaggggaccttcgcgccgtggccgtgtcaggattggatccggctagaaaatacaagttcttgctgtttgggctccagaatggaaagcggcacggacccgtccccgtagaagcccgcaccgcacccgataccaagccttcgcctcgacttggcgagctgacagtgacagatgccactccggattctgtgggtttgagctggactgttcccgaaggcgaatttgactctttcgtagtgcagtacaaggataaagacggtaggctccaagtagtgcctgtagccgcaaaccagagagaagttacagtgcagggactggaaccctcaagaaaatatcgtttcctgctctacggactctcgggtcggaagcgtctcggaccaatatcagctgattccacaacagctcctcttgagaaagaattacctccccaccttggagagctgaccgtagctgaggagacatcaagttccctgcgtctatcttggaccgtcgctcagggcccattcgatagttttgtggtgcagtatagagacacggacggccagccacgcgcagtaccggtggccgctgaccagagaacagtgaccgttgaagacctggaacctggcaaaaagtacaaatttttgctgtatggattgcttggaggaaagaggctgggtccagtcagcgccctgggtatgaccgcacctgaagaagatacaccggcgcctgaattagcaccagaagcccctgaaccgcctgaagagccaagactgggggtgctgaccgtaacggatacaaccccagattcaatgagactctcctggagcgtcgcccaaggacccttcgatagcttcgtcgttcaatatgaggacacaaacgggcagcctcaagcattgctcgtcgacggagaccagtcaaaaatactgatcagtggcttggaaccctcaactccgtacagatttctcttgtatgggttgcacgaaggaaaacgactcggtcccctcagcgccgaaggaacaacagggctggcccccgcaggacagacctcagaagaatcacgacccagactgtctcaactttctgttactgacgtcacgactagcagtcttcgactgaattgggaggccccacctggcgcatttgatagtttcctacttcggtttggagtcccttcaccttctactctcgagccccatcccaggcccttgttacaacgcgaacttatggtgcccggaactcgccattccgccgtgctacgtgacctaagatctggcactctatattccctcacactttatggtctgcgcggaccacacaaggcagactctatccaaggcaccgctagaacactgagtcccgtgctcgaatctcccagggatttgcagttttctgagattcgcgaaacttcggctaaagtgaattggatgcccccgccctcccgtgcagattcattcaaagtcagttaccagctcgccgatggaggcgagcctcagtccgtgcaagttgatggacaagcacgtactcagaagctccaaggcttgatccccggtgcccggtatgaggtgactgtggtctcagttcgtggtttcgaggagtcagaacctctgactggatttctgacaacagtgcccgacgggccaactcaattgagagctttgaaccttaccgaaggattcgccgtcctccactggaagccgcctcagaatccggtggatacttacgatgtgcaagtgacagctcctggcgcaccccccctgcaggcagaaacacctggctcagctgtggattaccctctccatgatctcgttttacataccaattacacagctactgtgcgcggcctgagggggccaaatcttacatcacccgcttctattactttcacaacagggctggaagctccgagggatctcgaggccaaggaggtcaccccccgaaccgccttgctcacttggaccgagcctccagtgaggcctgccggctacctgctatcttttcatacacctggcggacaaaaccaagagattctgctacccggagggattacaagccaccagctgctcggacttttccctagtacgtcctacaacgcccggctccaggcaatgtggggtcagagcctactgccacccgtctcgaccagctttacgaccggaggactcagaattccttttcctcgagactgcggcgaggagatgcagaatggcgctggggcaagtagaacaagtacgattttcttgaatggaaatcgggaaagacccttaaacgtcttttgcgacatggaaaccgacggaggaggatggttagtgttccagcgacgaatggacggacaaactgacttctggcgggactgggaagattatgcacacgggttcggaaacatcagcggcgagttttggctgggaaatgaagccctccatagtctcacccaagccggcgattacagcatgcgtgtggatttaagggctggagacgaggccgtatttgctcagtacgattcctttcacgttgattcagctgccgaatactatcgacttcacctggaaggttatcacggcactgcaggcgatagtatgagctaccactccggctccgtgttctccgctcgagatcgggaccctaattctctgcttatcagttgtgctgtcagttatcgtggagcttggtggtatcggaattgtcactacgctaacctgaacggcctgtacgggtcaacagtggaccatcagggtgtgtcttggtatcattggaaaggctttgagttcagtgtccccttcacagaaatgaaactgaggcctagaaatttcaggagtccagctggcggaggttag

SEQ ID NO: 31994 - RNA, 2022 nt, synthetic construct
  misc_feature 1..2022: note = Description of Artificial Sequence: Synthetic coding sequence
  source 1..2022: mol_type = other RNA
atgcgactaagctggagtgtagctcagggcccatttgacagtttcgtcgtgcagtatgaggatacaaatggacaacctcaggcactgcttgtagatggagaccagtctaagatactgatctctggccttgaacctagtacgccatataggtttctgctttacgggctgcacgaggggaaacgattaggtcctctgagcgcggaagggaccacgggactcgcaccagccggacagacaagcgaggagagcagacctagactttcccagctcagcgtcacagatgtcactacaagctccttgcgtctgaactgggaggccccccctggcgcttttgattcctttttgctgcgattcggcgtcccaagcccttctacattggaaccccaccccagacctctgctgcaacgagaactcatggtgcctggaacacgccacagcgccgtacttcgggacctgagatccggcacactttattccctgacactttacggcttgagagggcctcacaaggccgactctatacaaggtactgcacgcacactttcacccgtgctagagagtcccagggacttgcaattttctgagatacgggaaacatcagccaaggtgaactggatgcctcccccatcaagggctgactcctttaaggtctcctaccaattagccgacggaggtgagccacaaagcgtacaagtagacggccaggcaaggacccagaagctgcagggactgatccccggtgctaggtatgaggtgacagtggtgtccgtaagaggtttcgaggaatcagaaccgctcacaggtttcctgaccaccgtccctgatggacctacccagttaagagcactcaacttaactgaaggctttgcagtcttacactggaaaccaccccagaatccagtcgacacttacgacgttcaagttacagcgccaggggctccacctcttcaagccgagaccccagggagcgcagtggattatcccctgcacgacttggttctgcacacaaactacacggccacagtacgaggactgcgcggaccaaacttgactagcccggcaagcatcaccttcacaacaggactggaagcccctagagaccttgaagctaaagaggtaacaccacggaccgctctactgacatggactgaaccgcctgtgcggcctgcgggttacctgctctcatttcacaccccaggaggccagaatcaggagatactacttcccggcggcattacttcacaccaactgcttggactctttccttctacttcctataatgcgaggctgcaggcaatgtggggtcagtcgctgttgccccctgttagtacctcattcaccaccggtggactgagaatccccttcccacgcgattgcggtgaagagatgcaaaatggggcaggtgcatccaggacctccactatattcctcaacggcaatcgagaacggccactgaacgtattttgtgacatggagaccgatggcggcggatggctggtcttccagagaagaatggatgggcaaactgacttttggagggattgggaggattacgctcacggctttggaaacattagtggggaattctggttgggcaacgaggctttacactctttaacacaagcgggagactattcaatgagggttgatttgagggcgggcgatgaagcagtattcgctcagtacgactcttttcacgttgatagcgcagcagagtactataggcttcacctggagggataccacgggactgctggtgattccatgtcttaccacagcggaagtgtattttcagcacgggacagagatccaaactcactattgatcagttgtgcggtttcttatcgcggagcttggtggtaccggaattgtcactacgcgaatctgaacggtctctatggaagcactgtggatcaccagggggtcagctggtaccactggaagggatttgagttctcggtcccattcactgagatgaaattgcggcctagaaactttcggagcccagctggaggcggatag

SEQ ID NO: 31995 - RNA, 1335 nt, synthetic construct
  misc_feature 1..1335: note = Description of Artificial Sequence: Synthetic coding sequence
  source 1..1335: mol_type = other RNA
atgccgagatccggcgcgcccaaagaacgacctgctgaaccactgacaccacccccatcctacggtcatcaaccccaaaccgggtccggagagtccagcggtgcgagcggcgataaagatcacctgtatagtactgtgtgtaagcccagatcccctaaacctgcagcgcccgccgcgccccccttctcctctagtagcggggtactgggtactgggctgtgtgaactggaccgactgctacaggaactaaatgctacacaattcaacattacagacgaaattatgtcccagtttccaagtagtaaagtggcgtcaggtgagcaaaaagaggaccagtccgaagacaaaaagcggcctagcttaccatctagtcccagtccaggcctgcctaaagcgtccgccacatcagcgacactcgagcttgaccgcctaatggcgtcactgtcagattttagagtccagaatcacctccctgcttcgggccccactcagcctcccgtcgtgtcatccaccaatgagggtagcccatccccaccggaacccaccggaaagggatcactcgatacgatgctcgggttactgcagagcgatttaagccgtcgcggcgtgcccacccaggcaaagggcttgtgtggatcatgcaataagccgattgcgggtcaggttgtgactgcactagggcgcgcttggcatccagagcattttgtttgtggaggttgttcaacagcactgggaggttccagcttcttcgaaaaagatggcgcacctttttgtcccgaatgttacttcgagagattctcacctcggtgcggattctgcaaccaacctattaggcataagatggtgaccgccctggggacgcattggcatcctgagcatttctgttgcgtctcttgtggtgaaccattcggggatgaagggtttcacgaacgtgagggccgtccatattgtcgacgagacttcctgcaactttttgccccacgctgccagggatgtcaagggcctatcctagataactatatctccgctttgtctgctttatggcaccccgactgtttcgtgtgccgcgaatgtttcgcccccttctctggcgggagcttctttgaacacgaaggtagaccactttgcgagaaccattttcacgcacgacgcggatctctgtgcgctacgtgcgggctgcctgtgacgggcaggtgtgtgagcgcgctcggccgtcgattccaccctgaccattttacatgtacattctgcctccggcccctgaccaaggggagctttcaagaaagagccggaaaaccatattgtcagccatgtttcctaaaactgttcggatag

SEQ ID NO: 31996 - RNA, 1335 nt, synthetic construct
  misc_feature 1..1335: note = Description of Artificial Sequence: Synthetic coding sequence
  source 1..1335: mol_type = other RNA
atgcctcgttccggcgcacccaaggagagacccgcagaacccctcacaccacccccttcttacggtcatcaaccacagacaggaagcggagaatccagcggtgcttcaggcgataaagaccatctttacagtaccgtctgtaaaccgcggtcacccaaacccgccgcccctgccgccccacccttctcttcttctagcggagtgttaggcacgggactctgcgaactcgaccggctgttgcaagagctgaatgctacccagtttaacatcacagatgagattatgagccagttcccatcgtccaaagttgcatccggagaacagaaagaggatcagagcgaagataaaaagcggccgtccttgcccagctccccttcccctggattacccaaggcaagcgctacatccgcaacactggaactagaccggttgatggccagcctgagtgattttagagtccagaatcacctgcctgcttccggaccaacccagccccccgtagtaagcagcacaaacgagggcagcccatcaccgcctgaaccgaccggcaagggatccctggacacaatgttaggcttgttgcagagtgacctctcgcgaagaggcgttccaactcaggccaaaggtctctgtggttcctgtaacaagcctatcgcgggtcaagtcgtcactgctttgggacgtgcatggcatcctgaacactttgtgtgtggcggttgttctaccgccttaggcggttcttcttttttcgagaaggatggggctccgttttgtccggaatgctattttgaaagattcagcccacgctgtggcttttgcaatcaacctataaggcacaagatggtgaccgctctcggcacccactggcatcctgagcatttctgctgtgtgtcatgtggcgagccttttggggatgagggattccatgaacgcgagggaaggccgtactgccgaagagattttctccagttatttgctccgcggtgccaaggttgtcagggtccaattctagataattatatatccgctttgtccgctctttggcaccctgattgttttgtgtgtagagaatgttttgcacctttctctggcggctccttcttcgagcacgagggccgcccattatgcgagaatcactttcacgctaggcgcgggagcctctgtgcaacatgtggattaccagtcactggtagatgcgtgtccgctctaggacggcgcttccatcccgaccattttacatgcacattttgcctcagaccccttaccaaaggctccttccaggagcgcgcgggcaagccctactgtcaaccatgcttcttgaaactcttcggctag

SEQ ID NO: 31997 - RNA, 1386 nt, synthetic construct
  misc_feature 1..1386: note = Description of Artificial Sequence: Synthetic coding sequence
  source 1..1386: mol_type = other RNA
atggaagaccttgatgcgctgctctcagaccttgaaactacaacctcgcatatgcctcgttccggggcgcctaaggaacgacccgctgaacccctgacgcctccaccctcctacggccaccaaccacagacaggcagcggcgagagctctggtgctagcggggataaagaccacctctactctacagtgtgcaaaccaaggagtcctaaaccagccgctccagccgcacctcccttttcatcatccagcggcgtgctgggcacaggactgtgcgagttggaccgcctcctacaggaactcaacgctacccagtttaacataacagacgagatcatgtctcagtttccgtcaagtaaagtagctagtggcgaacagaaggaagaccaatccgaagataaaaagcgaccatccctccctagttctcctagtcctggcctgcctaaagcatctgccacctcagcaaccttggagctagacagactgatggcctccctgagcgactttcgcgtacagaatcacttgcccgctagcggtccaacccagccacctgtggtgtcttcgactaatgaggggagcccttctccacccgagccaaccggaaagggctccctggataccatgctggggctcctccagtccgacttgtctagacgcggcgtcccaacacaggccaagggactgtgtggatcttgtaataaacccattgctggacaggtcgtcactgctttgggcagagcttggcaccccgaacatttcgtgtgcggcggatgtagcaccgcactcgggggatcttctttctttgaaaaggacggtgccccattttgccccgaatgctattttgaacgcttttctccccgctgcggattttgtaaccagccgatccggcataagatggttacggccctcggcacccactggcatcctgaacatttctgctgcgtatcttgtggcgagccttttggtgatgaaggttttcatgagagagaaggtcgtccttactgcagacgggactttctgcaactgtttgcaccgagatgccagggatgccaaggacccattttggacaactacatttcagccctgtcagcactgtggcatcctgactgctttgtttgcagagaatgcttcgccccctttagcggaggttcttttttcgaacatgaaggccgaccactttgtgagaatcatttccatgcccgcagaggctccttgtgtgcaacctgcgggttgccggtaactggtagatgtgtgtccgcgctgggtcgccgctttcaccctgatcacttcacatgtacattctgcttgcgcccactgaccaaaggcagctttcaagagcgcgctggaaaaccgtattgtcagccatgttttctcaaactcttcgggtag

SEQ ID NO: 31998 - RNA, 3075 nt, synthetic construct
  misc_feature 1..3075: note = Description of Artificial Sequence: Synthetic coding sequence
  source 1..3075: mol_type = other RNA
atgtgtgccagaatggccggacgaaccactgctgctccaagagggccatatggtccctggttgtgtcttcttgtggcattagctcttgacgttgtacgggtcgattgcggccaagcccccctggaccccgtatacctgcctgccgcccttgagctgctggatgcccctgagcattttagagtgcaacaagtgggccattaccctccggccaattcttccctgtcttctagatctgagacttttctgttgctacaaccatggccaagagcccagcccctgctcagggcctcttacccacctttcgccacccagcaggtggtgcctccccgtgttaccgaaccgcatcagagacctgtaccctgggacgtccgggcagtatcagttgaagctgcagttacacctgccgaaccatacgccagagttttattccacctgaagggtcaagattggccacctgggtctgggagtcttccttgcgccagacttcatgcgacacacccggctggaaccgcacaccaggcctgtcgttttcagccatcactgggcgcctgcgtggtggagctcgagcttccctctcattggttctcccaggcatccaccacaagggctgaactcgcctacactctcgagccagccgctgagggaccgggagggtgcggtagcggcgaagagaacgacccaggggagcaggccttacctgtcggaggggttgaactacgacccgcagacccccctcagtatcaggaggtcccacttgatgaagccgtgaccctccgcgtccccgacatgcccgtccgcccaggtcaattgttctctgccactttgttgttaagacataatttcactgcttctttactcacattgagaattaaagtgaagaaaggactgcacgtgactgccgctaggccagcacaacccaccctgtggaccgctaaacttgatcgctttaaaggttcacgccaccacactacactgattacatgccatcgggcagggcttacagaacctgatagctcttctcctctggaactatctgaattcttatgggtggacttcgtagtggaaaatagtaccgggggcggggtggctgttactaggccagtaacgtggcaactggaatatccgggacaggcccctgaggctgagaaagacaagatggtttgggaaatcttggtttctgaacgcgatatcagagccctgatcccgttggcgaaggctgaagaattggtgaacacagcaccactgaccggcgtcccccaacatgtgcctgtaagactagttacagtagacgggggtggggcactcgtcgaggtgactgagcatgtaggctgcgagagcgccaatacccaagtgcttcaagtgtcggaggcatgcgatgctgtttttgtggccggcaaggaaagccgcggcgcacgcggagtccgtgttgatttttggtggagacgtctgcgcgcaagccttaggctgacagtttgggcccccttattaccccttaggatcgaattgactgacacaacactcgagcaggttcgaggctggcgtgtgccggggcccgctgagggccctgcagaacccgcagcagaggccagtgatgaggcagaacgcagagcgcgcggctgtcaccttcagtatcagagagccggagtgaggtttctagcaccgttcgccgcccaccctctggacgggggtagacgtctgacccaccttctcggaccagactggcttctggacgttagccacctagtcgcaccgcatgccagagttcttgactcccgggttgcttcgttggaaggaggtagagtggtggtcggtagagaacctggcgtgacgtccatcgaagttcggagccccttgtctgatagcattttgggagaacaggctctcgccgttactgatgataaagttagcgttcttgagctgcgcgtgcagcctgtcatgggtatttccctcaccctgtctcgtggcactgcccacccaggggaagtgacagcaacttgctgggcccagtctgccctcccggcgcccaagcaagaagtcgcactgagtctgtggctttctttctcagaccacaccgtcgcccctgcagaactgtacgaccggcgagatctaggtctgtcagtgtcagccgaagaacccggcgcaatcctgcctgccgaagaacagggcgcgcagctgggggtcgtggtcagtggagccggggcagaggggcttccattacacgtcgccttacatccacctgagccttgtcgacgcgggcggcacagggtgcctctagcatcaggaacagcatggttaggcctgcccccagccagcactcccgcccccgcattgccaagttcaccggcctggtctccccccgccaccgaagcaactatgggcgggaaaagacaagtggcagggtcggttggaggaaacacaggagtgagaggaaaattcgagcgagcggaagaggaggcccgaaaagaagagaccgaggcacgggaagaagaagaggaagaggaagaagagatggtccccgctccacagcacgttaccgaactcgagctgggcatgtacgcactgctaggagtgttttgcgttgccatattcatatttctggttaatggggtggtgtttgtgctgcgttaccaaagaaaagagccacccgattctgctactgaccccacatcccctcaaccccacaactgggtgtggctgggcacggatcaagaagaacttagccggcagctggatcgacagtcaccaggcccgcctaagggtgaaggcagttgtccttgtgagtctggaggaggcggagaggccccaaccctggcccctggcccacctgggggtacaactagtagttcctcaactctcgcacgcaaagaggccggtgggaggaggaaaagagtagagtttgttacttttgcccctgcaccccctgctcagagtccagaagagcctgtgggagctcccgctgtgcaaagtatcctggtggcaggagaggaggatattaggtgggtgtgcgaggacatggggctcaaagatccagaagaattgcggaactacatggaaagaatacgaggaagtagctag

SEQ ID NO: 31999 - RNA, 1368 nt, synthetic construct
  misc_feature 1..1368: note = Description of Artificial Sequence: Synthetic coding sequence
  source 1..1368: mol_type = other RNA
atgggtcttagcacagttcccgacctgttgcttcccttggtgctgcttgaactcctggtaggtatataccccagcggagttattggcctggtccctcatctcggcgaccgcgaaaagcgagatagcgtgtgtccccagggaaagtatatccacccccagaataatagtatctgttgcaccaagtgccacaaaggaacatatttatataacgactgccccggacctgggcaggacactgactgtagagaatgcgaatctggctcctttaccgcctccgagaatcacctgcgacactgcttgagctgttccaaatgcagaaaagagatgggacaggttgaaatctcatcatgcacagtggatcgcgataccgtctgcggttgtagaaagaaccaatacagacattactggtcagagaacttgttccaatgttttaattgtagcctctgcctgaacggaaccgtccacctgtcttgccaagagaaacagaataccgtatgcacgtgccacgctggatttttcctgcgcgaaaatgaatgtgtctcctgcagcaactgcaagaagtctttggaatgtaccaagctgtgtttacctcaaattgagaatgtcaagggaaccgaagattcaggtacaaccgttctgctgccactcgtgatcttcttcgggctttgcctcctttctctgctcttcattgggttaatgtatagatatcagaggtggaagagcaagctctactcaatagtctgcggcaaatccacgccagagaaagagggcgagttagagggtaccaccacaaagccactggcgccaaacccaagtttcagtcccacacccggctttacaccaacactcggcttttctcccgttcctagtagcacattcacgagttcctctacctatacccctggcgactgcccaaatttcgctgccccacggcgcgaagtcgccccaccatatcagggagcagacccaatcctggctaccgcgcttgcatccgatcctatccccaaccctcttcagaaatgggaagactccgcgcacaagccccagtcattagataccgacgaccctgccacactttatgccgtggtggagaacgtacctcctttgcgctggaaagaattcgtacgccgcctaggcctgtctgaccatgagattgaccgcctagaacttcagaatggacgttgcctgagggaggctcagtattcaatgctcgcaacgtggcgcagaagaacgcctcgccgagaagcaacactcgaactcttaggacgcgtgttacgcgacatggacctgctggggtgtttggaagatatcgaagaagctctgtgcggacccgctgcattaccacctgctccctccctgttaaggtag

SEQ ID NO: 32000 - RNA, 657 nt, synthetic construct
  misc_feature 1..657: note = Description of Artificial Sequence: Synthetic coding sequence
  source 1..657: mol_type = other RNA
atgggcctctcgaccgtgccagatctattattgccactggtattgctggaactgctggtaggcatctacccttcaggggtgatagggttggttcctcacttaggcgaccgcgaaaaaagagattccgtttgtccacaagggaaatatatccatccccaaaacaacagtatttgctgcaccaagtgccataagggaacatacctgtataatgactgtccaggtccaggccaggacactgactgccgcgaatgtgagtccggaagctttactgccagcgagaaccatctgcgtcattgtctgtcctgttccaaatgtcggaaggagatgggccaggtggagatttcaagctgcactgtcgatagagataccgtgtgtggctgtcggaaaaaccaatatcgccactattggtctgagaacctttttcagtgctttaattgctccctgtgtctcaatggtaccgtgcacctatcctgtcaggaaaagcaaaacacagtgtgtacctgccatgccggattctttctgcgcgaaaacgagtgtgtctcatgttctaaagtgctgttgtgccgacccgggtggaatgctgttgcccggtctcgcctgaccgcaacctccgccagccagatacaagcgattctccttttacaaccacccaaatag

SEQ ID NO: 32001 - RNA, 1386 nt, synthetic construct
  misc_feature 1..1386: note = Description of Artificial Sequence: Synthetic coding sequence
  source 1..1386: mol_type = other RNA
atggcacccgttgccgtatgggcagcactcgctgtcggcttggaattatgggccgccgctcacgccctccctgcccaagtagccttcaccccttatgcaccagaacccggctcgacctgtcggctgcgagaatattacgatcagacagcccaaatgtgctgttctaaatgcagccccggtcagcatgcaaaggtgttctgtacaaagacctctgacaccgtctgcgacagctgcgaggacagtacctatacccagctctggaattgggtaccagaatgcttaagctgcggttcaagatgttccagtgatcaggtcgagacgcaagcatgtactcgagagcagaatagaatatgcacttgccgtccaggttggtactgcgctctgtccaaacaagagggatgtcgcttatgtgctcccttgcgcaaatgtcgcccaggattcggagtggccagacccgggaccgaaacctccgatgttgtgtgcaagccctgcgctccaggcactttctccaacaccacttcctccacagatatatgtcggccacatcagatttgtaacgttgtggctatacctggtaacgcctcaatggatgccgtgtgcacctccacgagcccaacacggtcgatggctccaggcgccgtgcacttaccccagcctgttagtacccgaagccagcacactcagccaacacccgaaccaagcacggcaccttctacatccttcctccttcctatgggaccctcacctcccgccgagggatctactggcgacttcgcactgcctgtggggttgatcgttggagtgactgctctcggactccttataatcggggtggtcaactgcgtgattatgacacaagtcaagaagaaacccttatgcttacaaagagaagctaaagtaccacacttgccagccgacaaagcaagaggtactcaaggcccagaacagcagcatctgcttataacggcaccaagtagttctagttccagtctcgaaagttctgctagcgcactcgatcgccgcgctcccacaaggaatcaaccacaggctcccggagtagaagcaagtggagcaggagaggctcgcgccagtacaggttcctccgactcaagccccgggggtcatggaacccaagtgaatgtgacgtgcatcgtgaacgtgtgctcctctagcgaccatagttctcaatgctcatcccaggcttcttccacaatgggcgatacagattcatccccgagtgaaagcccaaaagacgagcaggtcccattcagtaaagaagagtgtgcgttcagaagccagttggaaacgcctgaaactttgcttggttctaccgaagagaaacccctgccactgggggtccctgacgctggaatgaaaccctcttag

SEQ ID NO: 32002 - RNA, 807 nt, synthetic construct
  misc_feature 1..807: note = Description of Artificial Sequence: Synthetic coding sequence
  source 1..807: mol_type = other RNA
atggcccctgtggccgtgtgggctgctcttgccgtggggctggaactgtgggccgccgcacacgctctgcctgcccaagtagcgtttactccgtacgcccctgagcccgggtctacttgccgcctcagagagtactatgatcaaaccgcgcagatgtgttgttccaaatgctcacccggccagcacgccaaggtcttctgcacaaaaacaagcgacacggtgtgtgattcttgtgaggattccacctatactcagttatggaattgggttcctgaatgtctatcctgcggctctcgctgctctagtgaccaggtcgaaacacaggcttgcacaagagaacagaacagaatctgtacgtgtcgaccaggttggtattgtgccttgtctaagcaagaaggatgtcgtctgtgcgcgcccctgaggaaatgtcgccctggattcggagtggcaagaccaggtacagagacaagcgatgtagtatgcaagccttgcgctcccggcactttcagcaatactaccagttcgacggatatatgtcgcccgcaccagatatgcaacgtggttgccattccaggaaacgcctcaatggatgcagtgtgtacatctacaagccctacaagatcaatggccccaggcgccgtgcacctcccacaacccgtgtccacccgatcccagcacacccagccaacccccgagccatctacagccccatcaacgagcttccttttgcccatgggcccctctcccccagccgaaggatccaccggcgatttcgccttaccagtcgtgagtctttcttccagttag

SEQ ID NO: 32003 - RNA, 468 nt, synthetic construct
  misc_feature 1..468: note = Description of Artificial Sequence: Synthetic coding sequence
  source 1..468: mol_type = other RNA
atggctcccgtcgcagtatgggccgccctggccgtcggtttagaactctgggccgccgcacatgccctcccagctcaagtagccttcactccatacgctcccgaacccggtagcacctgcaggctgagggaatattacgaccagactgcccagatgtgctgcagcaagtgttccccaggccagcacgctaaggttttctgcacgaagacttcagacactgtgtgtgatagctgtgaagattccacctacactcagctgtggaattgggtccccgaatgtctttcttgcgggtcccgatgttcatccgaccaagttgagactcaggcatgcacgagagaacaaaaccgtatatgtacatgcagacctggttggtattgcgcacttagcaaacaagagggttgcagactgtgcgcccccctccggaagtgcaggcctggttttggagtcgcgcgccctgatttgtcctag

SEQ ID NO: 32004 - RNA, 114 nt, synthetic construct; identical to SEQ ID NO: 31823
  misc_feature 1..114: note = Description of Artificial Sequence: Synthetic coding sequence
  source 1..114: mol_type = other RNA

SEQ ID NO: 32005 - RNA, 1131 nt, synthetic construct
  misc_feature 1..1131: note = Description of Artificial Sequence: Synthetic coding sequence
  source 1..1131: mol_type = other RNA
atggttgttgtcgccgcggcccccaatcccgcagatggtacacccaaggtactgctcctttcaggccaacccgcctctgccgcaggggcacccgcaggacaggccctccccctcatggtgcccgcacagagaggagcctccccagaggcagcaagcggcggacttcctcaggctagaaaaagacagcgactcacccacttgtcacctgaagaaaaagcccttcggagaaaattgaagaacagagttgcagcccagaccgccagggaccgaaagaaagcaagaatgagcgagttggaacagcaggtcgtcgatctcgaagaggagaatcaaaagctattgttggaaaatcagctgctcagagaaaaaactcatggcttggtggtggagaaccaagaactgcgacaaagactcggcatggatgcactggtggcagaggaagaagcagaagctaagggaaacgaagtgcgacccgtagccggaagcgccgagagcgcagctggagcaggacctgtagttaccccacccgagcatctgcccatggactccggaggaatagacagcagcgattccgaaagcgatatccttctgggtatcctggataacctcgatcctgtcatgttcttcaagtgcccgtctccagaacccgcatcattggaagagctgccggaggtatacccagaaggcccatcaagtctccctgcatcccttagtctcagcgtcggcacgtcttccgctaagcttgaggcaatcaacgaattaatcagatttgatcatatttatactaaacccttggtccttgaaattcctagtgaaactgagtcgcaggcgaacgtggttgtcaagatagaagaagctcccttgtcccccagcgagaacgaccaccctgaattcattgtgagcgtgaaagaggaacctgttgaagatgatctggtgcctgaactgggcatatcaaatttattaagcagctcccattgccctaagcccagcagttgcctcctcgacgcctactccgattgcggctacgggggaagtctttcacccttctcggatatgagcagtctcctcggcgttaaccactcatgggaagatacttttgcgaatgaactttttccacaattgatcagtgtttag

SEQ ID NO: 32006 - DNA, 1494 bp, synthetic construct
  misc_feature 1..1494: note = Description of Artificial Sequence: Synthetic coding sequence
  source 1..1494: mol_type = other DNA
atgacagtattcctatcctttgcattcctagctgccatcctgacccatatcggttgcagcaatcagagacggagtccagaaaattctggtaggagatacaatcgcatccaacacggccagtgcgcttacacgttcatactccctgaacacgatggcaactgccgcgagagcacaacggaccagtacaacacaaacgcattgcagcgtgacgctccgcatgtggagccagactttagtagtcagaaactgcagcaccttgaacacgtgatggaaaactatacccagtggttacagaagttggagaattatatcgtcgagaacatgaagtccgaaatggctcaaatccagcagaatgccgtgcagaaccacactgcaacaatgcttgagataggcacaagtctgctttcccagaccgccgaacagacccgtaagctgaccgacgtcgagacacaagtactgaaccaaacctcccgacttgaaatccagctgcttgagaatagtctttcgacttacaagctggagaagcagctgttgcaacagacaaacgaaatcctaaaaatccatgagaagaactcgctgcttgagcacaagattctagaaatggaaggtaaacataaagaagaactggacacactaaaggaagaaaaggagaatctgcaagggctggtcacccgacagacttatatcatccaggaactggagaaacaactgaacagggcaaccacaaacaacagcgtcctacagaaacagcaacttgagctcatggataccgtacataacttggtcaatctatgcaccaaggagggcgtgctactgaaaggcgggaaacgggaggaagagaagccttttagggactgtgcagacgtgtatcaggcgggcttcaataagtccgggatttacacgatctatataaacaacatgcccgagccaaagaaggtattctgcaacatggatgtgaatgggggagggtggactgtcatacagcaccgcgaagatggcagcctcgattttcagaggggctggaaagagtataagatggggtttggcaatccatcaggggaatattggctgggcaacgaattcattttcgctattactagccagcgccagtacatgctgaggatcgaacttatggactgggaggggaatagagcttatagtcaatatgatcggttccacatcggaaatgagaagcagaactacaggctctatctgaagggccacaccggcacagccggcaagcagagctcactgatcctgcacggggccgatttctcgactaaggacgccgacaacgataactgtatgtgcaagtgcgccttaatgcttacgggaggatggtggtttgatgcatgcggcccctccaacctcaacggaatgttctacaccgcgggccagaatcatggcaagctgaacggtattaagtggcactactttaaagggccatcctacagtctgaggtcaacaactatgatgattaggcctctggacttt

SEQ ID NO: 32007 - DNA, 1494 bp, synthetic construct
  misc_feature 1..1494: note = Description of Artificial Sequence: Synthetic coding sequence
  source 1..1494: mol_type = other DNA
atgactgtgttcctctcgtttgcgtttctggccgccatcctgacccacatcggatgctccaatcaacgtagatcgccagagaacagcggacgccggtacaatcggatccaacatggacaatgtgcctatactttcatccttccggaacatgatggaaactgtagggaatcaacgaccgatcagtacaacaccaacgccctgcaacgcgacgctcctcacgtcgaacctgacttcagctctcagaagctccagcatctggaacacgtgatggagaattacactcagtggctgcagaagctcgaaaactacatcgtggagaatatgaagtcggagatggcgcagatccaacaaaacgccgtccagaatcacactgcgactatgttggagatcggaaccagccttctctcccagactgccgaacaaacccgcaagctgaccgacgtggagactcaggttctgaaccaaacctcgcgcctcgaaatccaactgctcgaaaactccctctcaacctacaagctggaaaagcagttgcttcagcagaccaatgaaattcttaagattcatgagaagaattcgctgctggagcacaagatacttgaaatggagggaaagcacaaggaggaactggataccctgaaggaagagaaggaaaatctgcagggactcgtgactcggcagacgtacatcatccaggaacttgagaagcaacttaaccgggccactaccaacaatagcgtgctgcagaagcaacaacttgagttgatggataccgtccacaacctggtcaacctgtgcacgaaagaaggcgtcctgttgaagggaggaaaacgcgaggaagaaaaaccgttcagggattgtgctgacgtgtaccaagctggttttaacaaatccggcatttacactatttacatcaataacatgcctgaaccgaaaaaagtgttctgcaacatggacgtgaatggcggcgggtggactgtgatccaacatcgcgaagatggatccctcgatttccagaggggatggaaggagtacaagatgggattcggaaacccctcaggggaatactggctgggaaacgagtttatcttcgccatcacttcccaacggcaatacatgctcaggatcgaattgatggattgggaaggcaaccgggcgtactcgcagtacgacaggttccatatcggcaatgaaaagcaaaactatagactgtacctgaaaggacacactggcactgccggcaagcagtcgtcccttattctccacggagccgacttctccactaaagacgccgataacgacaattgcatgtgtaagtgcgcactgatgctgaccggaggttggtggtttgacgcatgcggaccatcgaatctcaatggaatgttctacaccgcgggccaaaatcatggcaaactcaacgggatcaaatggcactacttcaaaggaccatcgtactcacttcggtccaccactatgatgatcaggccgttggacttt

SEQ ID NO: 32008 - DNA, 1494 bp, synthetic construct
  misc_feature 1..1494: note = Description of Artificial Sequence: Synthetic coding sequence
  source 1..1494: mol_type = other DNA
atgactgtctttctgagctttgccttcttagctgccattctcacccacataggttgctccaatcaaagacggagccctgagaacagcggccgcaggtataaccgcatccaacacgggcaatgcgcctacaccttcattctccccgagcacgatggcaactgccgcgagtcaaccacagaccagtataatacaaacgctctgcaacgagatgcaccccacgtggagcccgacttctcgagccaaaagctgcagcatctcgagcatgtgatggagaactacacacaatggttgcagaaacttgaaaactatattgtggagaatatgaagagcgagatggctcaaatccagcaaaatgccgtgcagaatcacactgccaccatgctagaaatcgggacttccctgctaagtcagactgccgaacaaacccggaagctgaccgatgtggagacccaggtgctcaatcagacaagtcggctcgaaatacaactgctcgagaattcgctgagcacctataagttggagaaacagctgctgcagcagacaaacgagattcttaagatacatgagaagaattcattacttgaacacaagatcttggaaatggaggggaagcacaaggaagaactggacacactgaaggaggagaaggaaaatctacaaggcctcgtcacacgacagacctacatcatccaggagctggagaaacagctgaaccgagctaccaccaacaatagcgttctgcagaagcagcaactggaacttatggacaccgtgcataatctcgtgaacttatgcaccaaggaaggagtcctcctcaaagggggcaagagggaggaggagaaacccttccgcgactgcgcggatgtttatcaagccggcttcaataagagcgggatctacaccatatacatcaataacatgcctgagccaaaaaaggtgttttgcaacatggacgtgaatggcggaggctggacagtcattcagcaccgcgaagacgggtccctggattttcaaaggggctggaaagagtacaagatgggtttcgggaaccctagcggtgaatattggctgggaaatgaattcattttcgccatcacaagccagcgacagtatatgctgagaatcgagttgatggattgggaggggaaccgggcatatagccaatacgatagattccatatcggaaacgagaagcaaaactaccggctctatctgaagggccatacaggaaccgccggaaagcagtccagcctcatcctgcacggtgcagacttctcaacgaaggatgccgacaatgacaactgtatgtgcaaatgcgcgctgatgctgaccggcggttggtggttcgatgcatgcggtccttccaacctcaatgggatgttctacacagctggtcaaaatcatgggaagcttaacggcatcaagtggcactattttaagggccctagctacagcctcaggagcaccacaatgatgatccgtccactggacttc

SEQ ID NO: 32009 - DNA, 1494 bp, synthetic construct
  misc_feature 1..1494: note = Description of Artificial Sequence: Synthetic coding sequence
  source 1..1494: mol_type = other DNA
atgacagtctttcttagctttgcatttctcgcggctattctaacacacatcggatgcagcaaccagcgacgctcgccagaaaattccggaaggcgttacaatcgaattcaacacggtcaatgtgcttacactttcattttgccggaacatgatggaaattgtagagagtctaccacggatcaatataatactaatgcattgcagcgcgatgcaccacatgtggagcctgattttagttctcagaaacttcaacatctagagcatgtgatggaaaactacactcaatggttgcaaaaattggaaaactacattgtagagaatatgaagtcggaaatggcgcaaatccagcaaaacgctgtacagaatcatacggctactatgttagaaattgggacatcacttttgtctcagacggctgaacagacgcggaagctaactgacgttgaaacacaggtgctcaatcaaacatcgaggctcgagattcaacttttggaaaactcgttgtcaacgtacaagttagaaaaacaactcttacaacagacaaacgaaatcctcaagatccatgagaagaactcactcctggagcataagatattggaaatggagggtaaacacaaagaagaattggatacactgaaggaagaaaaggaaaacttgcaaggacttgtaacaaggcaaacctacatcattcaagagcttgaaaaacaacttaacagggcaacaaccaacaacagcgtgcttcaaaaacagcagctcgagcttatggatacagtacacaatctggtcaatctttgtacaaaggaaggcgtattgctgaagggtggcaaacgagaagaggaaaaaccatttagagactgtgccgatgtataccaggcgggattcaacaaatctggaatttatacaatctacattaacaacatgccagagccaaagaaagttttctgcaacatggacgtcaatggaggagggtggacggtaattcaacatcgtgaagatggatcgcttgatttccaacgaggttggaaagaatacaaaatgggtttcggaaatccatccggggaatattggcttggcaatgagtttatttttgccataacttcgcagcgtcaatatatgctacgcatcgaactcatggattgggaaggaaatagagcctactcacaatatgatcgctttcatattggaaatgaaaagcaaaattatcgtctttatcttaagggacatacagggactgctggtaagcaatcctctctcattctccatggcgcagattttagtactaaagatgcagataatgataattgtatgtgcaaatgtgcgctgatgctcacgggaggctggtggttcgatgcttgcggcccttctaatttgaacggaatgttttatactgctggtcagaaccacggtaaattaaacgggattaaatggcattacttcaagggaccatcatattcattgcgaagtactaccatgatgattcgacctttagacttc

SEQ ID NO: 32010 - DNA, 1494 bp, synthetic construct
  misc_feature 1..1494: note = Description of Artificial Sequence: Synthetic coding sequence
  source 1..1494: mol_type = other DNA
atgaccgtgtttctgtcatttgcatttcttgcagctatcctgacgcacattggatgcagcaaccagagacggtcccccgaaaacagcggcagacgctacaacagaattcaacatggacaatgcgcgtacacctttattcttccagaacacgacggtaactgcagggaatccaccactgatcaatacaacacgaatgcactgcaaagagacgcaccacatgtggaacctgatttttcatcccagaagctgcaacatctcgaacacgtcatggaaaactatactcagtggcttcaaaaactggagaactatattgtggaaaacatgaaatccgaaatggcacagatccagcaaaacgcagtgcagaaccatactgcaactatgcttgagatcggaacgagccttctgtcacaaaccgctgaacagactagaaagctcacggacgtggaaactcaggtgctgaaccagacctcccggcttgaaattcaacttctcgagaatagcctttccacttacaaacttgagaaacagctcctccagcaaaccaacgaaatcctgaagatccatgaaaagaacagcctgcttgagcataagatactggagatggagggtaaacacaaagaagagttggatactcttaaggaggagaaagaaaacctgcagggactggtgactcgccagacctatatcatacaagaacttgaaaagcagctgaatagagcaaccacgaataacagcgtgcttcagaaacagcaactggagctgatggacaccgtgcataatcttgttaacctgtgtactaaagagggggtcctcctgaagggaggcaaaagagaggaagaaaagcctttcagggactgcgccgatgtgtatcaagccggttttaacaagtcgggaatctacaccatttacatcaacaatatgcccgagcctaagaaggtgttctgcaacatggacgtcaacggaggtgggtggaccgtcatacaacatagagaagatggctcacttgatttccaacgtggatggaaggagtacaagatgggattcggtaacccttcaggcgaatactggttgggaaatgaattcatcttcgctatcacttcgcaaagacaatacatgcttcgcatcgagctgatggattgggaaggtaatcgggcgtacagccagtacgaccggtttcatatcggcaatgaaaagcaaaactacagactctacctgaaaggacacactggaactgccggaaagcagtcctccctcattctgcatggagccgatttttccactaaggatgcagataacgacaattgtatgtgtaagtgtgcactgatgctgaccggaggttggtggtttgatgcctgcggtccaagcaatctgaacggtatgttttacacggcaggacagaatcatgggaagctgaacggcattaagtggcattacttcaagggtccatcatactcacttagaagcaccaccatgatgattcgccctttggacttc

SEQ ID NO: 32011 - DNA, 1494 bp, synthetic construct
  misc_feature 1..1494: note = Description of Artificial Sequence: Synthetic coding sequence
  source 1..1494: mol_type = other DNA
atgactgtgttcctttcattcgccttcctggcagccatcctgacccatattggctgttcgaaccagcgtagatccccagaaaattccggaagaagatacaaccgcatccaacatggacaatgcgcttacaccttcatcctgccagaacacgacggaaattgccgcgagtcgacgaccgaccagtacaataccaacgccctgcaacgagatgctccgcacgtggagccggatttctcgagccaaaagttgcaacacttggagcatgttatggagaattacactcagtggctgcagaagctggaaaactacatagtggagaatatgaagtctgagatggcgcaaatccagcaaaacgctgtgcagaatcataccgccactatgctggaaatcggtacgtccttgctgtcgcagaccgccgaacagactcggaaactgactgacgtcgaaacgcaagtcctcaatcagacctcacggttggaaatacagctcttggagaactccttgtcaacctacaaacttgagaagcagctgctgcaacagaccaacgaaattctgaagattcacgaaaagaacagcttgctggagcacaaaatcctggagatggaagggaagcacaaggaggagctggacaccttgaaggaggagaaagaaaaccttcagggcctggtgactcgccagacgtacatcatccaggaactcgaaaagcaactcaatcgagcaactaccaataactcagtactgcaaaagcaacaactcgaacttatggatactgtgcataatctggtcaacctctgtactaaggagggcgtgctgctgaaaggcggtaaacgcgaagaagaaaagccctttcgggactgcgccgacgtctaccaagcgggattcaataagtcaggtatctacactatctatatcaacaacatgccggaacccaagaaggtgttctgtaacatggatgttaacggaggaggatggaccgtgatccagcaccgcgaagatgggagcttggactttcagcgggggtggaaagagtacaaaatgggtttcggaaacccatccggggagtactggctcggtaatgaattcatcttcgcgatcacctcgcaacgtcagtacatgctcaggatcgaattgatggattgggaggggaaccgcgcgtacagtcagtacgatcgattccatatcggcaacgagaagcagaattaccggctctacttgaaaggacacaccggaaccgccggaaagcagtcgtccctcatcctccacggagccgatttttcgacgaaggacgctgacaacgataattgcatgtgcaaatgcgcgctcatgctgactggcggttggtggttcgacgcctgcgggccttccaacctgaacggcatgttctataccgccggacagaaccatggcaagctgaacggaattaagtggcactactttaaaggaccgagctattcccttcgatccaccactatgatgatcaggcctctcgacttt

SEQ ID NO: 32012 - DNA, 1494 bp, synthetic construct
  misc_feature 1..1494: note = Description of Artificial Sequence: Synthetic coding sequence
  source 1..1494: mol_type = other DNA
atgacggtcttcctgtcattcgcgttcttagccgcaattttgacacacattggatgcagcaaccagcgccgcagccctgaaaattccgggcgcaggtacaatcgtattcagcacggccaatgcgcctatacatttattctacccgagcacgatggcaattgccgcgaatcgaccactgaccagtataacaccaacgccctccagcgggatgcgccccatgtggagcctgacttttcgtctcagaaactccagcatctcgagcatgtgatggagaattatacacagtggttgcagaaactagagaactacattgtggagaatatgaaatccgagatggcgcagatacaacaaaatgctgtgcagaaccatactgctacgatgctggagatcggtaccagcctgctatctcagactgcagagcagacacggaaattgactgacgtggaaacgcaggtgcttaaccagacgtctagactggagatacagctgttggagaactctcttagtacatataagctggagaagcagctgctgcaacaaacaaacgaaatcctcaaaatccacgaaaagaatagccttctcgagcataaaattctggagatggaaggtaagcacaaggaggagttagatactttgaaggaagaaaaggagaacctgcagggcttggttacgaggcagacatacatcatccaggagctagagaagcagctgaatcgagcgaccaccaataacagcgtgcttcagaaacagcagctggagctgatggatactgtgcataatctggtaaacttgtgcactaaggagggtgtcctgctcaagggtggtaagagggaggaggagaagccattcagggattgcgccgacgtctaccaggcgggattcaataagtccggaatttatacgatctacatcaataatatgcctgaacctaagaaagtcttctgtaatatggatgtgaatgggggcggctggaccgtgattcagcaccgcgaggatggatctctcgattttcaaagggggtggaaagagtataagatgggtttcgggaatccatcaggcgagtactggctcggcaatgagtttattttcgccataaccagccagaggcagtatatgcttaggattgaacttatggattgggaggggaatagagcctactcccagtatgatcggttccacatcggaaatgagaaacaaaattataggttgtacttgaagggtcacacaggaaccgcagggaagcagtcatcactgatcttgcacggagcagatttttcgaccaaggacgcagacaatgacaattgtatgtgcaagtgtgcgctgatgctgactgggggctggtggttcgatgcttgcggaccgagcaacttgaacggcatgttctacacagctggacagaaccacgggaaactcaacgggatcaagtggcactattttaagggcccctcctatagcttgcgtagcaccacgatgatgattagacctctggacttc

SEQ ID NO: 32013 - DNA, 1494 bp, synthetic construct
  misc_feature 1..1494: note = Description of Artificial Sequence: Synthetic coding sequence
  source 1..1494: mol_type = other DNA
atgactgtgtttctttcttttgccttcttggctgcaatcctcacccatattggctgttctaaccagagacgttctcccgaaaactctggacgaaggtacaatagaattcagcacggccagtgcgcctatacttttatcctccctgagcacgatgggaattgccgcgaaagcacgacagatcaatataacacaaatgcccttcaacgagatgcgccgcacgtagagcctgatttctcatcacagaagttgcagcacctcgaacacgtcatggagaactatacacagtggctgcagaagctagagaattatattgtggaaaacatgaaatccgagatggctcagattcagcagaacgcggtgcagaatcataccgccaccatgctggagatcggaacgtcactgctcagccaaaccgcagagcagaccagaaagctaactgatgtggaaactcaagtactgaaccagaccagccgactggagatacaactgctcgagaatagtctgagcacatataagctggagaagcagctactgcaacagacgaacgaaatcctcaagatccacgaaaaaaattccctgctggagcataagatccttgagatggagggtaaacacaaggaagaactggacaccctcaaggaggagaaggagaacctgcaggggttggtgactagacagacttatatcatacaggagttggaaaagcagctgaaccgggctaccaccaataattcagtactgcagaagcagcagctggagttaatggacaccgtgcataacctggtcaatctgtgcacaaaggagggggtgctgctgaaaggcgggaaaagagaagaagaaaagccatttagagactgcgcagatgtgtaccaagccggttttaacaagagcggtatctataccatatacatcaataatatgccggagcctaaaaaagtcttttgtaacatggacgttaatggcggagggtggacagtgatccagcaccgcgaggacggtagcttagatttccagagagggtggaaggagtataaaatggggtttgggaaccctagtggagaatactggctgggtaacgaatttatttttgcgattacaagccagaggcagtatatgctgcgcatcgaacttatggactgggagggaaaccgcgcttacagccagtatgatcggttccatattggcaatgaaaagcagaactatagactctatctcaaaggacatacgggaactgccggcaaacagtcctcccttattctccatggggctgacttttccacaaaagatgctgataacgacaattgtatgtgtaagtgcgctttgatgctgaccggcggttggtggtttgatgcttgtggaccctccaacctcaacggcatgttttacaccgcgggtcagaatcatgggaagcttaatggcatcaagtggcattactttaaaggaccaagctattctctgaggtcgacgaccatgatgatacgtcctctggacttt

SEQ ID NO: 32014 - DNA, 1494 bp, synthetic construct
  misc_feature 1..1494: note = Description of Artificial Sequence: Synthetic coding sequence
  source 1..1494: mol_type = other DNA
atgacagtgtttctgtcattcgcttttctggccgcaatcttaacccacattggctgcagcaatcagaggcggagtcccgagaactccggtagacggtacaatcgcatccagcatgggcagtgcgcttatacatttatcctacccgaacacgatggtaactgccgcgagagcactactgatcagtataacacaaacgcacttcagcgcgatgcgcctcacgtggaaccggacttctcatctcaaaagctgcagcacctggagcacgtcatggagaattatacacagtggcttcaaaagctcgaaaactacatagtagagaacatgaaaagcgagatggctcagatacagcagaacgccgtacagaatcacacagccaccatgctggagatcggaacatctctgcttagtcagactgcagaacagacgcgtaaactgactgacgtggagacccaggtgctgaaccagacctctaggctggagatacagctgctggagaattctctaagcacctacaaactggaaaagcagcttttgcagcagacgaacgagatactaaagatccatgaaaagaattctttgctggaacataagattttggagatggaaggaaagcacaaggaagagctggatactcttaaagaagagaaggaaaaccttcagggactcgtcaccagacagacctatataattcaagaactggagaagcaacttaatagagccacgacaaacaactccgtactgcagaagcagcaactggagctgatggatacggtacacaatctggttaacttgtgcacaaaggagggggtcttgctgaaaggaggtaaaagagaggaggagaaacccttccgcgactgcgccgacgtctatcaggccggattcaacaagtcaggcatttacactatttatatcaacaacatgcccgagcctaagaaggtgttttgcaacatggatgttaacggagggggttggacagtcattcagcaccgcgaagacggttccttagactttcagagaggatggaaggagtataagatgggctttggtaaccctagcggcgagtattggttagggaatgagtttatattcgccatcactagccagcgacagtacatgttgaggatcgagctgatggactgggaaggaaatcgtgcatactcccaatacgaccgctttcacattggcaacgagaagcagaattaccgattgtatctgaaaggccacactgggaccgccgggaaacaatcctctttgatactacatggggccgatttctccaccaaggatgccgacaatgataattgcatgtgtaagtgcgctctcatgctcacaggcgggtggtggttcgacgcctgtggcccgtccaatctgaacgggatgttctacacagcaggacagaaccacggtaaactgaatggaatcaagtggcactactttaaggggccgagctactccctgcgcagcacaactatgatgatccggcccttggatttc

SEQ ID NO: 32015 - DNA, 1494 bp, synthetic construct
  misc_feature 1..1494: note = Description of Artificial Sequence: Synthetic coding sequence
  source 1..1494: mol_type = other DNA
atgaccgtttttctgtctttcgctttcctggccgcgattctgacccacatcgggtgttctaatcagcggcggtctcctgagaattccgggaggcgctataatcggatacagcatggccagtgtgcctacacctttatcctccccgaacacgatggtaactgcagggagtccaccactgaccagtacaatacaaacgcactacagagggatgctccccacgttgagcccgatttctcttcccagaaactccaacatcttgagcacgtgatggagaactatacacaatggctccagaagttagagaattacatcgttgaaaatatgaagtcagaaatggcacagatccaacagaacgcagtgcaaaatcatacagctacgatgctggaaatagggacaagcctgctgtctcagacggccgagcagactaggaagctaactgatgtggagacgcaggtgctgaatcagacttcaagacttgaaatacagttgctcgaaaattctcttagcacctacaaactggagaagcagctgctccagcaaaccaatgaaatccttaagatccatgaaaaaaattctctcctggagcacaagatccttgagatggaggggaaacacaaagaggaactggacacgttgaaggaagagaaggagaatctgcagggtttggtgactcggcaaacgtatatcattcaggagttggagaaacagcttaatcgggccacaactaataattctgtgcttcagaaacagcaactggagctaatggatactgttcataacttagtaaatctctgcacaaaagaaggcgttctactcaagggcggtaagcgagaagaagagaagccttttcgagactgcgcggacgtgtatcaagcagggtttaacaagtccgggatatacactatctacataaataacatgcctgaaccgaagaaagtattttgtaacatggatgttaatggcggaggttggaccgttattcagcaccgtgaagacgggagtttggattttcagagaggatggaaagaatacaagatgggatttggcaacccaagcggcgagtactggctggggaatgaattcattttcgccattacatcacagaggcagtacatgctccgtattgaacttatggactgggagggaaatcgagcctattctcagtatgaccgctttcacattggcaatgagaagcaaaactaccggctctacttgaagggccacactggaaccgccgggaaacagagctctctgattctccacggagcagattttagcaccaaggacgctgataacgataattgcatgtgtaagtgcgcactaatgctgacaggaggctggtggtttgacgcctgtggccccagcaatttaaacgggatgttttataccgcaggtcaaaaccatggcaaactgaacggaataaagtggcattacttcaaaggcccctcatatagtctccgatccacgactatgatgattcggccgttggacttt

SEQ ID NO: 32016 - DNA, 1494 bp, synthetic construct
  misc_feature 1..1494: note = Description of Artificial Sequence: Synthetic coding sequence
  source 1..1494: mol_type = other DNA
atgaccgtgtttctgtcgtttgcatttctcgcagcaattcttacgcatatcggttgttcaaaccaacgaaggagtcccgaaaattcaggacgtcggtacaacagaatccaacacggacaatgtgcatacacctttatactgcctgagcatgatggcaactgtagagaatctaccactgatcaatacaacactaacgctttgcagagagatgcaccacacgtggagcctgatttcagctcccagaagctgcaacaccttgagcacgtcatggagaactacacccagtggctgcagaagttggaaaactatattgtggaaaacatgaaatcggaaatggcgcaaattcagcagaacgcagtgcaaaaccatactgccacgatgcttgagattggaacctcccttctgtcccaaaccgctgaacaaacgaggaaacttaccgacgtagaaacccaagtgttgaaccagacttcacgcttggagattcaactgctggaaaattcgctttcgacttacaagctcgagaagcaactgctccaacaaactaatgaaatcctcaagatccatgagaagaatagcctcctcgagcacaaaatccttgaaatggaaggtaaacataaggaagaactggacaccctcaaggaggaaaaggagaatttgcagggcctggtaactcggcagacctacattatccaggaactggaaaagcaactcaaccgcgcgactactaataactcagtcctccagaagcagcagctggaattgatggacaccgtgcacaatttggtgaacctttgtaccaaggaaggcgtcctgctgaaaggtggaaagcgcgaagaagagaagcctttcagggattgtgccgatgtttatcaggcagggttcaataagagcggcatttacaccatctacataaacaatatgccagagcccaagaaggtgttttgcaatatggatgtgaatggcggtggttggaccgtgattcagcatcgtgaagatggatccctggatttccagagaggatggaaggaatacaaaatgggattcggcaaccccagcggagaatactggcttggcaacgaattcatattcgcaattacctcccagcgccaatacatgcttcgaattgaacttatggactgggagggcaatcgggcctatagccaatacgatcggttccatattgggaacgaaaaacagaactaccggctttacttgaaggggcacactggtaccgccggtaagcagtcgtcccttatcctgcatggtgccgactttagcaccaaggacgcggacaacgataactgcatgtgtaagtgtgccctcatgctcacgggaggatggtggtttgacgcatgcggaccatcgaacctcaacggtatgttttacactgcgggacagaatcatgggaaactcaatggaattaagtggcattactttaagggcccttcatacagcctcaggtcgactaccatgatgattagacccctggatttt

SEQ ID NO: 32017 - DNA, 1494 bp, synthetic construct
  misc_feature 1..1494: note = Description of Artificial Sequence: Synthetic coding sequence
  source 1..1494: mol_type = other DNA
atgaccgtgttcctttcctttgcttttctcgccgctatcttgactcacatcggttgctccaatcaacggagaagccctgaaaatagtggccgcaggtataacagaatacaacacggccagtgcgcatacaccttcattctgccagagcatgatggcaactgtagagaatccacgacagaccagtacaataccaatgccctgcagagggatgcaccacatgttgagccggacttttcctcccagaagttgcagcatctcgaacacgtcatggagaactatactcagtggctgcagaaacttgaaaactacattgtggagaacatgaaaagtgagatggcacagatccagcagaatgcggtgcaaaaccatacagccacgatgttggagatcggcacaagcctcctttcccagacagctgagcagactcgcaaactgacagatgtggagactcaggtgctgaaccaaacgtctaggctggaaatccagttgttggaaaactccttgagcacttataagcttgaaaaacagctcctccagcagactaacgagattctcaagatccacgagaagaattctttgctggagcacaaaatcctggagatggaggggaagcacaaagaagagttggatactcttaaggaagagaaggaaaatctccaggggcttgtaacccggcagacctacatcatccaagagctcgaaaagcaactcaacagggcgacaaccaataactctgtgctgcagaagcagcaattggaactcatggacacagtgcacaacctcgtgaatttgtgcactaaagaaggggtactcctcaagggagggaaaagagaggaggagaagcctttcagagactgtgccgatgtgtaccaggcggggttcaataagagcggaatctacaccatctacattaataatatgcccgaaccaaagaaggtcttctgcaacatggacgtcaacggagggggctggaccgtcatccagcacagggaggacggctctttggacttccagcggggatggaaggagtataagatgggatttggaaatccatcaggggagtattggctcggtaacgagtttatcttcgcaattacgtcccagcgccaatatatgctgcggattgagctcatggactgggagggcaaccgcgcatactctcagtacgaccgctttcacattggcaacgagaaacaaaattataggctctatctgaaagggcacacagggacagccggaaagcagagttctctgattctgcatggcgctgacttctcaaccaaggatgccgataacgacaattgcatgtgtaagtgtgcccttatgctgactgggggctggtggtttgacgcttgcggcccctcaaacctgaatgggatgttctacactgcaggtcagaaccatggcaaattgaatggaataaaatggcactacttcaaaggaccgtcttacagcctccgctctactaccatgatgattcggccactggacttc

SEQ ID NO: 32018 - DNA, 1494 bp, synthetic construct
  misc_feature 1..1494: note = Description of Artificial Sequence: Synthetic coding sequence
  source 1..1494: mol_type = other DNA
atgacagtgtttctaagcttcgcttttttggccgccatcctgacccatatcgggtgtagtaatcagaggagaagcccagaaaattccggacggagatataataggatccagcatggccagtgtgcatacacttttatcctacctgaacacgatggaaactgccgagaatcgacaaccgaccagtacaataccaacgccctgcagcgcgatgctcctcacgtcgagcctgacttcagctcccaaaagctgcaacatcttgagcatgttatggagaattacacacagtggcttcagaagctcgagaactacattgtagagaacatgaaaagtgagatggcccagatccaacagaatgcagtgcaaaatcacacagcaacaatgcttgagatcggcacctctttactttcgcagaccgcggagcagacccgtaagctaacagacgtcgaaacccaggtcctgaaccagacctcgagattagaaatacagctgttagagaatagcctgtccacctacaaattagaaaaacagctgttacagcagacaaacgagatattgaagatccacgagaaaaactcactcctcgagcataaaatactagaaatggaaggtaaacacaaggaagaattagatacgcttaaagaggagaaggaaaacctccaaggtctcgtcacacgacagacctacatcattcaggagcttgagaaacagctgaatcgggcaaccactaataatagcgtcctgcagaagcagcagcttgagctgatggacactgtccataacctggtgaatctgtgcaccaaagagggcgtcctgttaaaggggggcaagcgggaggaagagaagccattccgcgattgcgcagatgtgtatcaggccggatttaataaaagcggcatatatacaatctacattaataacatgccagagcctaaaaaagtgttttgtaacatggacgttaacgggggtgggtggacggtgatacaacatcgagaggacggttccctcgatttccaaaggggctggaaagagtataagatgggcttcgggaatccatctggggagtactggttgggcaacgagttcatctttgctatcactagccagaggcagtacatgctaaggattgagctgatggactgggagggcaacagagcatactcccagtatgataggtttcatatcgggaatgaaaaacagaattataggctttatctgaaaggacataccggaactgctggcaaacagagcagcctgatcctgcacggcgctgatttttccaccaaggatgccgataacgacaattgtatgtgcaagtgcgcattgatgttaacaggaggctggtggtttgacgcttgcgggccatcgaacctgaacggtatgttttataccgccggacagaaccatgggaaactgaatggcattaagtggcactacttcaaagggccttcgtattcactgcgctctacgaccatgatgattcggcctctggatttc

SEQ ID NO: 32019 - DNA, 1494 bp, synthetic construct
  misc_feature 1..1494: note = Description of Artificial Sequence: Synthetic coding sequence
  source 1..1494: mol_type = other DNA
atgacagtcttcctgagctttgcttttctggctgcaatcctgacacacatcggatgttctaatcagagaaggtctcctgaaaactctggccgaaggtacaatcgtattcagcatggacaatgtgcttataccttcatcctccccgagcacgacgggaattgtagggagtccaccacagaccagtataacacaaacgcccttcagagggacgcgcctcacgtggagcccgacttcagcagtcagaagctccagcatctggaacatgtgatggagaactacactcagtggctgcagaagctagagaactacatagtggaaaacatgaagtcagaaatggcccaaatacaacaaaatgccgtgcagaatcacactgccaccatgctagaaatcggaacttcgctgctgtcccagactgcagaacaaaccaggaaactgactgacgtggaaactcaagttttaaaccaaactagccggctcgaaattcagctactggaaaattcactatccacctacaaattagagaaacaactgttgcagcaaaccaacgagatcttgaagattcacgagaagaattccctgttggaacacaaaatactggaaatggaggggaaacataaggaagagctcgataccctgaaggaagagaaagagaatctacagggtttggtaacgcggcagacatacatcatccaagagctggaaaagcagctgaacagagccacaactaataatagtgtgcttcagaagcagcagttggaacttatggacactgtgcacaatctggttaatctgtgtactaaggagggggtcctactcaaagggggaaagcgggaagaggagaagccattccgcgactgcgcagacgtgtaccaggccggatttaacaagtctggtatctatactatatatataaataacatgcctgagcccaagaaggtgttttgcaatatggacgtcaacggagggggctggacggtgatccagcacagagaagacggttctctggactttcagcgtgggtggaaggagtacaagatgggcttcgggaaccctagtggagagtactggctcggtaacgaattcatttttgctattaccagtcagcgtcagtacatgctgagaatagaactgatggactgggaaggaaacagagcctactcccagtatgatcggttccacataggaaacgaaaaacagaattatcggctgtacttgaaagggcacaccggtactgccggaaaacagtcctctctcattcttcacggtgccgacttctccacaaaagacgctgataacgacaattgtatgtgcaaatgtgctctgatgttaactgggggctggtggtttgacgcgtgcggtccttcaaacctcaacggtatgttctacacagctggacagaaccatggaaagctcaatggcattaagtggcattactttaaagggccctcttattctctgcgtagtacaacaatgatgattagacccctcgatttt

SEQ ID NO: 32020 - DNA, 1494 bp, synthetic construct
  misc_feature 1..1494: note = Description of Artificial Sequence: Synthetic coding sequence
  source 1..1494: mol_type = other DNA
atgaccgtgttcctctcctttgcctttttggcggcaatcctcacccatattggatgctccaatcagcgccgcagccctgagaattcggggaggcgctataaccgaattcagcacggacaatgcgcgtacactttcattctgcctgagcacgacgggaactgtcgggaatccaccaccgaccagtataacaccaatgcgttgcagagagacgcaccgcatgtggagcctgacttctcatcacaaaaactgcagcacttggaacacgtcatggaaaactacactcagtggttgcaaaagctcgaaaactacatcgtggagaatatgaaatctgaaatggcccagattcagcagaatgcggtgcagaaccatactgccactatgctcgagatcgggaccagcctgctgtcgcaaactgctgagcagacccgcaaactgaccgacgtggaaacccaggtgctgaaccaaacctcacgcctggaaatccaactgctggagaactcactgtccacctacaagttggagaaacaacttcttcagcagactaatgagatcctcaagatacatgagaaaaactcactgctggagcataagatcctcgaaatggaaggaaagcataaagaggaactcgacactctgaaggaggaaaaggagaatctgcagggcctggtcacccggcagacttacatcatccaagagctcgagaagcaactgaatagggcgaccactaacaactcagtgctccagaagcagcagctcgaattgatggatactgtgcacaacctcgtgaacctttgcaccaaggaaggtgtcttgctgaagggcggcaagcgcgaagaggagaaaccattccgggattgtgccgacgtttaccaagccggattcaacaaatcaggaatctataccatatacatcaacaacatgcctgaaccgaaaaaagtgttctgtaacatggatgtcaacggaggaggctggactgtcatccagcatagagaggacggatcgctcgacttccagcggggttggaaggaatacaagatgggcttcggcaatccgtcgggtgaatactggctcggaaacgaattcatcttcgcaatcacctcacagcggcagtacatgctgagaattgaactgatggactgggaggggaaccgggcgtacagccaatacgatagatttcacatcggaaacgagaaacagaattacaggctttacctgaaggggcataccggcacggctggaaagcagtcctccctcatcctccatggagctgacttttcgacgaaggacgctgataacgataattgcatgtgcaagtgcgctctgatgttgactgggggatggtggtttgacgcatgcggtccaagcaatctcaacggcatgttctacactgccggacagaaccacggcaagctcaacggcatcaagtggcattacttcaagggaccctcatactcccttagatcaaccactatgatgatccgcccattggacttt

SEQ ID NO: 32021 - DNA, 1494 bp, synthetic construct
  misc_feature 1..1494: note = Description of Artificial Sequence: Synthetic coding sequence
  source 1..1494: mol_type = other DNA
atgacggtgttcttgtcttttgcttttctggctgcgatccttacccacatagggtgtagcaatcagaggcgttcccctgagaactctgggcgacggtataacagaattcagcacggccagtgtgcatacacatttatcctgcccgaacatgacggtaattgtcgcgagtccaccaccgatcaatacaacacgaacgcactccagcgcgacgcccctcatgtagaaccagattttagctcccagaaactgcagcacctcgaacacgtcatggagaactatacacagtggctgcagaagcttgagaattacatcgtggaaaatatgaagtctgagatggctcaaatccagcaaaatgccgtacaaaaccacactgccacaatgttggagataggcacatctttacttagccaaacggcggagcagaccagaaagcttacagatgtagaaacacaggttttaaaccaaacttcacgtctggaaatccaactactagagaatagcctaagcacatataagctggagaaacagctgctccaacagactaacgagatcttaaagatccacgagaagaactctcttctggaacacaagatcctagaaatggagggcaagcacaaagaagaactggataccctcaaggaagaaaaggaaaacttgcagggcctcgttactcgccagacgtatatcatccaggaactggagaaacagctaaatcgcgccacaaccaacaacagcgtgctgcagaagcagcagctcgagttaatggatactgtacataacttggtgaacctttgcactaaggagggagtcttactaaaagggggaaagagggaggaggagaagccgttcagggattgcgcagacgtttatcaggcaggctttaataagtccggtatctacacaatttacattaacaacatgccagaacctaaaaaggtcttctgtaacatggacgtgaatggtggaggatggactgtgatccagcatcgggaagacggaagcctcgactttcagaggggatggaaagagtacaagatgggattcggtaatccatccggcgaatactggctgggcaacgagtttatcttcgccatcacctcacagaggcagtacatgcttaggatagaactgatggactgggagggaaaccgagcctactcccagtatgacaggttccacatcggaaacgaaaaacagaactaccgactttatctgaagggccacactggaactgccggaaagcagtcttccttaattctgcatggcgcagattttagcacgaaggacgctgacaacgacaactgcatgtgtaagtgcgctctgatgctcaccgggggctggtggtttgacgcctgtggaccgagcaatctgaatggtatgttctatacagctggtcagaatcatggcaaactgaatgggataaagtggcattatttcaagggaccatcatactcacttcggagtaccactatgatgataagaccgctagacttt

SEQ ID NO: 32022 - DNA, 1494 bp, synthetic construct
  misc_feature 1..1494: note = Description of Artificial Sequence: Synthetic coding sequence
  source 1..1494: mol_type = other DNA
atgacagtgttccttagtttcgctttcctggccgccattctgacacatataggctgctcaaatcagcggaggtcgccagaaaatagcgggcgacggtataataggatacaacacggccagtgtgcatacaccttcatcctccctgaacatgacggaaattgccgcgagtccacaactgaccagtacaacactaacgccctgcaacgagacgccccgcatgtggagccggacttttctagccaaaaattgcagcatctggaacacgtaatggagaactacacacagtggctgcagaaacttgagaactacattgtcgagaatatgaaatcagaaatggcacagatccagcaaaatgccgtgcagaatcatacagccacgatgttggagatcgggacgtctttgctgtctcagactgccgaacagacccgcaagctgactgacgtagagacgcaggtcctcaatcagacctcgcggcttgaaatacagctcctggagaactctctcagcacctacaagctggaaaagcagctacttcagcaaaccaatgagatcttaaagattcacgagaaaaactccctgctcgaacacaagatcttggagatggaaggaaagcacaaggaagagctggacactctgaaggaggagaaggaaaatcttcagggactcgtaactcggcagacatatatcattcaggaacttgagaaacagctcaatagagcaaccactaacaactcagtgctccaaaaacagcagcttgagctgatggacaccgttcacaacttggtgaacctgtgtacaaaggagggagtgcttctaaagggtgggaaaagggaggaagagaaaccattccgcgattgtgccgatgtctaccaggctggttttaacaagtcgggtatctatacaatatatatcaacaatatgcccgaaccaaagaaagtgttctgcaacatggatgtcaacggtggtggctggacagttatacagcacagagaggacggttctctcgatttccagcgtggatggaaagagtataaaatgggcttcgggaatcccagcggcgagtattggctgggcaatgaattcatcttcgccatcacaagtcagaggcagtatatgctcagaattgagctgatggactgggaggggaacagggcatactctcaatatgaccggttccacatcggtaatgagaaacagaactatagactgtacctaaagggacataccggcacagccggaaagcagtccagtctcatactccacggggcggattttagcactaaagatgccgacaatgacaattgcatgtgcaagtgcgcactcatgctgaccggagggtggtggtttgacgcctgtggacctagtaatttaaatgggatgttctacacagcgggccagaatcacgggaagctgaacggcattaagtggcactattttaaaggcccttcctactctcttcgctccacaaccatgatgatcagacccctggacttc

SEQ ID NO: 32023 - DNA, 1494 bp, synthetic construct
  misc_feature 1..1494: note = Description of Artificial Sequence: Synthetic coding sequence
  source 1..1494: mol_type = other DNA
atgaccgtgtttctgtcattcgcatttctcgctgcgatcttgacccacattggttgctcaaaccagcgccgctcccccgaaaacagcggccgccgatacaacaggattcaacacggacagtgcgcctataccttcatcctccccgaacacgacgggaactgcagagagagtaccacagaccaatacaacactaacgcgctccaacgcgacgctccacacgtggaacctgatttcagttcccagaagctgcagcacctcgaacatgttatggaaaactatacgcaatggctccagaaactggagaactatatcgtagaaaacatgaaatccgagatggctcaaattcagcagaatgccgtgcagaaccatacggcaacaatgctcgagataggcacctcccttctttctcagaccgcggagcagacaagaaaactgaccgatgtggaaacacaagttctcaaccagacttctcgtctcgagatccagctcctagaaaattccctctctacttacaaactcgaaaagcaactactgcagcagaccaatgaaattctgaaaatccacgaaaaaaactctctgctagagcataagatcctagagatggagggaaagcacaaggaggaactcgacaccttaaaagaagagaaggagaacctacagggcctcgtaactagacaaacatatattatccaagaactcgagaagcagctgaatagagccaccaccaataacagcgtgttacaaaaacaacagctggagctcatggatacagttcacaaccttgtgaatctgtgtaccaaagagggcgtcctattgaagggtgggaaacgagaagaggagaaacccttccgcgattgtgctgatgtttaccaagccggatttaataaatccggcatctatacgatatacattaataacatgccagaacctaagaaggtgttctgcaacatggatgtaaacggaggggggtggactgttatccagcacagggaggatgggagcctagactttcagcgcggatggaaagaatacaagatgggcttcgggaacccatctggcgagtattggcttggcaacgagtttatcttcgcaataacatcacagaggcagtacatgttacggatcgagctgatggactgggagggaaatagggcttacagccagtatgacagatttcacatcgggaacgaaaagcagaactaccgcctgtatctcaagggacacaccggcacagccggtaaacagtcctcactgatactgcacggggcagatttctctaccaaagacgccgacaacgataattgtatgtgtaagtgtgcccttatgctcaccggaggctggtggttcgacgcatgcggcccttctaatctgaacgggatgttttacaccgccggacagaatcacgggaaactgaacggcattaagtggcattactttaaggggccctcgtacagcctgaggtcaacaaccatgatgatcagaccactggatttt

SEQ ID NO: 32024 - DNA, 1494 bp, synthetic construct
  misc_feature 1..1494: note = Description of Artificial Sequence: Synthetic coding sequence
  source 1..1494: mol_type = other DNA
atgacggtcttcctctccttcgcgtttctcgcagccatccttacccacatcggatgttcgaatcaaaggcgctcccctgagaattccggacgcaggtacaaccgcatccaacacggacaatgcgcttacacgttcattctgcctgaacacgacggcaactgccgggaaagcaccaccgaccagtacaatactaatgctttgcagcgcgacgcaccccatgtcgaaccggacttctcatcgcaaaaactgcaacatctggagcacgtgatggagaactacactcagtggctgcagaagctggaaaattacatcgtggagaatatgaaatccgaaatggctcagattcaacaaaatgcagtgcagaaccatactgccaccatgctcgaaatcggaacttctctcctgtcgcaaacggcggagcaaacccgtaagttgaccgacgtggagactcaggtgctgaatcagacttcgagactggaaattcagcttctggagaattcgctgtcgacgtacaaacttgaaaagcagcttctccagcagaccaatgagatcctgaagattcacgaaaagaactctctcctcgagcacaagatcctcgagatggaaggaaagcataaggaagaacttgataccctcaaggaggaaaaggagaatttgcagggactggtcacccgccagacctacatcatccaagaactggagaaacagctgaatagagccactaccaacaattccgtgctgcagaaacaacaactggagttgatggatactgtgcataatctcgtgaatctgtgcactaaagaaggagtcctgctcaaggggggaaaacgagaggaggaaaagcctttcagagactgcgccgatgtctaccaggctggatttaacaagtcgggtatttacactatttacatcaacaacatgccagaaccaaagaaggtgttttgcaacatggacgtcaacggtggcggctggactgtaatccaacatagggaggacggcagcctcgattttcagcgaggatggaaggagtacaagatgggcttcggtaatccatcgggggaatactggctggggaacgagtttatcttcgccatcacctcccagcgccagtatatgctgcgcattgaactgatggactgggaaggtaaccgggcttactcgcagtacgaccgcttccacataggaaatgaaaagcagaactaccggctgtacctcaaaggacacaccggaaccgcaggaaaacagtccagcctgatccttcacggagcggatttctcgaccaaggacgcagataacgacaactgcatgtgtaagtgcgctctgatgctgaccggcggttggtggttcgacgcctgcggaccctcgaatctgaacggaatgttctataccgcgggacaaaaccatggtaaactgaatggaatcaagtggcactatttcaaggggccttcttactcgttgaggtcaaccaccatgatgatcagaccgctggacttc

SEQ ID NO: 32025 - DNA, 1494 bp, synthetic construct
  misc_feature 1..1494: note = Description of Artificial Sequence: Synthetic coding sequence
  source 1..1494: mol_type = other DNA
atgaccgtcttcctgtccttcgccttccttgctgccatactgacccatattggatgtagtaaccagcgccggagtcctgagaatagcggtcgacgctacaatcgaatccagcacggacagtgtgcctacactttcatcctgcctgagcacgatgggaattgcagggagagcaccactgaccaatacaatacgaatgcgctgcagagagatgccccccatgtagagcccgatttttcgtcacagaagttgcaacacttggaacatgtgatggaaaactacacccagtggctgcagaagctcgaaaattacattgttgaaaacatgaagtcggaaatggctcagattcagcagaatgcggttcagaaccacaccgcaacgatgttggagataggtacctcgctgctaagccagacagctgagcagacacgaaaactgactgatgtcgagacccaggtgttgaaccagactagccgtctggagatccagctgctggagaactccctctctacgtacaagcttgagaagcaactgttgcaacagacgaacgagattcttaaaattcacgagaagaacagcctcctggaacataagatactggaaatggagggcaaacataaggaagagcttgatacgctgaaggaggaaaaggagaacctccagggcctggtgacccgccagacctatatcatccaggagctggagaaacagctgaaccgggcaactactaataattcggttctgcagaagcaacagttggagcttatggatacagtacacaatctggtcaacctttgtaccaaggagggagttttgcttaaaggcggaaaaagagaagaagaaaagccgtttcgggattgcgccgatgtgtatcaggccggtttcaacaagtcaggcatttacacgatatatataaataatatgcccgagccgaagaaggtgttctgcaatatggatgtgaatggaggtggatggacagttattcaacaccgcgaagacggaagtctggacttccagcggggatggaaggaatacaaaatgggatttggaaatccgtcgggagaatactggttgggcaacgagttcatatttgctatcacgagtcagagacagtatatgctccgcattgaactgatggattgggagggaaatcgagcctattcgcagtatgataggtttcacatcggcaacgagaagcagaattaccgcctgtatcttaaaggtcataccggaacggctggtaagcaaagcagtcttattttacacggcgctgacttctccacaaaggatgccgacaacgataattgcatgtgcaaatgtgctctgatgttgacgggaggatggtggttcgatgcttgcggcccttcgaacctgaacggcatgttttataccgcgggccagaatcatggaaagttgaacggcatcaagtggcattacttcaaaggcccatcgtattccctgcgtagcacgacaatgatgatccgccccctagacttc

SEQ ID NO: 32026 - DNA, 1494 bp, synthetic construct
  misc_feature 1..1494: note = Description of Artificial Sequence: Synthetic coding sequence
  source 1..1494: mol_type = other DNA
atgaccgtgttcctttcgtttgcatttcttgctgcgattctgacgcatatcggttgttcgaaccaacgtcggtccccggaaaattcaggcagacgatacaaccgtatacagcatggtcagtgcgcctatacgtttattctgcccgagcacgatggcaattgtagagaatcgaccaccgatcagtacaatactaatgcgctccaacgagatgcacctcatgtggaacccgatttttcgtcacaaaaacttcagcatctggaacatgtgatggagaactacacccagtggcttcaaaaacttgagaactacattgtggagaatatgaagtcagaaatggcacaaattcaacaaaacgcagtccagaaccataccgcgaccatgctcgagattggcacttcacttcttagccaaactgccgaacaaactagaaagttgactgatgtggaaacgcaggttctgaaccaaacttccagactggaaatccaactgcttgaaaacagcctctcgacctataaacttgaaaaacaactccttcaacagaccaacgaaattctgaagatccacgagaagaattcccttctcgaacataagattctcgaaatggaaggaaagcacaaagaagaactggatacccttaaagaggaaaaagaaaacttgcaaggactcgtgacccgacaaacctacattattcaagagttggaaaagcaacttaaccgtgcaaccaccaacaactcggtgttgcaaaagcagcaactggaactgatggatactgtgcataatcttgtcaacctgtgtactaaggaaggtgtgctgctgaagggcggaaagcgagaggaagaaaagccttttagagattgcgccgacgtgtaccaagccgggtttaacaaaagcggtatttacactatttacatcaacaatatgccggaaccaaaaaaggtgttctgtaacatggatgtgaacggaggtgggtggactgtgatccagcatcgagaagatgggtcgctggattttcagagaggctggaaggagtacaagatgggatttggaaacccatcgggagaatactggcttggtaacgaattcatctttgcaattaccagccagagacagtacatgctccggattgaacttatggactgggaaggaaatcgcgcttactcacagtacgatcggtttcatatcggaaatgagaagcaaaactaccgtctgtacttgaaggggcacaccgggactgcaggtaaacagagctcactgatacttcatggagcagacttttcgaccaaagatgcagataacgataattgtatgtgcaagtgtgcactcatgctgactggtggctggtggtttgacgcgtgcggcccatcgaacctcaacggaatgttctacaccgcgggtcagaatcacgggaagctgaacggaattaagtggcattactttaagggcccgagctatagccttcggtccaccaccatgatgatccgccctctcgatttc

SEQ ID NO: 32027 - DNA, 1494 bp, synthetic construct
  misc_feature 1..1494: note = Description of Artificial Sequence: Synthetic coding sequence
  source 1..1494: mol_type = other DNA
atgactgtgttcctgtcattcgcgtttctggcggctattcttactcacatcggatgctccaatcaacgtcgctcgccagaaaactccggaagaagatacaacagaatccagcacggacaatgtgcatacacgtttatcctgccggaacatgatggaaattgccgcgaatcgaccaccgaccaatacaacactaatgctctgcagcgcgatgcgcctcatgtggaacctgatttctcatcgcaaaagctgcaacacttggaacatgtgatggagaattacactcagtggcttcagaaattggagaactacatcgtggaaaacatgaaatcggaaatggcacagatccaacagaatgcggtccaaaaccacactgctaccatgcttgaaatcggtacgagcctgctttcccaaacggctgaacagacccggaagctgaccgacgtcgagactcaggtgctgaaccagacttcacggctcgagattcagctgctggagaacagcctgtcgacctacaaattggagaaacaactcctgcagcaaacgaatgaaatcctgaaaattcacgaaaagaattctctgctcgagcataagattcttgagatggaaggcaagcacaaggaggagctcgacactctgaaggaagaaaaggaaaacttgcagggcctcgtgactcgtcagacctacatcatccaggaacttgaaaagcaacttaacagggcaactaccaacaactcagtgttgcagaagcaacaactggagctgatggataccgtgcataatctcgtgaatttgtgcaccaaagaaggagtgctgttgaaaggaggtaagcgagaggaggagaaaccgttccgcgactgcgccgacgtgtatcaggcaggctttaacaagagcgggatctatactatctacatcaataacatgcctgagccaaagaaagtcttttgcaatatggacgtgaacgggggtggctggactgtcattcagcatcgcgaagatggctcgttggattttcagcgggggtggaaggagtacaagatggggttcggcaacccgtccggcgaatactggcttggaaacgaattcattttcgcaatcacctcccaacgccagtacatgctgcgcatcgagctcatggattgggagggaaatcgcgcctacagccagtacgaccgctttcacatcggaaatgaaaagcagaattaccggctctacctgaagggccacaccggaaccgccggtaagcagtcgtcactgatccttcatggggcagacttctcgactaaggatgcagataacgacaattgcatgtgtaagtgcgcactgatgctgactggaggatggtggtttgatgcctgtggaccttcaaacctgaacgggatgttctacactgctggacaaaaccacggtaaactcaacggaatcaagtggcactactttaaaggaccatcttactccttgcgctccactactatgatgatcaggccgctggatttc

SEQ ID NO: 32028 - DNA, 1494 bp, synthetic construct
  misc_feature 1..1494: note = Description of Artificial Sequence: Synthetic coding sequence
  source 1..1494: mol_type = other DNA
atgacagtcttcctgtcctttgcatttcttgccgctatcctgacacatatcgggtgctcgaatcagaggagaagtcccgaaaattctggacgacgctataacagaatacagcacgggcagtgcgcatatacattcatccttccagaacatgatggaaactgtagggaatcgactacagatcagtataacactaatgctctgcagagggacgccccccacgtcgaaccagatttttcatctcagaaactacagcacctcgaacatgtgatggaaaactatactcaatggctccagaaacttgagaattatatcgttgagaacatgaaaagtgagatggcacagattcagcagaatgcagtacagaaccacactgccacaatgctggaaatcgggacatccctcctttcacagacggcagaacaaactagaaaactgactgatgtcgagacacaggttctcaatcagacatcgcgacttgagatccagctattggaaaactcactgtccacttataaacttgagaaacagctgctccagcagactaatgagatcctgaaaatccacgagaaaaatagtttactggaacacaagatcctggaaatggaagggaaacataaagaagagcttgacacactgaaggaagaaaaagaaaatttacaggggctcgtgacaaggcagacatatataattcaagaactagaaaagcaattgaatagggccacaacgaataactccgttttgcagaaacaacagctggaacttatggacacagtacataacctcgttaacctatgtactaaagaaggagtactcctgaaggggggaaaacgagaagaagaaaaaccttttagagattgcgccgatgtataccaggccgggtttaacaaaagtggaatttacacaatatatataaacaatatgccagagccaaaaaaagttttctgcaacatggacgtaaacggaggaggatggacagtcatccagcaccgggaagatgggtcactagattttcagcgcgggtggaaagagtacaaaatgggattcggaaaccctagtggggaatactggctggggaatgaatttatctttgcaatcactagtcagcggcagtatatgttgcgcatagaattaatggattgggaagggaatagagcgtattcccaatatgatcgattccatatcgggaacgaaaagcagaattatcgcttgtacctgaaaggacatacagggactgccgggaaacagtcttctctgatacttcacggggccgacttctctacaaaagatgcagataacgataattgtatgtgtaaatgcgcactcatgctaacaggaggatggtggtttgatgcttgtggaccatctaacttaaacgggatgttctatacagccgggcagaatcatggaaaactgaatgggataaaatggcactactttaaaggacccagttatagtctacggtctacaacaatgatgatacggcccctcgatttt

SEQ ID NO: 32029 - DNA, 1494 bp, synthetic construct
  misc_feature 1..1494: note = Description of Artificial Sequence: Synthetic coding sequence
  source 1..1494: mol_type = other DNA
atgaccgtctttttgtcctttgccttcctcgcagcaatcctgacgcatatcggctgctccaaccagagaaggtcacccgaaaactccggacggcggtacaaccgcattcagcatgggcaatgcgcatacactttcattctgccagagcatgacgggaactgtagagagtctacaactgatcagtataacacaaatgcgctgcaacgagacgctccacatgttgagccagactttagctcccagaaactgcagcatctggaacatgtgatggagaattatactcagtggctgcaaaaattggagaattacatcgtggagaacatgaaaagcgaaatggcccagattcagcagaacgctgtgcagaatcacacggccaccatgctggagattggaacgtctctgcttagtcagacggctgaacagacgcgcaagcttacggacgtagaaacccaggtcctgaaccagaccagtcgcctggaaatccagctcctggaaaattctctctccacgtataagctcgaaaagcagcttcttcaacagacaaacgaaatcctgaagatacacgagaaaaattctcttcttgaacacaagattctggagatggagggcaaacacaaggaagaactggacaccctcaaggaggagaaggaaaatctgcagggactcgtgacacgccagacttatatcattcaggaattggagaaacagctcaacagagcgaccacaaataactccgtgttgcagaagcagcagcttgaactgatggacaccgtgcacaatctggtaaacctttgtacaaaggagggcgtgctcctgaagggtggcaagagagaggaggaaaaaccttttcgcgattgcgctgacgtgtatcaggctggtttcaataagagtggtatctataccatctatattaataatatgcccgagccgaagaaggttttctgcaatatggatgtgaacggcggcggatggacagtcattcaacaccgagaggatgggagcttggattttcaaagaggttggaaagaatacaaaatgggctttggcaatcctagtggcgagtattggttggggaacgagtttatttttgcgatcacttcacagagacaatacatgctgcgcatagaactcatggactgggagggtaatcgggcatatagccagtacgacaggttccacatcggcaatgagaaacagaattacagactctatttgaaggggcacactggcacagcgggaaagcagtccagcctgatacttcatggggccgacttctccactaaggacgccgacaatgataattgcatgtgcaagtgtgccctgatgctgactggaggatggtggttcgacgcgtgcggtccttcaaacttgaacggcatgttctacaccgctgggcagaatcatggaaaactgaacgggattaaatggcactatttcaaaggtccctcctatagtttgaggtctacgacgatgatgatccgccctctggatttt

SEQ ID NO: 32030 - DNA, 1494 bp, synthetic construct
  misc_feature 1..1494: note = Description of Artificial Sequence: Synthetic coding sequence
  source 1..1494: mol_type = other DNA
atgaccgtgtttctgtcttttgcatttctggcagcaatcctgacccatatcggttgttcaaatcaacgccggtcacctgagaactcaggacgccgctacaaccgtatccaacacggtcaatgcgcatacacctttatccttcctgagcatgatggtaactgtcgcgagagcaccaccgatcaatacaacaccaacgccctgcaacgggacgcaccccatgtggaacctgatttttcctcacagaaactgcagcatctggaacatgtgatggagaactacactcaatggcttcaaaaacttgaaaactacattgtcgaaaacatgaagtctgaaatggcacagatacaacagaacgcggtgcaaaaccacacggcaactatgcttgaaatcggtaccagcctcctgtcccagactgcagaacaaacgagaaaattgacggatgtcgaaacccaagtcctcaatcagaccagccgtcttgaaattcaactgctggagaattccctgtccacttacaagctggagaaacagctcttgcaacagaccaacgaaatactcaagattcacgaaaagaactccttgctcgaacataagatactggaaatggaaggaaagcataaagaagagctcgacaccctcaaggaagaaaaggaaaatcttcagggcctggtcaccagacagacctacatcatccaggaacttgagaagcagcttaaccgcgcaaccactaacaattcggtcctccagaaacaacaacttgaattgatggacaccgtgcacaacttggtgaatctttgtactaaggagggtgtgctgctcaagggaggtaagcgggaagaagagaagcccttccgggactgtgcagatgtgtaccaagcaggcttcaacaagtcaggaatttacaccatttacataaacaatatgccagaaccgaagaaggttttctgtaatatggatgtgaatggtggcgggtggaccgtcattcagcatagggaagatggatcactggactttcaaagaggctggaaggaatacaaaatgggattcggaaatccctccggtgaatattggctggggaacgagtttatctttgccattacctcccaaaggcagtatatgctgagaatagagctcatggactgggaagggaatcgggcctactcccaatacgataggtttcatatcggcaacgagaaacaaaactaccgcctctaccttaagggacacaccggtaccgcaggtaagcagtctagcctgattctccatggcgccgatttctcgactaaagatgcggacaacgataactgtatgtgtaaatgtgcactcatgctgactggaggatggtggtttgatgcctgtggacctagcaaccttaacggtatgttttacactgcaggccagaatcatggtaaacttaatggaattaagtggcactactttaaaggcccctcgtactctcttcggtccactactatgatgattagacctcttgatttt

SEQ ID NO: 32031 - DNA, 1494 bp, synthetic construct
  misc_feature 1..1494: note = Description of Artificial Sequence: Synthetic coding sequence
  source 1..1494: mol_type = other DNA
atgaccgttttcttgtctttcgcatttttggctgccatattgacacacatcggatgtagtaaccagaggagaagccccgaaaacagcggccgccgctacaaccgcatccaacacggccagtgtgcttacacgttcatccttcctgagcacgacggaaattgtcgcgagtctactacagaccagtacaataccaacgccttgcagcgcgacgctccccatgtcgagccagatttctccagccagaaactgcagcacctggagcatgttatggagaactacactcagtggttgcagaagctggaaaattatatagtagagaatatgaagtcagagatggcgcagatccagcagaacgccgtgcaaaatcatacggcaacgatgctggagattggaacctccctgctttcacagacggctgagcagacaagaaagctgacggatgtggagacccaagtactgaatcagacatccaggctggagatccaacttttggagaactctctctccacgtacaagcttgagaaacaactgctccagcagacgaacgaaatcttgaagatccatgagaaaaactccttgcttgagcacaagattctggaaatggagggcaaacataaggaggagctggatacgctgaaggaggaaaaggagaatctccagggactggtgacgagacagacatacatcattcaagaactcgagaagcaactgaatagggccaccaccaataatagcgtgctgcaaaagcagcagcttgaactgatggataccgtgcataatcttgtcaatctttgtaccaaagagggagtgcttctgaagggaggaaagagggaggaggaaaagccttttcgcgattgcgctgacgtgtaccaggctggatttaataagagcggtatttataccatctacatcaacaatatgccagaacctaagaaagtattctgcaacatggatgtcaacggaggtggatggaccgttattcagcaccgcgaggatggaagtctggactttcagaggggttggaaagaatacaagatgggctttggtaaccctagtggcgagtattggctcggcaacgagtttattttcgctatcacaagtcagaggcaatatatgctgagaatcgaactcatggattgggaaggaaatagggcctactcccaatacgataggttccacatcggcaatgaaaaacaaaattacaggctgtatctgaagggccacactggcactgctggaaagcagtcatccctgattctgcacggagccgacttcagtacaaaggacgctgataatgataactgcatgtgcaagtgcgcattgatgttgaccggtggatggtggttcgacgcctgtggaccgtccaatcttaatggcatgttctatactgcaggacagaaccatggcaagctcaacggcattaaatggcactactttaagggcccatcctacagcctccgcagcaccaccatgatgatcagacctttggacttt

SEQ ID NO: 32032 - DNA, 1494 bp, synthetic construct
  misc_feature 1..1494: note = Description of Artificial Sequence: Synthetic coding sequence
  source 1..1494: mol_type = other DNA
atgacagtgtttttgtccttcgcctttctggctgctatattaacgcatattggttgctccaaccagcgtcggagtcctgagaactccggtcgacggtataataggattcagcacgggcaatgcgcatatacttttatcctgccggaacacgatggtaactgcagagagtcgactaccgaccagtacaacacaaatgcactccagcgtgatgccccccacgtggagcccgacttctctagtcaaaaactacagcacctcgagcacgtaatggagaattacactcagtggctccagaaactcgagaactacatagtggagaatatgaagtcagagatggcacaaattcagcagaacgctgtgcagaaccatacagctaccatgcttgagatcgggacgagcctcctgagtcagactgctgaacagactagaaagctgacagatgtggaaacccaagtactcaaccagacatctaggttggagatccagctactggagaactctctatccacatacaaactggagaagcaattacttcagcaaacaaatgagatcctgaagattcatgagaaaaactcgttgctggagcataaaattctcgaaatggaaggcaagcacaaagaggaactggacacgctgaaagaggagaaagaaaacctccagggccttgtaacacgccagacatacatcattcaggaattggagaagcagctgaacagagccaccacaaataatagtgtgcttcagaagcaacagcttgaattgatggatactgtgcacaacttagtaaatctgtgcaccaaggaaggcgttctgctgaagggtggtaaaagggaagaagaaaagccattccgggattgtgctgacgtttatcaagccgggttcaataagtcagggatatacacaatctacatcaacaacatgcctgaaccaaagaaggtgttttgcaatatggacgtgaacggcggaggctggacagtgatacaacaccgcgaggacggatctctggatttccagcgaggttggaaggagtataaaatggggttcggaaaccccagtggggagtactggcttggcaatgaattcatcttcgccattacatcccagaggcaatatatgctgagaatagagctcatggactgggaaggaaacagagcttatagccagtacgacagatttcacataggaaacgaaaaacagaattacagattgtatctcaaggggcataccggcacagccggaaagcagagttccctgatcctgcatggggccgatttcagtacaaaagatgctgacaacgacaattgcatgtgcaagtgtgcgctgatgctgactggcgggtggtggttcgatgcatgtggaccctcaaacttgaatggtatgttttacactgccggacagaaccacgggaagctcaacggtataaaatggcattactttaagggaccttcatattcgctgagaagtaccaccatgatgattcgccccttggatttc

SEQ ID NO: 32033 - DNA, 1494 bp, synthetic construct
  misc_feature 1..1494: note = Description of Artificial Sequence: Synthetic coding sequence
  source 1..1494: mol_type = other DNA
atgaccgtgttcctgagctttgcgtttctggcggcgatattgacccacatagggtgttccaatcagcgccgctccccagagaacagcggccgtcgctataatcgtatccaacacggccagtgcgcttatacgttcatactgccagagcacgacggtaactgtcgggaatccactaccgaccagtacaacaccaatgctctgcaacgggacgcgccccacgtcgaaccagacttcagtagccaaaaattacagcacctggagcacgttatggagaactacacccaatggctgcagaagctggagaactatatcgttgagaacatgaagtctgaaatggcacaaattcagcagaacgctgttcagaatcacacagcaacgatgcttgagattggtacctctttactttcccaaaccgctgagcagacgcgcaaattgaccgacgtggaaactcaagtcctgaaccaaacttcgcgcctggagatccagctgttggaaaatagcctgagcacgtataagcttgagaagcagctgcttcagcagaccaacgagattctgaagattcatgaaaagaattccctgctggagcacaaaattctggagatggaaggcaagcataaagaggagctagacacgttgaaagaggagaaggagaatctgcagggccttgtcacccgccagacctacatcattcaggaactggaaaaacagctgaacagagcgacgacaaataatagcgtgctgcaaaaacaacagttggagttgatggataccgttcataacctggtgaacttgtgtactaaggaaggtgtcctgcttaagggtggcaagcgcgaagaggagaagcctttccgcgactgcgcagatgtataccaggcaggctttaataagagcggaatctacaccatttacattaacaacatgcctgagcctaagaaggttttttgcaatatggacgtcaatggagggggatggaccgttatccagcatcgcgaggatggcagcctggactttcagcgaggttggaaagagtacaaaatggggtttggaaacccgagtggtgaatattggctgggtaacgagttcattttcgctatcacaagccagcgccaatatatgctgcgcatcgaactaatggactgggaggggaaccgcgcgtatagccaatacgatcgattccacattggcaacgaaaagcagaactaccggctgtacctgaaaggccacaccggtaccgcgggaaagcaaagctcattgatcctgcatggcgctgacttttctacgaaggatgctgacaacgataattgcatgtgcaagtgcgccctgatgctcaccggggggtggtggtttgatgcttgcggtccgagcaacctgaatggtatgttctacacggctggtcaaaatcatgggaaactgaacggtatcaaatggcattacttcaagggtccaagctatagcttgcgctctactacgatgatgatccgcccattggacttt

SEQ ID NO: 32034 - DNA, 1494 bp, synthetic construct
  misc_feature 1..1494: note = Description of Artificial Sequence: Synthetic coding sequence
  source 1..1494: mol_type = other DNA
atgactgtgttccttagcttcgccttcctggcggctattctgactcatataggttgcagtaaccaaaggcgcagcccggagaacagtggcaggcggtataacaggattcagcacggacagtgtgcctatacctttatcttgcccgagcacgatggaaattgcagagagagcaccaccgaccagtacaacacaaacgctttgcagcgggacgcccctcatgtggagcctgatttcagctctcagaagttgcagcatcttgaacatgtgatggaaaactacacacagtggttgcagaagctggaaaactacatagtggaaaacatgaagagtgaaatggcccagattcagcagaacgctgttcagaaccatacagccacaatgttagagatcggcacatccttgctgtcccaaaccgccgagcagacccgcaaattaaccgatgtggagacccaggtgctcaaccagacctcgcggttggaaattcaattgctcgaaaactcgctgtcaacatacaaacttgaaaagcagctcctgcagcagaccaatgagatcctgaagatccatgagaaaaattccctgcttgagcacaagattctcgagatggagggtaagcacaaggaagagctcgacacactgaaggaggagaaagagaacttgcaggggctggtgaccaggcaaacatacatcattcaggagctcgagaaacagctgaatagagccaccaccaataactccgttttacagaagcagcagttagagctcatggacaccgtgcacaacctggtcaatctttgcaccaaggagggtgtgctgctgaaaggcggcaagagagaagaagagaaaccgtttcgcgactgcgcggatgtatatcaagctgggtttaacaagagtggaatttacaccatttacattaacaacatgccagaaccaaaaaaagttttctgtaacatggatgtcaatggggggggctggaccgtgatccagcacagggaagacggttccctggactttcagagagggtggaaggagtacaagatgggcttcggaaacccctcaggcgaatactggctagggaacgaattcatcttcgcaatcacctcgcaaagacaatatatgttgaggattgagctgatggattgggaagggaaccgggcctacagccagtacgataggtttcatattgggaatgaaaagcagaattacaggctatatctgaagggccacacaggaactgcgggaaagcagagttctctgatcttgcatggagcggacttttcaacaaaagacgcagataacgataactgtatgtgcaagtgtgctctaatgctgactggcggatggtggttcgacgcttgcgggccatcgaacctgaacggaatgttctatacagcaggccagaatcatggcaagctcaacggaataaaatggcattactttaagggcccctcatattcactgagatcaacaaccatgatgatccggccattggatttc

SEQ ID NO: 32035 - DNA, 1494 bp, synthetic construct
  misc_feature 1..1494: note = Description of Artificial Sequence: Synthetic coding sequence
  source 1..1494: mol_type = other DNA
atgaccgtatttctcagtttcgccttccttgcggctatcttgacccacatcgggtgctccaatcaaagacgcagcccggagaattccggaaggcgctacaaccggatccaacatgggcagtgtgcctacaccttcattctcccggagcatgacgggaactgccgggaatccaccacggaccagtacaatacgaatgccctccagcgcgacgccccacacgtcgaacctgacttctcttcacagaagctgcagcatcttgagcatgtgatggagaactacactcaatggctgcagaagttggagaattacatcgtcgaaaacatgaaaagcgaaatggcacagattcagcagaatgcagttcagaaccacactgctacgatgctggaaattggcactagcttgctctcacagactgcagaacagacgcgcaagctgaccgatgtggaaacccaagtgctgaatcaaacctcccgcctggagatccagctcctggagaactctctctcgacctacaaactcgaaaagcaactcctgcagcaaaccaatgaaatactgaagattcacgagaaaaacagcctgctggagcacaaaattcttgagatggaaggaaaacacaaggaagaattggatactctgaaggaggaaaaggagaatcttcaaggacttgtgaccaggcaaacgtacataatccaagagcttgaaaaacaactgaacagagcgacgactaataacagtgtccttcaaaaacaacaactcgaactgatggatactgtgcataacctggtgaacctctgcactaaagaaggtgtgttgttgaagggaggaaaacgcgaggaagaaaagccgttcagggactgcgccgatgtctatcaggcgggcttcaataagtctggaatttacaccatctacatcaacaatatgccggaacctaagaaggtgttctgcaatatggatgtgaacggaggaggatggactgtcatccagcacagagaggacggatcgctggatttccagcggggctggaaggagtataagatgggctttggtaacccgtcgggagaatactggctggggaacgagttcatctttgcgatcaccagccaaagacagtatatgctccggatcgagctgatggactgggagggaaaccgtgcgtactcacagtacgatcgattccacatcgggaatgagaagcagaactaccggctgtacctgaagggccacaccggaactgccggtaagcagtcaagcctgatcttgcatggcgctgacttttcgaccaaggacgcggacaacgacaactgcatgtgtaagtgtgcactcatgttgactggcggatggtggttcgatgcttgcggcccttcaaaccttaacggcatgttttacaccgcaggtcagaatcacggtaaacttaacggtatcaaatggcactactttaagggacccagctacagcctgagaagcactactatgatgatccgcccactcgacttc

SEQ ID NO: 32036 - DNA, 1494 bp, synthetic construct
  misc_feature 1..1494: note = Description of Artificial Sequence: Synthetic coding sequence
  source 1..1494: mol_type = other DNA
atgacggtgttcctgtcgttcgcctttttggcggccattctgacccacatcggatgctccaatcagcgcaggtcaccggaaaactccggcaggcgctacaatagaatccagcatggacagtgtgcatacactttcatccttccagaacatgacggtaactgccgcgagtcgaccacggatcagtacaacactaacgccctccagcgggatgctccgcacgtcgaacccgacttctcatcgcagaagctgcaacatctcgagcacgtgatggaaaactacacccagtggcttcagaaactggagaactacatagtggaaaacatgaagagcgagatggcccagatccaacaaaacgccgtgcagaaccacaccgcaaccatgttggagatcggaactagcctgctttcccaaactgccgaacagacccggaagttgactgacgtcgagactcaagtcctgaaccagaccagtcgcctcgagattcagctcctggaaaacagcctgagcacctacaagctggagaagcagctcctgcagcaaaccaacgaaatcctgaaaattcacgagaagaattccctgctggagcataaaatcctggaaatggaagggaagcataaagaagagctcgatactctcaaggaagaaaaagaaaatctccaaggactggttacccggcagacttacatcatccaagagctggaaaagcaactgaaccgagcaactactaacaattccgtgctgcagaagcagcaactcgaattgatggacactgtgcacaatctcgtcaatctctgtaccaaagaaggggtcctgctcaaaggaggcaagagggaagaggagaagccgtttcgggactgcgcggatgtgtatcaggcgggcttcaacaagtccggcatctacacgatttacatcaataatatgccagaaccgaagaaggtgttctgtaatatggacgtgaatgggggagggtggaccgtgatccaacatcgggaggacggctcgcttgacttccagcgtgggtggaaagaatacaagatgggattcggaaatccttctggcgagtactggctgggtaacgaattcatcttcgctattacctcacagcgccaatacatgttgcgcatcgagctgatggactgggaaggaaacagagcctacagccaatacgaccggttccacatcggcaacgagaagcagaactacagactctacctgaagggccacactggtaccgccggaaaacaatcctcacttatcctccacggagctgatttctcaaccaaggacgcggataatgacaactgcatgtgcaagtgcgcgctgatgttgactggaggatggtggttcgatgcttgcggaccgtcgaacctgaacggtatgttttacacggcaggtcagaatcatggcaagctcaacggaatcaagtggcactactttaaaggaccatcgtattcgctgagaagcactaccatgatgatccgccctctggatttt

SEQ ID NO: 32037 - DNA, 1494 bp, synthetic construct
  misc_feature 1..1494: note = Description of Artificial Sequence: Synthetic coding sequence
  source 1..1494: mol_type = other DNA
atgactgtattcctttccttcgcctttctggctgcaattctcactcacatcggctgctccaaccaaaggaggtcaccagaaaatagtggacgtaggtacaatagaatccagcatggccagtgcgcatatacattcatactgcctgagcatgatgggaactgtagagaatctactactgaccagtacaacactaacgcacttcaacgtgacgcaccacatgtcgaacccgatttttcttcacagaaattgcaacatcttgagcatgttatggagaattacacccaatggttacagaagctggaaaactacatcgtcgaaaacatgaaatctgagatggcgcaaatccaacagaacgcagtccaaaatcatacagccactatgctcgagattggcacatccctcttgtctcaaactgctgaacaaacaagaaaacttacagacgtggaaacccaagtacttaaccaaacctcacgactagaaattcaattactcgagaactcattatccacttataaactcgagaaacaacttcttcaacagacaaatgagatcctcaaaattcatgagaaaaacagccttttggaacataagatcctcgaaatggaaggtaaacataaggaggaattggatacgctaaaagaagagaaggaaaatttacagggtctcgttacacgacagacttatattattcaagagctcgagaagcagctcaatcgagcaaccacgaacaatagtgttctccaaaaacagcaactcgagcttatggatactgtgcacaatcttgtgaacctttgcactaaggagggtgtgttgcttaagggtgggaagcgagaggaggagaaacctttccgtgactgcgcggatgtttatcaagcaggcttcaataaaagtgggatttatacgatatacataaataatatgcccgaacccaagaaagtgttctgcaatatggatgttaatggcggtggttggactgttatccagcatagagaggatgggtccctcgacttccagcggggatggaaagaatacaagatgggtttcgggaatccctctggtgagtattggctcggcaatgagtttatctttgctattacttcacagcgtcaatatatgttacgtatcgagttaatggattgggaaggaaacagggcatactcccagtatgacaggttccacattggaaatgaaaagcaaaattataggctgtatctcaagggtcataccggaacagccggtaaacagtcttcacttatcttacatggtgccgatttttccactaaagatgctgataacgataattgtatgtgtaaatgtgctctgatgctaacagggggctggtggttcgacgcatgtggacctagtaatttgaatggtatgttctataccgctggacaaaaccacgggaagcttaacggaataaaatggcattattttaagggtccttcttattcattgcgttcaactactatgatgatcaggccgcttgacttc

SEQ ID NO: 32038 - DNA, 1494 bp, synthetic construct
  misc_feature 1..1494: note = Description of Artificial Sequence: Synthetic coding sequence
  source 1..1494: mol_type = other DNA
atgaccgtttttctgtccttcgcgttccttgctgccatcctgactcacatcggatgtagcaaccaacggaggtcgccagagaactcaggacgcagatacaaccgcattcagcatggtcagtgtgcttacacgtttatcctgcctgagcatgacggcaactgccgcgagtcgacgaccgatcaatacaacaccaatgccctccaacgcgacgctccccatgtggaaccggatttctcgagccagaagctgcagcatctggagcacgtgatggagaactacacccagtggctccagaaactcgaaaactatattgttgagaatatgaaaagcgaaatggcgcagatccagcaaaacgccgtgcagaatcataccgctaccatgctcgagattggcacttcgcttctgtcgcaaactgccgaacagactcgaaagctgaccgatgtggaaactcaggtgctgaatcagacctcgcggctggaaattcagctcttggaaaattcgttgtctacttacaagctggaaaagcagcttctgcaacagacgaatgagatcttgaaaatccatgaaaagaactcacttctggaacacaaaatcctcgagatggaaggaaagcacaaggaagaactggataccctcaaagaggaaaaagagaacttgcaaggtctggtgacccggcagacttacatcatccaggagcttgagaagcagctgaatagggccactactaataactccgtcctccaaaagcaacaattggaactcatggacacggtgcataatctggttaacctctgtaccaaagaaggcgtcttgctcaagggaggcaaaagggaagaagagaaaccattcagggattgcgcggacgtgtaccaggccgggttcaataagtcgggaatctacaccatctacatcaataacatgcccgagccgaagaaggtgttctgcaacatggacgtgaatggaggagggtggactgtcatccaacatcgggaggacggttcacttgatttccaaagagggtggaaggagtacaagatgggattcggaaacccgagcggggaatactggctgggtaatgagtttatcttcgcgattacttcccaaaggcaatacatgctgagaatcgaactgatggactgggagggaaatcgcgcgtattcccagtacgaccggttccatattggaaacgagaagcagaactatcggctgtacctcaagggacacactggcaccgcaggtaagcagtcatcccttatcttgcatggagcagatttctcaaccaaggatgccgataacgacaattgcatgtgtaagtgcgctctcatgctgaccggcggttggtggtttgacgcatgtggacctagcaatctgaacgggatgttttacactgcgggccaaaatcatggaaagctcaacggaatcaagtggcactacttcaagggcccgtcgtactctctgagatcgaccactatgatgatacgtcctctggacttc

SEQ ID NO: 32039 - DNA, 1494 bp, synthetic construct
  misc_feature 1..1494: note = Description of Artificial Sequence: Synthetic coding sequence
  source 1..1494: mol_type = other DNA
atgaccgtgttcctcagcttcgcatttctggccgcaattctgactcatatcggctgcagcaatcagaggcgttcaccagaaaactccggtagacgctacaatcgcatccaacatggacagtgcgcatacacgttcatcctgcctgaacacgatggaaactgcagagagtcaactaccgaccagtacaacacgaacgctttgcagcgggatgcaccgcatgtggagccagacttctcatcgcaaaagctgcagcatctcgaacacgtgatggaaaactacacccagtggctgcagaagctcgagaactacatcgtggaaaacatgaaatcggaaatggcccagatccagcagaacgccgtgcagaatcataccgcgacgatgctcgagatcggtacctcgctgctgtcacagacggcggaacagacccggaaactgactgatgtggaaacgcaagtgttgaatcagacctcacgccttgaaatccagctgctcgagaattcacttagcacctacaagctggagaaacagctccttcagcaaaccaatgagatcctcaagatccacgaaaagaactcactcctggaacacaaaatcctggaaatggaaggtaagcacaaggaagagttggataccctgaaggaggaaaaggaaaacctgcagggtctggtcaccagacaaacctacatcatccaagaactcgaaaagcagcttaatcgggccactaccaacaattccgtgctgcagaagcaacagttggaacttatggatactgtccataacttggtgaatttgtgcaccaaggagggggtcctgctgaaaggaggcaagcgggaggaagaaaaaccattccgggattgcgctgatgtttaccaggcgggatttaacaagtcggggatttacactatttacatcaacaatatgcccgaaccaaagaaagtgttctgtaacatggatgtcaacggaggcggatggaccgtgattcaacaccgcgaggacggctcgctcgacttccagcggggatggaaagagtacaagatgggattcggcaatcccagcggagagtactggcttggaaatgagttcattttcgcgatcacctctcagcggcaatacatgctccggattgaactgatggactgggaaggaaaccgggcttactcgcagtacgatcgctttcacatcggaaacgaaaagcagaattacaggctgtacctgaaaggccataccggcactgccggaaaacagtcgtcgctgatcctgcacggcgctgacttctccactaaggacgcagataacgataactgtatgtgtaagtgtgccttgatgcttaccggcgggtggtggtttgatgcatgtggcccttcgaacctcaacggcatgttctacactgctgggcaaaatcacggaaaactcaacggtatcaaatggcactacttcaagggcccgtcctactcgctccgctcgaccaccatgatgatccgcccgctggacttc

SEQ ID NO: 32040 - DNA, 1494 bp, synthetic construct
  misc_feature 1..1494: note = Description of Artificial Sequence: Synthetic coding sequence
  source 1..1494: mol_type = other DNA
atgacagtgttcctgtcctttgcgttcctagcagccatccttacccatattggatgttctaaccaacgcaggtctccagaaaatagcggccggaggtataacaggattcagcacgggcagtgcgcttacacttttattctccccgagcatgacggcaactgtagggaatctaccactgaccaatacaataccaatgccctgcagcgcgatgcaccgcacgtcgagcctgatttttcctcccagaaacttcagcatctggagcatgtgatggagaactacactcagtggctccaaaagctagaaaactatatcgtcgagaacatgaaaagtgagatggcacagatccagcagaatgccgttcagaatcataccgccacaatgctggagatcggaacgagcctgcttagtcagaccgcggaacagacccgaaagctgacagacgtcgaaactcaggtgcttaaccagacctccagactggagatccaattactggaaaattctttgtcaacatacaagctcgagaagcagctcctgcagcagacaaatgaaatcctgaaaatccatgaaaagaattctcttctggagcacaagattctagaaatggaaggcaagcacaaagaggagcttgatacactgaaggaggagaaggagaacctgcagggtttggttacacgacagacatatatcatacaggaactcgagaaacagctgaaccgggccaccacaaacaattcagtgttacagaaacagcagctagagctgatggacactgtacacaacctcgtgaacttatgcacaaaagaaggagtcctgctgaagggaggcaaaagagaagaagaaaagccctttagggactgtgccgatgtttaccaggccggattcaataagagcggaatttacaccatatatatcaacaacatgcccgaaccgaagaaggtgttctgcaacatggacgtcaacggcggaggttggactgtcattcaacatcgagaagacggatcgctggactttcaaagaggttggaaagagtataagatgggtttcggcaaccctagtggggagtactggttgggcaatgaattcatttttgcgattacctctcagagacagtacatgctgcgaatcgagcttatggattgggaagggaatcgtgcttatagccagtacgatcgattccatataggcaacgaaaagcagaattaccgactgtacctcaagggacacaccgggaccgccgggaaacagtcatctctgattttgcacggcgctgacttttcaacgaaagacgcagataacgataactgcatgtgcaagtgtgccctgatgctgacaggaggctggtggttcgacgcctgcggcccctcaaatctaaacgggatgttctacacagccggccagaaccatggtaagcttaatggaattaagtggcactacttcaaagggccaagttactctttgcggtcaactactatgatgatccgacccctggatttc

SEQ ID NO: 32041 - DNA, 1494 bp, synthetic construct
  misc_feature 1..1494: note = Description of Artificial Sequence: Synthetic coding sequence
  source 1..1494: mol_type = other DNA
atgactgtcttcctatcatttgccttcctcgctgccatactcacacacatagggtgctccaatcagcgcaggtctccagaaaattcgggacgccgctacaatcgaatccagcacgggcagtgcgcctacacatttatcctacctgaacatgatgggaactgtcgggaatcaacaacagatcagtataacacaaacgctctccagcgcgatgcgccccacgttgaacccgatttcagttctcaaaaactccagcaccttgagcatgtaatggaaaactatacacagtggctccagaagcttgaaaactatatagtcgaaaatatgaaatcggagatggcccagatccagcagaatgctgttcagaatcatactgctacgatgctcgaaataggaacgtcactgctctctcagacagctgaacagactcgcaaactaactgatgtcgagacacaagtgctcaaccagacaagtagactcgaaatccagctgctggaaaattcactctccacttataaactggaaaaacagctactgcagcaaactaacgaaattctgaaaatccacgaaaaaaattcactgttggaacataaaatactggaaatggaaggaaaacacaaggaagaattagatactcttaaagaagaaaaagagaacttacaaggactcgtgactagacaaacttacattatccaggaacttgaaaaacagcttaacagagctacaacaaataactcagtacttcagaaacagcagttggaattaatggatacagtgcacaaccttgttaatttatgtacaaaggaaggggtgctcctaaagggggggaaacgcgaggaagaaaaacctttcagagattgcgctgatgtgtaccaagccggatttaacaaatcaggaatctatactatatatatcaacaacatgccggaacccaagaaagtgttctgcaacatggacgtcaatgggggagggtggacagtgatacagcatcgggaggatggaagtctcgacttccagagggggtggaaagaatataagatgggattcggaaacccttctggagaatattggctcgggaacgaatttatttttgcaatcacatcccagcggcagtatatgctcaggatagaactcatggattgggaagggaaccgcgcatactcccagtatgataggtttcacatcggaaatgaaaagcagaattatagactctatttaaaaggacatacaggaacagccgggaaacagtcctccttaatcctccatggagccgatttttctacaaaagacgctgataatgacaattgcatgtgtaagtgcgctctaatgttaactggggggtggtggtttgatgcctgtggaccatccaatctgaatgggatgttctacactgctgggcagaatcatggaaaactcaatgggatcaagtggcattactttaaaggacctagttatagtttgaggtctacaacaatgatgattcggcctctcgatttt

SEQ ID NO: 32042 - DNA, 1494 bp, synthetic construct
  misc_feature 1..1494: note = Description of Artificial Sequence: Synthetic coding sequence
  source 1..1494: mol_type = other DNA
atgaccgtcttcctcagtttcgcttttctggcggctatcctgacacacattgggtgtagtaatcaacggcgctcccctgaaaatagcgggcggcgatataatcgcattcagcatggacagtgtgcttataccttcatcctgccagaacatgatggcaattgcagagagtcaactaccgaccagtataacactaacgcactgcagcgggatgcgcctcatgtggagccggatttttcaagtcaaaaattgcagcatctggagcacgtaatggagaattatacacagtggcttcagaaacttgaaaattacattgtagagaacatgaagagtgagatggctcagatccagcagaacgccgtccagaaccacactgccacaatgctggagatcggaacgtctctcctgtcgcagacagccgagcagacacgaaaactcacagatgtggaaactcaagtcctgaaccaaacaagcagactggagattcaattacttgagaatagtttatctacctacaaacttgagaagcaactgctgcagcagaccaatgaaatactgaagattcatgagaagaactcacttctggagcataaaattctggagatggaggggaaacacaaagaagaattggatacactgaaagaggaaaaggaaaacttgcaaggactagtgactcgacagacctacatcatccaagaactggagaagcagctcaatcgcgccaccacaaacaatagcgtgctgcaaaaacagcaactggagctaatggacaccgtgcacaatttggtaaacctgtgtactaaggaaggcgtcctgttgaagggcgggaagagggaagaagagaagcccttcagggattgtgccgacgtataccaggccggatttaacaaatctggaatttacaccatttacatcaacaacatgccggaaccgaaaaaggtcttctgtaatatggacgtgaacggaggcggttggacagtaattcagcacagagaggacggcagtttggacttccaacgcggatggaaggaatacaaaatggggtttgggaacccgtctggagagtattggctggggaatgagttcatctttgcaatcacgtcccagcggcagtacatgttgaggatcgaactgatggactgggagggcaaccgggcttattcgcagtatgacagattccacattgggaatgaaaagcagaactaccgcctgtacttgaaaggtcataccgggaccgccggaaagcagtctagtctgatattacacggagctgacttcagtaccaaggacgccgataatgataactgcatgtgcaagtgtgcactgatgctcaccgggggctggtggttcgacgcttgcggacccagcaatcttaacgggatgttctacacagccggccaaaaccacggaaagctgaacggcattaaatggcattattttaagggccctagctacagtctccgctctacaaccatgatgattcggccgctggatttt

SEQ ID NO: 32043 - DNA, 1494 bp, synthetic construct
  misc_feature 1..1494: note = Description of Artificial Sequence: Synthetic coding sequence
  source 1..1494: mol_type = other DNA
atgactgtgttcctgagtttcgcctttctggccgccattctgacccacatcgggtgcagcaaccagagaaggtcccctgaaaatagcggacgcagatataacaggattcaacatgggcagtgcgcctacacatttatcctccccgaacacgacggcaattgtcgggagtccaccaccgatcagtacaacacaaacgcactccaaagagatgccccacacgtggaacctgatttttccagccaaaagctccaacacttggaacacgtaatggaaaattatacccagtggcttcagaaacttgagaactacatcgtcgagaacatgaagagcgaaatggcccaaatccagcaaaatgctgtgcagaaccacactgctactatgctcgaaattggcacaagtcttctcagccagacagctgaacaaacaagaaagctgaccgacgtggagacccaggttctgaaccaaacaagccgcttagaaatccaactgctggagaatagcctctccacatacaaactggagaaacagttgctgcagcaaaccaacgaaatcctgaaaatccacgagaagaatagcctgctggaacacaagattctggagatggaggggaagcacaaagaagaactggacacacttaaagaagaaaaggagaaccttcagggcttggttactcggcagacctacatcatccaggagctggaaaaacaactcaatcgggccactaccaacaactccgtcctccaaaagcagcagttagagctgatggacaccgtccacaacctcgtaaatctgtgcactaaggagggcgtgctcttgaagggcgggaagagagaagaagaaaaaccatttcgtgattgcgcagatgtttatcaggctggttttaacaagtccggaatttacaccatttacatcaacaacatgcctgaaccaaaaaaagtcttctgcaacatggacgttaatggaggagggtggaccgtgattcaacatagagaagacgggagcctggactttcaacgaggatggaaggagtacaagatgggttttggaaaccctagcggtgaatactggctcggaaatgagtttatttttgccataaccagccagcgtcagtacatgttgagaattgaactgatggattgggagggaaacagggcctattctcaatacgatcgcttccatatcggaaacgagaagcaaaactatcggctctacttgaaaggccataccggcacggccggcaagcagagctctctcattttgcatggagcggacttctcaaccaaagatgccgacaacgataattgcatgtgtaaatgtgccctgatgctcaccggaggctggtggttcgatgcttgtggaccctccaacttgaacggcatgttttacacagcaggacaaaaccatggtaaacttaacggaatcaagtggcactactttaagggtccatcgtacagcttgagaagcaccacaatgatgatccgccccctggatttc

SEQ ID NO: 32044 - DNA, 1494 bp, synthetic construct
  misc_feature 1..1494: note = Description of Artificial Sequence: Synthetic coding sequence
  source 1..1494: mol_type = other DNA
atgaccgtctttcttagctttgcatttcttgccgcaatcctcacgcacattgggtgctccaatcagaggcgatcgcccgaaaattcaggtcggagatacaatcgcattcaacatggacagtgtgcctacacctttattctgccagaacatgacggtaactgtagggagtccaccaccgaccagtacaacacgaacgcacttcaaagggatgcacctcatgtggaacccgacttttcaagccaaaaactgcagcatctcgaacatgtgatggagaattacacccaatggctccaaaagctggaaaactacattgtggagaatatgaagtcggaaatggcacaaattcaacaaaatgcagtgcagaaccacactgctactatgttggagattggtactagcctgctctcccagactgcagaacagaccagaaagctcacggatgtcgagactcaggtgcttaaccagaccagccgactggagatccagcttcttgagaacagcctttctacctacaaacttgagaaacaacttttgcagcaaaccaacgagattctgaaaattcacgagaaaaacagcctgttggagcacaagatactggagatggaaggaaagcacaaggaggagcttgatactctgaaggaggagaaggaaaaccttcagggactggtcacccgacagacctacattattcaagaacttgagaagcagcttaatcgggcgactaccaataacagcgtgttgcaaaagcaacagcttgaactgatggacactgtgcataatctggtgaacctgtgtactaaggaaggtgtgctgcttaaagggggcaagcgcgaagaggagaagccttttcgggattgcgcagacgtgtatcaggcagggtttaacaagtcggggatttacactatctacatcaataacatgccagagccaaagaaagtgttttgtaacatggatgtgaatggaggtggatggaccgtgattcagcatagagaggacggctccctggattttcagcggggatggaaggaatacaagatgggattcggaaacccttccggggagtattggctcggcaatgaattcatatttgcgataacctcccagagacagtacatgcttcgtatcgaattgatggactgggagggcaaccgcgcatactcccaatacgatcggttccatataggaaacgaaaagcaaaactaccggctctaccttaaaggacacactggaactgcagggaaacaaagcagcttgatcttgcacggtgccgacttctccaccaaagatgccgataacgacaactgtatgtgtaagtgtgctcttatgcttaccggaggatggtggttcgatgcgtgtgggcctagcaacctcaacggcatgttctacaccgccggacagaatcatggtaaacttaacggaattaagtggcattactttaagggaccttcctactcgcttaggtcgactaccatgatgattcgtcctctggacttt

SEQ ID NO: 32045 - DNA, 1494 bp, synthetic construct
  misc_feature 1..1494: note = Description of Artificial Sequence: Synthetic coding sequence
  source 1..1494: mol_type = other DNA
atgactgtgtttctgtctttcgcttttctggcagcgatcctcacccatatcggatgctccaaccagcgcaggtcccccgagaattcgggacggcggtacaacagaatccaacacggccaatgcgcctacactttcatcctgcctgaacatgatggtaactgcagagagagcaccaccgaccagtacaatactaacgctctgcagagggacgcgccacacgtcgaacccgatttttccagccagaagctgcagcacttggagcacgtcatggagaattacacgcagtggctgcagaagctggaaaactatatcgtggagaatatgaaatcggaaatggcacagatccagcagaacgcggtgcagaaccacactgctaccatgctggaaatcggcacctccttgctgtcacaaaccgccgagcaaaccagaaaacttactgacgtggaaactcaagtgctgaaccagacttcccgactcgagatccaactgctcgagaattcactgagcacttacaagctcgagaaacagcttctccagcaaactaacgaaatactgaagatccacgaaaagaactctctcctggagcacaagatccttgaaatggaagggaaacacaaggaagagctggacacgctgaaggaagaaaaagagaatctgcaaggattggtgactcgtcaaacttacatcatccaggagctcgaaaagcaactgaaccgcgctactaccaacaactctgtgctgcaaaaacagcagttggaattgatggacaccgtccataacctggtgaacctgtgcaccaaggaaggtgtgctgctgaagggcgggaagagggaagaagaaaaaccgttcagggactgtgccgatgtctaccaagcaggcttcaataagtcaggaatctacaccatttacattaacaacatgccggaacccaaaaaggtgttctgtaacatggacgtcaacggaggcgggtggacggtgatccaacaccgcgaggacgggtcactggacttccagcgagggtggaaggaatacaagatgggtttcggaaatccatcgggagaatactggctgggcaatgagttcatctttgcaatcacgtcccaacgccagtacatgttgaggatcgaactgatggattgggagggaaatcgcgcctactcccaatacgaccggttccatattggcaacgagaagcagaattatcgcctttatctgaaaggacacaccggaaccgctggaaagcagagcagcctgattcttcacggagcggatttcagcaccaaggacgccgataacgataactgtatgtgcaaatgcgcgctgatgctcactggaggatggtggttcgacgcgtgcgggccatcgaatcttaatggcatgttttacaccgccgggcagaaccacggaaaactgaacggaatcaaatggcattacttcaagggaccttcatactcgctgcgctcgactaccatgatgatccggcctcttgatttc

SEQ ID NO: 32046 - DNA, 1494 bp, synthetic construct
  misc_feature 1..1494: note = Description of Artificial Sequence: Synthetic coding sequence
  source 1..1494: mol_type = other DNA
atgaccgtttttctctcctttgccttcctggcagcaattctcacccatatcgggtgctcgaaccagagacgttcgcctgaaaattcggggagacgttacaatcgcattcaacacggtcaatgcgcctacacgttcattctgcccgaacatgacggcaattgtcgggaatccactaccgatcagtacaacaccaacgccctccaacgcgatgctccccatgtagaaccggatttcagctcacaaaagctccaacatctggagcatgtgatggagaactacactcagtggctgcaaaagttggagaattacattgtggagaatatgaagtcagagatggcgcaaatccaacaaaacgccgtgcaaaatcacaccgcaaccatgctcgaaattggcacctcgcttctttcccagacggcggaacagactcgtaaactgaccgatgtggagactcaggtccttaaccagaccagccgcctggaaattcagcttctcgaaaactccctgagcacctacaaacttgagaagcaattgctgcaacagactaacgaaatcctgaagattcatgaaaagaattcactgcttgaacacaagattctggagatggagggtaagcataaagaagaactcgacacccttaaagaagaaaaggaaaaccttcaaggtcttgtgacccgccaaacttacatcatccaggaacttgaaaagcagctcaaccgtgccaccaccaataactctgtccttcagaagcaacagcttgaacttatggacacggtgcacaacctcgtgaacctttgtaccaaggaaggagtccttctcaagggaggaaagagggaagaagagaagccttttcgagattgtgcagatgtgtaccaggcaggattcaataagtcgggaatttacaccatttacatcaacaacatgccagaacctaagaaggtgttctgcaatatggatgttaacggtggtggatggaccgtgattcaacatagagaggatgggtcactggatttccaacgaggatggaaggaatacaaaatgggctttggaaacccatccggtgaatactggttgggtaacgaattcattttcgcgattacttcgcaacgccaatacatgctgagaatcgaacttatggattgggaaggaaaccgagcttactcgcagtacgacagattccacataggcaacgagaaacagaactacagactttacctcaagggacataccggaactgcaggaaagcaatcctcccttattctccatggggcagattttagcacgaaggatgcggacaatgataactgtatgtgtaagtgtgcacttatgctcaccggaggatggtggtttgacgcctgtggtccctccaaccttaatggtatgttttacactgcaggacagaaccatgggaaactcaacggcataaagtggcattactttaaaggcccgagctactcacttagatcgaccactatgatgatcagacccctggacttc

SEQ ID NO: 32047 - DNA, 1494 bp, synthetic construct
  misc_feature 1..1494: note = Description of Artificial Sequence: Synthetic coding sequence
  source 1..1494: mol_type = other DNA
atgacggtttttttatcgtttgcgtttttagcggcgatactaacgcatataggttgttcgaatcaacgtcgttcgccggaaaattcgggtcgtcgatataatcgtatacaacatggtcaatgtgcgtatacgtttatattaccggaacatgatggtaattgtcgtgaatcgacgacggatcaatataatacgaatgcgttacaacgagatgcgccgcatgttgaaccggatttttcgtcgcaaaaattacaacatttagaacatgtaatggaaaattatacgcaatggttacaaaaactagaaaattatatagtagaaaatatgaaatcggaaatggcgcaaatacaacaaaatgcggtacaaaatcatacggcgacgatgctagaaataggtacgtcgctactatcgcaaacggcggaacaaacgcgtaaattaacggatgtagaaacgcaagtactaaatcaaacgtcgcgtttagaaatacaactattagaaaattcgttatcgacgtataaactagaaaaacaattactacaacaaacgaatgaaatattaaaaatacatgaaaaaaattcgttattagaacataaaatattagaaatggaaggtaaacataaagaagaactagatacgttaaaagaagaaaaagaaaatttacaaggtctagtaacgcgtcaaacgtatataatacaagaactagaaaaacaactaaatcgtgcgacgacgaataattcggttctacaaaaacaacaactagaattaatggatacggtacataatctagttaatttatgtacgaaagaaggtgttttactaaaaggtggtaaacgagaagaagaaaaaccgtttcgagattgtgcggatgtatatcaagcgggttttaataaatcgggtatatatacgatatatataaataatatgccggaaccgaaaaaagtattttgtaatatggatgtaaatggtggtggttggacggttatacaacatcgagaagatggttcgttagattttcaacgaggttggaaagaatataaaatgggttttggtaatccgtcgggtgaatattggctaggtaatgaatttatatttgcgataacgtcgcaacgtcaatatatgttacgaatagaactaatggattgggaaggtaatcgtgcgtattcgcaatatgatcgatttcatataggtaatgaaaaacaaaattatcgtttatatttaaaaggtcatacgggtacggcgggtaaacaatcgtcgctaatactacatggtgcggatttttcgacgaaagatgcggataatgataattgtatgtgtaaatgtgcgttaatgctaacgggtggttggtggtttgatgcgtgtggtccgtcgaatttaaatggtatgttttatacggcgggtcaaaatcatggtaaactaaatggtataaaatggcattattttaaaggtccgtcgtattcgttacgttcgacgacgatgatgatacgtccgctagatttt

SEQ ID NO: 32048 - DNA, 1494 bp, synthetic construct
  misc_feature 1..1494: note = Description of Artificial Sequence: Synthetic coding sequence
  source 1..1494: mol_type = other DNA
atgacggtgttccttagctttgcgttcctcgctgccatattgacccacattggttgcagcaatcagcgccgatctcctgagaactcgggtcggcgttacaaccgcatacaacatggccaatgtgcatacacctttatactgcccgagcatgatggcaactgtagagagtcgactaccgaccagtataacactaatgcacttcaaagagatgccccccacgtggaacctgatttttcaagccaaaaactccagcatcttgaacatgtgatggagaactacactcaatggctgcagaagctggaaaactacattgtggaaaacatgaagtccgagatggcacaaatacagcagaacgccgttcaaaaccacactgcaactatgcttgagatcggaacctcgcttctttcacaaaccgcagagcaaactaggaagctgactgatgtggagactcaagtgcttaatcagacctcccgcctggaaatccaacttcttgaaaactcgctttccacctataagctcgaaaagcagctgctgcaacaaaccaatgagatcctgaagattcatgagaagaactcacttctggaacacaagattctggagatggaaggcaaacataaagaggagctcgacactctcaaagaggagaaggaaaacctccagggactcgtaactcggcaaacctacattattcaggaattggagaagcaactcaaccgggcaaccacgaacaacagcgtcctgcaaaagcaacagctggagctgatggatactgtccacaatctggtcaacctgtgtactaaggagggtgtgcttcttaaagggggtaagagagaagaggaaaaaccctttagagattgtgccgatgtgtaccaggcgggtttcaacaagtccggaatttacactatttacatcaacaatatgcccgaaccaaagaaagtgttttgtaatatggatgtgaacgggggtggttggaccgtcattcaacatcgcgaggatggttcgctggactttcaacgaggatggaaggagtacaagatggggttcgggaatccttctggcgagtactggctgggcaatgagttcatcttcgctatcacctcccagagacagtacatgcttcgtattgaactgatggattgggaaggaaacagagcatactcacaatacgacaggtttcatataggcaacgaaaagcagaactaccgcctctacctcaaagggcacactggtactgctggtaaacagtcatcgttgattcttcacggagccgactttagcactaaggatgcagataacgacaactgtatgtgtaaatgcgcactgatgcttactggaggatggtggtttgatgcctgtggtccatccaacctcaatggtatgttctataccgctggacaaaaccacggcaagttgaacggcataaagtggcactactttaagggaccatcatactcgcttaggagcaccaccatgatgattcgtccactggatttc

SEQ ID NO: 32049 - DNA, 1494 bp, synthetic construct
  misc_feature 1..1494: note = Description of Artificial Sequence: Synthetic coding sequence
  source 1..1494: mol_type = other DNA
atgaccgtgtttctttccttcgcctttcttgcagcaatcctcactcacatcggatgttccaatcagcggcgctcgcccgagaactcaggacggagatacaatagaatccaacatggtcagtgtgcttataccttcattcttcctgagcatgatgggaactgcagagagtctaccacggatcagtacaatacgaatgcacttcaacgggatgcacctcacgtcgaaccagacttcagctctcagaaactccaacatctggagcatgtgatggaaaactatacccagtggctccagaagctcgaaaactacatcgtcgaaaacatgaaatcggaaatggcacagatacagcaaaacgcggtccaaaaccacacggcgactatgctcgaaatcggaaccagcctgctgtcacagactgctgaacaaaccagaaagttgaccgatgtggaaacccaagtgcttaaccaaacgtcacgtcttgaaattcagctcctcgaaaactccctgtcgacctacaaactcgaaaagcaactcttgcaacaaactaatgagatccttaagatacatgaaaagaactctcttctcgagcacaagattctggagatggaaggaaaacacaaagaagaactggacacccttaaggaagaaaaggaaaacctccaaggacttgtgactagacaaacctacataatccaggagcttgagaagcaactcaaccgcgccaccacgaataactctgtcctccaaaagcagcagctggagctcatggataccgtgcacaaccttgtgaatctgtgtactaaggaaggtgttctgctgaagggtggaaagagagaagaagagaagccatttcgggattgtgctgacgtgtaccaagcggggttcaacaaatcgggaatttacactatctacattaacaatatgcccgagcctaagaaggtgttttgcaacatggatgtgaacgggggtggatggaccgtcatccagcaccgagaggatggctcccttgattttcagagaggttggaaggaatacaagatggggtttggaaacccttccggcgaatactggctgggcaacgaattcatttttgcaattacctcccagcgccagtacatgctccgaattgaacttatggattgggaaggaaatcgggcatactcgcaatacgaccgctttcatatcggtaacgagaagcaaaactaccgcctttacttgaagggtcatactggaaccgccggcaaacaaagtagtctgatccttcatggagcggatttttccaccaaggacgcagacaacgacaattgtatgtgtaagtgcgcactgatgctgactggaggatggtggttcgatgcctgtgggccatcaaacctgaatggaatgttttacactgccggacagaaccacggaaaacttaatgggattaagtggcattacttcaaaggaccttcgtacagccttcggtcgactaccatgatgataagacctcttgatttc

SEQ ID NO: 32050 - DNA, 1494 bp, synthetic construct
  misc_feature 1..1494: note = Description of Artificial Sequence: Synthetic coding sequence
  source 1..1494: mol_type = other DNA
atgaccgtgttcctctcattcgccttcttggccgccatccttactcacatcgggtgtagcaatcaacgccgcagtcctgagaattcgggtcgccgctacaatcggatccaacatggtcagtgtgcctacaccttcattctgccagagcacgacggcaattgcagagagtccactaccgaccaatacaatacgaatgctctccagcgtgacgccccgcacgtggagccggatttcagttcgcaaaaactccagcaccttgaacacgtaatggagaattacacccaatggcttcagaagttggagaactatatcgttgagaacatgaagtccgaaatggcacaaatccagcagaacgccgtgcagaaccacactgccaccatgttggaaattggaacgtcccttctctctcaaaccgccgaacaaacccggaaacttactgatgtggagactcaggtgctcaaccaaaccagccggctcgagatccaactccttgaaaactcgctttcaacctataagctcgagaagcagctgctgcagcaaactaatgagatcctcaaaattcacgagaagaatagcctgctcgagcataagattctggaaatggaggggaagcacaaggaggaactggatactttgaaggaagagaaagaaaatctccaggggctggtgaccagacagacctacatcatccaggagctcgaaaagcagttgaaccgggcaaccacgaacaactcggtgctgcagaagcagcagcttgaactcatggacactgttcataatcttgtgaacctctgcaccaaggagggagtcttgctgaagggtggaaagcgcgaagaagagaagcccttcagagattgtgcagacgtgtaccaggcggggtttaacaagtcagggatctacaccatttacatcaataacatgccagaaccaaagaaagtgttttgcaacatggacgtcaacggaggaggttggactgtgatccagcaccgagaagatggaagcctggacttccagcgcggctggaaagaatacaagatgggattcggaaacccctccggagaatactggctgggaaacgagtttatcttcgccatcacgtcccagcggcaatacatgcttcgcatcgaactgatggactgggaaggaaaccgcgcgtactcgcagtacgacagatttcatatcgggaacgaaaagcagaactacagactttacctgaaaggacataccggaactgcgggaaaacagtcaagcctcatactgcacggagcggacttctcgactaaagatgcggataacgataactgtatgtgcaaatgcgcccttatgctgactggtgggtggtggttcgacgcatgtggcccttcgaatctgaacggcatgttctataccgctggacagaatcacggcaaactcaacggcatcaagtggcattacttcaaaggcccgtcctactcgctgaggtccacgaccatgatgatcaggccgctggacttt

SEQ ID NO: 32051 - DNA, 1494 bp, synthetic construct
  misc_feature 1..1494: note = Description of Artificial Sequence: Synthetic coding sequence
  source 1..1494: mol_type = other DNA
atgaccgttttcctatcgttcgcctttctcgctgctatcttgactcacataggttgctcaaaccagagacgatcacccgagaacagcgggcgaaggtacaataggatccagcacgggcaatgcgcttacacatttatactccctgagcatgatgggaactgccgagaatccaccacagatcaatacaacactaatgcccttcaacgggatgccccacacgttgagcccgatttttcctcccagaagctgcagcacctggagcacgttatggaaaattacactcagtggttgcaaaagctcgagaactacattgtagaaaacatgaaaagcgagatggctcaaatacagcagaacgccgtccagaatcacaccgccaccatgctcgaaattggaacatcactgctctcacagaccgcagaacagacaaggaaactcactgatgtggagactcaggttttgaatcagacttctaggctcgagatacagcttctggaaaattcccttagtacttataagttggagaaacagttgctgcagcagaccaatgagatcctgaagatacacgagaaaaatagtctgctcgaacataaaattcttgagatggagggcaaacacaaggaagagttagatacgctcaaagaggaaaaggaaaatctgcaaggcctcgtgacaagacaaacatacattattcaggagctggaaaaacaactgaatcgagcaacgacaaacaattctgtcctccaaaagcagcagctggagctcatggacaccgtacacaacttagtcaatctttgcactaaggaaggcgttctgctcaaaggtggcaaacgcgaggaggagaaacccttccgagattgtgcggacgtctaccaagctggttttaataagtcagggatttacacaatttacatcaacaatatgcccgaaccaaaaaaagtgttttgcaatatggacgtgaatgggggcggatggacagttatccagcatcgcgaagatggcagtctggatttccagcgaggatggaaggaatacaagatgggttttgggaatccctctggtgagtattggttgggcaatgaattcattttcgcaataacttcacaaaggcaatatatgctgaggatcgagttgatggactgggaagggaaccgcgcctatagccagtacgaccggtttcacatcggcaatgagaaacagaattacagactatacctcaagggccatacagggacagcaggtaagcagagttctcttattctgcatggtgcggatttctctactaaggatgccgacaatgacaattgcatgtgcaaatgtgccttgatgcttactggagggtggtggttcgacgcctgcgggccgtcaaacctcaatggaatgttctacacggccggccagaaccacggcaaactgaatgggatcaagtggcactactttaaaggtcctagctatagccttaggagtaccacgatgatgatccgtcccctggacttc

SEQ ID NO: 32052 - DNA, 1494 bp, synthetic construct
  misc_feature 1..1494: note = Description of Artificial Sequence: Synthetic coding sequence
  source 1..1494: mol_type = other DNA
atgaccgtattcctttctttcgccttcctggcagctattcttacacatatcggctgcagcaatcaacggcggtctccagagaacagcgggcgccgatacaatcgcattcagcacggacaatgcgcctatacatttattttgccagaacacgacggcaattgtcgggagtcaactacagatcagtataacacgaacgcactgcagcgagatgcaccgcacgtcgagcctgacttttcatctcaaaaactgcaacacctcgagcatgtgatggaaaactatacgcagtggcttcagaagctagagaattacatcgtcgagaacatgaagagcgaaatggcccaaatccagcaaaacgctgtgcagaaccatacggcaacgatgcttgagataggaacatcgctcctgtcacagaccgctgagcaaacacgtaagctgactgatgtagagacacaggtccttaatcagacttcgaggctcgagatacaactgttggaaaattccctgtcaacctataagctggagaaacagttattgcagcaaaccaatgagatattgaagatacatgagaagaattcactgcttgagcataaaatccttgagatggaagggaaacataaagaagaacttgatactctcaaagaggaaaaagaaaatctgcaaggcttggttacccgacaaacgtatatcatccaggaactagagaagcagctcaatcgggcaaccacgaataattctgtactccaaaagcaacaactcgagttaatggatacagttcacaacctagtaaatctatgcacaaaagagggggtgttattgaagggtggcaagcgcgaggaagaaaagccgtttagagactgtgctgacgtctatcaggctggattcaacaagtctggaatttacaccatttacatcaacaatatgcccgagcctaagaaggtgttctgtaatatggatgtgaatggcgggggctggacagtgatccagcatcgcgaggatggctcactggattttcagcgaggatggaaggagtataaaatggggtttggaaacccaagtggtgaatactggctaggtaatgaatttatctttgcaatcacctcacagcgccagtacatgttgagaatcgagctgatggattgggagggcaaccgcgcttatagtcaatacgatcgattccatatcggtaatgaaaaacaaaattaccggctttacttaaaaggccacactgggaccgctggcaagcagtcgtcattgatccttcacggggcagattttagtacaaaagacgccgataatgataactgcatgtgtaagtgtgcgctcatgctcacggggggatggtggtttgacgcttgcggccccagcaatttgaacggcatgttttacacggcaggacaaaaccacggcaagctgaatggaatcaagtggcattatttcaagggtcccagttattcgttgcggtccactacgatgatgatccgtcccctggatttt

SEQ ID NO: 32053 - DNA, 1494 bp, synthetic construct
  misc_feature 1..1494: note = Description of Artificial Sequence: Synthetic coding sequence
  source 1..1494: mol_type = other DNA
atgactgtgtttctctcgttcgccttcctggccgccatcttgactcatatcggatgctccaaccaacgcagatcacccgagaactccggccggcggtacaaccggatccaacacggacagtgcgcgtacaccttcatcctgccagagcacgatggtaattgtcgcgaatcgactactgaccagtacaacacgaatgccttgcagcgggatgcgcctcatgtcgaaccggacttctcgtcacagaagctccagcacctggaacacgtgatggagaactacactcagtggctgcaaaagctcgagaactacattgtggagaacatgaagtcggaaatggcgcagatccaacagaatgcggtgcagaaccacaccgccaccatgctggaaatcggcacgagcctgctctcacaaactgcggaacaaactcggaagctgaccgacgtcgagactcaggtgctgaaccagactagtcgcctggaaatccagcttctggaaaattcgctctccacttacaagctggaaaagcaacttctgcagcagaccaacgagattctgaaaatccacgaaaagaacagcctgttggagcacaagattctggaaatggaaggaaaacataaagaggaactcgacactctgaaagaggaaaaggagaatctgcaaggcctggtgacccgccagacgtacatcatccaggaactggagaagcagcttaaccgggctaccaccaacaattccgttctccagaaacagcagctggagctgatggatactgtgcataacctggtgaacctttgtactaaggaaggggtcctgctgaagggcgggaagagagaagaggaaaagccgttccgcgattgcgccgacgtgtaccaagccggatttaacaagtcaggaatctacacgatttacatcaataacatgccagaaccgaagaaggtgttctgtaatatggatgtgaatggtggaggctggaccgtgatccagcatagggaagatggaagccttgacttccagcggggctggaaggaatacaaaatgggattcggaaatccgagcggggagtactggctcggcaacgagttcattttcgccatcacttcacaacggcagtatatgctgcggatcgaactgatggattgggagggcaacagagcttactcgcagtacgacagattccatattggcaacgagaagcaaaactaccgcctgtacctgaagggtcacactggaaccgccggaaagcagtcctcactgatcctccacggagcggactttagcactaaggacgcggataatgacaactgcatgtgcaaatgcgcattgatgctcaccggaggatggtggtttgacgcatgtgggccaagcaacctgaatggcatgttctacaccgcgggacaaaatcacggaaagctcaatggaatcaaatggcactactttaaaggaccctcatactcgctccggtccaccactatgatgatccgcccactcgatttc

SEQ ID NO: 32054 - DNA, 1494 bp, synthetic construct
  misc_feature 1..1494: note = Description of Artificial Sequence: Synthetic coding sequence
  source 1..1494: mol_type = other DNA
atgactgtgtttctctcattcgccttccttgcggccattctcacccacattggctgtagcaaccagcgccggtcgccagaaaactcgggccgccgctacaaccgcattcagcacggacaatgtgcctacacctttattctcccagagcacgacggtaattgccgcgagagcacgaccgaccagtacaacaccaatgcactgcaacgcgacgcaccccatgtcgagcctgacttctcgtcccagaagctgcaacacctcgaacacgtcatggaaaactacacccagtggctgcaaaagctggagaattacatcgtggagaatatgaagtctgaaatggcgcaaatccagcagaatgccgtgcagaatcacaccgctactatgttggagatcgggaccagtctgctgtcccagacggcggagcagaccaggaaattgaccgatgtggagactcaggtgcttaaccagacctcgcgcctggagatccaactgctggaaaattccctctcaacctacaagctcgaaaaacaactgctccagcagaccaacgagatcctgaagatccacgagaagaattcgctcctggagcataagatactcgaaatggaggggaagcacaaagaggagctcgataccctcaaggaggagaaagaaaacctgcaaggccttgtgacccgccaaacttacatcatccaggaactggaaaagcagctgaacagagccaccactaacaactctgtgttgcagaaacaacaactggagctgatggacactgtgcataatcttgtgaatctgtgcacgaaagagggagtgctgctcaagggtggtaagcgggaggaggaaaaaccattccgggattgcgcagacgtgtatcaggccggattcaacaaatcgggaatctacactatctacattaacaacatgcctgaaccaaagaaggtcttttgcaacatggacgtgaacggagggggatggaccgtgatccaacatcgcgaggacggaagcctggacttccagaggggatggaaggagtataagatgggcttcggaaatccgtcaggagaatactggctcggaaacgaattcatctttgccatcacttcgcagcgccagtacatgcttaggatcgaactgatggactgggagggcaatcgggcgtattcccagtatgatagattccacatcgggaacgaaaagcaaaactaccggctgtacctcaaaggacacactggaactgcaggaaaacaatcgtctctgatccttcacggcgcggacttttccaccaaggatgccgataatgacaactgcatgtgtaagtgcgctctcatgctcactgggggatggtggtttgatgcgtgcggccccagcaacttgaatggtatgttctacacggcaggacagaatcacggcaaacttaatggaatcaagtggcattacttcaagggtccttcttactccctcaggtcgaccaccatgatgattcggccgctcgacttc

SEQ ID NO: 32055 - DNA, 1494 bp, synthetic construct
  misc_feature 1..1494: note = Description of Artificial Sequence: Synthetic coding sequence
  source 1..1494: mol_type = other DNA
atgactgttttcctcagtttcgcctttcttgcagctatccttacccacatagggtgtagcaaccagcgtcggtcccctgaaaattccggacgccggtataaccggatccagcacggtcagtgcgcttacacttttatcctcccagaacatgatggcaattgccgcgagtcaaccacagaccaatataacacaaacgctctgcagagggacgctccacacgtagagccagactttagttcgcagaagctgcagcatcttgagcacgtgatggaaaactacacccagtggcttcaaaaattggagaactacatagtggagaacatgaaatctgagatggcccagatacagcagaatgcggtgcagaaccataccgccactatgctcgagatcggtactagtctgttgagtcagaccgccgaacaaactcgtaaactgactgatgtggaaacccaggtgttaaatcagacctcgagacttgagatccagctcctggaaaacagtctctctacctacaaactggagaagcagctgctccagcagacaaacgaaattttgaaaattcacgaaaaaaattctttgctggagcacaagattttagaaatggaaggtaaacacaaagaggagctcgacacactgaaagaagaaaaggagaacctgcagggactggtgaccaggcaaacatacatcatccaggaactggagaaacagctgaatagggcaaccacaaacaattctgtcctacagaagcaacaattagagcttatggacaccgttcataacttagtcaacctgtgcacaaaagaaggagtgttgctcaagggtgggaagcgtgaggaagaaaagccattcagagactgcgcagacgtctaccaggccgggtttaacaaaagcggaatttatactatatacatcaataatatgccagaacccaaaaaggtcttctgcaatatggacgtgaacggagggggctggacggtcattcaacatcgcgaagatggttccctggacttccagcggggctggaaagaatacaagatgggatttggaaacccgtctggcgagtattggttggggaatgaatttattttcgcaattactagccaacgccagtacatgctaagaatcgagcttatggactgggagggtaatcgcgcctactcccagtatgatcgcttccatatcggtaacgagaagcagaactaccggctgtatctcaaggggcacacaggaaccgcagggaagcagtccagtctgatccttcacggagccgatttttccactaaggacgccgacaacgacaattgtatgtgcaagtgcgccctaatgctgactgggggatggtggttcgatgcatgtggcccttccaacctcaatggtatgttttatacggccggccaaaaccatggtaaactcaatggcattaagtggcactattttaaggggccctcatactctctgcggtcaacaactatgatgatcagaccactggatttt

SEQ ID NO: 32056 - DNA, 1494 bp, synthetic construct
  misc_feature 1..1494: note = Description of Artificial Sequence: Synthetic coding sequence
  source 1..1494: mol_type = other DNA
atgacagtcttcctcagcttcgcttttctggccgcaatcttgacccacatcggatgctccaatcagcgcaggtctcccgagaattctggacgccgttacaaccgcatacagcacggtcagtgcgcctacaccttcattctgcccgagcatgatggcaactgtagggaaagtaccaccgaccaatataacacaaacgctctccagagagatgctccccatgtggagccagatttctcatcccagaaacttcagcacctggaacatgttatggagaactatactcagtggctgcagaagctggagaactacatcgtagaaaacatgaaaagtgagatggcccagatccagcagaacgccgtgcagaaccatactgccaccatgctcgaaatcggcacaagccttttgagccagaccgctgagcagactaggaaacttactgatgtcgaaacccaagttttgaatcagacctcacgccttgagattcagctccttgagaacagtttgtcaacctacaagttggagaagcaactgcttcaacagactaatgagatcctcaagattcacgagaagaacagcctgcttgagcataagatactggagatggagggtaagcataaagaggagttggacactttgaaggaggagaaggagaacctccaaggcctcgtgacacgccagacctacatcatccaggagctcgagaagcaactgaatcgtgcaactaccaacaatagcgtcttgcagaaacagcagctggaattgatggacaccgtgcacaacctggttaacctgtgtaccaaggaaggagttcttctgaaaggcggtaagcgcgaggaggagaagcccttcagagattgcgctgacgtgtatcaggcaggttttaacaagtccggaatttacaccatctacattaataatatgcccgagccaaagaaggtcttctgtaatatggacgtgaatggaggtggatggaccgttattcaacacagggaggacggttccttggactttcagaggggctggaaggaatataagatgggattcggcaatccaagtggtgaatattggctcggtaacgaatttatttttgctattacctcccagcgccagtacatgctgcgcatcgagcttatggactgggagggtaacagggcctactctcagtacgacaggtttcacatcggtaacgaaaagcagaactataggctgtacctcaaaggtcacacaggaactgcaggtaagcaaagctcactgatcctgcatggagccgacttctcaaccaaggacgcagataatgataactgcatgtgtaagtgtgccctcatgttgacaggcggatggtggttcgacgcttgcggaccctctaacctcaacggaatgttttacaccgctggacagaaccatggtaagctcaatggtatcaaatggcattacttcaagggtccttcttactcccttcgttccaccacaatgatgatccgccccctggatttt

SEQ ID NO: 32057 - DNA, 1494 bp, synthetic construct
  misc_feature 1..1494: note = Description of Artificial Sequence: Synthetic coding sequence
  source 1..1494: mol_type = other DNA
atgactgttttcctgtcattcgccttcctggctgcaattctaacacacatagggtgttctaaccaacgacgtagcccggagaattcaggccggcgctataacaggatacaacacggacagtgtgcttatacgtttattctcccggaacacgatggaaactgccgggaatccacgacagaccagtataataccaacgcactgcagagagacgcaccacacgtcgaaccggatttctcatctcagaagctgcagcacctagagcatgtgatggagaattacacacaatggctacagaaactggaaaattacattgtggagaacatgaagtccgagatggcacagatccagcagaatgcggtccagaatcataccgccaccatgctggaaataggaactagtcttcttagccagactgctgagcagaccagaaaactgacagacgtcgaaacccaggttctgaatcagacctcccggctggagatccagctccttgagaactcactgagcacctacaagttggaaaagcagctgctccagcagacaaatgaaatcctgaaaattcacgagaagaactccttgcttgagcataagatcttggagatggaggggaaacataaagaggaactcgacacccttaaggaggagaaggagaatctccaaggcctagtgacacggcaaacatacattattcaggaactggagaagcagctcaacagggccaccactaacaacagcgtgctgcagaaacagcagctggaactcatggatacagtacacaacttggtcaatttgtgtactaaggaaggagtgctcctcaagggcggcaagcgggaagaggaaaagccgttccgagattgcgcagatgtctaccaggctggattcaacaaaagtggcatttatactatatatattaacaatatgcccgagccaaagaaggtcttctgtaacatggatgtgaacgggggtggatggacggtaatccagcaccgggaggatggcagcctggatttccagcgtggatggaaggaatacaaaatgggatttggcaatccctctggcgaatactggctggggaacgaatttatatttgctatcaccagtcagcgccagtatatgttgcgcattgagttgatggactgggaaggcaaccgtgcatattcccagtacgatcgatttcatataggcaacgagaagcagaactatcggctgtaccttaaaggccacactgggacagcgggaaaacaatcttcactcatattacacggagccgatttttcgaccaaggatgccgacaatgacaactgcatgtgtaagtgtgcacttatgctgacaggtggctggtggttcgacgcctgcggcccttcaaatctgaatggtatgttctatacagccggacagaatcatggcaagttgaacggaattaagtggcactatttcaaaggaccctcctatagtcttcggtcaacgactatgatgatcagacccctggatttt

SEQ ID NO: 32058 - DNA, 1494 bp, synthetic construct
  misc_feature 1..1494: note = Description of Artificial Sequence: Synthetic coding sequence
  source 1..1494: mol_type = other DNA
atgactgtgttcctttcctttgcatttctggctgcaattctgactcatattggttgttcaaatcaaaggcggtcgcctgagaactcaggtcggcgctacaatagaattcagcacgggcagtgtgcatatacgttcatactgccggaacacgatgggaactgtcgggaatcgactaccgatcagtacaataccaacgccctgcaaagagatgcccctcatgtggaaccagacttttcgtcgcaaaagctgcaacatttggaacatgtgatggaaaactacacgcagtggttgcaaaagttggagaattacattgttgagaatatgaaatcagaaatggcacaaattcagcagaatgcagtgcaaaaccataccgcaaccatgcttgaaatcggtactagtcttttgtcacaaaccgcagagcagactcgcaagctgaccgatgtcgaaactcaagtactgaaccagacttccagattggagattcaacttctggaaaactcgctcagcacctataaactggagaagcagttgcttcaacagaccaacgaaatactgaagattcatgaaaagaactcgcttttggagcataagatacttgagatggaaggaaagcacaaggaggagctcgacaccctcaaggaggaaaaagaaaaccttcaaggtcttgtcacccgccagacctacataatccaagaactggaaaagcagcttaacagggccaccactaataacagcgtgttgcaaaaacaacaacttgaacttatggacactgtgcacaacctggtgaacctgtgcactaaagaaggtgtgctgctgaaaggtggaaagcgcgaagaagaaaaacccttcagggactgcgctgacgtgtaccaggccggttttaacaaaagcggtatttacactatctacatcaataacatgcccgaaccaaagaaggtcttttgcaatatggacgtcaacggcggaggatggaccgtgattcagcatcgcgaagatggatccctggactttcaaagagggtggaaggaatacaagatgggctttggtaacccatcgggagaatactggctgggaaacgaattcatttttgccatcacttcccagcgtcagtacatgctccgtattgaactgatggattgggaaggaaacagagcttactcgcaatatgacagatttcatatcggaaacgagaaacagaactacagactttacctgaaaggacataccggaaccgccggcaaacagagtagcctcattctgcatggagcagacttctcgactaaagacgcagataacgataattgtatgtgcaaatgtgcgctgatgctcaccggtgggtggtggttcgatgcttgtggcccttcaaatctgaacggaatgttctatactgcagggcagaatcacggcaagttgaacggaatcaagtggcactactttaaggggccctcctactctcttcggtccacgaccatgatgatacggcccctcgatttt

SEQ ID NO: 32059 - DNA, 1494 bp, synthetic construct
  misc_feature 1..1494: note = Description of Artificial Sequence: Synthetic coding sequence
  source 1..1494: mol_type = other DNA
atgacggtattcctgtcatttgctttcctggccgccattctgacccacatcggctgctctaatcagcggagaagtcccgagaatagtggtcggcgctacaaccgtatccagcatggtcagtgtgcctataccttcatcctccctgagcacgatgggaattgcagagagagtactaccgaccaatacaatacaaacgctctgcagcgagatgcccctcacgtcgagccagacttctctagtcagaaattacaacacctggaacatgtgatggagaattatacccagtggttgcagaagttggagaattacattgtggagaatatgaaaagtgaaatggcacagatccagcagaatgctgttcagaatcacacagccacaatgcttgagatcggcaccagtctccttagccaaactgcggagcaaactcggaagcttactgacgtggaaactcaggtgcttaaccaaaccagccgtctggagattcaacttttggagaatagtctcagcacatacaagctggagaagcagctcttgcaacagactaacgagatcttaaagatccacgagaagaattctttgctcgagcacaagatcctggagatggaggggaaacacaaagaggagttggacacactgaaagaagagaaggagaacctgcaagggctagtgacccgtcagacatatatcatacaggagctggaaaagcagctcaacagagctacaaccaacaattcagtcctccagaaacagcagttggagctgatggatacagtgcacaacttggtgaacctgtgtaccaaagaaggggttttgcttaagggagggaagcgcgaggaagaaaagccattccgagattgtgcagatgtgtaccaagccggcttcaacaagtctggcatctatacaatttacataaacaacatgccagaaccaaagaaagtcttttgcaatatggatgtcaatggaggaggatggaccgtgatccagcaccgcgaggatggcagcctagacttccaacgcggctggaaagagtataagatggggttcgggaatccgtcaggcgagtactggttaggaaacgagtttatatttgccatcaccagccaacgccagtacatgctacgcatcgaactcatggattgggagggaaacagggcctattctcagtacgatcgcttccacatcggtaacgagaagcagaattatcggctctatcttaagggtcacactggtacagctggcaaacagtccagtctcatactacatggagccgacttcagtacaaaggatgcagacaatgataattgcatgtgtaaatgcgctctgatgcttaccggtggctggtggttcgatgcatgcgggcccagcaatctgaacgggatgttttacactgcaggccagaaccatggtaaactgaacgggataaagtggcactacttcaaaggtccatcctatagcctcagatccaccacaatgatgatcaggccattagacttc

SEQ ID NO: 32060 - DNA, 1494 bp, synthetic construct
  misc_feature 1..1494: note = Description of Artificial Sequence: Synthetic coding sequence
  source 1..1494: mol_type = other DNA
atgactgtgttcctgagtttcgctttcctggccgcgatcctcactcacatcggctgttccaaccagcgacgctcgccggaaaacagcgggcgccgctacaacagaatccagcatggacaatgcgcctacaccttcatcctgccagaacacgacggtaactgtcgcgagtcaaccactgaccaatacaataccaatgccctccagcgcgatgcgccacacgtcgagccggacttctcgagccaaaagttgcagcatctcgagcatgtcatggagaactacacccagtggctgcagaagctggaaaactacatcgtggaaaacatgaaatcagaaatggcccaaattcagcagaacgcagtgcaaaaccacactgccactatgctggagatcggaactagcttgctctcacaaactgccgagcagacccggaagctcaccgatgtggagactcaggtgctgaaccagacctctcgcctcgagatccaactgctcgaaaacagcctgtcgacttataagctcgagaaacaactcctgcagcagaccaacgaaattctgaagatccacgaaaagaattccctcctggagcataagattctggagatggaaggaaagcataaagaggaacttgataccctgaaggaagagaaagagaacctgcagggactggtcactagacagacttacatcatccaggagctggagaagcagctgaacagagctaccacgaacaattcagtgctccagaaacagcagttggagttgatggacaccgtgcacaacctggtgaacctctgcacgaaggaaggagtgttgctgaaaggaggaaaaagagaagaagaaaaacctttccgcgactgtgcggatgtttatcaagccggtttcaataagtcgggaatttacactatctacatcaacaacatgccggaaccaaagaaggtcttttgcaatatggacgtcaacggaggtggatggaccgtcatccagcaccgcgaggacggctccctggattttcagcgcggttggaaggagtacaaaatgggatttggaaacccatctggggagtactggctgggcaatgagttcatcttcgccatcactagccagaggcagtacatgttgcggatcgaactgatggactgggagggaaaccgcgcctactcgcagtacgaccgcttccatatcgggaacgaaaagcagaactaccggttgtacctgaagggacatacgggtactgccggaaagcaatcctcgctgatcctccacggagcggacttttcaaccaaggatgctgacaatgataactgcatgtgtaaatgtgctctcatgctgacggggggttggtggtttgatgcatgtggcccatccaacctcaacggaatgttctacaccgcaggacaaaaccacggaaagctcaacggaatcaagtggcactactttaaaggaccgtcgtactcgctccgctccactaccatgatgatcagacctctggacttc

SEQ ID NO: 32061 - DNA, 1494 bp, synthetic construct
  misc_feature 1..1494: note = Description of Artificial Sequence: Synthetic coding sequence
  source 1..1494: mol_type = other DNA
atgactgtcttcctgagttttgctttcctggccgcaatccttacccatatcggatgcagcaaccaacggcgcagccctgaaaacagtgggagaaggtacaaccggattcaacacggacagtgcgcatatactttcattttacccgaacatgatggcaactgccgtgaatcaaccacggatcagtataacacaaacgccctccagagggacgcccctcacgtagagccagatttttctagccagaaactccagcaccttgaacacgttatggagaactacacccagtggctgcagaagctggaaaactacatcgtcgagaatatgaagagcgaaatggcacagatccagcaaaatgctgttcaaaaccataccgcaaccatgctggagatcgggacctctttacttagccaaacggctgaacagacgcgcaagctgacagatgtcgaaacccaggtgctaaaccagacctctaggctggaaattcagcttcttgagaacagtctctcaacgtataagttagagaagcaactgctccaacaaacaaacgaaatattaaaaatacacgaaaagaacagtcttttggaacataagatactggaaatggagggtaagcacaaagaagaactggacactctgaaagaagaaaaagagaacttacagggacttgtgaccagacaaacctatatcatccaggagctcgaaaagcagctgaatagggcgacaactaacaactccgtcctccaaaaacagcaacttgaactgatggataccgtgcacaacctagtgaatctctgcaccaaggaaggcgtcctgttaaagggcggaaagagagaggaggaaaaaccctttagggattgcgctgatgtgtatcaggccggattcaacaaaagtggcatctataccatctacataaacaacatgcctgagcccaagaaggtcttttgcaacatggatgtcaacgggggcggttggactgttatccagcatagagaggatggcagcctggattttcagaggggttggaaggaatataagatgggatttgggaaccctagcggagagtactggctgggaaatgagttcatattcgcaattactagtcagcggcaatatatgttgaggatcgaattgatggactgggagggtaaccgcgcctattcccagtacgataggttccatatcggaaacgaaaagcagaactacagactctatctgaagggtcacactggcaccgcgggtaaacaaagttcccttatccttcacggagctgacttcagcactaaagacgcagacaacgataactgtatgtgcaagtgtgctctcatgctgacaggaggatggtggtttgatgcctgcgggccctctaacctcaacggcatgttctacaccgctgggcagaaccacggcaaactgaacggaatcaaatggcactactttaaggggccaagctactcccttaggagtacaactatgatgatcaggcccttagatttt

SEQ ID NO: 32062 - DNA, 1494 bp, synthetic construct
  misc_feature 1..1494: note = Description of Artificial Sequence: Synthetic coding sequence
  source 1..1494: mol_type = other DNA
atgaccgttttcttatccttcgcattcttagcagcgatcctgacgcacattggttgcagtaatcagcggcggtcaccggaaaactcaggcagaagatataatagaattcagcatgggcagtgcgcgtacacttttattctcccggagcacgacggtaactgtagggaatccaccactgaccagtacaacacgaatgcattacagcgagacgccccacatgtggagccggatttttcctcgcaaaagctccagcatctcgaacatgtcatggagaattatactcaatggttacagaaactggaaaattacatagtggaaaacatgaagagcgaaatggctcagattcagcaaaacgctgtacagaatcacacagcaaccatgctggaaatcgggacgtccttactcagtcaaacggcggagcagacaagaaaactaacagatgtggagacccaggtactcaatcagacttccagactggaaattcaactgttagagaactcactctcaacatacaagctggagaagcagctacttcagcagacgaatgagattctgaaaatccacgaaaagaactcattacttgagcacaaaatacttgagatggaaggcaagcacaaggaggaactcgacacgttgaaggaggagaaagagaatcttcaggggttagttactcggcagacttacatcatccaggaactggaaaagcagcttaatcgggctacaaccaataattccgtgttacagaagcagcagctggaactcatggatactgtgcacaacttggtgaatctatgtacaaaagaaggcgtgctgcttaagggcgggaagcgtgaggaggaaaaaccttttcgggattgtgccgacgtgtatcaggctgggttcaacaaatcgggaatatacactatatacattaacaacatgcctgaaccgaagaaagtcttttgcaacatggacgtcaatggcggcgggtggactgtcattcagcatcgcgaggacgggagcctggattttcagagggggtggaaagagtataagatggggttcgggaatccgagcggggagtactggctcggaaacgagtttattttcgcaatcacctctcagagacaatatatgctgcggatagagttgatggattgggaggggaatagagcatacagccagtacgaccggtttcacattggaaatgagaaacagaactataggctctacttgaaaggacatacagggacagccggaaaacagagttcgttgattctgcatggggccgatttcagtaccaaggacgctgataatgataattgtatgtgcaagtgcgcactgatgctgaccggcgggtggtggtttgacgcgtgcggtcctagtaacctgaatggaatgttctatacagctggccagaaccacggtaagctcaacggcattaaatggcattacttcaagggaccaagctactctctgcggagcacaacaatgatgatcagacctcttgatttc

SEQ ID NO: 32063 - DNA, 1494 bp, synthetic construct
  misc_feature 1..1494: note = Description of Artificial Sequence: Synthetic coding sequence
  source 1..1494: mol_type = other DNA
atgaccgtgttcctgagttttgcattcctcgccgcgatactgacgcatattggatgctccaaccagcgccgcagccccgagaactctggtcgccgatacaatcggatccagcacgggcagtgcgcctatacatttattctgcctgagcacgatggcaattgccgagagtccacaactgaccagtataacacaaatgcccttcagcgtgacgccccgcacgttgagcctgacttttcctctcagaaacttcaacacctcgagcatgtaatggagaactacacccagtggctccaaaaacttgagaactatatcgtcgagaatatgaagagcgagatggcccaaatccaacagaatgccgtgcagaatcataccgcgactatgctggagatcgggacgtccctgctctcccagaccgcagagcaaaccagaaagctcacggatgtggagacccaagtgctaaaccagaccagcaggttagagatccagcttctcgagaattctctgtcaacctataagctcgaaaagcagctgttgcaacagacgaacgaaatcttaaaaattcacgaaaaaaattctctgctcgaacataagatactagagatggaaggaaagcataaagaagaactcgacacactgaaagaggagaaagaaaaccttcaggggttggtgacacgtcagacttatattattcaggagctcgagaagcagctgaatagggctaccacaaacaattctgttctgcagaagcagcagttagagttgatggacacggtccataatttggtaaatctgtgcacaaaggagggagtattgcttaagggtggcaagagggaggaggagaaaccgtttcgggactgtgcggacgtgtaccaggccggcttcaacaaatcaggaatctatacaatctacatcaataatatgcctgaacctaagaaagtcttctgtaacatggatgttaacggcggggggtggactgtgattcagcatagagaggacgggtccctggatttccagaggggctggaaagagtataagatggggtttggcaatccaagcggagaatattggttgggcaatgaatttatatttgcaataacttcccagcggcaatatatgttgcgtatcgagctcatggattgggaggggaaccgtgcatactctcagtacgatagattccatatcgggaacgagaagcaaaattaccgcctctacctgaaaggtcatactggtaccgctgggaaacagagcagcctgattttgcatggtgcagacttcagtaccaaagatgcggataacgataactgtatgtgcaaatgcgcactgatgctcactggaggatggtggttcgacgcttgtggcccctctaaccttaacggaatgttttacacagccggccagaaccatggaaagttaaatggcatcaagtggcattacttcaaaggcccctcatactctctgagaagtaccaccatgatgatcaggcccttggatttt

SEQ ID NO: 32064 - DNA, 1494 bp, synthetic construct
  misc_feature 1..1494: note = Description of Artificial Sequence: Synthetic coding sequence
  source 1..1494: mol_type = other DNA
atgacagtgtttttgtctttcgctttcctcgctgccatacttacccatatcggttgttctaatcagcgccggtctccggagaactctggtaggaggtataataggatccagcacggccagtgcgcctacaccttcatccttcctgagcatgacggtaactgtcgcgaatcaacgaccgaccagtacaatacaaacgcactccagcgcgacgcacctcatgttgagcctgacttcagttcacaaaaactacagcatctggaacatgtgatggaaaattatactcagtggctccagaagttagagaactatattgtggaaaatatgaagtccgagatggctcagatccaacagaatgctgtgcagaaccatacagccacaatgctcgagattggcaccagtctgctgagccagacagctgaacagacccggaagctcaccgatgttgagacacaggtactaaaccaaacctctaggctcgaaattcagctgttggagaacagtttgtcaacttataagctggagaagcagttgctgcaacaaaccaacgaaattctgaaaattcacgaaaaaaatagtctgctcgaacataagatcctggagatggagggcaaacacaaagaagagctcgacacattaaaggaagagaaggaaaacctccagggcctagtcaccaggcaaacctacatcatacaggagttagagaagcagctcaaccgcgccactaccaacaattcggtcctacagaagcagcagttggagctcatggatacggtgcataatctggtgaatctctgtactaaggaaggggttctattgaaaggggggaagagagaggaggaaaaacctttccgggattgtgctgacgtgtaccaggctggctttaataagtctggcatctatactatctatatcaacaatatgccggagccaaaaaaggttttttgcaatatggacgtgaatggaggcggttggaccgtgatccagcaccgagaagatggctccctagatttccagaggggctggaaggagtacaaaatggggtttggaaatccttctggggagtactggctgggaaatgagttcattttcgctattacatcgcagagacaatacatgttgcgtattgagctcatggattgggagggcaatagagcatattctcagtatgaccgctttcacattggaaatgaaaagcaaaattaccgcctttatcttaagggacacaccggtaccgcaggtaaacagtccagcctgatcttgcatggagctgactttagcactaaggatgcggacaacgataactgcatgtgcaagtgcgcccttatgcttactggcggctggtggtttgatgcatgcggcccctccaatttgaatgggatgttttacaccgccggacagaaccacgggaagctaaatggtattaaatggcactattttaaagggcccagctactctctgcgcagtacgaccatgatgatccgccccttggacttc

SEQ ID NO: 32065 - DNA, 1494 bp, synthetic construct
  misc_feature 1..1494: note = Description of Artificial Sequence: Synthetic coding sequence
  source 1..1494: mol_type = other DNA
atgacggtgttcctgtcctttgcatttctcgccgcgattcttacgcatattgggtgctccaaccagagacgctcaccagaaaacagcggtagacgatacaacagaattcaacatggtcagtgtgcatacactttcatccttccagagcatgatgggaattgccgggagtctactaccgatcagtacaacaccaacgcacttcagagggacgcgcctcatgtggagccagattttagctcacaaaaactccagcatcttgagcatgtgatggaaaactacacccaatggcttcaaaagctggagaattacattgtcgaaaacatgaagtcggagatggcgcaaatccaacagaacgccgtccagaaccataccgcaaccatgctggaaatcggaacctcacttctttcgcagaccgcagagcaaactcggaaacttactgatgtggagactcaagttctcaaccaaactagcagactggaaattcagctgctcgaaaatagcctctcgacctacaaacttgagaagcaactgctccaacaaactaacgagatacttaagattcacgaaaagaattcccttcttgaacacaaaatccttgaaatggagggtaaacataaggaagaactggacaccctcaaagaggaaaaggaaaacctccaagggctcgtgactagacagacgtacataattcaagaactggagaaacagcttaaccgtgcaaccactaataactcggtgctccaaaagcagcagctggagctgatggacacggtgcacaacctggtcaatctgtgtacgaaagagggtgtgttgctgaaagggggaaagcgggaagaagaaaagcctttcagagattgcgcagatgtgtaccaagcaggctttaacaagtcgggtatttacaccatttacattaacaacatgcccgagccgaagaaggtgttttgtaatatggacgtgaacggaggcggatggactgtgattcagcatagggaagatggttcccttgattttcagcgcggatggaaggaatacaagatggggtttggtaacccaagcggggaatactggctgggaaatgagttcatatttgcaatcacctcgcagaggcaatacatgctgagaattgaactcatggactgggagggaaaccgggcatactcacaatatgatcggttccatattggaaatgagaagcaaaactacagactgtaccttaagggccacaccggaaccgccggtaaacagtcctcccttatccttcacggcgccgatttttcgactaaggatgcagataacgacaactgtatgtgtaaatgtgccctgatgcttactgggggatggtggtttgatgcatgtggacccagcaacctcaacggcatgttctacactgcaggtcaaaaccacggaaagctgaacggaattaagtggcactactttaagggcccttcttactcgctccgaagcactaccatgatgattcggcctcttgatttt

SEQ ID NO: 32066 - DNA, 1494 bp, synthetic construct
  misc_feature 1..1494: note = Description of Artificial Sequence: Synthetic coding sequence
  source 1..1494: mol_type = other DNA
atgacagtctttctctcattcgcattcctggctgctattctgacccacatcggctgctccaatcagcggcggtcccctgagaactctggaaggcgctacaacaggatccagcatggtcaatgcgcttatacgttcattctacctgagcatgatgggaattgcagggagtctaccacagaccagtacaacacaaacgcactccagcgggacgccccacacgtagaacctgattttagtagccagaaactgcaacacctggaacacgtgatggaaaactacacccaatggttgcagaaactggagaactacattgtggagaatatgaaaagtgaaatggcgcagatccagcaaaacgctgttcagaaccacacagcaacaatgctcgagatcggcacaagccttttatcccaaacagctgagcagacccggaagctgactgacgtcgagacccaggtcctgaaccaaacctcccgccttgagatccaactcttggaaaactccctctcaacctataaactcgagaaacaactgctgcagcagaccaacgagatcctgaagattcatgaaaagaacagcctcttggagcacaagattctggaaatggaaggcaagcacaaggaggaactcgataccttgaaagaagaaaaggagaatcttcaggggctggtcactcggcagacttacatcatccaggaattggaaaaacagctcaatcgggcaactacgaacaattccgtgctccagaaacagcagcttgagctgatggacaccgtgcacaaccttgtgaatctctgcaccaaagagggcgttttgttgaaaggtggcaaaagagaagaagagaaaccttttcgagattgcgccgacgtttatcaggcaggcttcaataaaagcgggatttacacaatatacataaacaacatgcctgaacctaaaaaagtgttttgcaacatggacgttaacggcggagggtggactgtgatccagcaccgggaggacggcagtctggattttcagagaggttggaaggaatacaagatgggattcggcaatccctccggagaatattggcttggcaacgagtttatttttgccattaccagccagagacagtacatgctacggatcgaactgatggactgggagggtaatcgcgcgtacagtcagtacgacagattccatataggcaacgagaaacaaaattatagactgtaccttaagggacacactggcacggcggggaaacaaagctctcttatcttgcatggggccgacttctcgaccaaggatgccgacaacgacaattgcatgtgcaaatgcgccctcatgttaacgggtggctggtggttcgatgcttgcggtccctccaacctgaacgggatgttttatactgccggtcagaaccacggaaaactcaatggcattaagtggcactatttcaagggaccgagttacagccttcgctccactaccatgatgatccgtccgctggacttt

SEQ ID NO: 32067 - DNA, 1494 bp, synthetic construct
  misc_feature 1..1494: note = Description of Artificial Sequence: Synthetic coding sequence
  source 1..1494: mol_type = other DNA
atgactgtatttctcagctttgcctttctggcagcgatcctgactcacatcggatgctcaaaccaacgacgcagtcccgagaatagcggccggagatacaaccggatccagcatggacaatgtgcgtacacttttatcctcccagagcacgacgggaactgtcgtgaatcaaccactgaccagtacaataccaacgccctgcaacgggatgcacctcatgtcgagccggattttagctcgcagaaactccaacacctcgaacacgtgatggagaactatacccaatggctccagaagctcgaaaactacattgtggagaacatgaagtccgaaatggcccaaatccagcagaatgcagtgcaaaatcatacggcaaccatgctggagataggcacctcgctcctgtcccaaactgcagaacagaccagaaaactcaccgatgtggaaactcaggtccttaaccagaccagtaggctggaaattcaactgctggaaaatagtctgtccacctataagttggaaaaacaattgctgcaacagactaacgaaatcttgaaaatccatgaaaagaactcccttctcgaacataagatacttgagatggaaggtaaacacaaagaagagttggacaccttgaaggaggagaaggagaaccttcaaggtcttgtgactcgccaaacgtacattattcaggagctggaaaagcaactgaaccgcgcaactaccaacaactccgtccttcagaaacaacaactggagctgatggataccgtgcataatctcgtgaatctttgcaccaaggaaggagtgctccttaagggtggcaagagagaagaagaaaagcccttcagagattgtgccgacgtttaccaggctggattcaataagtcgggaatctacaccatttacattaacaatatgcctgaacctaaaaaggttttttgtaatatggatgtcaacggaggcggttggaccgtgattcaacatcgggaagatggatcgttggactttcagagagggtggaaggaatacaagatgggctttggtaacccaagcggcgagtactggctcggcaacgaattcattttcgccattactagccaacgccagtacatgctgcgaattgaactgatggattgggaaggtaaccgcgcttatagccaatacgataggttccatatcgggaatgaaaaacagaattacaggctttacctcaagggacacacggggaccgccggaaaacaaagctcgcttatactgcatggagcagacttctcgactaaagacgcagacaatgataactgcatgtgtaagtgcgcactcatgcttaccggcggctggtggtttgacgcatgtggacctagcaaccttaacggaatgttttacaccgcgggtcagaatcatgggaagctgaacggtattaagtggcattacttcaaggggccatcctattcgctccgaagcactactatgatgatcagaccactggatttt

SEQ ID NO: 32068 - DNA, 1494 bp, synthetic construct
  misc_feature 1..1494: note = Description of Artificial Sequence: Synthetic coding sequence
  source 1..1494: mol_type = other DNA
atgactgtttttctgtcgttcgcctttttggccgccatactaacgcacattggctgctccaatcagcgacgttcgccggagaattcaggcagaagatataatcgtatccaacatggccaatgtgcttacacctttatcctgcctgaacacgacgggaattgtagagagtcaacaacagaccaatataatactaacgcgcttcagcgagatgcccctcatgtcgaaccggatttttcctcacagaaattacagcaccttgagcatgtaatggagaactatacgcagtggctgcagaagcttgaaaattacatcgttgaaaatatgaaatccgaaatggcccaaattcaacaaaatgcggtgcaaaaccatacggcgacgatgcttgaaatcggcacgtctctgctgtcacagacagctgaacagacccgtaaactgacagacgtggaaacgcaagtgttaaaccagacctccagactcgaaatacaactgcttgaaaactcactttccacctataaattagagaagcaattactgcaacaaacaaacgaaattctgaaaattcatgaaaaaaactcattgctggagcacaaaattcttgaaatggaaggtaaacataaagaagaactagatacattaaaagaggagaaagaaaatcttcagggtctagtcacacgtcaaacatatattatccaagaacttgaaaaacagcttaaccgggccactacaaacaactcggttttgcaaaaacagcagttggaattaatggataccgtccataatctggtaaacctttgtacgaaagaaggggtcttactgaaaggcggcaagcgcgaagaggagaaaccgtttcgtgattgcgcggacgtctatcaagcaggctttaacaaaagcggtatatatactatttatatcaataatatgccggaaccgaagaaagtgttttgcaacatggacgtgaatggaggcggctggactgtaatccaacatcgggaggatggctcattggattttcaacgtggttggaaagaatataaaatgggctttggaaacccgagtggagaatactggttggggaacgaattcattttcgctattacgtcacagcgtcagtatatgttacggattgaattgatggactgggaaggcaacagagcgtatagccaatacgatcgttttcacataggtaatgagaaacagaactatcgtctttacctaaaaggacatacgggtactgcaggtaagcagtccagtcttatattgcatggagcggatttttctactaaagatgccgataatgataactgcatgtgcaaatgtgcccttatgcttactggcgggtggtggtttgatgcttgcggcccgtcaaacctcaatggcatgttttatacagctggacaaaatcatgggaaattgaatggaataaagtggcattatttcaagggaccgtcgtattcattgagaagtacaacaatgatgattcgtcctcttgatttc

SEQ ID NO: 32069 - DNA, 1494 bp, synthetic construct
  misc_feature 1..1494: note = Description of Artificial Sequence: Synthetic coding sequence
  source 1..1494: mol_type = other DNA
atgaccgtgtttctgtcattcgcgttcctcgccgccattcttactcacatcggatgttccaaccagcggcgctccccagaaaactctggccggcgatacaaccgcatccaacacgggcaatgtgcctacacctttatcctgccggagcatgacggtaactgcagagaatccaccactgaccaatacaacaccaatgccctgcagcgcgacgcgccgcatgtggagcctgacttctcatcacagaagttgcagcatttggagcacgtcatggaaaactacacgcaatggctgcagaagctcgagaactacattgtggaaaacatgaagtcagagatggctcaaatccagcagaacgcggtgcagaaccataccgcgactatgctcgagataggaacctcgctgctctcacagactgccgagcagactaggaaactcaccgacgtggagactcaagtgctcaaccagacttcaaggctcgagatccagttgctggaaaactcgctgtcgacctacaagctggagaagcagttgctgcaacagaccaacgaaattctgaaaatccacgaaaagaattcgctgctggaacacaaaatcctggaaatggaaggaaagcataaggaagagttggatactctgaaggaggagaaggagaacctgcagggactggtgacccggcaaacctatatcatccaagagctcgaaaagcaactcaatagagcaactaccaacaattcggtcctgcagaagcagcagctggaattgatggacactgtccacaatctggtcaacctctgcaccaaagagggagtcctgcttaagggaggtaagcgagaagaggaaaagccgttccgggactgcgctgatgtgtaccaggcgggattcaataagtcgggaatctatactatctacattaacaatatgccggagccgaagaaggtattctgcaatatggatgtgaacggaggaggatggactgtgatacaacacagagaggacggtagcttggacttccagcgcggatggaaggagtacaaaatgggcttcggcaatccgtcaggggaatactggctgggcaatgagttcatatttgccatcacgtcgcagcgccaatacatgctgagaatcgaactcatggattgggaggggaaccgggcatacagccagtacgaccgctttcacatcgggaatgagaagcagaattacagactctacctcaaaggacacacgggaaccgctgggaaacagtcgtctcttatcctccacggagcagatttctccacgaaggatgccgataatgataattgcatgtgtaagtgcgctctgatgctgactggcggatggtggtttgacgcctgcggccccagcaatctgaatggaatgttctacaccgcagggcaaaaccatggaaaattgaacggcatcaaatggcactatttcaagggaccaagctactcgttgcggtcaaccactatgatgatcagaccgctcgatttt

SEQ ID NO: 32070 - DNA, 1494 bp, synthetic construct
  misc_feature 1..1494: note = Description of Artificial Sequence: Synthetic coding sequence
  source 1..1494: mol_type = other DNA
atgactgtgttcctgtccttcgcctttctcgcagcgatactgacacacataggatgctccaatcagcggcgctcaccagaaaacagcggtagacggtataataggatacagcatggtcagtgtgcctacactttcatcttgcccgagcacgacggaaattgtcgcgagagtacaactgatcagtacaataccaacgccctgcagcgcgacgcaccccacgtggagcctgattttagctctcagaagctgcagcacctggaacatgtaatggagaattacacacagtggctgcagaaactcgagaactacatcgtggaaaacatgaaaagcgaaatggctcagatacagcaaaatgcagtccagaaccacacagctactatgctcgaaattggaaccagtctgctgtctcaaaccgccgaacagacccggaagctcacagacgtggagacccaagtgcttaatcagactagtcgcctggaaattcagctgctggagaacagtctgtccacatataagctcgagaagcagctcctgcagcaaacaaatgaaatcctcaaaattcacgagaagaactccctgcttgagcataaaatccttgagatggagggcaagcacaaggaggaattggacacccttaaagaggaaaaggagaacttgcagggcctggtcactagacagacatatatcatccaagagctggaaaagcagctgaacagggcaaccactaacaactcagtgctgcaaaaacaacagctggaacttatggacaccgtccataacctcgtgaatctgtgtaccaaggaaggggtcctgctcaagggcggcaagcgagaggaagaaaagccctttcgagattgcgcagatgtttatcaagctgggttcaacaaaagcgggatttacacgatttatattaataacatgcccgagcctaaaaaagtgttctgtaacatggacgtgaacgggggaggatggacggtgatccagcatcgagaggacgggagcttggattttcaaaggggatggaaagagtacaaaatggggtttggaaaccctagcggggaatactggctggggaacgagtttattttcgctattacctcacagcggcagtatatgttgagaatagaattgatggattgggagggaaatagagcttatagccagtacgataggtttcacatcggcaatgaaaagcagaattatagactctacctcaagggacacactggcactgccgggaagcagtctagcctcattctgcacggggctgatttctccactaaagacgcagacaacgacaactgcatgtgtaaatgcgccctgatgctgacaggcggatggtggttcgacgcgtgtggtccatcaaatctcaacggaatgttttacaccgccgggcaaaatcatggaaaactgaacggaatcaagtggcactacttcaagggtccgagctacagcctgagatccacgacgatgatgatcaggccactggacttt

SEQ ID NO: 32071 - DNA, 1494 bp, synthetic construct
  misc_feature 1..1494: note = Description of Artificial Sequence: Synthetic coding sequence
  source 1..1494: mol_type = other DNA
atgactgtttttttgagctttgcttttctggccgccatccttacccacataggttgttccaatcagcgtcggagccctgagaatagtggccgtcgttataaccggatccaacacggccagtgcgcgtatacctttatcctgcccgagcatgatggtaattgccgagagagtacgaccgatcagtataatacgaacgctctacagcgcgacgcacctcatgtggagcccgatttttcatcccaaaaactccagcatctggagcacgttatggaaaactatacgcagtggcttcagaagctagagaactacatcgttgagaacatgaaatcagagatggcccagattcagcaaaacgccgtgcagaaccacaccgcgactatgcttgaaataggaacatccctgctctcccagactgcggaacagactcgcaagttgacagatgttgaaactcaggtgcttaatcagactagcaggcttgaaatccagttgttggagaactcgttgtccacctacaaactcgagaagcagttactacaacagactaacgaaatactcaaaatccacgagaagaatagtctgttagagcataaaatcctagagatggagggaaaacataaagaggagcttgacacattgaaggaagaaaaagagaatcttcagggactcgttactagacagacgtatattattcaggagttagaaaagcagttgaatcgcgccactaccaataactctgttttgcagaagcagcaattggaactaatggatacagtgcacaatctcgtgaatttatgtacaaaagaaggagtgctacttaaaggaggtaaacgggaggaagaaaagccttttagagactgtgctgatgtatatcaggccggcttcaacaagtccggtatttatacaatttacatcaataacatgcctgagcccaagaaggttttctgcaatatggatgttaacggaggcggctggaccgtaatccaacaccgagaggatggcagtctggactttcagagaggatggaaggagtacaagatgggatttggcaatccatccggcgaatattggctgggcaatgagttcatttttgccattacgagccagcgacagtatatgcttaggatcgaacttatggattgggagggtaacagagcatactctcagtacgaccggttccacatcggcaatgagaagcagaactatcggctgtatcttaagggacacacaggcacagctggcaaacagtcctctcttatcctgcacggcgccgatttctctactaaagatgccgacaacgacaattgtatgtgtaaatgcgccttgatgctcacaggggggtggtggttcgacgcgtgtggacccagcaacctcaatggtatgttttacaccgcaggacaaaatcacggcaaactcaacggaatcaagtggcactatttcaaagggccatcttactccctgcgctccaccactatgatgatccgtcctctagatttt

SEQ ID NO: 32072 - DNA, 1494 bp, synthetic construct
  misc_feature 1..1494: note = Description of Artificial Sequence: Synthetic coding sequence
  source 1..1494: mol_type = other DNA
atgacggtgttcctgtcgttcgcattccttgccgcaattctcacccatatcgggtgctcaaaccagaggcggtcgcccgagaactcagggcgccgctacaaccgcatacagcacggacagtgtgcctacacgttcattcttccggagcacgacgggaactgtcgggagtctactacggaccagtacaacaccaacgcgttgcaacgggatgcgcctcacgtggagcccgatttctcgtcccaaaagctccaacatctcgagcacgttatggaaaactacactcagtggcttcaaaagctggagaactacatcgtcgaaaacatgaagtccgaaatggcccagattcaacaaaacgccgtccaaaaccataccgctaccatgctcgaaatcggcacctccctcttgagccagactgctgaacagacgcggaagctgaccgacgtcgagactcaggtgctgaatcaaacctccagactggaaatccaactgctggagaactccctgtccacttacaagctcgaaaaacagctcctccagcaaactaatgaaatcctgaaaattcatgagaagaattcgctccttgagcacaagatccttgagatggagggaaagcataaggaagaactggataccctgaaggaggaaaaagagaatcttcagggactcgtgactcgccaaacctacatcatccaagagcttgagaaacagttgaacagagccaccactaacaattcggtgctgcaaaagcaacagctcgaattgatggacactgtgcataatctcgtgaatctttgcaccaaggaaggagtccttctgaagggaggaaagagagaagaagaaaagccgtttcgcgattgcgccgacgtctaccaagcaggattcaataagagcggaatctatactatctatatcaataacatgccggaaccgaagaaagttttctgtaatatggatgtgaacggaggaggatggacggtcatccaacatcgcgaggacggatcacttgacttccaacgcggatggaaggagtataagatgggattcggcaatccttcaggcgaatattggctgggaaacgaattcatctttgccattacttcccagaggcagtatatgctcagaatcgaactgatggactgggaggggaaccgcgcctacagccaatacgatagatttcacatcggcaatgagaagcagaactaccgcctctacctgaagggtcatacgggaaccgcaggcaaacagagcagcctgatcctccacggtgcggactttagcactaaagacgccgacaatgataactgcatgtgcaaatgcgcactcatgctcaccggaggatggtggttcgacgcttgcggcccgagcaatttgaatggaatgttctacactgccggtcagaaccacggcaaactgaacggaatcaagtggcactacttcaagggcccatcctacagcttgagatctaccaccatgatgatcagacctctggacttc

SEQ ID NO: 32073 - DNA, 1494 bp, synthetic construct
  misc_feature 1..1494: note = Description of Artificial Sequence: Synthetic coding sequence
  source 1..1494: mol_type = other DNA
atgacggtgtttctgtcttttgccttcctggcagctattttgacccatataggctgctccaaccagcggcgcagcccggagaactcgggacgcaggtataaccgcatacagcacggccaatgtgcctataccttcatcctgccagagcatgacggaaattgtcgggaatcaactaccgatcagtataacaccaatgctctgcagcgcgatgcacctcacgtggagcctgacttttctagccagaagctgcagcatttggaacatgtgatggagaactacactcagtggctgcagaaacttgagaactacattgtggaaaacatgaagagcgagatggcacagatccagcagaacgcggttcagaatcacacggccaccatgctggagattggcacatctctgctgtcccagacggctgaacaaacacgtaaacttacagacgtcgagactcaagtattaaaccagactagccgactggaaatccagctgctcgaaaacagcctcagcacttacaaactagaaaaacagctcctccagcagaccaatgaaattctgaaaattcatgaaaagaattctcttctggagcataaaatcctggagatggaggggaaacacaaagaggaattggataccctgaaagaagagaaggagaatctgcagggcctggtgacacgccagacctatatcattcaggaactggagaagcagttgaaccgcgccaccactaataactctgtccttcagaaacagcagctggaactgatggataccgtacataacttggtgaacctgtgcactaaagaaggggtgctcctcaaaggaggcaagcgggaggaggaaaagccttttcgggactgcgcggatgtttaccaagccggcttcaataagtccggaatttacaccatctatattaataatatgcccgaacctaaaaaagtgttttgcaatatggacgttaatgggggaggatggaccgtgatccaacaccgagaagatggtagtctggacttccagaggggctggaaagagtataagatggggttcgggaacccctcgggggagtattggttaggcaatgagttcatcttcgcgattaccagtcagaggcagtacatgctgcgcatcgagttgatggactgggagggcaacagagcctattcacagtatgacagatttcatatcgggaatgagaaacaaaactaccgactgtacctgaaaggtcacaccggcacagctggcaagcagagctccctgattttacacggagctgacttctcgaccaaagacgccgacaatgataattgcatgtgcaaatgtgctctgatgctcactggaggctggtggttcgacgcctgtggtccatccaacctcaatggcatgttctacactgcagggcaaaaccatgggaagttaaatggaattaagtggcactatttcaagggtccatcatatagtctgcggagcaccactatgatgatcaggccgctggatttt

SEQ ID NO: 32074 - DNA, 1494 bp, synthetic construct
  misc_feature 1..1494: note = Description of Artificial Sequence: Synthetic coding sequence
  source 1..1494: mol_type = other DNA
atgactgttttcctttcattcgcctttcttgcagctattttaacccatataggatgttcgaatcaaagaaggagtcctgaaaattcaggacgtagatataatagaattcaacatggtcaatgtgcatatacttttattcttccagaacatgatggaaattgtagagaaagtacaactgaccaatataataccaatgctttacaaagagacgctccacatgttgaaccagatttttcatctcaaaaacttcaacatttagaacatgttatggaaaattatacccaatggcttcaaaagttagagaactatatagttgaaaatatgaaatcagaaatggcacagattcaacaaaatgctgttcaaaatcatacagcaacaatgttggaaataggaacttctctactctcacaaacagcagaacaaacaaggaaacttaccgacgttgaaacacaagttttaaaccaaactagtcgtttagaaattcaattattagaaaattccttaagtacttataaacttgaaaaacaattattacaacagacaaatgaaatattaaaaatacatgaaaaaaattcattattagaacataaaattcttgaaatggaaggaaaacataaagaagaattagacactttaaaagaagaaaaagaaaatttacaaggtttagttactcgacaaacatatatcattcaagagttagaaaaacaacttaatagagctacaacaaataattctgttttacaaaaacaacaattggaattaatggatacagttcataatttagttaacttatgtacaaaagaaggagttttgttaaaaggtggaaaaagagaggaagagaaaccatttagagattgtgcagacgtatatcaagcaggattcaataagtcaggaatatacactatttatatcaataatatgccagagccaaaaaaagttttttgtaatatggatgtaaacggaggtggatggacagtaattcaacatagagaagatggttctttagatttccaaagaggatggaaggaatataaaatgggattcggaaatccatcaggagaatattggttgggaaacgaatttatatttgcaattacaagtcaaagacaatatatgttaagaattgaacttatggactgggaaggaaatagagcatattcacaatatgatagatttcacattggaaatgaaaaacaaaattatcgactttatttaaaaggacatactggaactgcaggaaaacaatcttcacttattcttcatggtgctgactttagtacaaaagatgcagataatgataattgtatgtgtaagtgtgcattaatgcttacaggtggatggtggtttgatgcatgtggaccatcaaatttaaatggtatgttttacactgcaggacaaaatcatggaaaattaaatggaattaaatggcattattttaaaggtccaagttattctcttaggtctacaactatgatgattagacctttagatttt

SEQ ID NO: 32075 - DNA, 1494 bp, synthetic construct; identical to SEQ ID NO: 32051
  misc_feature 1..1494: note = Description of Artificial Sequence: Synthetic coding sequence
  source 1..1494: mol_type = other DNA

SEQ ID NO: 32076 - DNA, 1494 bp, synthetic construct
  misc_feature 1..1494: note = Description of Artificial Sequence: Synthetic coding sequence
  source 1..1494: mol_type = other DNA
atgaccgttttcctgtcattcgcatttctggctgctatcctcacccacatcggctgctcgaaccaaagaaggtcgccggagaactccggccgccgctacaaccggatccagcatggtcaatgcgcctacactttcatcctgccggaacacgatggaaactgccgtgaatcgaccaccgaccagtataacacgaacgctctgcagagggacgcaccgcacgtggagccggattttagcagtcagaagctccagcacctggaacatgtgatggaaaactatacccagtggctgcaaaaactcgaaaactacattgtagagaacatgaagtcggaaatggcacagatccaacagaatgctgtgcaaaatcacactgccaccatgttggaaatcggaacttccctgctgtcgcagaccgccgaacagactagaaaacttaccgacgtcgaaactcaggtcctgaatcaaacgtcacgtcttgaaatacaattgctggaaaattcactgtcgacctacaaattggaaaagcagctcctccaacagactaatgagattctcaagatccacgagaaaaactccctcctggagcacaagatccttgaaatggagggaaagcacaaggaggaactggacactctcaaggaagagaaggagaatctgcagggactggtcaccagacaaacctacatcatccaggaacttgagaagcagctcaaccgggcaactaccaataactcagtgctccaaaagcaacagcttgagctgatggataccgtccataacttggtgaacctgtgtaccaaagagggagtgctcctgaaggggggaaagagagaagaagaaaagccattcagagattgcgcagatgtgtaccaagccggcttcaacaaatcaggaatctacactatttacatcaataacatgccggaaccgaagaaagtgttttgtaacatggacgtcaacggcgggggctggaccgtgattcagcacagagaagatggttccctggatttccagcgcggatggaaggagtacaaaatgggcttcggaaaccctagcggagaatactggctgggtaacgagtttatcttcgcgatcacctcacaacgccagtacatgctgcgaattgaactgatggactgggaggggaaccgggcttactcgcagtacgaccggtttcacattggaaatgagaagcagaactaccgcctctatctgaagggacatactggaactgcaggcaaacaaagcagcctgatcctgcatggagcggatttctcaactaaggacgccgacaatgataactgcatgtgcaagtgtgctctgatgcttactggaggttggtggtttgacgcctgcggaccatcgaatctgaacggaatgttctacactgccggacaaaaccatggcaagttgaatggaatcaagtggcattactttaagggaccgtcgtacagcttgcgctccactactatgatgatccgccccttggatttc

SEQ ID NO: 32077 - DNA, 1494 bp, synthetic construct
  misc_feature 1..1494: note = Description of Artificial Sequence: Synthetic coding sequence
  source 1..1494: mol_type = other DNA
atgactgtgttcttgtcattcgcgtttctggcagccattctcacccatatcgggtgttcgaaccaaagaagatcgcccgaaaatagcggtaggcgctacaaccgcattcaacacggtcagtgcgcatacactttcatcctccctgaacatgatggcaactgcagagaatccactacggaccaatacaacactaacgcactgcaacgcgatgccccccacgtcgagccagatttttcaagccaaaaacttcagcaccttgaacatgtcatggagaactacactcaatggcttcaaaagctcgaaaactatattgtcgaaaacatgaagtctgaaatggcccagattcaacaaaatgccgtccaaaaccacactgccaccatgcttgaaataggaacttccctcctttcccaaacggcagaacagacccggaagctcaccgacgtggaaactcaagtgctcaatcaaacctcacggctggaaattcaactcttggagaactccctcagcacgtacaagctggagaagcaactcctccagcaaactaacgagatcctgaaaattcatgaaaagaactcactgctggagcataagattcttgagatggagggaaagcataaggaagagctcgatacccttaaagaggaaaaggaaaatctgcagggacttgtgacgagacaaacctacatcatacaagagcttgaaaagcagctcaaccgcgcaacgactaacaactcggtgcttcagaaacaacaattggagctcatggacactgtgcataatcttgtgaatctctgtaccaaagaaggcgttcttctcaagggcggcaaacgagaggaggaaaagccatttcgggactgcgctgatgtctatcaagcagggttcaacaaaagtggaatatacaccatctacatcaataacatgccagaacctaagaaggttttttgcaatatggatgtgaatggcggtggatggaccgtgatacagcatcgcgaggatggaagtcttgactttcagagaggttggaaggaatacaagatgggattcgggaacccttcaggtgaatactggctggggaacgagttcatttttgcaatcacctcacagcgacagtatatgctgcggatcgagctgatggattgggagggaaatcgggcatattctcaatacgacagatttcacattggtaatgaaaagcagaactatagactttaccttaagggtcatactggtactgctggcaaacagtcatccctcattctccatggggctgacttttccactaaagacgcagataacgataattgtatgtgtaaatgcgcgctgatgctgactggaggatggtggtttgacgcctgtggcccttccaacttgaatggaatgttctacactgcaggacaaaaccatggtaaactcaacggaattaagtggcattactttaaaggaccaagctactccctgcgttcgactactatgatgattcgccctctggatttc

SEQ ID NO: 32078 - DNA, 1494 bp, synthetic construct
  misc_feature 1..1494: note = Description of Artificial Sequence: Synthetic coding sequence
  source 1..1494: mol_type = other DNA
atgaccgtttttctgtcgttcgcgtttcttgcagcgatcctgactcatattggatgttcgaatcagaggagatcacctgagaattctggacgacgttataaccgtattcagcatggtcagtgcgcctacacttttatcctcccagaacatgatggaaactgcagggagagcaccaccgaccaatacaacaccaatgcactgcaacgggatgccccccacgtggaaccagacttttcgtcgcagaagctccaacacctggaacatgtgatggaaaactatactcaatggttgcagaaactggagaattacattgtcgaaaacatgaagtccgagatggcgcaaattcagcagaacgctgtgcagaatcatacggcaaccatgctcgaaattggaacctcactccttagccagaccgccgaacagactcggaaactcactgatgtcgaaacgcaggtcctcaaccaaaccagcagactggagattcaactgctcgagaactccctgagcacctacaagctggaaaagcagcttcttcaacaaaccaacgagattcttaagattcatgaaaagaactccctgctcgagcataagatactggaaatggaaggaaaacataaggaagaacttgacactttgaaggaggagaaggaaaatctgcaggggcttgtgactcgccaaacctacatcatccaagagctcgagaaacaactgaatcgcgctactactaacaactccgtgcttcagaagcagcagctggagcttatggacaccgtgcataacctcgtcaatctttgtaccaaagaaggagtgttgctgaagggaggtaagcgagaggaagaaaagcctttcagagattgtgcggatgtgtaccaagctggttttaacaagtcgggaatttacaccatatacataaacaacatgcctgaacccaaaaaggtgttttgcaatatggatgtcaatggcggcggatggaccgttatacagcatcgcgaggacggatcgcttgattttcagcgcggatggaaggaatacaagatgggtttcggaaaccctagtggagaatactggcttggaaacgagttcatttttgcaattacttcccaaagacaatacatgttgaggatcgaacttatggattgggagggtaatcgggcctactcacagtacgacagattccacataggaaatgaaaagcagaactacagactgtaccttaaaggccatacgggcactgcaggtaagcaatccagcctgatcctgcacggagcggatttctcgaccaaggatgcagataatgataactgtatgtgtaagtgcgccctgatgctgaccggtggttggtggttcgatgcatgtggtccaagcaacctgaacggtatgttctacaccgcaggacaaaaccatggaaagctcaacgggataaagtggcattactttaagggaccttcctactcacttagatcgactactatgatgattaggccattggatttt

SEQ ID NO: 32079 - DNA, 1494 bp, synthetic construct
  misc_feature 1..1494: note = Description of Artificial Sequence: Synthetic coding sequence
  source 1..1494: mol_type = other DNA
atgacagtgttcctaagcttcgcctttcttgcggccatactgacccatataggctgtagcaaccagcgtagatcccccgaaaactcaggacggaggtataatcgcatccagcacggtcagtgcgcctatacatttattctgccagagcacgacggcaattgccgtgaaagtaccacagatcagtataacaccaatgctctacagagggacgctcctcatgtcgagccagacttcagctcgcagaaactgcaacatttggaacacgtaatggaaaattatacacagtggctacaaaagcttgaaaactatatcgtagaaaatatgaaatccgagatggcacagatccagcaaaatgccgtgcagaaccacacagcaactatgctcgaaatcgggacttccttgctgtcccagaccgcagaacagacgcgtaaattgacagacgtagagactcaggtactgaaccagacctccaggctggaaatccagttgttggaaaattcgctcagcacctataagctcgaaaagcagctgttgcagcagactaatgaaatactgaaaattcacgagaaaaattccttgcttgagcataagattttggagatggagggtaaacataaggaagaattggatacgttgaaggaggaaaaagaaaacctccagggtctggtcacccgccaaacatacatcatacaagagctcgagaagcagctcaatcgtgctaccactaacaactctgttttacaaaagcagcagctcgaattaatggacacagttcacaacctggtgaacctatgtaccaaggaaggtgtcctactgaagggtggaaagagggaggaagagaagccgtttcgcgactgcgcggatgtctatcaggccgggttcaacaaaagcgggatttacacgatctacatcaataatatgcctgagccaaagaaggttttttgcaatatggatgtgaatggaggcggctggacagtgattcaacacagagaagatggaagtctggactttcaacgagggtggaaggaatataaaatgggtttcggcaacccttccggcgaatactggctcgggaatgaattcatttttgcaatcacctcccaacgtcagtacatgttgcgcattgaactgatggactgggagggaaacagagcctactcccagtatgaccgattccacatcggcaacgaaaaacagaattatcgcctatatctcaaaggacacactggcaccgccggaaagcagtcctctctcatccttcatggtgcagacttttcaaccaaggacgctgacaacgacaattgtatgtgcaagtgtgcactgatgctgacagggggctggtggttcgatgcttgtggaccttctaacctcaatggcatgttctacaccgccggtcagaatcacgggaagcttaatggtataaaatggcattatttcaagggacccagttactcccttaggagtacgacaatgatgatcaggcccctggatttt

SEQ ID NO: 32080 - DNA, 1494 bp, synthetic construct
  misc_feature 1..1494: note = Description of Artificial Sequence: Synthetic coding sequence
  source 1..1494: mol_type = other DNA
atgaccgtctttctcagctttgcctttctggcagcgatcctgacacacatcgggtgtagtaaccagcgtcgatcccccgaaaacagcggtcgacggtataatagaatccagcatggtcagtgcgcttacacttttatcctgcctgaacatgacggcaattgtagggagagcacgactgatcagtacaacaccaatgcactgcagagagacgcccctcatgtagaacccgattttagcagccagaagctacagcacctggaacacgtgatggaaaactatactcagtggctgcagaagctggaaaactatatcgtagagaacatgaaatcggaaatggcccagattcagcagaacgccgtgcagaaccacactgccactatgctcgagataggcacgtccctgctgtcccagacagccgagcaaacccgtaagctgacagatgtggaaacccaggtgcttaaccagacgtcccggctcgaaatacaacttcttgagaacagtctgtctacctacaagcttgaaaagcagcttctgcagcagaccaatgagattctaaagatccatgaaaagaattctctgctggagcacaagattttggagatggaggggaagcacaaggaggaattagataccctgaaggaggaaaaggaaaacttacaaggcttggtgacccggcaaacttatattattcaagagctggagaagcagctaaatagagcaaccaccaataatagtgttctgcaaaagcagcagctagagttaatggatactgtccataacttggttaacctgtgtactaaggagggggtgttgctgaaggggggtaaacgagaagaggagaagcctttccgggattgtgccgatgtgtaccaggcagggttcaacaagtccggcatttatactatttatatcaataacatgcccgaacctaaaaaggtgttttgtaatatggacgtgaatggcgggggctggacggtgattcagcatcgcgaagacggaagtcttgactttcaacgcgggtggaaggagtacaaaatggggtttggcaacccaagcggagagtattggctgggcaacgaatttatttttgccataacatctcagaggcagtacatgctcaggattgaactcatggactgggagggcaaccgtgcatactctcagtacgatcggtttcacataggcaacgagaagcagaattatcggctctacctgaaaggacacaccggcacggccggtaagcagagctcattgatattacatggtgctgatttcagcaccaaggacgccgataatgacaactgtatgtgcaagtgtgctctgatgctaacgggagggtggtggttcgacgcttgtggaccttccaacctcaacggcatgttctataccgctggacagaatcacggaaaactgaatgggatcaagtggcattactttaaagggccgagctattccctgaggagtactaccatgatgatccgcccgctggatttt

SEQ ID NO: 32081 - DNA, 1494 bp, synthetic construct
  misc_feature 1..1494: note = Description of Artificial Sequence: Synthetic coding sequence
  source 1..1494: mol_type = other DNA
atgaccgtgtttctttccttcgcattcctcgccgcaattcttacgcatattggctgctcgaatcaacgccgctcacctgagaatagcggccggagatacaatagaattcaacatgggcaatgcgcatacaccttcatattgcctgaacatgatggcaactgcagggaatccactacggatcagtacaacaccaacgccctccagcgcgacgcacctcatgtggagcccgatttcagctcgcaaaagctccagcatcttgaacatgttatggagaattacacccagtggcttcagaagctcgaaaactacattgtggagaatatgaagagcgaaatggcccaaatccagcaaaacgcagtgcaaaaccataccgccaccatgttggagattgggactagcctcctttcacaaactgctgaacaaactcgcaaactcaccgatgttgagacgcaggtgttgaatcaaacttcacgactggaaatccagctgttggagaactcgctttcgacgtacaaactcgaaaaacagttgcttcaacagactaacgaaattcttaagatccacgaaaagaactccctcctggagcacaagatcctggaaatggaaggcaaacacaaggaagaactcgatactctgaaagaggagaaggagaaccttcaaggactggtgacccgacaaacgtacatcatccaggagctcgaaaagcaacttaacagagcaactactaataactcggtgctccaaaagcagcagttggagcttatggatactgtgcataatctggtcaacctctgtaccaaggaaggagtcctcctgaaaggcgggaaaagagaagaagagaaaccattccgtgattgtgcagatgtctaccaagccggctttaacaagagcgggatttacaccatatacattaacaatatgcctgagcctaagaaggtgttttgcaacatggacgtgaacggtgggggttggaccgtgatacagcaccgcgaagatggctcattggattttcaacgtggttggaaggaatacaaaatgggctttggcaatccgtcgggtgaatactggctgggaaacgagttcatttttgcaattacgtcgcagagacaatacatgttgcggatagaattgatggactgggaaggaaacagagcatattcgcagtacgatcggtttcacattggaaacgaaaagcagaactacagattgtatctgaaggggcataccggaactgcgggaaagcaatcgtcacttatactccatggagcagacttttcaaccaaggacgcagataacgataattgtatgtgtaaatgtgcacttatgctgaccgggggatggtggttcgatgcctgtgggccatccaacctcaatggaatgttttacaccgctggccaaaatcacgggaaacttaatggaatcaagtggcactacttcaagggcccctcgtactccctgagatcaactaccatgatgatacgcccactggacttt

SEQ ID NO: 32082 - DNA, 1494 bp, synthetic construct
  misc_feature 1..1494: note = Description of Artificial Sequence: Synthetic coding sequence
  source 1..1494: mol_type = other DNA
atgaccgtgttcctctcctttgcctttcttgctgcaattttgactcacataggttgttcaaatcaacgaagatctccggaaaacagcggaaggcgctacaatagaattcagcatgggcagtgtgcctacacttttatcttgccagaacatgacggcaactgccgcgaatccactactgatcaatacaacaccaacgcccttcaacgtgatgcgccacatgtcgaacccgatttttcttcgcagaagctgcagcatctggaacacgtgatggagaactacacccagtggctccaaaaacttgaaaactatatcgtggaaaacatgaagtcagaaatggcgcaaattcaacagaacgccgtgcaaaaccataccgccactatgctggagatcggaacctcactcctctcccagaccgcagagcaaacccggaaacttactgatgtggaaacccaagtgcttaaccaaacgagcagactggagattcaactcttggaaaattcactttcaacttacaagctggaaaagcagcttcttcagcaaaccaatgagattttgaagattcatgagaaaaacagcctgcttgaacataagatcctcgaaatggaaggtaaacacaaagaagagcttgataccctcaaggaagagaaggagaaccttcaaggcctggtgactcggcagacttacattattcaggagctggagaagcaacttaatagagcaactactaacaacagcgtccttcagaagcaacagctggaactgatggatacggtccataatctggtgaacttgtgcactaaggaaggcgtgcttctcaagggcggtaagcgagaagaggaaaagccatttagagattgtgcagacgtgtaccaagcaggctttaacaaatccggaatttacaccatttacataaacaatatgcccgaacctaagaaggtgttctgcaatatggatgttaatggagggggttggaccgtcatccagcaccgtgaggacggatcgctcgactttcagcgaggatggaaggaatacaaaatgggttttggtaacccgtcgggagagtactggctgggaaacgaattcatctttgcaatcacgtcccaacgtcaatacatgctcaggattgagttgatggactgggaaggcaatcgagcatactctcagtacgataggtttcacataggtaatgagaagcagaattaccgcttgtatctgaaaggacacaccgggactgcaggtaagcaatcgtcgctcattcttcacggcgcggacttttcgactaaggacgcggataacgataattgtatgtgtaaatgcgcacttatgctgaccggcggatggtggttcgatgcatgtgggccctccaatctcaacggtatgttctatactgctggtcaaaaccacgggaaactgaacggaatcaaatggcactactttaagggaccttcttattcgcttcggtcgactactatgatgatccggccgttggatttc

SEQ ID NO: 32083 - DNA, 1494 bp, synthetic construct
  misc_feature 1..1494: note = Description of Artificial Sequence: Synthetic coding sequence
  source 1..1494: mol_type = other DNA
atgaccgtctttctgtcattcgcctttctggccgccattttaacccatattgggtgctctaaccaacgcaggagtcctgagaattctggcaggaggtacaaccgaattcaacacggacagtgcgcatacacttttatcttgccagagcatgacggcaattgcagagagagcacaaccgatcagtacaatacgaacgcccttcagagagacgcccctcacgtcgaaccagacttcagttcacagaagctacagcatctggagcacgtgatggagaactacacccagtggctacagaagcttgaaaattacatcgtagaaaatatgaagtctgaaatggcacagatccaacaaaatgcagtgcagaatcacaccgccaccatgctcgaaataggtaccagtcttttaagccagacagccgaacaaactcgaaagctgaccgatgtagagacccaggtcctgaaccagaccagtagattagagatacagttactggagaacagcctatccacctacaaattagaaaagcagctgttgcaacaaacgaatgaaattctgaagatacacgaaaaaaactcactgctggaacacaaaatcctagagatggagggaaagcataaagaggaattggatacactgaaagaggaaaaggagaatcttcagggattggtgacgcgacagacctatataattcaggaacttgagaagcagctgaatagagccactacaaacaactctgtgctgcaaaagcaacagctcgagcttatggatacagtgcacaatcttgtgaacctctgtacaaaggaaggcgttttgctgaaagggggaaagagagaggaggaaaaacccttcagggattgtgccgacgtgtaccaagctggatttaacaagtccggcatctatacgatttacattaacaacatgccggagcccaaaaaagttttttgcaatatggacgtgaacggcggagggtggactgtgattcaacaccgagaggatgggtccctcgatttccagaggggctggaaggagtacaagatggggtttggcaacccctccggggaatactggttgggcaatgagttcatcttcgctattactagccaacgacaatacatgctcagaatcgaattaatggactgggaggggaaccgggcctactcccagtacgacagatttcatatcggaaacgagaaacagaactatcgactgtacctcaaaggacacactggcacagccgggaaacagtcgagccttattctccacggtgctgatttttccaccaaggacgcggacaacgataattgcatgtgcaagtgcgccctaatgctcactggtggctggtggtttgacgcatgtggcccatccaacctgaacgggatgttttataccgccgggcagaatcacggcaagctgaatggaatcaagtggcactatttcaaaggtcccagttacagcctcaggtcgactaccatgatgatccgaccactggatttc

SEQ ID NO: 32084 - DNA, 1494 bp, synthetic construct
  misc_feature 1..1494: note = Description of Artificial Sequence: Synthetic coding sequence
  source 1..1494: mol_type = other DNA
atgactgtgtttctcagcttcgcatttctcgcagcgatccttactcatatcgggtgcagcaaccagagacgcagcccagagaactccgggagaaggtataatcgcatccagcacggccagtgcgcgtataccttcattcttcctgagcatgatggaaattgtcgcgaaagcaccaccgaccagtacaacacaaacgcactgcaaagagatgctccccacgtggaacctgacttcagctctcaaaagctgcaacacctggaacacgtgatggagaattacacccagtggctgcagaaactggagaactacattgtcgaaaatatgaagagtgagatggcacagatacagcaaaatgctgttcaaaatcataccgccacaatgctcgaaatcgggacatcgctcctctcgcagaccgctgagcagacccgcaagctgaccgacgtggagacccaggtgctgaatcagacatcaaggctagagatccagttgctcgagaatagtttgtccacgtataaactcgaaaagcagctgctgcaacaaaccaatgagatactcaagatacatgaaaagaattccctcctagagcacaagatcctggaaatggaaggaaaacacaaggaagagctggataccctgaaggaggagaaagaaaaccttcagggtttggtcactcggcagacatacattatacaggagctggagaagcagctcaacagggcgacaaccaacaacagtgtgttgcagaagcaacagctggaacttatggacaccgttcacaatcttgtaaacctgtgcacgaaggagggggtgctgctaaagggaggtaagcgtgaggaagagaaaccgttccgggactgtgcagatgtgtaccaagccggctttaacaagagtggcatttacacaatttacataaacaatatgcccgaacccaaaaaggtcttctgcaacatggacgtcaacggaggaggttggaccgttatccagcacagggaggatggcagccttgattttcagcgtggttggaaagaatataagatgggattcgggaacccgtcgggggagtactggctggggaatgaatttatattcgcaatcacgtcacaaaggcagtacatgctgagaattgaactgatggactgggaggggaatcgtgcttactcacagtatgacaggttccacattggcaatgagaagcaaaactaccgcttgtatctgaaaggacataccggaacggcggggaaacagtcaagtctgatattacatggcgccgacttcagcaccaaggatgcggacaatgacaactgtatgtgcaaatgtgccctcatgttaacaggcggttggtggtttgatgcctgcgggcctagcaacctcaatgggatgttctatacggccggacaaaaccacggcaaactcaatggaattaagtggcattacttcaaggggccctcctacagtctccgatcgaccaccatgatgatcagaccgttagacttt

SEQ ID NO: 32085 - DNA, 1494 bp, synthetic construct
  misc_feature 1..1494: note = Description of Artificial Sequence: Synthetic coding sequence
  source 1..1494: mol_type = other DNA
atgaccgtttttctgtctttcgccttcctggctgccattcttactcatataggttgctctaaccagcgaaggtctcctgagaattctggaagaagatataaccgtattcaacatggccagtgtgcttataccttcattctgccagaacacgatggtaactgccgtgaaagcaccacagaccagtataacacaaacgcactgcagcgcgacgcccctcatgttgagccagacttctcctctcagaaactccagcacctggagcatgtcatggaaaactatactcagtggctgcagaagctggaaaattacatagtcgaaaatatgaaaagtgagatggcccagatccagcagaatgccgtgcagaaccatactgcaaccatgctagagatcggcacttccctgctgtctcagactgccgagcagactaggaaacttactgatgtggagacccaggtcttgaatcagaccagccgcctggagatccagcttctcgaaaacagtttaagcacatacaagctggagaagcagctgctccagcagaccaatgaaatactgaaaattcacgagaaaaatagtctcctggaacacaagatcctggagatggaaggtaagcataaagaggaactggataccctgaaggaagaaaaggaaaacctgcagggtctggtaacccggcaaacttatattattcaggagctggagaagcagctcaatagagccacaactaataactctgtgctacagaaacaacagcttgaactcatggataccgtgcataatctagtgaacctgtgcacaaaagagggcgtgctgctgaaaggaggaaaacgcgaagaagagaagcctttcagagactgtgccgatgtctaccaagctggatttaataaatcaggtatttacaccatctatatcaataatatgcctgaacccaagaaggttttttgcaacatggatgtgaacggcggcggctggaccgtgatccaacacagggaagacggcagcctcgatttccagcgcggctggaaggaatacaagatggggtttggtaatcccagcggagaatattggctcggaaatgaattcatattcgctattacttcccaaaggcagtatatgttaagaatcgaattaatggactgggagggcaatagagcttacagccagtatgacagatttcatattgggaatgaaaaacaaaactatcgactgtatctgaagggccacactggcaccgctggcaagcagagtagcctaattttgcatggggcagatttctctacaaaagacgcagacaatgacaactgtatgtgtaagtgcgccctgatgctgacagggggatggtggttcgacgcatgcggcccctcaaatctgaacggcatgttctatacagccggacagaaccatggcaaattaaacggcattaagtggcactactttaaagggccctcttatagcctgagatcaaccacaatgatgatcaggcctctagacttc

SEQ ID NO: 32086 - DNA, 1494 bp, synthetic construct
  misc_feature 1..1494: note = Description of Artificial Sequence: Synthetic coding sequence
  source 1..1494: mol_type = other DNA
atgactgtgttcctgtccttcgctttcctcgcagcaattttaactcacataggctgttccaaccagagaaggagtccagaaaactccggacgaagatacaacaggatacagcatgggcagtgtgcttacacttttatcttgcccgaacatgatggtaattgtagggagtctacgacggatcaatacaatacaaatgccctgcagagagacgccccccacgtggagcctgacttcagttctcagaaacttcagcaccttgaacatgtgatggagaactatacgcagtggctgcaaaagttggaaaactacattgtcgagaacatgaagagcgaaatggcgcaaattcaacaaaacgcagtgcagaatcacactgctacgatgttggaaattggcacttcattactcagtcagactgccgaacagacgaggaagcttacagatgtggaaacgcaggttctcaatcagacctctcggcttgagattcagctgctcgagaattcccttagtacgtataagctggaaaagcagctccttcagcagacaaacgagattctgaagattcacgagaagaactccttgttggagcacaaaatccttgagatggagggaaagcacaaagaggagctggacacactgaaggaggagaaggagaatctgcaggggcttgtgacacgacagacatacattatccaggaacttgaaaagcagctgaatcgagctactacaaataattccgtgctacagaagcagcaactggaactcatggacactgtgcacaacttggtgaacctgtgtacgaaggaaggcgtccttttaaagggaggcaaaagagaagaggagaagccttttcgcgactgtgcagatgtatatcaggcaggctttaacaaatccggcatttacacgatctatatcaataacatgccagaacctaagaaggtgttctgcaacatggatgtcaacggcggcggctggacggttattcagcaccgggaggacggttctctcgactttcagcgcggatggaaggaatataagatgggctttggcaatcctagcggcgagtattggttgggtaacgagtttatatttgcaatcacgagccagcgtcagtacatgcttcgcatcgagctgatggactgggaagggaacagggcatatagccagtacgatcggttccacatcgggaatgaaaaacagaactacaggctgtatctcaagggacacacagggactgcaggcaagcagagttccctgatcctgcatggtgctgacttctcaaccaaggacgcggacaatgacaactgcatgtgtaagtgcgctttgatgctcacggggggctggtggttcgacgcctgtgggcctagtaacttgaacggaatgttctacaccgcaggtcagaatcacggtaaactgaacggcattaagtggcactattttaagggcccaagctattcacttcgatctactaccatgatgatcaggccactcgatttc

SEQ ID NO: 32087 - DNA, 1494 bp, synthetic construct
  misc_feature 1..1494: note = Description of Artificial Sequence: Synthetic coding sequence
  source 1..1494: mol_type = other DNA
atgacggtcttcttgtcctttgccttcctcgctgcgatccttactcacattggttgctctaaccaaaggcgctcacccgagaacagtggccggcgctacaaccgcattcagcatggtcaatgcgcttacaccttcatcctaccagagcacgacggcaattgccgtgaatccaccactgaccagtataataccaacgcattgcagcgtgatgcccctcacgtggagccagactttagttcgcagaaactgcaacacctggagcacgtgatggaaaattacactcagtggttgcagaagttggagaactacattgttgagaacatgaagagtgagatggcccagattcaacagaacgcagtccagaaccacaccgctacgatgctggaaattggcactagtctgctttcccagacagctgagcagacaaggaagctgaccgacgtcgagacacaggtccttaaccagacctccaggctcgaaatccagctcctggaaaattctctgagtacctacaagcttgagaagcaactcctacagcagacaaacgagatcctcaagatccatgaaaagaattcacttttggagcataagatcctcgagatggaaggtaagcacaaggaggaactcgacacgctcaaggaagagaaggagaacctgcagggtctggttacaaggcaaacctacatcattcaggagctcgagaagcagctgaaccgagcaacaactaacaactcggtgcttcagaagcagcaactggaactgatggataccgtccataacttggttaacctttgcactaaggagggagtattgctgaagggtgggaagagagaagaggagaaaccattccgggactgtgccgacgtctatcaggcaggcttcaacaagagtggcatatacaccatctacatcaataacatgcccgaaccaaagaaggtcttctgcaatatggatgtgaatggcggcggctggaccgttattcagcaccgcgaggacggaagtctcgatttccagcggggatggaaggagtacaagatgggcttcggtaacccgtcgggcgagtactggctcggaaacgaatttatattcgccataacatcgcaaagacagtacatgctgaggatcgagttgatggattgggagggcaacagggcttatagccagtatgaccgatttcacattggtaacgaaaagcaaaactaccgtctgtatctgaaggggcacaccggcaccgctggcaagcaatcctcgcttattttacacggtgctgacttcagtaccaaagacgctgataatgacaactgcatgtgcaagtgcgccctcatgctcacaggtggatggtggttcgatgcctgcggcccaagtaaccttaacggtatgttctacacagcgggtcagaaccatggcaaacttaacggtatcaagtggcactatttcaaaggtcccagctactctcttcgttctaccactatgatgatccgccctctggacttc

SEQ ID NO: 32088 - DNA, 1494 bp, synthetic construct
  misc_feature 1..1494: note = Description of Artificial Sequence: Synthetic coding sequence
  source 1..1494: mol_type = other DNA
atgacagtgtttctatcatttgcctttcttgcagccattctgacacacatcgggtgcagcaaccagaggcggtcacctgaaaactctggcagaagatacaatagaattcagcacggtcagtgtgcctacactttcattctgcccgagcacgacggaaactgtagagagtcgacaaccgatcagtataatacaaatgcccttcaacgggatgctccgcatgtggagcctgacttctcaagtcagaaactgcagcatctagagcacgttatggagaactacacccagtggttgcagaagctggagaactatattgttgagaacatgaagtccgagatggcccaaatacagcaaaacgccgttcagaatcacacggccaccatgcttgaaattggaacttctctcttgagtcagaccgcggagcagaccagaaagcttacagacgtcgagacccaggttcttaaccaaactagccgactggagatacagcttctggaaaattcattgagcacatataagctggaaaagcagctgctacagcagacaaacgaaatcctgaaaatccacgaaaagaactctctgctggaacataagattctggaaatggaagggaaacataaggaagaacttgacactttgaaagaagaaaaggaaaaccttcagggcctcgtgactcgacagacatacatcattcaagagctggaaaagcagctgaaccgggccaccacaaataactccgtgcttcagaaacaacaactggagcttatggacactgtacataaccttgtcaatctctgcaccaaggagggagtgttgctgaagggtggtaagcgcgaggaggaaaagccattcagagattgcgccgacgtttaccaggccggtttcaacaagagcgggatctacacgatctatattaacaacatgcccgagccaaaaaaggtgttctgcaatatggatgtgaacggtggcggctggaccgtgattcaacaccgagaggacggatcactggactttcaaaggggttggaaggagtacaagatggggttcggaaacccctccggggagtactggctggggaatgagttcatttttgccattacttctcaaaggcagtacatgctgagaattgagcttatggattgggaaggaaatagggcctacagccagtacgatagatttcacattggcaacgaaaagcagaactacaggctgtatctcaaggggcacaccggcacagccggaaagcaaagtagtctgattcttcacggagcagacttttctaccaaagacgccgataatgacaactgcatgtgtaagtgcgctctgatgttgactgggggatggtggttcgacgcctgcgggccctccaacctgaacggtatgttctatacggcgggacaaaaccacggaaagttgaacggcataaagtggcattacttcaaaggcccctcatattctctgcgtagtacaacaatgatgattaggccacttgatttt

SEQ ID NO: 32089 - DNA, 1494 bp, synthetic construct
  misc_feature 1..1494: note = Description of Artificial Sequence: Synthetic coding sequence
  source 1..1494: mol_type = other DNA
atgactgtctttctgtcgtttgcgtttttggccgcaattcttacgcatatcggatgtagcaatcagcgcaggagccctgaaaactccggccggcggtacaacaggatccaacatggacaatgtgcctatacctttattctccctgagcatgacggtaattgtcgcgaatccaccaccgatcaatacaacacgaacgcgcttcagcgcgacgcaccccatgtggaaccggatttcagctcccagaagctccagcatcttgaacatgtgatggaaaactatactcagtggctgcaaaaactcgagaactacattgtcgagaatatgaagtccgagatggcgcaaattcagcagaacgcagttcaaaatcatactgcaacgatgcttgagattgggacttccctgctctcgcagacggccgagcaaacccggaaacttactgatgtcgaaacccaggtgctcaaccagacttctaggctcgaaattcagctgcttgagaattccctctcgacctataagctcgaaaagcagcttctccaacagaccaacgaaatcctgaagattcacgagaagaattcgctgctggaacataagattctggagatggagggcaagcacaaggaagaactggacaccctgaaagaagaaaaggaaaaccttcagggtctggtgactcggcaaacctacataatccaggagcttgaaaagcaactgaacagagcaactaccaataactcggtcctccaaaagcaacagcttgaacttatggacaccgtccataatcttgtgaacctgtgcaccaaagaaggcgtgctgcttaaaggaggcaagagagaggaagaaaagccattccgagattgtgctgacgtgtaccaagcaggatttaacaaatccgggatttacaccatctacatcaataacatgcctgagcctaagaaggtgttttgtaacatggacgttaacggaggtggttggactgtgattcaacatcgggaggacggatcgctggacttccaaagaggctggaaggaatacaagatgggatttggaaatccctcgggagaatactggcttggtaacgagtttatcttcgctataaccagccagcggcagtacatgctcaggatcgagcttatggattgggagggaaacagagcatacagccaatacgaccgcttccatatcggaaacgaaaagcagaactacaggctgtacttgaagggtcacaccgggacggcaggaaagcaaagctcattgattcttcatggtgcagacttctccaccaaggacgctgataatgataactgtatgtgtaaatgcgcccttatgcttactggtggttggtggtttgatgcctgtggtccgtcgaatctcaacgggatgttctacaccgccggacagaatcatggcaagttgaacggaatcaaatggcactacttcaaaggacctagctactcactgagatccaccaccatgatgattcgaccacttgatttt

SEQ ID NO: 32090 - DNA, 1494 bp, synthetic construct
  misc_feature 1..1494: note = Description of Artificial Sequence: Synthetic coding sequence
  source 1..1494: mol_type = other DNA
atgaccgtgtttctctcgttcgcatttctggcggccatcctcacccacatcggatgctccaaccagaggcgctcgccggaaaacagcgggagaaggtacaaccggatccaacacggccagtgcgcttacactttcatccttccggaacatgacggaaactgccgggagtcgaccaccgaccagtacaacactaacgcactgcaaagagatgccccacacgtcgaacctgatttttcatcccagaaactccagcacctggaacacgtcatggagaattacacccaatggctgcagaaactcgaaaactacatcgtggagaatatgaagtcagagatggctcagatccagcaaaacgcggtgcaaaatcacactgcgaccatgttggaaatcggaaccagcttgctgtcccagacggccgaacagactaggaagctcaccgatgtcgagacgcaggtcctcaaccagacgtcacgcctcgaaatccagctcctggaaaactctctgtcgacttacaagctcgagaaacaactgcttcaacagaccaacgagatactgaagattcatgaaaagaactctctgcttgagcacaaaatcctcgagatggagggtaagcataaagaggaactcgacacgctgaaggaggaaaaagaaaatctgcaaggactcgtgactcgccagacgtacattattcaggaactggaaaagcagctgaaccgcgcgaccaccaacaattccgtcctgcagaagcagcagctcgagctcatggatactgtgcataacctcgtcaatctgtgcactaaagagggggtccttcttaagggcggaaagagggaagaagagaaaccattccgcgactgtgcggatgtgtatcaagccggtttcaacaagtcgggaatctacaccatctatatcaacaatatgcctgaacctaaaaaggtgttctgcaatatggacgtgaacggtggagggtggactgtgatccaacacagagaggacggttcgctcgattttcagcggggctggaaggagtacaagatgggattcggcaaccctagcggagagtactggctcggtaatgaattcatcttcgccatcacctcgcagaggcaatacatgctgagaattgaactgatggattgggagggcaaccgcgcatattcacaatacgacaggttccacatcggaaacgaaaaacagaactaccggctctacctgaagggtcacactggtactgcgggaaagcagagcagcctgatcttgcacggagctgatttctccactaaggacgccgacaatgataactgcatgtgtaagtgcgcactcatgctcaccggcggatggtggtttgacgcgtgcggtcctagcaacctgaacgggatgttctacactgcaggacaaaaccatggcaagctgaatggaatcaagtggcattactttaaaggacctagctacagcctccggtccactaccatgatgattcgcccgctcgacttt

SEQ ID NO: 32091 - DNA, 1494 bp, synthetic construct
  misc_feature 1..1494: note = Description of Artificial Sequence: Synthetic coding sequence
  source 1..1494: mol_type = other DNA
atgaccgtctttctgtcgtttgcgtttctggcagcgatcttgactcatatcggctgttcaaaccagcgtcgatctcctgagaattcgggaagaaggtacaatcgtattcaacatggtcagtgtgcatacacctttatactgccggaacacgatggtaactgcagggagtccaccaccgatcagtacaataccaacgccctgcaacgtgatgcgccccatgtcgagcccgatttctcaagccaaaaactgcagcaccttgaacacgtgatggagaactacacccaatggctgcaaaagctcgagaattacatcgtggaaaacatgaagagcgaaatggcacaaatacaacaaaatgcagtccagaaccacactgccaccatgcttgaaataggaacctcgctgctgtcgcagaccgcagaacagacccggaagctgaccgacgtggaaacccaagtgctgaaccaaactagcagattggaaattcagcttctggagaactcgctgtctacttacaaactggaaaaacaactgcttcagcagaccaacgagatcctgaagattcatgagaagaatagccttctcgaacacaagattctcgaaatggaaggtaaacacaaggaagagttggacactttgaaggaagagaaggaaaacttgcagggactcgtcactagacagacctacattatacaagaactggaaaagcaactcaaccgcgcaaccactaacaactcagtgctccaaaagcaacagctggaactgatggatactgtccataatcttgtgaatctgtgtactaaggaaggagtgctcctcaagggaggcaagagggaggaggaaaagccatttcgcgattgtgcagatgtgtaccaggccgggtttaacaaatcgggcatctacactatttacataaacaacatgccagagcctaaaaaggtcttttgtaatatggatgtcaacgggggtgggtggactgtgattcaacacagagaggatggatccctcgatttccagcgaggttggaaggaatacaagatggggttcggaaacccctccggagagtactggctggggaatgagttcattttcgctattacgtcccaacggcaatacatgctgagaatcgaactgatggactgggagggtaacagagcatactcacaatacgaccgatttcatatcggtaacgaaaagcaaaactaccggctctacttgaaaggtcatactggtaccgcggggaagcaatcctccctgatacttcacggggcagattttagcaccaaagatgcagataacgataattgtatgtgtaagtgtgcccttatgcttactggcggttggtggtttgatgcatgtgggccaagtaacctgaacggcatgttctacaccgcaggccaaaatcatggtaaacttaacggtattaagtggcattactttaagggtccttcgtactccctccgatcgaccactatgatgatccggcccttggacttt

SEQ ID NO: 32092 - DNA, 1494 bp, synthetic construct
  misc_feature 1..1494: note = Description of Artificial Sequence: Synthetic coding sequence
  source 1..1494: mol_type = other DNA
atgaccgtattcctgagctttgccttccttgctgccattctcacccatatcgggtgttcgaatcagcgccggtcacctgaaaattccggacgccgctacaataggatccagcacggacagtgtgcttacactttcatcctgcccgaacacgatggcaactgtcgggaatctactacggaccagtataacactaatgcactccaacgcgacgccccgcatgtggagccggacttcagcagccagaagctgcagcatttggaacatgtcatggaaaactacacgcagtggctgcagaaacttgaaaactacatcgtggaaaacatgaaatccgaaatggcgcaaatccaacagaatgcggtgcaaaaccatactgcaaccatgttggaaatcggaaccagcctgctttcgcagacggctgaacagactcgcaagttgactgacgttgagacgcaggtgctcaatcagaccagccgcctcgagatccagctgctcgagaactcgctgtcgacttacaagttggaaaagcagctgctgcaacaaaccaatgagatcctcaagatccatgaaaagaattcgctgctggaacataagatcctggagatggaaggcaagcataaggaagaactggacaccctgaaggaggagaaagagaacctgcaaggcctggtgaccagacagacttacatcattcaggaattggaaaaacagctgaacagggctaccacgaataactcggtgctccaaaaacagcaactggagctgatggatactgtgcataatctcgtgaacctctgtactaaggaaggcgtcctgcttaagggcggtaaaagagaggaagaaaagcccttccgggattgcgccgatgtgtaccaggcgggattcaacaagtcaggaatctacaccatctatatcaataacatgccggaaccaaaaaaggtcttttgtaacatggatgtcaacggaggaggatggactgtcattcagcacagagaggacggctcgctggacttccagaggggttggaaggagtacaaaatgggctttggaaacccttcgggagagtactggctcggcaacgagtttatctttgccatcacttcgcagcgccaatacatgctgagaatcgaattgatggactgggaggggaacagggcttacagccaatacgatcggttccatattgggaacgaaaagcagaattaccgcctgtacctgaagggacacacgggaactgccgggaagcagtccagccttatcctccacggagcggacttttcaaccaaggatgcggacaatgacaactgcatgtgcaagtgcgcgttgatgctgaccggaggatggtggttcgatgcctgtggtccgagcaacctgaacgggatgttttacaccgcaggccagaaccacggaaagctgaacggcatcaagtggcactacttcaagggacctagctactcgttgcgctccacgaccatgatgatcaggccactcgatttc

SEQ ID NO: 32093 - DNA, 783 bp, synthetic construct
  misc_feature 1..783: note = Description of Artificial Sequence: Synthetic coding sequence
  source 1..783: mol_type = other DNA
atggagaaagtgcgccgcgaaggtgtgaaggtcatgccgaacgccatagtgcagagcgttggagtgagtagtggaaaattgctaatcaagctgaaggacggcaggaaggtggagacagaccacattgttgcagccgttggactggagccaaacgttgaactcgcaaagactggaggattagaaattgactctgattttggtggtttccgggttaatgctgaactccaggcaagatcaaatatttgggtggccggagacgccgcatgtttctacgatattaaactcggccggagacgggtcgagcaccacgatcacgccgtggtgtccgggcgcttggctggcgaaaatatgacaggcgctgcgaagccctactggcaccagtcgatgttttggagcgacctgggacctgacgttggctacgaagccataggactcgtggattcaagcctgccaacagtgggagtattcgccaaggctacagctcaggataatcctaaaagtgccactgagcaaagtggcacgggcatccggtctgagagtgaaaccgaatctgaagcctccgagatcactatccccccttccacgccggctgtacctcaggcacctgtacagggcgaagactatggtaagggggtgatattttacttgagagacaaagtggttgtggggatcgtcctctggaacatctttaatcggatgccaatagcgagaaagatcataaaggacggggagcagcacgaagaccttaatgaggtcgccaaactattcaatatccatgaggac

SEQ ID NO: 32094 - DNA, 783 bp, synthetic construct
  misc_feature 1..783: note = Description of Artificial Sequence: Synthetic coding sequence
  source 1..783: mol_type = other DNA
atggagaaggtgcggcgggagggggttaaggtaatgcccaacgctattgtacagagcgttggtgtatcgtcaggaaagctcctgattaagttgaaagacggccgtaaggtggagacagaccacatcgttgctgctgtgggccttgagccgaacgttgaattagccaaaacaggggggctcgagattgatagcgactttggcgggttccgcgtgaacgctgaattacaggccaggagtaatatatgggtggccggagatgcggcatgcttctatgacataaaactgggtagaagacgcgtggaacatcatgatcatgccgtggttagcggccgcttagccggcgaaaatatgacgggcgcagccaagccttactggcaccagagtatgttctggtcagatctgggacccgatgtcggctacgaggcaattgggttagtagacagctccttgcccactgtcggagtgtttgccaaggctactgcccaggataatcccaaaagcgctacggagcagtcgggtactggtatcaggtcagagagcgaaacagagagcgaagcaagcgaaattacaatcccccccagtacacccgctgtcccccaggcgcctgttcagggagaggactacggaaagggcgtgattttctatctgagggacaaagtggtggtcgggatcgttctctggaacattttcaaccgcatgcccatagccaggaagattattaaagatggcgagcagcacgaggacttaaatgaagtggctaaactatttaacatacacgaggac

SEQ ID NO: 32095 - DNA, 783 bp, synthetic construct
  misc_feature 1..783: note = Description of Artificial Sequence: Synthetic coding sequence
  source 1..783: mol_type = other DNA
atggagaaggtcagacgtgagggcgtaaaggtgatgccgaacgccattgtgcagagtgtaggcgtatcgtctggaaagctcctgattaaactgaaggacggacggaaggtggagacagaccacattgtagcggcagtcggacttgagcctaatgtggaactggctaaaacagggggcctcgagatagactctgattttggggggtttagggtaaatgctgagctgcaggcccgatccaatatttgggtggcaggtgatgcagcttgcttctatgatatcaagctgggtcgacgaagagttgagcatcacgatcacgcagtggtaagcggcaggttggccggtgagaacatgaccggagcagcgaaaccgtactggcatcagagtatgttttggagcgacctggggcccgacgtaggatacgaggccataggtcttgtcgactcctctctccctaccgtgggcgtcttcgcaaaggctaccgcccaggataaccccaaatccgccacagaacaatcagggaccggaatacgctccgagtccgaaactgaaagtgaggccagcgaaattactattcccccttctactccagctgtcccccaagcccccgtgcagggtgaggattatggaaaaggcgtcattttctatctgcgtgataaagtggtcgttggtatagttctctggaacatttttaaccgcatgccgatcgcgcgcaagatcatcaaggatggcgagcaacatgaagatcttaacgaagtagctaagttattcaatatacatgaggat

SEQ ID NO: 32096 - DNA, 783 bp, synthetic construct
  misc_feature 1..783: note = Description of Artificial Sequence: Synthetic coding sequence
  source 1..783: mol_type = other DNA
atggagaaagtgcggcgagaaggggtgaaggtaatgccaaatgccatagtgcagtccgtgggcgtgtcctccggaaagcttctcattaagttgaaggacggcaggaaagtggaaaccgaccacatcgtggccgctgtgggcctcgaaccgaatgtcgagttggccaaaactgggggccttgaaattgacagtgatttcggcggctttcgcgtgaacgcggagctgcaggcgcgctctaacatctgggtggccggcgatgccgcatgtttttacgatatcaaacttgggcgcaggcgcgttgagcaccacgatcacgctgtcgtcagtggtcggttggccggcgaaaatatgactggcgccgccaagccctactggcatcagtctatgttctggtctgatctcggacccgacgtgggatacgaagctatcggtttggtggattcatcacttccgacagtgggcgtgtttgcgaaggcaacagcacaagacaaccctaagagtgccacggagcagtctggtacaggcattcggtccgaatcagagactgagtctgaggcatccgagatcactatacctccgagcaccccagccgtcccacaggcccctgtccagggagaggattatggaaagggcgtgatcttttatcttcgcgacaaggtggtagtggggatcgtcttgtggaacatttttaaccgaatgcccatagcaagaaagatcataaaagacggggagcaacatgaagatcttaacgaagttgcgaagctctttaatatacatgaagac

SEQ ID NO: 32097 - DNA, 783 bp, synthetic construct
  misc_feature 1..783: note = Description of Artificial Sequence: Synthetic coding sequence
  source 1..783: mol_type = other DNA
atggaaaaggtgcgacgcgaaggagttaaggtgatgcctaacgcaattgtgcaatcggtgggagtgtcctcaggcaaactgctgattaagctgaaggatgggagaaaggtcgaaacggatcacattgtggcagcagtcgggctcgagcctaacgtggagctggcaaagactggaggcctggaaattgattccgacttcggagggtttagagtgaatgcggaactgcaagccaggtcgaacatttgggtcgcaggtgatgcagcctgcttctacgacataaaactgggacgtcgtcgggtggagcatcacgatcatgcagtggtgtccggtagacttgctggtgagaatatgactggcgcggcgaagccatactggcatcaatccatgttttggtcagacctgggacccgacgtgggctacgaagctattggactggtggattcttctcttcccacggtgggagtctttgccaaggctactgcacaagataatccaaagtcagcaactgaacagtcggggaccggcattcgctcggagagcgagacggagtcggaagcatccgaaattactataccaccttcaactcccgcagtgcctcaagcccccgtccagggtgaagattatggtaagggggtgattttctatttgcgggataaagtggtggtgggcatcgtgctctggaacatctttaacaggatgcctatcgcccgcaaaatcattaaggatggcgaacagcatgaggatctgaatgaagtggccaagttgttcaacattcatgaggat

SEQ ID NO: 32098 - DNA, 783 bp, synthetic construct
  misc_feature 1..783: note = Description of Artificial Sequence: Synthetic coding sequence
  source 1..783: mol_type = other DNA
atggagaaagtgcgtagagagggtgttaaggtaatgccaaacgccattgtacagtccgttggagtgtcgtcaggaaaactgttaatcaaacttaaagatggacgtaaagtcgagacggatcatattgtagctgcagttggtctagaacctaatgttgaattagcaaagaccggtggcctggaaattgattctgactttggagggttcagagtgaacgcggagttacaggcccgcagcaatatttgggtcgcaggtgacgcggcttgcttttacgatattaaattgggccggaggagggtggaacaccatgatcatgcagtcgtcagcggacgtctcgcaggggaaaatatgacaggagccgctaagccatattggcatcaatcaatgttttggagtgatcttggacctgacgtcggatatgaagcaataggactagtggactcgtcgcttccaacagttggagtctttgctaaagcgacagcgcaagataatccaaagtccgctacagagcaatcaggaaccggaatacgatcagagagtgaaactgagagcgaagcatctgaaatcacaattcctccatcgacgccagcggttccacaggctccagtccagggagaggactacggaaaaggcgtaattttctacttgcgtgataaagtggttgtgggaatcgttctttggaacattttcaacagaatgccaatcgcgcgtaaaatcataaaagatggagagcaacatgaagacctcaatgaggttgcaaaattatttaatatacatgaggac

SEQ ID NO: 32099 - DNA, 783 bp, synthetic construct
  misc_feature 1..783: note = Description of Artificial Sequence: Synthetic coding sequence
  source 1..783: mol_type = other DNA
atggagaaggtgaggagggagggggtcaaagtgatgccaaatgcaatcgtgcagagcgtgggcgttagttcaggtaaactgctgattaaactgaaagacggtcgcaaagtcgagactgatcacatcgtggcagcagtcggactggagccgaatgtggaactggccaagaccggtggtttggagatcgatagtgatttcggtggtttccgtgtgaacgcggagctgcaggctcgttccaatatttgggttgctggtgatgcagcttgtttctatgacattaaactgggacgccgccgcgtggagcaccacgaccatgcagtggtgagcggacggctggccggcgagaacatgacgggtgcggcgaaaccttactggcaccagagtatgttttggtcggatctgggtccagacgtcggctacgaagcgattggtctggtggactcctctctgccgactgttggcgtctttgcaaaagctactgcccaagacaaccccaagagcgcgacagagcaatccggcaccggtattcgttccgagtcagaaaccgaaagcgaagcaagcgaaattaccatcccaccttccacgccagcggtgccgcaagcccccgtgcagggtgaggactatggtaaaggggttattttctatttgcgcgataaagttgtcgttgggattgtgctgtggaatattttcaaccgcatgccgatagcgcgtaaaatcattaaagacggtgagcaacacgaagatctgaatgaagtggcaaagctgtttaacattcatgaagat

SEQ ID NO: 32100 - DNA, 783 bp, synthetic construct
  misc_feature 1..783: note = Description of Artificial Sequence: Synthetic coding sequence
  source 1..783: mol_type = other DNA
atggaaaaagtcagaagggaaggtgtgaaggtcatgcctaacgcaatcgtccagtcagtgggtgtcagctcgggcaaacttctgatcaaattgaaggatggtcggaaggtagaaactgatcacatagtggcagcggtgggattggaacccaatgtcgagctggcaaagactggcggtcttgagatcgatagcgactttggaggttttcgagtgaatgcagaactgcaagcacggtccaacatttgggttgcgggagacgccgcatgcttttacgatatcaagctcggacgtcgtcgtgtggaacatcatgatcacgccgtggtgtccggcagacttgccggggagaatatgactggcgcagcaaagccttattggcaccaaagcatgttttggtcggatcttggtccggacgtgggctacgaagctattggcctggtggattcatccctcccaacggtcggggtgttcgcaaaggcaactgcacaggataatcctaagtcagccactgaacaatcgggtaccgggatccgttcggaatcggaaaccgaatccgaagcctcagaaattactattcccccatcaactccagcagtgccacaagccccagtccagggagaagattacggcaagggggttatcttttacctgcgcgataaagtcgttgtggggatcgtgctttggaacattttcaatcgtatgcctattgcgagaaagatcataaaggacggagagcagcatgaggacctcaacgaagtggcaaaactcttcaacattcacgaagat

SEQ ID NO: 32101 - DNA, 783 bp, synthetic construct
  misc_feature 1..783: note = Description of Artificial Sequence: Synthetic coding sequence
  source 1..783: mol_type = other DNA
atggagaaggtgaggcgagagggcgtgaaagtgatgccgaatgcaattgttcagagtgttggcgtgtcttctggaaaactccttattaaacttaaggacggaaggaaagttgagaccgatcatatcgttgctgcagtgggcttggagcccaatgtggagttggcaaaaacaggggggctcgaaatcgacagcgatttcgggggcttccgggtcaacgccgagttgcaggcaagatcgaacatttgggttgccggcgacgctgcctgtttctacgatataaaacttggacgccgaagggtcgaacaccacgatcatgctgttgtgtctggacgcctggctggagaaaacatgactggggctgcaaaaccttactggcaccaatcaatgttttggtcagacttgggacccgatgtgggctacgaagctattggcctagtcgactcctcgctgccaactgtaggagtgttcgccaaggcaaccgcccaggacaaccctaagtcagcgaccgagcagagtgggacaggaatccggtcagaatcagaaaccgagtctgaggcatccgagatcaccattccccctagcacacccgcagtgccacaagcacccgtccagggagaggattacggcaagggcgttatcttttatctgcgggacaaggtggttgtggggattgtcctgtggaatatctttaaccggatgccaattgctaggaagatcatcaaggatggtgaacagcatgaagacctcaacgaggtagccaaacttttcaatatccatgaagac

SEQ ID NO: 32102 - DNA, 783 bp, synthetic construct
  misc_feature 1..783: note = Description of Artificial Sequence: Synthetic coding sequence
  source 1..783: mol_type = other DNA
atggaaaaggtgagaagggagggagtcaaggtgatgccgaatgccatcgtgcaatctgtgggcgtctcaagcggcaagctgctgattaagctgaaggatggtcgaaaggtggaaaccgaccatattgtagccgctgtgggactggaacctaacgtcgagcttgcgaaaacgggtggacttgagatcgatagcgattttgggggattcagggtgaatgcagaattgcaagcacgcagcaacatctgggtagcgggcgatgctgcttgtttttacgatatcaagctcgggagaaggcgcgttgagcatcacgaccacgctgtggtttcaggaagattggctggagaaaacatgactggcgcagcaaagccatattggcaccaatcgatgttttggagcgatcttggacccgacgtgggttacgaggcaattggtctggtggactcctcgcttccaaccgtcggtgtgtttgcaaaagcaaccgcccaagacaatcccaagagcgctactgaacagtccggtactgggattaggtccgagtcggaaaccgagtcagaggcctcagaaattacgattccaccttccacgcctgcagttcctcaagcgcccgtccagggggaagattacggaaaaggggtgatcttctaccttcgtgacaaagtcgtggtgggaatcgtcctttggaacatctttaatcgtatgcccattgcgagaaagattatcaaggatggagaacagcatgaggaccttaacgaagttgcaaagctgttcaacatccatgaagat

SEQ ID NO: 32103 - DNA, 783 bp, synthetic construct
  misc_feature 1..783: note = Description of Artificial Sequence: Synthetic coding sequence
  source 1..783: mol_type = other DNA
atggagaaggtccgccgcgagggcgtcaaggtgatgcctaacgcgattgtccagtccgtcggcgtctcatccggtaagctcctgattaagctgaaggacggccgcaaggttgagacggaccatatcgtcgccgctgtcggcttggagcccaacgtcgagctggcgaagacgggcggcctggagatcgacagtgatttcggcggcttccgtgtaaacgccgagctccaggcccgctccaacatctgggtcgccggcgacgccgcctgcttctatgatattaagctgggtcgccggcgggtcgagcaccacgatcacgccgttgtatccggccgtctggcaggtgaaaatatgactggcgcggctaagccatactggcatcagtctatgttctggtccgatctggggccggacgtagggtacgaagcaatcgggctggtcgacagctctttacccaccgtcggcgtctttgcaaaggctaccgcccaggacaaccccaaaagcgctaccgagcagtcgggcaccggcatccgctccgagagcgagacagagtctgaggcgtccgagattaccattccaccttctacccctgcggttcctcaggcgccggttcaaggggaggactacggcaagggcgttatcttctatttgagggacaaagttgtcgttggaattgttctgtggaacatctttaatagaatgcctatcgcccgcaagattataaaggatggcgagcagcacgaggatctcaatgaagtcgcgaagttgttcaacatccatgaagac

SEQ ID NO: 32104 - DNA, 783 bp, synthetic construct
  misc_feature 1..783: note = Description of Artificial Sequence: Synthetic coding sequence
  source 1..783: mol_type = other DNA
atggagaaggtgcgtcgcgagggcgtcaaggtaatgccaaacgccatagtccagtccgtcggcgtaagcagcggaaaattgttgataaaattgaaggacggaagaaaagtcgagactgaccacattgtggccgctgttggtctggagcctaatgtcgaactggcaaaaactggtggactggagattgactctgacttcggaggctttagggtaaacgctgaactgcaggctcgcagcaacatctgggtagccggcgacgcagcatgcttttatgacatcaagctgggccgcaggcgcgtggaacaccatgaccacgctgttgtgtccggccgcctggcaggtgagaatatgaccggagccgctaagccatactggcaccagtcaatgttctggagcgacctgggccccgacgtcggttacgaagcaatcggtcttgtggattccagcttgccaactgtaggagtctttgctaaagctaccgcccaggacaaccctaagtctgccaccgagcagagtggtacaggcattaggagtgaaagtgagaccgagtctgaagcttctgagataaccattccaccttctactcctgcagtgcctcaagctcctgtgcaaggtgaggactacggaaaaggtgtcatcttctacttgagagataaagtcgtcgtgggaatcgtcttgtggaacatatttaacaggatgcccatagccagaaagatcataaaggacggagaacaacatgaagatctcaatgaggtcgcaaaattgttcaacatccatgaggat

SEQ ID NO: 32105 - DNA, 783 bp, synthetic construct
  misc_feature 1..783: note = Description of Artificial Sequence: Synthetic coding sequence
  source 1..783: mol_type = other DNA
atggagaaagtgcggcgcgagggagtgaaggtcatgcccaacgcaatcgtccagtctgtcggagtgtcttcaggtaagttacttattaagcttaaagatggacggaaagtggagaccgatcacatcgtagccgccgttggacttgaacccaacgtggagctggcaaaaacgggaggcctggagatcgattctgattttggaggcttccgcgtgaatgccgagttgcaggcgcgtagcaacatatgggtagccggtgatgccgcctgtttctacgacatcaagttaggaagacgaagggtggaacatcacgatcacgctgtcgtcagtggacgcctggcgggggagaacatgaccggcgctgcgaagccatactggcaccaaagtatgttctggagtgacttggggcccgatgtgggctacgaggccattggcctggtggattccagtctgcctaccgtgggagtctttgcaaaggcgactgcccaggacaacccgaagagcgccacggagcaaagcggcaccggcatccgatcggagtcggagaccgagagcgaagcttccgagataaccataccgccctcgacccccgcggtaccgcaggcacctgttcaaggcgaggattatggcaaaggtgtcatcttctaccttcgcgataaggtggtcgtggggatagtgttgtggaacatcttcaaccgtatgccgatagcacggaaaattattaaggacggtgaacagcacgaagatcttaacgaggtggcaaagctgtttaatatccacgaggac

SEQ ID NO: 32106 - DNA, 783 bp, synthetic construct
  misc_feature 1..783: note = Description of Artificial Sequence: Synthetic coding sequence
  source 1..783: mol_type = other DNA
atggaaaaggtgcgccgggagggggtgaaggtcatgcctaatgccatcgtccagtcagtcggagtgtcatctggcaagctcctgatcaaactgaaagatggacggaaggtggaaactgatcacattgtggctgccgtgggactggaaccaaacgtagaattggctaaaaccggaggattggaaatcgattcagacttcggaggattccgcgtaaacgcagagctccaagcacggtccaatatctgggtggcgggggacgcagcgtgcttctacgacatcaagctgggaagaaggcgggtcgagcatcatgatcatgccgtggtgtccggacgcctggccggtgaaaacatgacgggcgctgcaaagccgtactggcaccagtcgatgttctggtccgacctgggtcctgatgttggatacgaagctattgggttggtcgattcctccctgcccactgtgggagtgttcgccaaggcaaccgcccaggacaacccaaagtcggcgaccgagcaatctggtaccggcatcagatcagaaagcgaaactgagtctgaggcaagcgaaatcactatcccgccctcgaccccggcggtcccccaggctccggtgcagggagaagattacggaaagggagtcatcttctatctgcgggataaggtggtggtgggcattgtgctgtggaacatcttcaacaggatgccgatcgccagaaaaatcatcaaggacggagaacaacacgaggacctcaacgaagtggccaagctgtttaacattcacgaggat

SEQ ID NO: 32107 - DNA, 783 bp, synthetic construct
  misc_feature 1..783: note = Description of Artificial Sequence: Synthetic coding sequence
  source 1..783: mol_type = other DNA
atggaaaaggtgagacgggaaggcgtcaaggtgatgccaaacgcgattgttcaatctgtgggggttagctccggaaagctcctgatcaagcttaaggacggccggaaggtggaaacagatcatatcgtggcggccgtaggtttggagccaaatgtggaattggctaagaccggcggtttggaaatcgattctgacttcggtggcttccgcgtaaatgccgaactgcaggcccgcagcaatatatgggtggccggggatgccgcttgcttttacgacattaagctgggccgacgccgggtggaacaccacgatcacgccgtagtgtccgggagacttgctggcgaaaacatgactggtgctgctaaaccttattggcaccaaagtatgttttggtcagacctaggccccgatgtgggctacgaggccattggtctagtggattcgtctctgcccaccgtgggtgtgttcgcaaaggccaccgctcaggataacccaaaatccgcaacagaacaaagcgggacagggattcggtctgagagcgaaactgagtccgaggcatcagagatcactatcccccccagcacacctgctgttccacaggcccctgtgcagggcgaggactacgggaagggagtgattttttatctgagggataaggtggtcgtgggcatcgtgctgtggaatatattcaatcggatgccgatagcccgtaagatcataaaggatggagagcagcatgaagatctgaatgaggtagccaaactgttcaatatacatgaggat

SEQ ID NO: 32108 - DNA, 783 bp, synthetic construct
  misc_feature 1..783: note = Description of Artificial Sequence: Synthetic coding sequence
  source 1..783: mol_type = other DNA
atggagaaagtgaggcgtgagggggtcaaagtgatgccaaacgctatagtgcagagcgtgggagtctcttcagggaaattgctgattaagcttaaagacggaagaaaagtggaaacagaccacattgtcgcagccgttggcctcgaacctaacgtggagttggccaaaaccgggggactcgaaatcgattccgattttggaggtttccgggtcaatgcggaactgcaagcacgctctaatatctgggtggccggggacgctgcctgcttttatgacatcaaactcggacgcagacgcgtggaacatcacgatcatgccgttgtgtctggccgactggctggggagaacatgacaggcgcggctaagccatactggcatcagtccatgttttggtctgatctggggcctgatgtggggtatgaggctatcggcctggtagacagctccctgcccactgtgggcgtgtttgccaaagcaaccgcccaggataaccccaaatccgctactgagcagtcaggaaccgggatccgttcagagagtgaaacagaaagtgaggcatcggaaatcaccatacccccaagcacaccggctgtcccacaagcacctgtgcagggcgaggattatggcaaaggggtgatcttctatctgcgcgacaaagtcgtggtgggaatcgtgttgtggaacatatttaatcggatgcctattgcaaggaagataatcaaagacggagagcaacacgaggacctgaatgaggtagccaagttatttaacattcatgaagac

SEQ ID NO: 32109 - DNA, 783 bp, synthetic construct
  misc_feature 1..783: note = Description of Artificial Sequence: Synthetic coding sequence
  source 1..783: mol_type = other DNA
atggagaaggttaggagggaaggcgtgaaggtaatgcccaacgcgattgttcagtcagtgggagtgtcttctggtaaactgctcataaaattgaaggacggcaggaaagttgagacagaccacatcgtcgccgctgtgggcctggagcccaatgtggaactcgcaaagactggtggcttggagatcgatagtgactttggtggtttccgcgtgaacgccgagttgcaagcgaggtcaaacatctgggtcgccggcgatgccgcttgcttctatgatataaaactgggtaggcgcagagttgagcaccatgaccacgcagtcgttagtggcaggctggccggcgaaaacatgacaggtgctgctaagccttactggcatcaatcaatgttctggtccgatctgggtccagatgtaggatacgaggcgattggtttggtagatagctctcttcctaccgtcggtgtctttgcaaaagccacggcacaggacaacccaaagtcagctaccgagcagtctggcacgggcatcaggtccgaatctgagacagagtccgaggcttcagaaataacgatcccaccctcaacacctgccgtgccgcaggcacctgtgcaaggtgaggactacggtaagggagtcatcttctacttgagggataaggtcgtggtaggcatcgtgctttggaatattttcaataggatgccaatcgcgaggaaaattatcaaagacggtgaacaacacgaggaccttaatgaagtcgccaagctttttaacatacacgaagac

SEQ ID NO: 32110 - DNA, 783 bp, synthetic construct
  misc_feature 1..783: note = Description of Artificial Sequence: Synthetic coding sequence
  source 1..783: mol_type = other DNA
atggaaaaggtgcgcagggaaggtgttaaggtgatgcctaatgcgatcgtccaaagcgtgggagtgtcaagcgggaagctgctgattaagctcaaagacggccggaaggtggaaactgatcacatagtggcagctgtgggacttgaaccaaacgttgaactggccaagactggaggcctggagatcgatagcgactttggaggttttcgggtaaatgcggagttgcaagcacgttccaacatttgggtggcaggggatgccgcgtgtttttacgacattaaactcggtcgaagaagggtggaacaccatgatcacgcagtcgtctccggtcgcctggccggtgaaaacatgactggcgctgctaagccctactggcatcagtcgatgttttggtcagatctggggccagatgtcggttatgaagcaattggtcttgtggactcctcactccccacggtaggggtgtttgcaaaggcaaccgcccaagataaccccaaatcggcgaccgagcaatcgggaaccggaataagatcggagtcagaaactgaatctgaagcaagcgagattaccattcctcctagcacgccggctgtccctcaggccccagttcagggcgaagattacggtaaaggtgtgatattctacttgcgggacaaggtagtcgtgggaatcgtgttgtggaacattttcaatcggatgcctattgcaagaaagatcattaaagatggcgaacagcatgaggaccttaacgaggtggccaagctgttcaacatccatgaggac

SEQ ID NO: 32111 - DNA, 783 bp, synthetic construct
  misc_feature 1..783: note = Description of Artificial Sequence: Synthetic coding sequence
  source 1..783: mol_type = other DNA
atggaaaaggtccggagagagggtgtgaaggtcatgcccaacgctatcgtgcagtcagtgggcgtctccagcggaaagctcctcatcaagctgaaggatggcagaaaggtggaaaccgatcacatcgtcgctgcggtcggtctggagccgaacgtggaactggccaaaactggggggttggaaatcgactccgactttggaggattcagggtcaacgctgagttgcaggcgagaagcaacatctgggtggccggagatgcggcatgcttctacgacatcaagctgggccggcgccgggtggagcaccatgaccatgccgtcgtctccggtcgcctcgccggagaaaacatgactggcgccgccaaaccttactggcatcagagcatgttctggtctgacctgggaccggacgtgggatacgaggctatcgggctggtggattcgtcactgcctaccgtcggtgtgttcgcgaaagccactgcgcaagacaatccgaagtcagctaccgagcaatccggcactggcatccgaagcgaatccgagactgaatccgaggcgtcagaaattactatcccgccgtcaactccggccgtgccgcaggcgccagtccagggggaggattacggaaagggagtcatcttctacctgagagacaaagtcgtggtggggatcgtcttgtggaacatcttcaaccggatgcctattgcgaggaagatcatcaaggacggcgaacagcacgaggatctgaacgaagtggcgaaacttttcaacatccacgaggac

SEQ ID NO: 32112 - DNA, 783 bp, synthetic construct
  misc_feature 1..783: note = Description of Artificial Sequence: Synthetic coding sequence
  source 1..783: mol_type = other DNA
atggagaaggtacgtagagaaggagtgaaggtgatgccaaacgcaatcgttcaatccgtaggggtgagttcggggaaactgttgatcaagttgaaagatggccgcaaggtcgagacagatcatatagtcgcggccgtgggcctggagcctaacgtggaactggcgaagacagggggattggaaattgattctgattttggcggtttccgagttaatgccgaactgcaggcccggtctaatatctgggtggccggggacgcagcctgcttctacgacattaaattaggacggaggagggtggagcaccacgatcacgccgtggtctccggcaggttggcgggcgaaaacatgaccggagctgccaagccatattggcaccaaagcatgttttggagcgacttaggacccgatgtgggctacgaggccatcggcttagtggactctagtctgccgacagtgggggtttttgcaaaagcgacagctcaggataacccaaagtccgcgacggaacaatccggcaccgggattaggtctgaaagtgaaactgagagtgaagctagcgaaattacaatacccccctcgacacccgcagttccccaggcacccgtacaaggggaagattatggcaagggggtcatcttctacctgcgcgataaagtggtcgtagggatcgtactgtggaacatcttcaataggatgcccatagcgcggaaaatcatcaaagacggcgaacagcacgaggatctgaacgaagtggccaaactctttaacatccacgaagat

SEQ ID NO: 32113 - DNA, 783 bp, synthetic construct
  misc_feature 1..783: note = Description of Artificial Sequence: Synthetic coding sequence
  source 1..783: mol_type = other DNA
atggaaaaggttcgccgggagggcgtgaaagtgatgcctaacgcgatcgtccagtccgtgggagtatcgtcggggaaactgctcatcaaattgaaggatggacgcaaggtggaaactgaccatatcgtggcagctgttggcctggagcccaacgtcgagctggcaaagacgggagggctggaaattgactcagacttcggaggtttccgcgtcaatgccgaattgcaggctaggtcgaatatctgggtggccggcgatgctgcgtgcttctacgatatcaagctgggacgccggcgtgtggaacaccacgaccatgccgtcgtctcgggtcgtctggctggagaaaacatgactggagccgccaagccgtactggcatcagtcaatgttttggtcggacctgggtccggatgtggggtacgaagcaatcggactggtggactccagcctcccgactgtgggagtctttgccaaggcaaccgcgcaagacaacccgaagtccgcaaccgaacaatccggcactggaatccgcagtgagtcggagactgaaagcgaagcctccgaaattactattccaccatcgactccagccgtgccacaagcaccggtgcagggggaggactatgggaagggggtgatcttctacttgcgggacaaagtggtcgtcggaatcgtcctgtggaatatcttcaatcgcatgcctatagcgaggaaaatcatcaaggatggagaacaacacgaagatctcaatgaagtggccaagctcttcaacatccatgaggac

SEQ ID NO: 32114 - DNA, 783 bp, synthetic construct
  misc_feature 1..783: note = Description of Artificial Sequence: Synthetic coding sequence
  source 1..783: mol_type = other DNA
atggaaaaagtgaggcgggaaggcgtcaaagttatgccaaatgctatagtccagtccgtaggcgtgagcagcggcaaacttctgataaaacttaaagatggccggaaggtagagaccgatcacatagttgctgccgtgggcctggagcctaatgtagagctggccaagaccgggggcctggaaatcgatagcgatttcggcgggttcagggtgaatgctgagttgcaggcccgaagtaatatctgggtggccggcgacgcagcctgtttttacgatattaagctgggccgtcggcgggtagagcaccatgatcatgccgtggtgagcggtagactagccggcgagaacatgaccggcgctgcaaagccctactggcatcagtcaatgttttggtctgatctcggacctgacgtgggctatgaggccatcggcctggtggactctagcctgcccacagtgggagtgtttgctaaggcaaccgctcaagacaatcctaaaagcgccacagagcagagtggcaccggcatacgaagcgagagtgagacagagtccgaagcctctgagatcactattcctccttctaccccagcagtccctcaggcccctgtccagggtgaagactacggaaaaggcgttatattctacctgagggacaaagtggtcgtaggaatagttctgtggaatatattcaacagaatgcctatcgcaaggaagatcataaaagacggcgaacaacatgaggatctgaatgaggtcgccaagctgtttaatatacatgaagac

SEQ ID NO: 32115 - DNA, 783 bp, synthetic construct
  misc_feature 1..783: note = Description of Artificial Sequence: Synthetic coding sequence
  source 1..783: mol_type = other DNA
atggagaaggtgcgacgagaaggggtgaaggtcatgccgaacgccattgtgcaatccgtcggagtatcctccggcaagctgttaatcaagctgaaggacggccgaaaagttgaaacggaccacattgtcgcagcagtgggattagagcctaatgtcgagcttgccaaaacagggggtctggagatcgactctgatttcggtggattccgggtaaacgcagagctgcaggcccgaagcaacatctgggtcgctggggatgccgcctgcttttacgacataaaactgggtcgtcggagagttgagcatcacgaccacgctgttgtgagcggtcgcctcgcaggcgagaatatgaccggcgccgctaagccttactggcaccagtctatgttctggtccgatttgggtccagacgtcggttatgaggctatcggattagtcgatagctccctgcctaccgtaggcgtgtttgctaaggcgaccgcccaagacaacccaaagagcgccacggagcaatctggcacagggattcggtccgaaagtgaaaccgagtccgaggcgtccgagattactattcctccctcaaccccggctgtcccacaggccccagtccagggcgaggattatggtaaaggcgtaatcttctacctgagggacaaggttgtggtcggtatagtcctttggaacatctttaacagaatgccaatcgccaggaagatcattaaggatggcgagcagcatgaagatctaaacgaggttgccaagcttttcaacattcacgaagac

SEQ ID NO: 32116 - DNA, 783 bp, synthetic construct
  misc_feature 1..783: note = Description of Artificial Sequence: Synthetic coding sequence
  source 1..783: mol_type = other DNA
atggaaaaagttcgccgcgagggggtgaaagtgatgcctaacgccattgtacagagcgtcggcgtttctagcggaaaacttctgattaagctgaaggacggacgtaaggtcgagacagaccatatcgtcgcggcagtgggcctcgaacccaacgtggagctcgcaaagacggggggccttgaaattgacagcgatttcgggggctttcgcgtaaacgctgaattgcaggctaggtccaatatctgggttgcaggagatgcggcttgtttctatgacatcaaattgggccggagacgggtagagcaccacgaccatgcggttgtgtctggccggcttgctggggaaaacatgacaggggccgccaagccctactggcaccagtcgatgttttggtctgacctaggccccgatgtgggatatgaggcaattggactggtagacagttctctgcccaccgttggagtctttgcgaaggcaactgcacaggataatcctaaatcagccactgagcagagcggcaccggtattaggtctgaaagtgaaactgagtctgaggcctctgaaattactattcctccctctactcccgccgtccctcaggcacccgtgcagggagaagactatggaaaaggcgtaatattctatctaagggataaggttgttgtgggcattgtgctctggaacatctttaatagaatgcctatagctcggaaaattataaaagatggcgaacagcatgaggacttgaacgaggtcgccaagctgttcaatatccacgaagat

SEQ ID NO: 32117 - DNA, 783 bp, synthetic construct
  misc_feature 1..783: note = Description of Artificial Sequence: Synthetic coding sequence
  source 1..783: mol_type = other DNA
atggagaaagtccggcgagagggagtgaaggtgatgcccaacgcaatcgtgcaatcggtcggggtttccagtgggaaactgttaattaaactcaaggatggccgaaaggtggagaccgaccacattgtggctgcggtgggcctcgagcctaacgtggaactcgctaagactggcggcttagagatcgatagcgatttcggaggattccgtgttaatgctgaactccaagcccggtccaatatttgggttgctggagacgccgcctgtttctacgacatcaagctcggaaggagacgggtggagcaccatgaccatgccgtggtttctggacgacttgccggggagaatatgacgggagccgctaaaccatattggcaccagtccatgttttggtctgacctgggcccagacgtcggatacgaggcaattgggctagtggactcatctctgcctactgtcggcgttttcgcgaaggcaaccgcacaggataaccccaagtccgccactgagcagagtgggacgggaatccgaagtgaatcggaaaccgagtcagaagcctccgagatcacaattcccccatctaccccagccgtgccacaggctccggtgcagggggaggactacgggaaaggagtcatcttctacctgagggacaaggtcgtcgtcggtattgtcctatggaacattttcaaccgaatgcctatcgcacgaaagatcataaaggatggtgaacagcacgaggatctgaacgaagtggcaaagctgttcaacatccatgaagat

SEQ ID NO: 32118 - DNA, 783 bp, synthetic construct
  misc_feature 1..783: note = Description of Artificial Sequence: Synthetic coding sequence
  source 1..783: mol_type = other DNA
atggagaaggtccgtcgggagggtgtcaaggtgatgccaaacgctatagtacagagcgtgggggtgtcctccggcaagctgctgattaagctaaaagatgggcggaaagtggaaaccgaccacatcgtagcagccgtggggctggagccaaatgttgagttggccaagaccggcggactggagatcgacagcgatttcggcggcttcagggttaacgccgaacttcaggctaggtcaaatatatgggtagccggcgatgcagcatgcttttatgatattaaattaggacgccgaagagtggagcatcacgaccacgccgtggtgagtggccgccttgccggggagaacatgacgggagcagcgaagccctactggcaccagtccatgttttggagcgacttgggccccgatgttggttacgaggccattggcctggttgactctagtctaccaaccgtgggggtctttgctaaggccacggcgcaggacaaccccaaatcagcaacggagcagtccggcacgggaataagaagcgaatccgagactgaaagcgaggcttcagaaattaccatcccaccctccacacccgctgtgccccaagcccctgtgcagggggaagactacggcaagggcgtgatcttctaccttagggataaggtcgtggtgggcatcgtgctgtggaatatttttaatcggatgcccatagcacggaagataattaaggacggtgaacaacacgaggatctcaatgaggtagctaaactttttaatatacacgaagac

SEQ ID NO: 32119 - DNA, 783 bp, synthetic construct
  misc_feature 1..783: note = Description of Artificial Sequence: Synthetic coding sequence
  source 1..783: mol_type = other DNA
atggaaaaagttagaagggaaggcgtgaaggtgatgccaaatgcaattgtccaatccgtgggagtgtcatcgggcaaacttcttatcaaactgaaggatggtcggaaagttgaaactgatcatatagtggcagccgtcgggcttgaacccaacgtcgaactggcgaaaaccgggggcctcgagattgactcggatttcggtggatttagagtgaacgcagaactccaggcacggtctaatatctgggtggccggcgatgcagcctgtttttacgacattaagttgggaaggcggcgcgtggagcaccatgaccacgcagtggtgtcgggccggcttgctggtgaaaacatgaccggggcagcaaagccttactggcaccagtcaatgttttggtcggatctcggccctgatgtgggatatgaggcaattggactggttgatagcagcctgccaaccgtgggggtgtttgcaaaggcaactgcacaggacaacccaaaatcagccactgaacaatccggaactgggatcaggtccgagagcgaaacggagagcgaggcatcggagatcaccatacctccttccaccccagcagtcccacaagcccccgtgcaaggggaggactacggaaaaggggtgatattctatctgagagacaaagtggtggtgggaattgtgctctggaacattttcaatagaatgccgatagcacgcaagatcataaaagatggagaacaacacgaggatctcaatgaagtggcaaagctgtttaacattcatgaagat

SEQ ID NO: 32120 - DNA, 783 bp, synthetic construct
  misc_feature 1..783: note = Description of Artificial Sequence: Synthetic coding sequence
  source 1..783: mol_type = other DNA
atggaaaaggtgagaagggaaggagtgaaagtgatgccaaacgccattgtgcaatctgttggggtctcaagcggtaaactcctgattaaattaaaagatggacgaaaagtcgaaacggaccatatagttgccgcggtgggactagaacccaatgttgaactggccaaaacgggcggactggagatcgactcagattttggcggattcagagtcaatgccgagctgcaagcccgctcgaatatctgggtcgcgggcgacgccgcctgtttctatgacattaagctcgggcgccggagggtcgaacaccatgaccatgccgtggtctccgggcggctcgccggcgaaaacatgaccggcgctgctaaaccttactggcaccagtccatgttctggtcagacttaggtcccgatgtggggtatgaggcaattgggcttgtggatagtagcctgccgacagtaggcgtgttcgcaaaggccactgcacaagacaaccccaaaagtgctaccgagcaatctgggactggcattcggtctgagtcagagacggagtctgaagcctccgagattacaattcctcctagcacacctgctgtcccgcaggctcccgtgcagggtgaggattatggcaaaggggtaattttctatctacgagacaaagttgtggtgggcattgtgctctggaacatttttaacagaatgcccattgccagaaagattatcaaggatggcgagcagcacgaggaccttaacgaggtggcgaaactgttcaatatccatgaagac

SEQ ID NO: 32121 - DNA, 783 bp, synthetic construct
  misc_feature 1..783: note = Description of Artificial Sequence: Synthetic coding sequence
  source 1..783: mol_type = other DNA
atggagaaggtgcggcgagaaggcgtcaaagtgatgcctaatgccatagttcagagtgtcggagtgagttcaggcaagctgctgatcaagcttaaagatgggcggaaggtggagaccgaccacatagtggctgccgtgggacttgaacccaatgttgagctggcgaagactggaggcttagaaattgactccgatttcggtgggttcagagtgaatgcggagctgcaagcccgctccaacatctgggtagcaggggacgcggcctgcttttacgatattaagcttggtcgacggcgggtggaacatcatgatcacgctgtggttagtggccggctggcgggggaaaatatgaccggcgccgccaaaccttactggcaccagagcatgttctggtcggacctggggcctgatgtcgggtacgaagctatcggcctcgtggacagttctttacccacagtgggagtgttcgcaaaggcgacggcgcaagacaatcctaagtccgccacggagcagagcgggacggggattaggtcagagtctgaaaccgaatcggaggcttccgaaattacgatcccgccctcgacacccgccgtgccacaggcaccagttcagggagaggactacggcaagggcgtgatcttttatttacgcgataaggtggttgtgggtattgtcctgtggaatatttttaatcggatgcccatcgcaaggaaaattattaaggacggcgaacagcacgaggatttgaatgaggtggccaaactcttcaacatacacgaggat

SEQ ID NO: 32122 - DNA, 783 bp, synthetic construct
  misc_feature 1..783: note = Description of Artificial Sequence: Synthetic coding sequence
  source 1..783: mol_type = other DNA
atggagaaggtcagacgggagggcgtgaaggtaatgcctaacgcaatcgtgcagtctgtgggagtttccagcggcaaactgcttatcaaactgaaggacggcaggaaggtggagaccgaccacatcgtggcggcagtgggcctggagcctaacgtagagctggccaagaccggcggcctggagattgactctgatttcggggggtttcgcgtcaacgcagaactgcaggcccggagtaacatctgggtggcaggtgacgctgcgtgtttttatgatattaagctgggccgtcgacgggtggagcaccacgatcacgcagttgtgtcgggcaggctggctggcgagaatatgaccggcgccgcaaaaccttattggcaccaatcaatgttttggtctgatttgggcccagatgtgggctacgaggccattgggctggtagatagttctttacccacggttggagttttcgccaaggcgaccgctcaggataatcccaagtcggcaaccgagcaatcagggaccggaattcgctccgagagcgagaccgagagcgaggcttctgaaattaccatcccgccttctacgcccgctgtccctcaagcacctgtccagggcgaagactatgggaaaggagtgattttctatttgcgggataaagtggtggtggggatagtcctttggaacatatttaaccggatgcccattgctcggaagatcatcaaagatggcgagcagcacgaagatctgaacgaggtggctaaactgttcaatattcacgaggac

SEQ ID NO: 32123 - DNA, 783 bp, synthetic construct
  misc_feature 1..783: note = Description of Artificial Sequence: Synthetic coding sequence
  source 1..783: mol_type = other DNA
atggagaaggtgcggcgcgagggcgtaaaggttatgcccaatgctatcgtacagtccgtgggcgtctcaagcgggaagctcttgattaagctgaaagacggaagaaaggtcgagacggaccatatcgtggccgcggttgggttggaacccaatgtagaactggccaaaactggcggattggaaatcgatagtgatttcggcggctttcgggtaaacgcagaactgcaggcccgcagcaatatttgggttgccggagatgccgcctgtttctatgatattaagctgggccgccgccgggtagagcatcacgatcatgccgtagttagtggcaggctggcaggcgaaaatatgactggagcagcaaagccctactggcaccagagcatgttttggtcagacctgggacctgacgttggctacgaggcaatagggctggtggactctagcctgcctacagtcggtgtgttcgcaaaagctaccgcacaggacaacccaaagtccgcaacggaacagagcgggaccggtattcggtccgagtcagagacagaaagcgaggcgagcgagatcacgatcccaccttctactcctgccgtcccacaggctccagttcagggagaggattatgggaagggcgttatattctacttgagagacaaagtggtggtgggaattgtgttgtggaacatctttaatagaatgcccattgccagaaagataatcaaggatggagagcagcatgaggacctgaatgaggtggctaagctctttaatatccacgaagac

SEQ ID NO: 32124 - DNA, 783 bp, synthetic construct
  misc_feature 1..783: note = Description of Artificial Sequence: Synthetic coding sequence
  source 1..783: mol_type = other DNA
atggaaaaggtgaggcgggaaggagtgaaggtcatgcctaatgctatagtgcagtcagtgggtgtctcgtccggaaaacttctgattaagctgaaagacggccgaaaggtggaaaccgaccacatagtggccgcggtggggctcgaaccgaacgttgaactggcaaagactggtggattggagattgactcagatttcgggggatttagagtgaacgccgaactgcaagcacggtcaaacatttgggtggcaggagatgctgcatgtttttacgacatcaagctcggtcgtcgccgagtcgaacatcatgatcatgcagtggtttcgggccgtcttgcgggagaaaacatgaccggcgcagctaagccttactggcatcaatccatgttctggtctgatctcggaccagatgtcgggtatgaggcaattggccttgttgatagcagcctccctactgtcggagtgtttgcaaaggcaaccgcccaggacaatccaaagtcagctactgaacagagcggaaccggaatccgctcagagagcgaaacggaatccgaagcctcggagataactatcccacccagcacccctgcagtgccacaagcaccagtgcaaggggaggattacggtaagggcgttatcttctaccttcgagataaagtggtggtcggtattgttctgtggaacatctttaatcggatgcctatcgcacgcaagatcattaaagatggagagcaacatgaggacctcaacgaggtggcaaaattgtttaacatacacgaagat

SEQ ID NO: 32125 - DNA, 783 bp, synthetic construct
  misc_feature 1..783: note = Description of Artificial Sequence: Synthetic coding sequence
  source 1..783: mol_type = other DNA
atggaaaaggtcagacgggaaggggttaaagtgatgcccaatgcaatcgtgcaatcagtgggagtgagctcaggaaaactcctgattaagctcaaagatggacggaaggtcgaaactgatcatatagtcgcagcggtgggacttgagccaaatgtggaacttgccaagaccggaggacttgagatagactccgatttcggcggttttcgggtcaacgccgaactccaggctcggtccaatatctgggtcgcgggagatgcagcatgcttttacgacattaagctgggtcgacggcgcgtcgagcatcacgatcatgcagtcgtgtcaggacgactggcaggagagaatatgactggcgcagcaaagccatattggcaccaaagcatgttttggtcagatcttgggcccgacgtggggtacgaagcgattggactggtggactcgtccttgccaactgtcggggtctttgctaaagccaccgcacaagacaatcctaagagcgcaaccgaacaaagcggaaccggtattcgttccgaatcagagactgaaagcgaggcgtctgaaatcactatacccccttcgacccctgcggtccctcaagctccagtgcagggagaagattacggcaagggagtgatcttttacctgagggataaggtggtggtgggaatcgtgctgtggaatatctttaaccggatgcctattgccagaaagatcattaaggatggggaacaacatgaggatctgaatgaagtcgcaaagctcttcaacatccatgaggac

SEQ ID NO: 32126 - DNA, 783 bp, synthetic construct
  misc_feature 1..783: note = Description of Artificial Sequence: Synthetic coding sequence
  source 1..783: mol_type = other DNA
atggaaaaggtgagaagagaaggtgtcaaggtgatgccgaacgcgatcgtgcagtcggtgggcgtttcgtcggggaagttgctgatcaaactgaaggatggccgcaaagtggagactgatcacatcgtggccgctgtcggactcgaacctaacgtcgaactggcaaagaccggagggctggaaatcgactccgacttcggcgggtttagggtcaacgccgagttgcaggcgcgctcaaacatctgggtggccggagacgcggcctgcttctacgacattaaacttggtagacgcagagtggaacatcacgaccacgctgtggtttctggacggttggccggtgagaatatgactggagccgctaagccgtactggcatcaatccatgttctggtccgacctgggccccgacgtcggatacgaagccatcgggctcgtggatagcagccttcctactgtgggtgtgtttgccaaagccactgcacaggacaacccaaagtcggccaccgaacaatcgggcaccggcattcgctcggagtcagagactgaatcagaagcgtcggagatcacgatccctccctcgacccctgctgtgccacaagctccagtgcaaggggaggactacggtaagggagtgatcttctacctccgcgacaaggtggtggtgggaattgtcctctggaacatcttcaatcggatgccgatcgcccgaaagatcatcaaggacggcgaacaacatgaggatctcaacgaagtggccaagttgttcaatattcacgaggat

SEQ ID NO: 32127 - DNA, 783 bp, synthetic construct
  misc_feature 1..783: note = Description of Artificial Sequence: Synthetic coding sequence
  source 1..783: mol_type = other DNA
atggagaaagtgcggcgcgagggcgtcaaggtcatgcccaacgcgatcgtccaaagcgttggagtctcctcgggaaagctgctgatcaagctcaaagatggccgaaaggtggaaaccgatcacatagtcgcagccgtgggactcgagccgaacgtagagctggcgaaaactggcggcctcgaaatcgactcggacttcggaggcttcagagtgaacgccgagttgcaagcccggtcaaatatctgggtcgccggagatgcagcgtgtttttacgatatcaaactgggccgacgcagagtcgagcaccatgaccatgcggtggttagcggccggctcgcgggagaaaacatgactggagcagctaagccgtactggcaccagtcaatgttctggtccgatctgggtccggacgtggggtatgaggcgattggactcgttgattcctccctcccaacggtcggagtgtttgccaaggcgaccgctcaggataatcctaaatccgcgactgaacaatcgggcaccgggatccggtcagaaagcgagactgaatccgaggccagcgaaatcaccatccctccctcaaccccagccgtcccgcaggcgccggtccaaggagaggactacggaaagggcgtgatcttctacctgagagacaaggtggtcgtggggatcgtcctctggaatatcttcaaccgcatgccgatcgcccgcaagatcatcaaggacggagaacaacatgaagatctgaacgaagtggctaaactgtttaacatccacgaagat

SEQ ID NO: 32128 - DNA, 783 bp, synthetic construct
  misc_feature 1..783: note = Description of Artificial Sequence: Synthetic coding sequence
  source 1..783: mol_type = other DNA
atggagaaagtgcgaagggaaggagttaaagttatgcccaacgccatcgtgcagtcagtcggggtgtcaagtggtaaactgcttatcaaactcaaggatggacgcaaggtcgagactgatcatattgtcgctgcagtcgggctcgagcctaacgtggagctggctaaaacaggaggtctggagatagacagcgacttcggaggctttcgggtaaatgctgagctgcaagcaaggagcaacatatgggtggcgggcgacgcagcctgcttctacgatatcaaactcggtaggagacgagtggagcaccatgaccatgcagtggtgtctggacgcttggctggcgagaacatgactggtgccgccaagccctattggcaccaatccatgttttggtcagatctgggacctgacgtaggctatgaagcaattgggctggtggattccagtctcccaacagtcggcgtcttcgctaaggcgaccgctcaagacaaccctaaatctgcaactgagcaatccggaacagggatacggagcgaatccgagacggagagtgaggccagtgaaataacaattcctccatccaccccagcggtgccacaagctcccgtgcagggggaggactacggtaagggggtaatcttttacctcagagataaggtggtagttgggatagtgttgtggaatatcttcaatcgcatgccaatagcaagaaaaattataaaggatggggaacagcacgaagatctgaacgaagttgctaagctgttcaacattcatgaggat

SEQ ID NO: 32129 - DNA, 783 bp, synthetic construct
  misc_feature 1..783: note = Description of Artificial Sequence: Synthetic coding sequence
  source 1..783: mol_type = other DNA
atggagaaagttcgccgagaaggtgtgaaagtgatgccaaatgctattgtccagtctgttggggtctcatccggaaaactgctgatcaaactgaaggacggacgaaaggtggaaacagatcatattgtggccgctgtaggcttagagccaaatgtcgaactagccaagaccggcggacttgagattgattccgacttcggaggattccgcgttaatgcagagcttcaggccagaagcaacatatgggtggccggagatgcagcctgcttctacgacatcaagctgggccgccggcgcgtcgagcaccacgatcacgcggtggtgagcggtcgcttggcaggggaaaacatgaccggtgccgcgaagccctattggcaccaatccatgttttggtctgatctgggaccagacgtcggctacgaagccataggtctggtggactcatctctccctactgtcggagtatttgccaaggcgaccgcccaagataaccccaaatctgcaactgaacaatctggaacaggtatccggagtgagtcggagaccgaatctgaggcgagcgagatcacaatcccaccttccactcccgccgtgccccaggctcctgtgcagggggaggactatgggaagggcgtgatcttctacttgcgtgacaaagtggtggtcggtatcgtgttgtggaatattttcaacaggatgcccattgcccgaaaaatcataaaggacggagagcagcacgaagatttaaacgaagttgctaagcttttcaatattcacgaagac

SEQ ID NO: 32130 - DNA, 783 bp, synthetic construct
  misc_feature 1..783: note = Description of Artificial Sequence: Synthetic coding sequence
  source 1..783: mol_type = other DNA
atggaaaaagttagacgtgaaggagttaaagttatgcctaatgcaatagttcaatctgtaggagtttcatctggaaagttacttattaaattaaaagacggtagaaaagtagaaacagatcatattgttgcagcagtaggtcttgagcctaatgttgaacttgcaaaaactggaggattagagatagattctgatttcggtggattccgtgttaatgctgaacttcaagcaagatctaatatttgggttgcaggagatgctgcatgcttttatgacattaaattaggaagaagaagagtagaacatcatgatcatgcagttgtatcaggtagattagcaggtgaaaatatgacaggagcagctaagccttattggcatcaatcaatgttctggagtgatcttggaccagatgttggatatgaagcaattggtcttgttgactcaagtcttccaactgtcggagtttttgctaaagcaactgcacaagataatcctaagtcagcaactgagcaatctggaacaggaattagatcagagagtgaaacagaaagtgaagcatcagaaattactattccaccttcaacaccagcagttcctcaagctccagtacaaggtgaagattacggtaaaggagttattttttatttaagagataaagtagttgttggtatcgttctttggaatatctttaatagaatgccaatcgcaagaaaaattataaaagatggagaacaacatgaagatttaaatgaagtagcaaaattgtttaacattcatgaagat

SEQ ID NO: 32131 - DNA, 783 bp, synthetic construct
  misc_feature 1..783: note = Description of Artificial Sequence: Synthetic coding sequence
  source 1..783: mol_type = other DNA
atggaaaaagtcaggagggagggcgttaaggtgatgccaaatgcgatcgtccagtcagttggggtgtcctcgggaaagctgctgataaagctgaaggatggtcgtaaagtcgagacggatcacatcgtggcagccgtaggattggaaccaaacgtagagttggcaaaaaccggcgggcttgagatcgattccgacttcgggggatttcgcgtcaacgccgaattgcaggcaaggtccaatatctgggttgcaggcgacgccgcatgtttctatgacatcaaactaggtaggcggagggtggagcaccatgatcatgcggttgtttcaggacggctagcaggtgagaatatgactggtgcagccaaaccttactggcatcagtcaatgttctggtccgacctgggtcctgatgttgggtacgaagctatcggcctcgtagatagctcactgcccacagtgggagttttcgccaaggccactgcacaggacaaccccaagagcgccactgagcaaagcggcacggggatcaggagcgaaagtgagacggaatccgaagcttcagaaatcaccatccctccttcgactcccgccgtccctcaggcccctgttcagggggaagactatggaaaaggcgttatattttatcttcgggataaggtcgtcgtcggcatcgtgctttggaatatattcaacaggatgcccatcgccaggaaaataatcaaagatggggagcaacacgaagatctgaacgaagttgcgaaactattcaacattcatgaggac

SEQ ID NO: 32132 - DNA, 783 bp, synthetic construct
  misc_feature 1..783: note = Description of Artificial Sequence: Synthetic coding sequence
  source 1..783: mol_type = other DNA
atggaaaaagtccggagagagggcgtgaaagtgatgcctaatgcaattgtgcaatccgtgggagtgtcttccgggaaactgttgatcaagctaaaggatggaaggaaggtggaaaccgaccatatcgttgccgccgtgggactagaaccgaacgtggagctcgccaagacaggcggcctggagatcgattccgactttgggggattccgggttaacgctgagctgcaggcacggagcaatatctgggtggccggcgacgctgcctgtttctatgatatcaaattaggtcgcaggagggtggagcaccacgaccatgcggtggtgtcaggtcgacttgctggcgaaaatatgaccggcgccgctaagccatactggcaccagtctatgttttggagtgatctgggccctgatgtgggatatgaagccattgggcttgtggacagctcgctcccaactgtcggggtgttcgctaaggccacggctcaggacaaccctaaaagtgcaactgaacagtctggaacaggaatacgcagtgaatctgaaacagaatcagaggcaagcgagataactattcctccttctactcccgccgtccctcaagcacccgttcagggtgaggactatggaaagggcgtgattttctatcttcgggataaagtggtcgtgggaatcgtgttatggaacattttcaatcgcatgcctattgcacgcaagattataaaggacggcgagcaacacgaggacctcaacgaggtggcaaagcttttcaatatccacgaagat

SEQ ID NO: 32133 - DNA, 783 bp, synthetic construct
  misc_feature 1..783: note = Description of Artificial Sequence: Synthetic coding sequence
  source 1..783: mol_type = other DNA
atggaaaaggtgaggcgggaaggtgtgaaagtgatgccgaacgcgattgtgcagtccgtgggcgtttcgtcgggcaagctgctgatcaaactcaaagacggtaggaaagtggaaactgaccacatagtggccgcagtgggtctggaacctaacgtcgaactggccaagaccggtggactggagatcgatagcgacttcgggggattccgagttaatgccgagcttcaggctcggtccaacatttgggtggccggagacgctgcctgcttctacgatatcaagttgggaagaaggcgcgtggagcaccatgaccacgcggtggtatcaggcagattggccggggagaacatgaccggagcggcgaaaccgtactggcatcagtcgatgttctggtccgacctcggaccagatgtaggatacgaggctatcggcctcgtcgactcgtctctcccgactgtcggggtctttgccaaggcaaccgcacaagacaatcccaagtccgctaccgagcaaagcggaacgggtatccggagcgaatcagagacggaaagcgaagcatcagaaatcactattcctccatccactccggcagtcccacaggctccggtgcagggtgaggactatggaaagggggtaatcttctacctcagagataaggtcgtggtgggaatcgtcctgtggaacatctttaaccgtatgcccattgctcgtaaaatcatcaaggatggcgagcaacatgaagatctgaatgaagtggccaagctgttcaatatccacgaagat

SEQ ID NO: 32134 - DNA, 783 bp, synthetic construct
  misc_feature 1..783: note = Description of Artificial Sequence: Synthetic coding sequence
  source 1..783: mol_type = other DNA
atggagaaggtcagaagggagggagtcaaggtaatgcctaacgccattgtgcaatccgtgggggttagcagcggaaagcttctgatcaaactgaaggatggtaggaaggtagagaccgaccacatagttgctgcagttggcttggagccaaacgtggagttagccaagacggggggcctcgaaatcgatagtgattttggcggtttccgggtcaacgccgagctccaagctcgaagtaatatctgggtcgcaggcgatgccgcatgtttctatgatattaaacttggccgccggagggtagagcatcatgatcacgctgtcgtaagcggtcgcttggcgggggaaaacatgacaggggctgctaagccctactggcaccaatctatgttttggagtgacctcggcccagacgtgggatacgaggctatcgggcttgttgatagtagccttcccaccgtgggggtcttcgcgaaagcgacagcccaggataaccccaagtcagctactgagcagtccggcacaggcattcggagcgagtccgagacagagagcgaggccagcgagatcaccattcctccctctacccctgctgtccctcaagctccggtgcagggtgaagactacggtaagggagttatcttttacctcagagataaagtcgttgtcggcatcgtcctctggaacatctttaatcggatgccgatcgctaggaagatcatcaaggatggggagcaacatgaggacctgaacgaggtggccaaactctttaacatacacgaagat

SEQ ID NO: 32135 - DNA, 783 bp, synthetic construct
  misc_feature 1..783: note = Description of Artificial Sequence: Synthetic coding sequence
  source 1..783: mol_type = other DNA
atggagaaggtgcgccgggaaggcgtcaaggtcatgcctaatgcgatcgtgcagtccgtcggagtgtcgtccggaaagctgttgatcaagctgaaggacggcagaaaggtggagactgaccacatcgtggccgccgtgggcctggaaccgaacgtggaactcgctaagacgggaggcctggagatcgacagcgacttcggcggatttcgggtgaacgcggagcttcaggcacgttctaatatctgggtggccggtgatgccgcctgcttctacgacattaagctcgggaggcggagagtggaacaccacgatcacgcggtggtgtcaggacgcctcgctggggaaaacatgactggcgcggccaagccgtactggcaccaatccatgttttggtccgatctcggtccagatgtgggctacgaagcgattggtctggtggacagcagccttccgaccgtcggcgtctttgccaaagccactgcgcaagacaatcctaagagcgccactgaacagtcgggaacgggaattagatcggaatcagagactgaatcggaagcctctgaaatcaccatcccgccctcaactccagcagtgccgcaggcgcctgtccagggcgaggactacggaaagggcgtcatcttctatctgcgggataaagtggtggttgggatcgtgctgtggaacatcttcaataggatgccaatcgcgcggaaaatcattaaggatggagaacaacacgaggaccttaatgaggtcgccaaactgttcaacattcacgaggac

SEQ ID NO: 32136 - DNA, 783 bp, synthetic construct
  misc_feature 1..783: note = Description of Artificial Sequence: Synthetic coding sequence
  source 1..783: mol_type = other DNA
atggaaaaagtgcgccgtgaaggcgtgaaagtgatgccgaacgctattgtgcagtcagttggcgtaagttcgggaaagcttctgatcaaactgaaggacggccgcaaggttgaaacggatcacattgtagcggctgtcgggcttgaaccgaatgtagaattagccaagacaggcggcctggaaattgactctgactttggggggtttcgagtcaacgcggagctccaggcaagatcaaatatttgggtagcgggggatgccgcatgtttttatgatataaagctcggccggagaagagtggaacatcatgatcacgcagttgtaagcggcaggttggcaggagaaaatatgacgggagcagcgaaaccatattggcatcaaagcatgttctggtctgacctcggtcccgacgtcggttacgaagcaatagggttagtcgattcctctcttcctacagtcggagttttcgcgaaagctacggcacaggacaatccaaaatcagctacagaacaatcgggaacagggattcgatcagaaagtgagacagaatctgaggcttcggagatcacaatccctccttcaactccagcggtcccgcaggccccggtccagggtgaagattatgggaaaggtgtcattttttatctgcgcgataaagtggtcgtgggtatcgtcctatggaatatttttaatcgcatgcctatagcgaggaaaattattaaagatggggaacagcatgaagatcttaatgaggtcgccaaattatttaatattcacgaggat

SEQ ID NO: 32137 - DNA, 783 bp, synthetic construct
  misc_feature 1..783: note = Description of Artificial Sequence: Synthetic coding sequence
  source 1..783: mol_type = other DNA
atggaaaaggtacgccgggagggcgttaaggtcatgccaaatgcaatcgttcaatctgtcggagttagctctggtaagctattaataaagttgaaagatggccgtaaagtggagacggatcatatcgtggccgccgtagggttggagccaaacgttgagcttgcaaaaaccggggggcttgaaatcgattctgattttggaggttttcgtgtgaacgctgagttacaggcgcgctctaacatctgggtcgccggcgacgccgcgtgcttttatgatataaagctcggccggaggcgagttgagcaccatgaccatgcagtcgtctccgggcggctggctggcgagaacatgacaggcgcggcaaaaccgtactggcatcagagcatgttttggtccgaccttggtccagacgtcggttacgaggctatcggactcgtcgattcgagcttaccaacagtcggtgtgttcgcgaaagcaacagcgcaggacaatccgaagtctgcaactgagcagtccggtacgggtattaggtcggagtcagagactgaaagtgaggctagtgagattaccatccctccttcaaccccagccgttccgcaagccccagtgcagggggaagattacggaaagggcgtcattttctatcttcgagataaggtcgttgtcggaatagttctgtggaacatctttaaccggatgcccattgcaagaaaaatcatcaaggatggagaacagcacgaggaccttaatgaggtcgcaaagcttttcaacatccatgaggac

SEQ ID NO: 32138 - DNA, 783 bp, synthetic construct
  misc_feature 1..783: note = Description of Artificial Sequence: Synthetic coding sequence
  source 1..783: mol_type = other DNA
atggaaaaagtgcggcgtgagggtgtcaaggtgatgccaaacgcgatagtccagtcagtcggcgtgtccagcggtaaactgctcataaaactgaaggacggtcggaaggtggaaaccgatcacatcgtcgctgcagtgggacttgagcctaacgttgaacttgcgaaaaccggcgggcttgagattgattcggattttggcggctttcgggtgaacgctgaactgcaagcccgctccaacatttgggtggcaggcgacgccgcatgcttttacgacattaagctcggacggcgcagagtcgagcaccatgaccatgcagtggtcagcgggcgtctcgcaggtgaaaacatgacgggggcagcaaaaccctactggcatcaaagcatgttttggtccgatctcggtcctgatgtcggatacgaagcgattggactcgtggattcgtcgcttcctaccgtcggtgtgtttgcgaaggcaaccgcacaagataacccaaagtcagctaccgagcaatctggaaccggaattagaagcgaatcggaaactgaatcagaggccagcgaaatcactattccgccatctacccccgcagtgcctcaggccccagtgcagggggaggattacggaaaaggagtcatcttttacctgcgcgataaggtggtggtcggaatcgtcctttggaatatctttaacagaatgccaattgcaaggaagatcatcaaggatggagaacaacatgaagatcttaacgaagttgcaaagttgtttaacattcacgaagat

SEQ ID NO: 32139 - DNA, 783 bp, synthetic construct
  misc_feature 1..783: note = Description of Artificial Sequence: Synthetic coding sequence
  source 1..783: mol_type = other DNA
atggaaaaagtgcggcgcgagggagttaaagtgatgcccaatgcgatagtgcagtccgtgggagtgagctcgggtaagctcttgatcaaactcaaggatggtagaaaagtggaaacggaccatatcgtggccgcggtgggcctggagcctaatgttgaactggcgaaaaccggagggctggagattgattcagatttcggagggttccgagtgaacgcggagctgcaggcccggtccaacatttgggtggcaggagacgcggcatgcttctatgacatcaagttgggccgccggcgtgtggagcaccacgaccacgccgtggtgtctgggaggcttgcaggggagaacatgaccggagccgctaaaccatactggcaccagagcatgttctggtcagacctcggcccagatgtgggctacgaagccatcgggttggtggactcctcactccccactgtgggagtgtttgccaaggcgacggcccaggataatccgaaatcggccactgagcaaagcggcaccggtatccggtcggagtccgaaaccgaatcggaagcctctgagatcaccatccctccctcgaccccggcggttccacaagcaccagtccaaggcgaagattacggcaagggagtgatattctacctcagggacaaagtggtcgtcggaatcgtcctgtggaacatcttcaatcgcatgccgatcgccagaaagattatcaaagacggtgaacaacatgaagatcttaatgaagtggctaagctgttcaacattcatgaagat

SEQ ID NO: 32140 - DNA, 783 bp, synthetic construct
  misc_feature 1..783: note = Description of Artificial Sequence: Synthetic coding sequence
  source 1..783: mol_type = other DNA
atggagaaagtccgcagagaaggtgtaaaggttatgccaaacgccattgtccagagcgttggagtcagcagcggcaagctgcttatcaaacttaaggatggtagaaaagtggagaccgatcacatcgtggccgccgtgggcctcgagcctaacgtcgagctggcaaaaactggaggcttggagattgattctgatttcggcggatttcgggtaaacgcggaacttcaggcgcggagcaacatctgggtcgcaggcgatgccgcttgcttttacgacatcaaattagggagacgccgcgttgagcatcatgatcatgcagttgtgtccggtagacttgcgggggaaaacatgactggggcagcgaaaccgtactggcaccagagtatgttctggtctgacctcggccccgatgtggggtacgaggctatcggactggtggactcatcacttccaacagtcggagtgtttgccaaggccaccgctcaagacaacccaaaatccgccactgagcagtctgggaccggcattaggagcgaaagcgaaacagagagcgaggcatccgagatcactatcccaccttctactcctgccgtgccccaggcacctgtgcagggagaagactacggaaagggcgtgatcttttacctgagggacaaagttgtggtgggtatcgtgctttggaacatttttaatagaatgccaatcgcccgtaagatcattaaagatggcgagcagcatgaagacctgaatgaggtagctaagctttttaatatccatgaggac

SEQ ID NO: 32141 - DNA, 783 bp, synthetic construct
  misc_feature 1..783: note = Description of Artificial Sequence: Synthetic coding sequence
  source 1..783: mol_type = other DNA
atggagaaagttagacgtgaaggggtgaaagtgatgcccaacgccatagtgcagtctgtaggggtatctagtggaaaacttctgatcaaactgaaagatgggaggaaagtggagacagatcacatcgtcgccgccgttggactagaacctaacgtagaactagcaaaaacaggaggactggaaatcgattccgattttggaggatttagggtgaacgcggagcttcaggccagatccaatatctgggtcgcaggagacgccgcctgcttctatgatattaaacttgggcgacggagggtagagcatcacgatcatgcagtggtgagtgggcgcctagccggggaaaatatgacaggagctgctaagccatactggcatcagtccatgttctggtccgatctcggacccgatgtggggtacgaagctataggactcgttgattcttcacttccaacagtaggagtctttgctaaggctactgctcaggataacccaaaaagtgctacagaacagtccggaacagggatccggtcagaatcggaaacagaaagtgaagcatctgaaattactataccaccatccactcccgcagtgccccaggcacccgtacagggggaagattatggaaagggggtgatcttctatctcagagataaagtggtcgtaggaatcgttttatggaacatattcaacaggatgcctatagctcgcaagatcataaaagatggggaacagcatgaggatctgaacgaagtggcaaaactgtttaacatccatgaagat

SEQ ID NO: 32142 - DNA, 783 bp, synthetic construct
  misc_feature 1..783: note = Description of Artificial Sequence: Synthetic coding sequence
  source 1..783: mol_type = other DNA
atggagaaggtgcgcagagaaggtgtgaaagtgatgcctaacgcgatcgtgcaatcggtgggtgtttcgagcggcaagctcctcattaaacttaaagatggaaggaaagtcgagacggatcatattgtggccgcagtgggtcttgaaccgaacgtggagttggcaaagactggcggtcttgagatcgattcggacttcgggggatttagagtcaatgcagagctccaggcgcgttcaaacatttgggtggccggggatgcagcatgtttttacgacattaagctcggccggagacgggtggaacatcatgaccatgccgtcgtgagcggacgcctcgcaggtgaaaacatgaccggtgcagcaaagccatactggcaccagtcgatgttctggtccgatctggggcctgacgtcggttacgaggcaatcggactcgtcgattcgtctctccctaccgtcggagtgtttgcaaaagcaactgctcaagacaatccaaagtcggcaactgaacagtccgggaccggcatcaggtccgaatccgaaactgaaagcgaagcaagcgaaattacgattcctccatcaacgccggcggtgcctcaagctccagttcagggggaagattatgggaaaggtgtgattttctacctccgcgataaggtggtggtggggatcgtcctctggaacattttcaacagaatgcctatagcacgcaagatcattaaggatggagaacagcacgaagatctgaacgaggtggccaaattgtttaacatccacgaagat

SEQ ID NO: 32143 - DNA, 783 bp, synthetic construct
  misc_feature 1..783: note = Description of Artificial Sequence: Synthetic coding sequence
  source 1..783: mol_type = other DNA
atggaaaaagtccgcagagaaggtgtcaaagttatgcccaacgcgatagtgcagagcgttggagtctcgagcggcaaactcctgatcaaacttaaggatggcaggaaggttgaaaccgaccatatagtggcagccgtcggactggaacccaatgtggagttggcaaagaccggtggactcgagattgattccgattttggcggatttcgcgtgaacgcggaacttcaagcaagatctaatatctgggtggcaggtgatgcggcatgtttctacgacattaagctcgggagacgtcgggtcgagcatcatgatcatgccgtcgtctcgggtagactggctggcgagaacatgactggcgcagcgaaaccctactggcaccagtcaatgttctggagcgacctgggcccagatgttggctacgaagcaattggactggtggactcctcgcttcctaccgtcggagtgtttgcgaaagccaccgcacaagataatccaaagtcagcaaccgaacaatccggtacgggaataagatccgaatcagaaaccgaatctgaggctagcgagattactattccaccatcgactcctgcagtgccccaggcacccgtgcagggagaagattacgggaagggagtcattttctacttgagagataaggtcgtggtgggcatcgtgctgtggaacatctttaaccgaatgccgattgctcgaaagattatcaaagacggtgaacaacacgaggatctcaacgaagtggcaaagctgtttaacattcatgaagat

SEQ ID NO: 32144 - DNA, 783 bp, synthetic construct
  misc_feature 1..783: note = Description of Artificial Sequence: Synthetic coding sequence
  source 1..783: mol_type = other DNA
atggaaaaggtgagacgggagggcgtgaaggtgatgcctaacgctattgtgcagagcgtgggtgtgagctcgggaaaactgctgatcaaactgaaagacggccgcaaggtggaaactgaccatatcgtggctgcagtgggtctggaacccaacgtggagcttgcaaagactgggggcttggaaatcgactcagatttcggcgggttcagggtgaacgccgagttgcaggccagatcgaatatctgggtggcgggagatgcagcgtgtttctacgacatcaagctcggcagacggcgggtcgagcaccacgaccacgccgtggtttccggaagattggcaggagaaaacatgaccggtgctgcgaaaccatactggcaccagtcgatgttctggtcggatctgggtccggatgttggatacgaagccatcggcctcgtggactcgtccctgccgaccgtgggagtgttcgccaaggcgaccgcccaggacaacccgaagtcagctaccgaacagtccggaaccggaatccgctcagagtccgagacggaaagcgaggcctccgagatcacgatcccaccgtcgactccggccgtgcctcaagccccggtccagggagaggattacggcaagggagtgattttctacctgagggataaagtggttgtgggaatcgtcctctggaacatcttcaacagaatgccgatcgcgaggaagatcatcaaagacggtgaacaacacgaagatctgaacgaagtggctaaacttttcaacatccacgaggac

SEQ ID NO: 32145 - DNA, 783 bp, synthetic construct
  misc_feature 1..783: note = Description of Artificial Sequence: Synthetic coding sequence
  source 1..783: mol_type = other DNA
atggaaaaggttagacgggagggagtgaaggtcatgcctaacgcaatagtgcagtccgtcggagtgagctccggaaaacttctgattaaacttaaggacggaagaaaggtggaaaccgaccatatcgtcgccgcagttgggcttgaacctaacgtggaactggcaaagaccggaggccttgaaattgatagcgattttggtgggtttcgagtgaatgccgagcttcaagctagatcgaacatttgggtggctggtgatgcagcctgtttctacgacataaagctggggcggcgccgagtggagcaccatgaccatgcagtcgtgtccgggagattggcaggcgaaaacatgacgggggcagcaaagccgtactggcaccaaagcatgttctggtcggacctgggccccgatgttggttacgaggcaattggactggtggactcaagcctgcctactgtcggagtgtttgccaaggccaccgcacaagataatcctaagagcgctaccgaacagagcggcaccggaatccgatccgaatcagaaacggaatcagaggcaagcgaaattactattcctccttccaccccggccgtgccacaggcacctgtccagggagaagattacggaaagggagtgatcttttacctcagagataaggtcgtcgtcggtattgtgctctggaacattttcaaccgcatgcccattgcccgaaagatcattaaggacggagagcagcatgaggacttgaacgaggtggcaaaacttttcaatattcacgaagat

SEQ ID NO: 32146 - DNA, 783 bp, synthetic construct
  misc_feature 1..783: note = Description of Artificial Sequence: Synthetic coding sequence
  source 1..783: mol_type = other DNA
atggagaaagttcgccgcgaaggagtgaaagtgatgccaaacgcaatcgtgcaatccgtcggggtcagctcgggaaagctccttatcaagctgaaggacggtcggaaggtcgaaactgatcacatcgtggccgctgtcggactcgaaccaaacgtcgaactggcgaaaactggaggactggagatcgactctgacttcgggggattccgcgtcaacgccgaactccaagctcggagtaatatctgggtcgcaggagatgccgcgtgcttctacgatatcaaactgggaaggcgccgggtggagcaccacgaccatgcggtcgtgtcggggagactggccggtgagaatatgaccggagcggccaagccgtactggcatcagagcatgttctggtcggacctgggtcctgacgtgggctatgaggccattggactggtcgactcgtcacttccgaccgtgggagttttcgctaaggccacggcccaggacaatccgaagtccgcaactgaacagtcaggaaccggtattcggagcgaatcggagactgagtctgaagcctccgagatcaccattccgccaagcacccctgccgtcccacaagcaccggtgcagggagaagattacggaaagggggtgatcttctacctgcgcgacaaggtggtcgtcgggatcgtgctctggaacatattcaatcgcatgcctatagcacggaagattatcaaggacggagagcagcatgaggatctcaacgaagtggccaagctcttcaacattcacgaggac

SEQ ID NO: 32147 - DNA, 783 bp, synthetic construct
  misc_feature 1..783: note = Description of Artificial Sequence: Synthetic coding sequence
  source 1..783: mol_type = other DNA
atggaaaaagtgaggcgagaaggagtgaaggttatgcccaatgccattgtccagtccgtgggggtgtcttccgggaagttgcttatcaaactgaaggatggcaggaaggtcgagactgatcatatcgtggctgcggtggggttagaaccgaacgtcgagctcgcgaaaaccggcggccttgaaattgattccgactttggaggattccgcgttaacgcggagctgcaggccaggtctaacatttgggtcgccggggatgctgcttgtttttacgacatcaaactcggtcgacgcagagtcgagcatcatgaccacgccgtggtgagtggtcgccttgctggagaaaatatgaccggggccgcaaaaccctactggcatcaaagtatgttctggagtgacctaggccctgatgtgggatacgaggctatcggtctggtcgactcttctttacctaccgtcggcgtattcgcaaaggccacggctcaggacaaccccaaatccgccactgagcaatctggcaccgggatacgttccgagtcggaaaccgaaagcgaggcttccgagatcactattcctccatctacccccgccgtgccacaagcaccagtgcagggagaggattacgggaaaggggtgattttttatttgcgagataaggtcgtcgtggggatagtcctgtggaacattttcaatcgcatgcctatcgcccggaaaatcatcaaagacggcgagcagcacgaagatctcaacgaggtggcaaaactcttcaacattcacgaggat

SEQ ID NO: 32148 - DNA, 783 bp, synthetic construct
  misc_feature 1..783: note = Description of Artificial Sequence: Synthetic coding sequence
  source 1..783: mol_type = other DNA
atggaaaaggtcaggcgggagggagtgaaggtgatgcctaatgccattgtgcagtcggtgggagtctcctcgggaaaactcctgattaagctcaaggatggacggaaagtggaaaccgaccatattgtggcggctgtgggacttgagccgaacgtcgagctggccaagactggcggactcgagatcgattcggacttcggaggattcagagtgaatgcagagctgcaagcgagaagcaacatctgggtggctggagatgcggcatgcttctacgacatcaaactcgggcgcaggcgcgtcgaacaccacgaccacgccgtcgtgtcaggaagattggccggggagaacatgactggagcagcaaagccttactggcatcaatcgatgttctggagcgatctgggaccagacgtcggatacgaagcaatcggattggtcgatagctccctgccaacggtgggcgtgtttgccaaggctactgcccaagataatcccaagagcgccactgaacagtcggggaccggaatccggtccgagtcggaaactgagtcagaagcctccgaaatcaccatccctccttccacgccagctgtgccgcaggccccagttcaaggcgaggattacgggaagggggtcatcttttatctcagagacaaagtggtggtgggtatcgtcctctggaacatattcaaccgcatgcctatcgcccggaagatcatcaaggacggagagcaacacgaagatttgaacgaggtggcgaagctgttcaacatccacgaggac

SEQ ID NO: 32149 - DNA, 783 bp, synthetic construct
  misc_feature 1..783: note = Description of Artificial Sequence: Synthetic coding sequence
  source 1..783: mol_type = other DNA
atggagaaggtgcgcagggaaggtgtcaaggtcatgcctaacgcgatcgtccaatccgtgggagtgtcgtcgggaaagctgcttatcaagctgaaagatggaaggaaagtggaaactgaccatattgtggcagcggtggggcttgaaccgaatgtcgaactggcaaaaactgggggtctggaaatcgattcggactttggtggcttcagggtcaatgcagaactgcaagcaagaagcaacatttgggtagcaggagatgctgcctgcttttacgatatcaagctgggacggcgaagagtggaacaccatgatcacgcggtggtgtcggggcggcttgctggtgagaacatgactggggcagctaagccatactggcatcagtcaatgttttggtccgaccttggcccagacgtgggatacgaagctatcggactggtcgactcgtcattgcctactgtgggggtgtttgcaaaggcaacggcacaagataacccaaagtccgcaaccgagcagtcgggtaccggtattagatcggaatcggaaactgagtccgaggcaagcgaaataaccatccccccttccactccagcagtcccgcaggcgccagtccagggcgaagattacggtaagggagtgattttctatcttagggacaaggtcgtggtgggaattgtcctttggaacatattcaatcgtatgccgatcgctagaaagattatcaaggatggagaacaacatgaagatctcaacgaggtggcaaaattgtttaacatacatgaggat

SEQ ID NO: 32150 - DNA, 783 bp, synthetic construct
  misc_feature 1..783: note = Description of Artificial Sequence: Synthetic coding sequence
  source 1..783: mol_type = other DNA
atggaaaaggttcggcgagaaggagttaaggttatgccaaacgcaatagttcagtctgtcggagtttcttccggtaagttattgattaaattgaaagatgggcgaaaagtagagactgatcacattgttgcagctgttggtcttgaaccaaatgtggagcttgctaaaaccggaggcctcgaaattgattcagactttggcggctttcgggtaaacgcagaactgcaagcacgatccaatatttgggttgcaggagacgctgcatgcttttacgatatcaaattaggtaggagaagagtagaacatcatgatcacgccgtggtaagtggtcgccttgctggagagaatatgacaggagctgccaagccatattggcaccaatcgatgttctggagcgatttagggcccgatgtaggttacgaggctatcggtcttgtcgattcttcattgcctactgtaggtgtctttgcaaaagcgaccgcccaagataatcccaagtccgccacagaacaatccgggactggaattagatcggagtcggaaaccgagtcagaggcttcggaaattacaatccctcctagcaccccggcagtcccacaagctccggtgcagggtgaggattatgggaaaggtgtgattttttacttgagagataaggtcgtcgttgggatagtactctggaatattttcaaccgcatgccaattgcacgtaagattatcaaggatggggagcagcatgaagatttgaacgaagtggcaaaattatttaacattcatgaggat

SEQ ID NO: 32151 - DNA, 783 bp, synthetic construct
  misc_feature 1..783: note = Description of Artificial Sequence: Synthetic coding sequence
  source 1..783: mol_type = other DNA
atggagaaggtccggagggaaggtgtaaaggtgatgcctaatgccatcgtgcagagcgttggggtttccagcgggaagcttcttatcaagctcaaggacggtcggaaagttgaaacagatcatatcgtggccgccgtcgggctcgaacccaacgtcgagctcgcgaagacaggaggacttgagattgattcagactttggagggtttcgggtgaacgccgaattacaagcgagaagcaatatttgggtcgccggggatgctgcatgtttttacgatatcaaattaggccgccggcgtgttgaacaccatgaccacgccgtcgtcagcggcagactggctggagagaacatgactggagccgcaaaaccttattggcatcagtctatgttctggagtgatctcggccctgacgttggctatgaagccataggcctcgttgactccagcctgccaactgtgggcgttttcgcgaaggcgaccgcgcaggataatccgaagagtgcgaccgaacagagcggaactggcattcgctccgaatccgaaactgaatcggaggcctcggagattaccatccctccgagtactcctgccgtcccccaggcacctgtgcaaggtgaagattacggtaaaggcgtgatcttttacctcagggacaaggtcgtcgtcggcatcgtactgtggaacatatttaaccgcatgccgattgcaagaaagatcatcaaagacggggagcagcacgaagatttaaatgaagtcgccaaactcttcaacatccatgaggac

SEQ ID NO: 32152 - DNA, 783 bp, synthetic construct
  misc_feature 1..783: note = Description of Artificial Sequence: Synthetic coding sequence
  source 1..783: mol_type = other DNA
atggaaaaggtgcgtagagaaggggttaaggtgatgccaaatgcaattgtccagtccgtcggcgtgtcgtcgggtaaactcttgattaagctgaaagatggacgcaaggtggagactgatcatatcgttgcagccgtgggtcttgagccgaacgtcgagctcgcaaagacgggcggactggagatagattcggacttcggtggctttcgcgtcaatgcagaactgcaagcacgaagcaacatttgggtcgcaggcgacgcagcgtgtttttacgacattaaactgggcagacgccgtgtggaacaccacgatcatgctgtggtatctggtcgcctggctggagaaaacatgaccggtgccgcaaaaccttactggcaccaaagcatgttttggtcggatctcggtcctgatgtgggatacgaagcgatcgggttggtggactcgtcactgccgactgttggtgtgtttgccaaggccactgctcaggataatcccaagagcgcaactgagcaatctgggactggaataaggtccgaaagcgaaactgaaagcgaagcatccgaaataacgattcccccctccacccctgccgtgccacaggccccagtgcagggcgaagattacgggaagggagtgatattctacctgagggataaggtggtcgtcggtatcgtgctttggaacatcttcaatagaatgccaatcgcccgcaaaatcattaaggacggtgaacaacatgaagatctgaatgaagtggccaaacttttcaatattcatgaggat

SEQ ID NO: 32153 - DNA, 783 bp, synthetic construct
  misc_feature 1..783: note = Description of Artificial Sequence: Synthetic coding sequence
  source 1..783: mol_type = other DNA
atggagaaggtgcggcgggaaggtgtgaaggtgatgccaaacgcgatcgtccagagcgttggagtgtccagcggcaagctgctcatcaagttgaaggatggaagaaaggtggaaaccgatcacatcgtggccgcggtgggattggaacctaacgtggaactcgcaaagaccggaggactggaaatcgacagcgattttggtggattccgcgtcaatgcggagctgcaagcacgctcgaatatctgggtcgctggagacgcagcatgcttctacgacatcaaacttgggcgccgtcgcgtggagcatcacgatcacgcagtggtgtcggggaggctggctggcgagaatatgaccggggcagctaagccctactggcaccagtcaatgttttggtcggacctgggacctgacgtcggctacgaggcaattggattggtcgactcctcactgcctacggtgggcgtgtttgcaaaggcgaccgcccaagacaatcctaaaagcgcgaccgaacagtcgggcacgggaatcaggtccgaatcagaaactgaatcagaagcgtcggagattaccatcccacctagcaccccggcagtgccgcaggccccggtccaaggtgaggactacggtaagggcgtgatcttctacctccgcgacaaggtggtcgtgggaatcgtgctgtggaatatctttaaccggatgccgattgcacgaaaaatcatcaaagacggtgaacaacacgaggatctgaacgaagtggccaagctcttcaacatccatgaagat

SEQ ID NO: 32154 - DNA, 783 bp, synthetic construct
  misc_feature 1..783: note = Description of Artificial Sequence: Synthetic coding sequence
  source 1..783: mol_type = other DNA
atggaaaaagtgcgccgagagggagtcaaagtaatgcccaatgcaattgtccagtcggtgggcgtatccagtggtaaattgctgattaaactcaaggacggcaggaaggttgaaacagatcatatagttgcagcggtggggctggagccaaacgtcgagctggctaaaactggagggctggagattgactccgatttcggtggctttcgggtgaatgctgaacttcaggcccggtctaacatatgggtggccggcgacgcggcgtgtttttatgacattaagctgggccggaggcgagttgagcatcacgatcacgccgtggtgagcggaagactggcaggcgagaatatgacgggagcggctaagccgtactggcatcagtccatgttttggagtgatctcggccctgatgttggttacgaggcaatcggattagtggacagttccctaccaacagtcggggtgttcgctaaggccactgcccaggacaatcccaaaagcgccaccgagcaatcaggcacaggtattaggtccgaatccgaaactgaaagcgaggcaagcgaaatcacgatacctccatcaacccccgccgtgccgcaggcccccgtacagggtgaggactacggaaaaggggtaatcttttacctcagggataaggttgtggtgggcattgtgttatggaatatctttaacaggatgcccattgcccggaagatcataaaagacggagaacagcatgaagacctgaacgaagtcgcaaagctgtttaacatccacgaagac

SEQ ID NO: 32155 - DNA, 783 bp, synthetic construct
  misc_feature 1..783: note = Description of Artificial Sequence: Synthetic coding sequence
  source 1..783: mol_type = other DNA
atggaaaaggtccggagggagggtgtcaaggtgatgccaaatgccatcgtccagtccgtcggcgtgtcatcgggaaagctccttatcaaactgaaggacggacgcaaagttgagactgaccacatcgtggcagccgttgggctggaacccaatgtggagctggccaagaccggaggactggaaatcgacagcgactttggcggattccgcgtgaatgctgaactccaggctaggagcaacatttgggtggccggcgacgctgcgtgcttctacgacattaagctgggaaggcggcgcgtcgagcaccacgaccacgcggtggtgtcaggacggctggcaggcgaaaacatgaccggcgccgccaagccgtactggcaccagtcgatgttctggtccgacctgggcccggacgtcggctacgaggcgatcggactggtcgattcatcgcttccgaccgtgggagtgttcgcaaaggctactgcccaagataacccaaaatcggccaccgaacagtcgggcaccggaatccggagcgaatccgaaaccgaatcagaagcctcggaaatcaccatcccgccaagcacgccggctgtgccacaagcgccggtgcagggggaagattacggtaagggagtgattttctatttgcgggacaaggtggtggtaggaatcgtgctctggaatatctttaatcgcatgcctattgccaggaaaatcatcaaagatggcgagcagcatgaagatttgaacgaagtggcgaaattgtttaacatccatgaggac

SEQ ID NO: 32156 - DNA, 783 bp, synthetic construct
  misc_feature 1..783: note = Description of Artificial Sequence: Synthetic coding sequence
  source 1..783: mol_type = other DNA
atggaaaaggtgaggcgcgaaggggtcaaggtgatgcccaatgccatcgtgcaatccgtgggcgtgtcgagcggtaagttgctgatcaagctgaaggacggacggaaagtggagacggatcatatagtggcagcagtcgggttggaacccaacgtcgaacttgcaaagaccggtgggctggaaatagactcggattttggcggattcagggtcaacgccgaactgcaggcaagatctaatatctgggtggccggagatgcagcgtgtttctacgatatcaaactgggtagacgtcgcgtggaacatcatgaccatgccgtggtgtctggacgtttggccggagaaaacatgaccggcgcggcaaagccgtactggcatcagtccatgttttggtcagatcttggaccagacgtgggctacgaggctattggtctggtggattcatcgctgcctaccgtgggagtgtttgccaaggctaccgcccaagataatcctaaatccgcaactgagcaatcagggactggcatcaggtcggagtccgaaaccgaatcggaagcgtcggagatcactatcccacctagcacccctgcagtcccacaagcaccggtgcagggagaagattatggcaaaggagtgatattctacttgcgagacaaagtggtggtgggaattgtgctgtggaacattttcaaccgtatgcctatagcaagaaagatcattaaggacggtgagcagcatgaggatcttaatgaagtggcaaaactctttaacattcatgaagat

SEQ ID NO: 32157 - DNA, 783 bp, synthetic construct
  misc_feature 1..783: note = Description of Artificial Sequence: Synthetic coding sequence
  source 1..783: mol_type = other DNA
atggagaaggtgcgacgcgaaggagtcaaggtaatgcctaatgcgattgtgcaatccgtgggggtgagttcaggcaagcttctgattaagctgaaggacggtaggaaagtcgagacagaccacatcgttgctgcagtggggttggaacctaatgtcgaattagcaaagactggcggcttagagatcgattctgatttcgggggtttcagggtgaatgccgaactccaagcgaggtctaatatatgggtggcaggcgacgccgcctgtttctacgatatcaaacttggaagaaggagggtggagcaccacgaccacgccgtggtctcgggtcgattggccggggaaaacatgacgggagccgctaagccctattggcatcaatccatgttctggagtgacctcgggcccgatgtaggttacgaagccatcggtttggtagactcctctctgccaacagtgggcgtctttgccaaggcaaccgcacaggacaacccaaaatctgccaccgagcagtcaggaaccggtattaggagtgaaagcgagacagaatctgaagcatcagaaataaccataccacctagtactcctgctgtgccacaggccccagtgcagggggaggattatggcaagggcgttattttttacctgcgggataaagttgtagtgggaatagtcttatggaatatttttaacagaatgcccatcgctcgtaaaatcatcaaggatggagaacagcacgaggacttgaatgaggtggcaaagttgttcaatatacacgaagat

SEQ ID NO: 32158 - DNA, 783 bp, synthetic construct
  misc_feature 1..783: note = Description of Artificial Sequence: Synthetic coding sequence
  source 1..783: mol_type = other DNA
atggaaaaagtacgtagggaaggagtaaaagtgatgcccaatgctatagtacagtccgtgggggtgtctagtggaaaactcttgataaaactgaaagatggaagaaaagtcgaaactgatcacatcgtcgctgctgtggggctggaaccaaacgtggaattagccaaaacagggggactagaaatcgattctgattttggagggtttcgagttaacgccgaactccaggcacggtcgaacatctgggtggcaggagacgccgcatgtttttatgatatcaaactagggaggcggagagtagaacatcacgaccacgcagtggtgtcagggcgacttgccggagagaacatgactggggcagccaaaccatactggcaccagtcaatgttctggtccgatcttgggcctgatgtggggtatgaggccataggattagtcgattcttctttaccaacagttggggtgtttgccaaagcaactgcccaggataaccccaaatccgcaactgaacagagtggaacaggaatcagatccgaatctgaaactgaatccgaagcctctgagatcacaatccctccttccacacccgctgtgcctcaggctccagtgcagggagaagattacgggaagggggtaatcttctatttacgcgataaagttgtcgtagggatcgtgctttggaacatcttcaacagaatgccaatagcacgcaaaataattaaagatggggaacagcacgaagatttaaacgaggtagcaaagctcttcaatattcatgaagat

SEQ ID NO: 32159 - DNA, 783 bp, synthetic construct
  misc_feature 1..783: note = Description of Artificial Sequence: Synthetic coding sequence
  source 1..783: mol_type = other DNA
atggagaaggtgaggagagaaggtgtgaaagtcatgcccaatgcaattgtgcagtctgtcggggtaagttccggaaaactgctgatcaagttgaaggacggacgcaaagtggaaaccgaccatatagtcgctgcggtcggcctggaacccaatgtggagctggctaagactggtggccttgagattgacagcgattttggcggctttcgggtgaacgctgagttgcaggctagaagcaatatctgggtcgcgggggacgctgcgtgcttctatgacattaagcttggccggcggcgagtggaacaccacgaccatgccgtggtgtccggcagactagctggtgaaaatatgacaggagccgccaagccctactggcatcagtcgatgttctggagcgaccttggccctgacgttggctacgaagctatcggattagtggactcatctctgcctactgtcggggtgttcgccaaggctaccgcgcaggataatccgaaatccgccacagagcagagcggtaccgggatccgtagtgaatcagagactgagtccgaagcctctgagatcaccataccaccatcgactcctgccgtgccccaagcgccagtgcagggggaggattacgggaagggcgtgatcttctacctccgcgacaaagtggtggtgggaattgtcctgtggaacattttcaataggatgcccatagctcgaaaaattattaaagacggagagcagcatgaagatctgaacgaggtggccaagctcttcaacattcatgaggat

SEQ ID NO: 32160 - DNA, 783 bp, synthetic construct
  misc_feature 1..783: note = Description of Artificial Sequence: Synthetic coding sequence
  source 1..783: mol_type = other DNA
atggaaaaggtgcggagagaaggagttaaggtcatgcctaacgccatcgtgcagtcagtgggggtttcgtcaggcaagctccttatcaagctcaaggacggacgaaaggtcgaaactgatcacattgtggccgccgtggggctggaacctaacgtggagctggcaaagacgggcgggctggaaatcgatagcgatttcgggggattcagagtgaacgcagagctgcaagcaagatcgaacatatgggtcgcgggagatgcagcatgtttttacgacattaaactgggtcggcggcgggtggagcatcacgaccacgcagttgtgtccggacgtcttgctggagaaaacatgaccggtgcagccaaaccttattggcatcaatctatgttctggtccgacctgggacctgatgtgggatacgaagcgattggacttgtggacagctcgctgcctactgtgggtgtgttcgcaaaagctaccgcccaagataacccaaaaagcgcaaccgaacaaagcggaaccgggattcgttccgagtcggagactgaatcagaagcctccgagataactattccgccctcaactcctgcagtgccccaggcaccggtccagggggaggattatggaaagggtgtgatcttttacttgagagataaagtggtggttggtatcgtgctgtggaacatctttaatcggatgcccattgcccgtaagatcattaaagatggagaacaacacgaagatctcaatgaagtcgccaaactgtttaacattcatgaagat

SEQ ID NO: 32161 - DNA, 783 bp, synthetic construct
  misc_feature 1..783: note = Description of Artificial Sequence: Synthetic coding sequence
  source 1..783: mol_type = other DNA
atggagaaagtccgcagagagggagtcaaggttatgcctaacgcaattgttcaaagtgtcggagtttcaagtggcaaattattgatcaagctgaaggacggtaggaaagtggagactgaccacattgtagccgctgtcggcctcgagcctaacgtcgagctagcaaagaccggcggactggagatcgattcggacttcgggggattccgggtgaatgcagaactgcaggcaagatctaacatctgggtcgccggagacgctgcttgcttttatgatatcaaactgggcagaaggagagtggagcatcacgatcacgccgttgtgtctggaaggcttgctggagagaatatgaccggagccgctaaaccctattggcatcagtccatgttctggagcgacctgggaccagacgttggatatgaggccataggcctggtagatagcagtctacctacagtgggcgtgttcgctaaggctaccgcccaggataatcccaagtcagcaactgaacagagcggcactggcattagatctgagtcagaaaccgaaagcgaggctagtgagatcaccattcccccatctacccctgcggttccacaggcacctgtccagggcgaggactacggaaagggagtgatcttttatctccgggacaaagttgttgtggggatcgtgctgtggaacatcttcaatcgcatgccaattgcgcggaaaattattaaagacggggagcagcatgaggaccttaacgaggtggctaagctattcaacatccatgaggat

SEQ ID NO: 32162 - DNA, 783 bp, synthetic construct
  misc_feature 1..783: note = Description of Artificial Sequence: Synthetic coding sequence
  source 1..783: mol_type = other DNA
atggagaaggttcggcgagagggggtaaaggtgatgcccaatgccatcgtccagagcgtaggcgtgagttctgggaagctgctgattaagctaaaagacggacgcaaggttgaaactgatcatatagtcgctgcagtggggctggagcccaacgtcgaactcgccaaaacgggtgggctcgagatagattctgacttcggtggctttagggttaatgcagaacttcaggcaagatccaacatctgggtggcaggggatgccgcatgtttctatgatatcaagctgggccggagacgggtcgaacatcacgatcacgccgtggtgagcgggcgtttggccggtgaaaacatgaccggagctgccaaaccctattggcatcagtccatgttctggtcagatcttggtcccgacgtggggtatgaagccataggactggttgactcgagtctgcccactgtgggcgtgttcgccaaagcaactgcccaggacaaccctaaatccgctaccgagcagtctggtactggtatccgctccgaaagtgagacagagagtgaggcatctgaaattaccattccgccctccacccccgccgtcccccaggcacccgtccagggggaggactatggcaaaggtgttatcttctatttaagggataaagtagtcgttggcatcgtgctttggaatatatttaacaggatgcctattgctcgtaaaatcatcaaagatggagaacagcacgaggacctgaatgaggtcgcaaagttattcaacatccacgaagac

SEQ ID NO: 32163 - DNA, 783 bp, synthetic construct
  misc_feature 1..783: note = Description of Artificial Sequence: Synthetic coding sequence
  source 1..783: mol_type = other DNA
atggagaaggttcggagagagggcgtgaaagttatgccaaatgccatcgttcagagcgtcggggtgagctcggggaaactcctcataaagctgaaggacggtcgaaaggtagagacggaccatatcgtcgctgcggtaggcctcgaaccgaatgtcgagctcgctaagaccggaggcttggaaattgactcagacttcggcggcttcagagtcaatgcggagctgcaggcccgttctaacatctgggtcgccggagacgctgcatgtttttatgacataaagctggggcgcaggagagtggaacaccacgatcatgctgtcgttagtggccggcttgccggtgagaacatgaccggtgcggccaagccatactggcaccaatcaatgttctggagtgacttgggccccgacgtaggctacgaggcaattggattggtggacagtagtttacctactgtaggagttttcgccaaggcaacagcccaggacaatccaaaatctgctaccgaacaatccggcactggcattcgctctgagtcagagaccgagagtgaagcttctgaaataaccattccgccttccacccccgccgtaccccaggcacccgttcagggggaggactacggcaaaggagttattttttaccttcgagacaaggttgtagtgggcatcgtactatggaacatatttaaccggatgcccattgcaaggaagattatcaaagatggagaacagcacgaagacctcaacgaggtggccaagttgttcaatatccacgaagac

SEQ ID NO: 32164 - DNA, 783 bp, synthetic construct
  misc_feature 1..783: note = Description of Artificial Sequence: Synthetic coding sequence
  source 1..783: mol_type = other DNA
atggaaaaagtcaggcgcgagggagtgaaggtgatgcccaacgcgatagtgcaaagcgtgggggtgtcatccggaaagctgcttatcaagctgaaagatggcagaaaggtagaaaccgaccatattgtggcggccgtgggcctggaaccaaatgtggaactggcaaagactggaggactggaaatcgatagcgatttcggcggtttcagggtcaacgcggaactgcaggcacgttctaacatctgggtggcgggagacgcagcatgtttctatgacattaagctggggcgccggcgcgtcgagcatcacgatcacgcagtggtgtccggccgcctcgccggagaaaacatgactggagcggcgaaaccatattggcaccagtcaatgttctggtccgacttggggccggacgtgggctacgaggcaatcggattggtggattcgtccctcccaacggtcggtgtgttcgccaaggcgactgctcaggacaaccctaaatcggcaacggagcaatccggaaccgggatccggagcgaatcagagactgaatcggaggcctcagaaatcaccattccaccaagcaccccggcagtgccgcaggcacctgtgcagggggaggactacggaaaaggcgttatcttctacttgagagacaaggtggtcgtcggaatcgtgctctggaacattttcaacagaatgccgatcgcccgaaagattatcaaggacggagaacagcatgaagatctgaacgaggtggccaagctcttcaacatccacgaagat

SEQ ID NO: 32165 - DNA, 783 bp, synthetic construct
  misc_feature 1..783: note = Description of Artificial Sequence: Synthetic coding sequence
  source 1..783: mol_type = other DNA
atggaaaaagtacggcgcgagggtgtaaaggtgatgcctaacgctatcgtgcagtccgtaggagtgtcatcgggtaagcttttgataaagctgaaggacggtcgcaaggttgagaccgatcatatcgtggccgctgtgggtttggagcctaacgttgaacttgctaagaccgggggccttgagatcgattcagacttcggcggcttccgagtgaacgctgagttgcaggcacgatctaacatttgggtagctggcgatgctgcttgtttctatgacataaaattagggcggcgcagagtcgagcatcacgaccacgcggttgtttccggccggctggcgggagagaatatgaccggcgctgccaagccttactggcatcagagcatgttttggagtgatctcggaccggacgtggggtatgaggcgattggcctcgtggactcttccctgccaactgtgggggtgttcgccaaagccactgcccaagacaatccgaagagtgccactgaacaatcaggcaccgggatccgtagcgagtccgaaacagaatccgaagcaagtgagatcaccatccctccatccacacccgctgtgcctcaagcacctgtgcagggtgaggactacggaaagggcgtcatcttctatctccgggataaggtggtggtgggcatcgtgctgtggaatatctttaacaggatgccaatcgccaggaagatcatcaaggacggggagcagcatgaggatctaaatgaggtggcaaaactgtttaatatacacgaggac

SEQ ID NO: 32166 - DNA, 783 bp, synthetic construct
  misc_feature 1..783: note = Description of Artificial Sequence: Synthetic coding sequence
  source 1..783: mol_type = other DNA
atggaaaaggtgcgcagagagggcgtgaaagtcatgccgaacgctatagtgcagtcagtcggcgtgtcctcagggaagctgctcatcaagctgaaagacgggcgcaaggtcgaaaccgaccatatagtcgcggccgtgggactggaaccaaacgtggaattggctaaaacgggaggtttggaaatcgattccgatttcggaggattccgcgtcaacgctgaactgcaagcccgatcaaacatctgggtggcgggagatgcggcctgcttttatgacattaagctgggacgtaggcgcgtggagcaccatgatcacgccgttgtgagcggaaggctggctggggaaaacatgactggtgcagccaagccgtactggcaccaatccatgttttggtcggatctcggaccggacgtgggatacgaggcaatcggccttgtcgattcctctctgccaaccgtgggtgtattcgcaaaggccaccgcgcaagacaaccctaagtcagccaccgagcagtcggggactgggatccgcagcgaaagcgagactgaatccgaagcgtcggagattactattccgccgagcacccccgccgtgccacaggctcctgttcagggagaggactacggtaagggggtgatcttctaccttcgcgacaaggtggtcgtcggcatcgtgctctggaatatcttcaaccggatgcccatcgctagaaaaatcatcaaggacggagaacagcacgaggacctgaatgaggtagcaaagctcttcaatatccacgaggac

SEQ ID NO: 32167 - DNA, 783 bp, synthetic construct; identical to SEQ ID NO: 32118
  misc_feature 1..783: note = Description of Artificial Sequence: Synthetic coding sequence
  source 1..783: mol_type = other DNA

SEQ ID NO: 32168 - DNA, 783 bp, synthetic construct
  misc_feature 1..783: note = Description of Artificial Sequence: Synthetic coding sequence
  source 1..783: mol_type = other DNA
atggagaaagtgcggcgagaaggagtgaaggtgatgcccaacgccatcgtacagtctgtgggggtcagtagcgggaaacttttgatcaaacttaaggatggaagaaaggtcgaaactgaccatatagtggcagcagtgggtctggaacctaacgtcgaactcgctaagaccggaggtcttgaaatcgattccgacttcggggggttccgggtgaatgccgaactgcaggcacgctcaaacatttgggtcgcaggcgatgctgcatgtttttacgacataaagctgggaaggcgtagagtcgaacatcacgatcacgcagttgtgtcgggcagactggcaggtgagaacatgactggagcggccaaaccatattggcatcagtccatgttttggtcggacctcggccctgacgtgggatacgaagcaatcggactcgtggattcctcgcttccgacggtcggtgtgtttgccaaagcaaccgcccaagacaacccaaaatctgctactgaacaatcaggtaccgggattaggtcggagagtgaaaccgagtccgaggcatccgagattactattcctccgtcaaccccagcagtgccacaagccccagtgcagggagaggattacggcaaaggggtgattttctaccttagagataaggtcgttgtcggaattgtgctttggaacatctttaacagaatgcctatcgcacggaagatcataaaggacggagaacaacacgaagatctgaatgaagtggcaaagctcttcaacattcacgaggat

SEQ ID NO: 32169 - DNA, 783 bp, synthetic construct
  misc_feature 1..783: note = Description of Artificial Sequence: Synthetic coding sequence
  source 1..783: mol_type = other DNA
atggaaaaagtgcgcagagagggagtgaaggtgatgcctaacgcgattgttcagtcagtgggagtgtctagcggaaagctcctgattaaactgaaggacggacgtaaagtggagactgaccacatcgttgccgcggtgggcttggaaccgaatgtggagctggccaagaccggcgggttggagatcgactccgactttgggggattcagggtcaatgctgaactgcaagctcggtcaaatatctgggtggccggagacgctgcatgcttttacgacatcaagctgggccggcgccgcgtggagcaccatgaccatgccgtcgtctccggacgccttgcgggtgagaacatgaccggtgctgcaaagccgtactggcaccagtcaatgttctggtccgatctgggtccggacgtgggatacgaagcgatcggactcgtcgattccagcctcccaactgtgggtgtttttgcgaaggctacggcacaggataaccccaaaagcgccactgaacaaagcggcactggaattcggagcgagtcagaaaccgagtccgaagcgagcgaaatcaccatccctccctcaaccccagcagtcccacaagcgccggtgcagggggaggattacggaaaaggagttatcttctatctccgcgataaggtggtcgtcgggatcgtgttgtggaacattttcaatagaatgccaatagcccggaagatcatcaaggatggcgaacagcacgaagatcttaacgaagtcgctaagttgttcaacatccatgaggac

SEQ ID NO: 32170 - DNA, 783 bp, synthetic construct
  misc_feature 1..783: note = Description of Artificial Sequence: Synthetic coding sequence
  source 1..783: mol_type = other DNA
atggagaaggtgcgtcgcgaaggcgttaaggtgatgccaaatgcaattgtccaatctgtgggagtgtcatcaggaaagctgctcatcaagctgaaagacggaagaaaagtggagactgaccacattgtggcggcagtggggctcgaacctaacgtggaactggcaaagacgggaggacttgaaatcgattctgatttcggcggttttcgggtcaacgcagaactccaggcgcgaagcaacatttgggtcgcaggcgacgcggcctgcttttacgacatcaagctcggacgtaggagagtcgagcaccatgaccacgctgtcgtgtccggacggcttgcaggtgagaacatgactggcgcagccaaaccttactggcatcagtcaatgttttggtctgatcttggacctgatgtgggttacgaagcaatcggacttgtggattcgtcccttccaaccgtcggagtgttcgccaaagcaacggcgcaagataaccctaagtcggcaactgaacagtccggcaccgggattcggtcagaatccgaaactgaaagtgaggcctcggaaataaccattccaccttccactcctgcagtgcctcaagcacccgtgcaaggcgaagattatgggaagggagtgattttctatctgcgagataaggtggtggtcgggattgtcctttggaacatctttaacaggatgccgattgcaagaaagattatcaaggacggtgagcaacacgaagatttgaacgaagtggcaaagttgttcaatatccatgaagat

SEQ ID NO: 32171 - DNA, 783 bp, synthetic construct
  misc_feature 1..783: note = Description of Artificial Sequence: Synthetic coding sequence
  source 1..783: mol_type = other DNA
atggaaaaggtgagacgggagggtgtgaaggtgatgcctaacgcaatcgtgcagtccgtcggcgtttcatccggtaaactcctcatcaagctcaaagatgggagaaaggtggaaaccgaccatatcgtcgctgctgtgggactggaaccgaatgtggaattggccaaaactggaggactggaaatcgattcggatttcggtggcttccgcgtgaacgcagaactccaggcgaggtcaaacatctgggtggccggagatgcagcctgcttctacgacatcaaactgggacgccggagagtcgaacatcacgaccacgccgtggtgtccggacggttggctggcgaaaacatgaccggagccgccaagccctactggcaccagtcaatgttctggagcgatctgggaccggacgtcggttacgaggccatcggactggtggactcgtcgctgccaaccgtgggagtgtttgcgaaggccactgcccaagacaatccgaaatcggccaccgaacagagcggcacgggaatccgctctgagtcggaaaccgaatcagaagcctcggaaatcaccatcccaccgtccactccagccgttccgcaagccccggtgcagggggaggattacggcaagggagtgatcttctatttgcgagataaggtcgtcgtgggcattgtgctgtggaacatattcaaccggatgcccatagcgcgcaagatcatcaaagacggggagcaacacgaggacctgaatgaggtggcgaagttgtttaacatccatgaggac

SEQ ID NO: 32172 - DNA, 783 bp, synthetic construct
  misc_feature 1..783: note = Description of Artificial Sequence: Synthetic coding sequence
  source 1..783: mol_type = other DNA
atggaaaaagttcgtcgtgaaggtgtaaaagttatgccgaatgcgatagtacaatcggtaggtgtatcgtcgggtaaactactaataaaattaaaagatggtcgtaaagtagaaacggatcatatagtagcggcggttggtttagaaccgaatgtagaattagcgaaaacgggtggtttagaaatagattcggattttggtggttttcgtgtaaatgcggaattacaagcgcgatcgaatatatgggtagcgggtgatgcggcgtgtttttatgatataaaattaggtcgtcgacgtgtagaacatcatgatcatgcggttgtatcgggtcgtttagcgggtgaaaatatgacgggtgcggcgaaaccgtattggcatcaatcgatgttttggtcggatctaggtccggatgttggttatgaagcgataggtctagtagattcgtcgttaccgacggtaggtgtatttgcgaaagcgacggcgcaagataatccgaaatcggcgacggaacaatcgggtacgggtatacgatcggaatcggaaacggaatcggaagcgtcggaaataacgataccgccgtcgacgccggcggtaccgcaagcgccggtacaaggtgaagattatggtaaaggtgttatattttatctacgtgataaagtagtagtaggtatagtattatggaatatatttaatcgtatgccgatagcgcgaaaaataataaaagatggtgaacaacatgaagatctaaatgaagtagcgaaattatttaatatacatgaagat

SEQ ID NO: 32173 - DNA, 783 bp, synthetic construct
  misc_feature 1..783: note = Description of Artificial Sequence: Synthetic coding sequence
  source 1..783: mol_type = other DNA
atggaaaaagtccggcgcgagggcgtgaaggttatgccgaacgcgatcgtgcagtccgttggagtttccagcggaaagttgctgatcaaactcaaggatgggcggaaggtcgaaaccgatcacatcgtcgccgctgtgggactggaaccaaacgttgaacttgccaagaccggaggtctcgagattgatagcgatttcggaggattcagggtgaacgcggagctccaggcgcgaagcaacatctgggtagcgggagatgccgcttgtttttacgacatcaaactaggcaggcgccgggtggagcaccacgatcatgccgtcgtctccgggcgccttgcgggggagaatatgaccggcgccgcgaaaccctactggcatcaatcgatgttctggagtgacctgggcccagatgtcggatacgaagccatcggtctcgttgatagcagcctgccaaccgtgggagttttcgcaaaggcaaccgctcaggataaccctaaatccgccactgagcagagcggaactgggatccgctcggaatctgagaccgagtccgaggcctcagaaattacaattccacctagtacccccgctgtcccacaggctcctgtgcagggggaggactatgggaagggggtcatattctatctgcgagacaaagttgtcgttggcatcgtgctctggaacatattcaaccggatgcccattgccaggaagattatcaaagatggcgagcagcatgaggacctcaacgaggtggctaagttgttcaacatccacgaggat

SEQ ID NO: 32174 - DNA, 783 bp, synthetic construct
  misc_feature 1..783: note = Description of Artificial Sequence: Synthetic coding sequence
  source 1..783: mol_type = other DNA
atggagaaggtgagacgcgaaggggtcaaggtcatgcctaacgctatcgtgcagtccgtcggggtatcatccgggaaactcctgataaagttaaaggacggccgcaaagtagaaactgaccacattgtggccgcagtcggcctggagccaaacgtggagctggcaaagactggcggtctagagatagattcggacttcggaggcttcagagtaaatgccgaactgcaagcgcgatcgaacatctgggtggccggagacgccgcttgcttctatgatatcaaacttggccgccgacgagttgagcaccacgaccacgccgtggtttcaggaagactagctggggaaaatatgactggcgccgctaagccttactggcaccagagtatgttttggagcgacctggggcctgatgtaggctacgaggcgattggtctagtcgacagctctctgcccacagttggagtgttcgcaaaagctactgcccaggacaatccaaagtccgctaccgagcagtcaggcaccgggatacgatctgaaagcgaaaccgaatccgaggcatccgaaattactatacctcctagcaccccagcggtgccccaggcaccagttcagggcgaggattatggaaaaggtgttatattctatctccgagataaagtggtggtgggaatcgtcctgtggaacatattcaaccgaatgccgatcgccaggaaaattataaaggatggagagcagcacgaagatttaaacgaggttgcgaagctctttaacatacatgaggat

SEQ ID NO: 32175 - DNA, 783 bp, synthetic construct
  misc_feature 1..783: note = Description of Artificial Sequence: Synthetic coding sequence
  source 1..783: mol_type = other DNA
atggagaaggtgagacgtgagggagtgaaggtcatgccaaacgctatcgtacagagcgtcggcgtgtcctctgggaaactcctgattaaattaaaagatggacgcaaagttgaaacggaccacatagtggccgccgtgggcctggaaccgaacgtcgaactcgccaaaaccggtggccttgagatcgacagcgacttcgggggctttcgcgtaaacgcagaattgcaagcacgaagcaacatctgggtggccggagacgcagcttgcttttacgacatcaagctgggccggaggcgagtggagcatcacgaccatgctgtggtctctggcaggctggctggagagaacatgactggcgccgctaaaccctactggcaccagtccatgttttggtcagaccttgggccagacgtaggctatgaggctatcggcttagttgactccagcctacccaccgtgggtgtgtttgctaaggccacagctcaggacaaccctaaatcagccaccgagcagagcggcactgggatccggagtgagagcgaaaccgagtcggaagcgtccgaaatcaccatccccccatccaccccagcagtcccccaggctcctgtgcagggcgaggattatggtaaaggcgtcatcttttacctcagggataaggttgttgtggggatagtactgtggaatatcttcaaccggatgcccatcgctaggaagattatcaaggatggggagcagcatgaagacttaaacgaggtagcaaagctctttaatattcatgaagat

SEQ ID NO: 32176 - DNA, 783 bp, synthetic construct
  misc_feature 1..783: note = Description of Artificial Sequence: Synthetic coding sequence
  source 1..783: mol_type = other DNA
atggaaaaggtgcgccgcgagggagtcaaggtgatgcctaacgccatcgtgcaatcagtgggagtgtcgtcaggaaagttgctgattaaacttaaggacggtcggaaggttgaaaccgatcatatcgtggcagcggtgggcctggaaccgaacgtcgaactggctaagactggaggtctggagatcgacagcgatttcggaggattccgggtgaacgcagaattgcaggcccggtccaatatctgggtggccggcgatgccgcgtgcttttacgacatcaagctcgggagacgccgggtcgaacaccatgaccacgcagtggtgtccggcaggctcgcgggagaaaatatgactggcgccgcaaagccgtactggcaccaatcgatgttctggtctgacctgggaccggacgtggggtacgaagcaatcggactggtggattcgtccctcccaaccgtcggcgtgttcgccaaagccaccgctcaggacaacccaaaaagcgctactgagcagtcagggactggtatcaggtccgagtccgaaaccgaatcggaggcgagcgagatcaccatcccgcccagcacgccggccgtcccacaggcccccgtgcagggagaggactacggaaaaggcgtgatcttctatctgcgcgacaaggtcgtggttggaatcgtcctttggaacatatttaatcgaatgcctatcgctagaaagattatcaaggacggggagcaacatgaagatctcaatgaagtcgcgaaactgttcaacattcacgaggat

SEQ ID NO: 32177 - DNA, 783 bp, synthetic construct
  misc_feature 1..783: note = Description of Artificial Sequence: Synthetic coding sequence
  source 1..783: mol_type = other DNA
atggaaaaagtccgtcgagagggggtcaaagtaatgcctaatgccatcgtgcagtcagtcggcgtgagttccggaaagctcctcatcaagttgaaggacggacggaaggtggaaaccgatcacatagttgcagcagttggcctcgagcctaatgttgaactggcaaagaccgggggccttgagatcgactcagatttcgggggcttccgcgtaaacgccgagctgcaggccagaagcaacatttgggttgcgggcgatgcagcctgcttttatgacattaaactggggcggcggagagttgaacaccacgaccatgctgtggttagtggcaggttggcaggagagaacatgaccggcgcagcaaaaccgtattggcaccagagcatgttctggagcgatttgggccctgacgtcggttacgaggcgatcgggcttgttgacagctctttgccaaccgtaggggtgtttgcaaaagcgaccgctcaggacaaccccaagtccgcaacggagcagagtgggaccggcattagaagtgagtccgagaccgaaagtgaggccagcgaaattacgatccctcccagtactccagctgtgccacaggcacccgtccaaggagaagactatggcaaaggagttatcttctatttacgggacaaggtcgttgtgggcattgtactctggaacattttcaatagaatgcctatagcccgtaaaattattaaagatggagagcagcatgaagacctcaatgaggtggcgaagttgttcaacatccacgaggat

SEQ ID NO: 32178 - DNA, 783 bp, synthetic construct
  misc_feature 1..783: note = Description of Artificial Sequence: Synthetic coding sequence
  source 1..783: mol_type = other DNA
atggagaaagtcagacgggaaggcgttaaggtgatgccaaacgcaatcgttcaatctgtgggtgtctccagtgggaagttgctcatcaagcttaaagacggcaggaaagtggagacagatcatattgttgccgcggtcggtctggaacctaacgtggagcttgctaagacaggggggctcgagatagattcagatttcggcggttttagggtgaacgctgaattgcaagctaggtctaatatctgggttgcgggcgatgccgcctgcttctacgacattaagctgggaaggcgtcgcgtggagcatcacgatcatgccgtggtaagtggacggctggcaggcgaaaacatgacaggagctgctaaaccatattggcaccagtccatgttctggtctgatctgggccctgacgtgggttacgaagccatcggcttggtggatagcagcctgcccaccgtgggcgtgttcgctaaggccacagcacaggacaacccgaagagcgccaccgagcaatctggcaccggaattagatcggagtcggagacagagtccgaggcttcagaaatcacaatcccaccgagcaccccggctgtaccacaggcaccagtgcagggcgaagactatggtaaaggggtgatattttacctgcgggacaaagtggtggtgggtatcgtcctgtggaacattttcaacaggatgcccatcgcaagaaaaattataaaagacggagagcagcacgaagacctcaacgaagtagcgaagctgttcaacattcacgaagat

SEQ ID NO: 32179 - DNA, 783 bp, synthetic construct
  misc_feature 1..783: note = Description of Artificial Sequence: Synthetic coding sequence
  source 1..783: mol_type = other DNA
atggaaaaagtgaggcgggaaggagtcaaagtgatgccaaatgcaatcgtgcagagcgtgggggtgtcgagcggcaagctcctgatcaagctgaaagatggacgcaaagtggagacggatcacatcgtggcggccgtcgggctggagccgaacgtggaacttgccaagactgggggtctggaaatcgactcggatttcgggggcttcagagtcaacgcagaactccaggcacggtcgaatatctgggtggctggagacgccgcctgtttttacgatatcaaactgggacgacgccgggtggaacatcacgatcacgcggtggtgagcggaagattggctggagaaaatatgaccggggcagcgaaaccatactggcatcagagcatgttctggtcagacctgggcccggacgttgggtacgaggccatcggcctcgtcgactcttccttgccgactgtgggagtgttcgccaaggcaactgctcaggacaacccaaagtcagccacggaacaaagcgggaccggaatccggtcagaaagcgaaactgaaagcgaagctagcgaaatcaccattcctccgtcaacccctgcggtcccgcaggccccggttcaaggagaagactacggaaagggcgtcatcttctacttgagggataaggtggtggtcggcatcgtgctttggaacatcttcaatcggatgccaatcgcacgcaagatcatcaaggacggtgaacagcacgaagacctgaatgaggtcgccaaactgttcaatatccacgaggat

SEQ ID NO: 32180 - DNA, 1854 bp, synthetic construct
  misc_feature 1..1854: note = Description of Artificial Sequence: Synthetic coding sequence
  source 1..1854: mol_type = other DNA
atgcacaaaacagcgagtcagcggctctttccaggcccctcctatcagaacatcaagtctataatggaggattcaacaatcctctcggactggactaacagcaataaacagaagatgaaatatgacttctcctgtgagttgtacaggatgagtacatactctacatttcctgccggcgttccggtgtcagagcgatcccttgcgagagccggtttctactacaccggcgtgaacgataaagtcaagtgcttctgttgtgggctcatgctggacaactggaagctgggagattctcccatacaaaaacataagcaactatacccgtcgtgcagctttatccagaacctggtctcagcttcactgggtagtacctctaagaatactagcccaatgcgtaatagcttcgcacatagcctgtcaccgactctcgagcatagctctctgttctcaggatcttacagctcattgagtccgaatccccttaattcacgcgccgtggaagatatctcctccagccggactaatccgtattcttacgcgatgtccactgaggaggccaggtttctgacttatcatatgtggcccctgacctttctctcaccgagtgagctggctagggccggcttctactatattgggcctggagaccgcgtagcatgtttcgcctgtggtgggaaactcagcaattgggagccaaaggacgacgccatgtccgagcatagaagacattttcctaactgcccctttctagagaacagcctggagacactcaggttttcgatttccaatctgtccatgcagacacacgccgctaggatgagaacattcatgtattggccttcctccgtacctgtgcagccagagcagttggcaagcgctggcttttactatgtaggacgcaatgacgacgtcaagtgcttctgctgcgatggcggcctacggtgctgggaatccggcgacgatccgtgggtggaacatgccaaatggttccctcggtgtgaattcctcatccggatgaaagggcaagaatttgttgacgagattcaggggcgatatccgcaccttctagagcagcttctctcaaccagtgacaccaccggtgaggagaacgcagacccaccaattattcacttcggccccggcgagtcttccagcgaagatgcagtgatgatgaacacccctgtggttaagtcggctcttgagatgggattcaacagagatctggtgaagcaaaccgtgcagtcgaagatcttaactactggagaaaactacaaaacggtaaacgacatagtgagcgcgctgttgaatgctgaggatgagaagagggaagaagagaaggaaaaacaagccgaggaaatggccagtgacgatctttcactgattcgtaaaaatcgaatggccctgttccagcagctgacctgcgttctccccatcctggataatctgttaaaggctaatgtaatcaacaagcaggagcacgatatcatcaagcagaagacccaaatcccattgcaagccagagaactcattgacactatccttgtgaaaggtaatgccgctgcgaacattttcaagaattgcttaaaagaaattgactctactctgtacaagaatctgttcgtcgacaagaatatgaagtacatacctactgaggacgtgtccggactgagcctagaagagcagctcaggcgcctgcaagaggagagaacctgtaaggtatgcatggataaagaggtgtctgtggtcttcataccctgcggacaccttgtggtttgccaggaatgtgctccttctctgcgcaagtgccctatctgccgaggaattatcaaaggcaccgtgagaacctttctgtca

SEQ ID NO: 32181 - DNA, 1854 bp, synthetic construct
  misc_feature 1..1854: note = Description of Artificial Sequence: Synthetic coding sequence
  source 1..1854: mol_type = other DNA
atgcacaagacagccagtcaaagactgtttcccgggccatcttatcagaacatcaagagcatcatggaggacagcactatcctgtccgactggactaacagcaacaaacaaaagatgaagtacgacttttcctgcgagctctatcggatgtccacttattctacttttcccgccggagtgcctgttagcgaacgaagtcttgcccgagccggattctattatactggcgtgaatgataaggtgaagtgcttttgctgcggtctgatgctcgacaactggaagctcggcgactccccaattcagaaacacaagcagctgtacccctcctgctcctttattcagaatttggtgtcagcaagcctgggaagcacgtctaagaatactagtcccatgagaaatagcttcgcccactcattgtcacctactctggaacacagctctctgtttagcgggtcttactcctccctgtctcccaatccactcaacagccgcgcagttgaggatatctcttccagccgcacaaatccctactcctacgccatgtctactgaggaagcacggttcctgacatatcacatgtggccattgacttttctttctcccagcgagctggcccgcgcgggcttctactatatcggcccgggagacagagtcgcctgcttcgcttgcggaggaaaactgtccaactgggaacctaaggacgacgctatgtcagaacatcgcaggcacttccccaattgcccatttctggaaaattccctggagaccctccgattcagtattagcaatctgagtatgcaaacacacgcagccaggatgcggacattcatgtactggccttccagtgttccggtacagccagaacagttggcttctgcaggcttttactacgtggggcgcaatgatgacgtgaagtgcttttgttgcgatggcggcctcaggtgttgggagtccggagacgatccttgggtcgaacacgctaagtggtttccccgctgtgagttcctgattcggatgaagggccaggaatttgtcgacgagatacagggtcgctacccacaccttctggaacagctgctttccactagcgataccactggtgaagagaacgccgacccacctattatacatttcggtccaggtgaaagctcttccgaagacgcagtgatgatgaatacacccgttgttaaaagcgccttggagatgggtttcaaccgcgatctggtcaagcagacggtgcagagcaaaattcttacaactggggagaactacaaaaccgtcaatgatatcgtgagtgcactgcttaacgccgaggacgagaagcgggaagaagaaaaggaaaaacaagccgaggagatggcttccgatgacctctccctcatcagaaaaaatcgaatggctctcttccagcaactgacctgtgtgctccctatactggacaacctcctgaaggcaaatgttattaacaagcaggaacatgacattattaagcaaaagactcaaattcccttgcaggcaagggagctgatagacacaatcctggtcaaggggaacgccgctgcaaatatttttaaaaactgcctgaaggaaatcgatagcacactgtataagaacctctttgtggataagaacatgaaatacatccctacagaagatgtgtctggactgtctcttgaggaacagttgcggcgcctgcaagaggagcgcacctgcaaggtctgcatggacaaggaagtgagtgttgtgtttataccgtgcgggcacctggtggtctgccaagaatgtgcaccctccctgagaaaatgtcctatatgtaggggcattatcaaagggacagtcaggacttttctttct

SEQ ID NO: 32182 - DNA, 1854 bp, synthetic construct
  misc_feature 1..1854: note = Description of Artificial Sequence: Synthetic coding sequence
  source 1..1854: mol_type = other DNA
atgcataaaacagcttctcaacgactatttccaggacccagctatcagaacatcaagtccattatggaagacagcactatactctctgactggactaatagcaataaacagaagatgaagtacgatttttcatgtgaattatataggatgtcaacctacagcacatttcctgccggggtgcccgttagcgagaggagccttgctagagcagggttctattacactggtgtcaacgacaaagtcaaatgtttctgctgcgggctgatgttggacaactggaaactaggtgactctcccatccagaagcacaaacagctgtatccgagctgttctttcatccagaatctggtgagcgcatctcttggttctacttcgaagaatacttcccccatgcggaatagctttgcccacagcctgtcacctaccctggaacattcttcactgttctccggatcctactcctccctgtcgcccaaccccctgaactcccgggccgtggaagatatatcatcatctcggacaaatccatactcttacgctatgtccaccgaggaggcacgcttcctaacataccatatgtggccgctgactttcttgtcgccttctgaacttgctagagccggcttttactatatcggccccggggatcgcgtcgcttgtttcgcctgcggcggaaaattatctaactgggagcccaaagatgacgccatgtccgaacatcgaaggcacttcccgaactgtccattcctggaaaactccctggagaccttgcggttttccatcagcaatctctccatgcagacccacgcagcgcggatgcgcacttttatgtactggcccagctccgtcccggtacaacccgaacagctcgcatcggcgggcttctactacgtaggtagaaatgacgacgttaaatgtttctgctgtgacggcggtctacgctgctgggagtcaggtgatgatccttgggtggagcacgccaaatggtttcctcgctgtgagtttctgatcagaatgaaggggcaggagtttgtcgatgagattcaaggcagatatcctcatttactggaacagttgttgtccacctctgacaccaccggggaagagaacgctgatcccccaatcatccatttcggcccgggggagagttcgtccgaagatgctgtgatgatgaacacgcctgtggttaagagtgcgctggaaatgggttttaatagggacctggtcaagcagaccgtgcagagcaaaatcctaaccacgggcgagaattacaagactgtgaatgatatcgttagcgcactgctcaatgctgaagatgaaaaaagggaggaggagaaggagaagcaggccgaagagatggcttcagacgacctgtctctgatccgcaagaataggatggcccttttccagcagctgacttgtgtgctccctattctggacaacttgctcaaggcgaatgttattaacaagcaagagcatgacatcatcaaacagaaaacccagatccctctgcaagctagggaactgatcgacacgatcctcgtgaagggcaacgctgcggctaatatttttaagaattgcctgaaagagatcgactctacactctataagaatctgttcgtcgataagaacatgaagtacattccaaccgaagatgtgtctggtctgagcttagaagagcagttgcgaagactgcaggaggagcgtacatgcaaggtgtgtatggacaaagaagtctctgtagtttttatcccttgtggccacttggtcgtgtgccaggagtgtgcccctagtctgagaaagtgcccgatctgcagggggatcatcaaaggaactgttagaaccttcctttcc

SEQ ID NO: 32183 - DNA, 1854 bp, synthetic construct
  misc_feature 1..1854: note = Description of Artificial Sequence: Synthetic coding sequence
  source 1..1854: mol_type = other DNA
atgcataaaactgcttcgcagcgactgttcccgggaccatcctaccagaatatcaagagcattatggaggattcgactatccttagtgactggactaattcgaacaaacaaaaaatgaagtacgactttagctgcgagctctaccgcatgtctacttactcgactttcccggctggcgtgccggtgtccgagcgctcattggcgagagcaggtttctactacaccggcgtgaatgataaggtgaagtgcttctgctgcggactgatgctggataattggaaactgggagactcgccgatccagaagcataagcaactctacccatcatgctcctttatccagaacctggttagcgcctcactgggctcaacctcgaagaacacgtcaccaatgagaaactccttcgctcacagcctcagcccgactcttgaacatagctcactgttctccggttcgtactcttcactgtccccgaatcctttgaactcccgcgccgtggaagatatctcatccagcagaaccaacccgtactcctatgcaatgtcgaccgaagaggcgcgcttcctcacctaccatatgtggcccctgactttcctctctccctccgaactggcgcgtgccggattttactacatcggacccggagacagagtggcgtgcttcgcctgcggcggaaaactgtccaattgggagcctaaggacgatgccatgagcgaacaccgcagacacttcccaaactgcccctttctggaaaattccttggaaactctccgcttctcgatcagcaacctgtcgatgcaaacccatgcagcacgaatgcgcaccttcatgtactggccatcctccgtcccggtgcaaccagaacaactggcaagcgcgggtttttattacgtcggaaggaatgacgatgtaaagtgtttctgctgtgatggtgggctccggtgttgggaaagcggggacgacccgtgggtggaacacgccaagtggttcccgcggtgcgaatttctgatcaggatgaagggccaagagtttgtggatgaaatccagggaagatacccgcacttgcttgaacagctcctctcgacttccgacaccaccggcgaagaaaatgctgatcctcctatcatccacttcggaccaggagaatcgtcgtccgaggacgccgtgatgatgaacactcctgtggtcaaatcggccctcgaaatggggttcaacagggatctggtgaagcagactgtccagtccaagattctcacgaccggagaaaactacaagactgtcaacgacattgtctcggcactgctgaacgccgaggacgagaaacgggaagaagaaaaagaaaagcaagccgaggagatggccagcgacgacctttcactgattcggaagaaccggatggctctgttccagcagcttacctgtgtgctcccgatcctggataacctcctcaaagctaatgttattaacaagcaggagcacgacattatcaagcagaaaacgcagatcccactgcaggcccgcgaactcatcgacaccatcctcgtgaagggaaacgccgcagcgaatatctttaagaactgccttaaagagatcgactcaaccctgtacaagaacctgttcgtcgacaagaatatgaagtacataccaaccgaagatgtgtcgggcctgagcctggaggagcaactgcggcgcctgcaagaggagcgcacctgcaaggtgtgcatggacaaggaggtgagcgtggtgttcatcccgtgtggacacttggtcgtctgtcaggagtgcgcgccgtcgctgcggaaatgccctatctgccgggggatcatcaaggggactgtgcggacgttcttgtca

SEQ ID NO: 32184 - DNA, 1854 bp, synthetic construct
  misc_feature 1..1854: note = Description of Artificial Sequence: Synthetic coding sequence
  source 1..1854: mol_type = other DNA
atgcacaagaccgcatcccagcggctttttccgggaccaagctaccagaatatcaagtccatcatggaggactcaactattctttccgattggactaactccaataagcagaagatgaagtacgatttttcgtgtgaactgtaccgcatgtcaacctactcgacctttcctgcgggtgtcccggtgtcggagcgcagcctcgcacgagcagggttttactatactggcgtgaacgataaggtgaagtgtttttgctgtgggttgatgctcgataactggaagttgggagatagccctatccagaagcataagcaactttacccgagctgttcattcatccagaacctggtgtctgcatcgttgggttccacttccaagaatacctcgccgatgagaaattcgttcgcgcatagcctttcgcctactcttgaacatagttccttgttctccggctcgtactcctcgctctcccctaacccattgaactccagagcagtggaagatatatcgtcctccaggactaacccttactcctacgcgatgtccaccgaggaagcaagatttctgacgtatcatatgtggccccttacctttctttcgccttcggaactggccagagcaggtttttactacattggaccaggggatcgggtggcatgttttgcatgcggtggaaaactcagcaactgggaacctaaggacgatgctatgtcagaacatcggcgccactttccaaactgcccttttctggaaaactccctcgagactcttagattctccatttcgaacctttcaatgcagactcatgcagcccgtatgaggacttttatgtactggcctagctccgtgcctgtgcaaccggaacaattggcatccgcaggcttttactatgtgggtaggaacgatgatgtgaaatgtttctgttgtgatgggggactgcgctgctgggaatccggtgacgatccatgggtggagcacgccaagtggtttccaaggtgtgagttcctgattaggatgaaaggccaggaatttgtggatgaaatccagggcagataccctcacctcctggaacaactgctgtccacctccgataccaccggagaagagaacgcagacccacctatcattcatttcggaccaggagaatcctcgtcggaagatgcagtgatgatgaatacccctgtggtgaaatccgcactggagatgggattcaatcgggacctggtgaagcagactgttcaaagcaagattctcaccaccggcgagaattacaagacggtgaatgatattgtctccgcactgctcaacgcggaagatgaaaaaagggaggaagagaaggagaagcaggccgaggaaatggcgtcagacgacctgagcttgattagaaaaaaccgaatggccctttttcagcagctcacctgtgtgctcccaattcttgacaaccttctgaaggctaacgtgatcaacaagcaagaacatgacattatcaaacaaaagacccaaatacctcttcaagcgcgagagctgatcgatacgattctggtgaaggggaatgcagcagcaaacatcttcaaaaactgtctgaaagaaatcgattccactctgtacaagaatctgtttgtggataagaacatgaagtacattcccaccgaggacgtcagcggactgagcttggaggaacaacttcgtaggcttcaggaagagaggacttgcaaggtttgtatggacaaggaggtgtcagtggtgttcattccttgtgggcacctggtggtgtgtcaagagtgtgcaccgtcacttagaaagtgtcccatttgccgcggtatcattaagggaaccgtgcggacctttctctca

SEQ ID NO: 32185 - DNA, 1854 bp, synthetic construct
  misc_feature 1..1854: note = Description of Artificial Sequence: Synthetic coding sequence
  source 1..1854: mol_type = other DNA
atgcataagaccgcatcgcaacggctgttccctggcccaagctaccaaaacataaagtccattatggaagattcgaccatcctttcagattggaccaattcaaacaaacagaagatgaagtacgatttctcatgcgagttgtacaggatgtccacttactcgaccttccctgcaggagtgccagtgagcgaaagatcgctggcgcgcgccgggttctactacactggcgtgaatgacaaggtgaagtgtttctgctgcgggctcatgctcgacaactggaagctgggagattcccccattcagaagcacaagcagctttacccctcttgcagctttattcagaaccttgtgagcgcatcgcttgggtcaaccagcaaaaacacttcccctatgcgtaactctttcgctcattcccttagcccgactctggagcattcatccctttttagcggatcctacagctcgcttagccctaatcccctgaacagccgcgcagttgaggatatttcctcctcgaggactaacccatatagctacgcaatgtccaccgaggaggcacgtttcctgacctaccacatgtggcctctgacgtttctttcaccatccgaactcgcaagagcggggttttactacattgggcctggtgatagagtggcatgttttgcatgcggaggtaagctgtcaaactgggaacctaaggatgacgccatgtcggagcaccgcaggcactttccaaactgtccttttctcgaaaactcgcttgagactctgcgctttagcatctcgaatctctcgatgcaaacccacgcagcgcgtatgcgcacctttatgtattggccatcgtcagtgccggtgcagcctgagcaactcgcatccgcaggattctactacgtcggacggaatgacgatgtcaagtgtttttgttgcgatggggggctccgctgttgggagtcgggagatgatccttgggtggaacatgctaagtggttccctcgttgtgaattccttattcggatgaaggggcaggaatttgtggatgagattcaaggtcgctacccacacctgctggaacagctgctctcgacctcggataccaccggagaggagaacgcagacccacccattattcattttggccctggcgaatcgagctccgaggatgcagtgatgatgaacacccctgtcgtgaagtcggcacttgaaatgggttttaacagagatctcgtgaagcaaactgtgcaatcaaagatcttgaccaccggagaaaactacaagactgtgaatgatatagtgtcggcactcctcaacgcagaggatgaaaagcgcgaggaagagaaagaaaagcaggcagaggaaatggcatcggacgatttgtccctgattcgcaagaatcgaatggcactctttcaacaacttacttgcgtcttgcctattctcgacaacctgcttaaagcaaatgtcattaacaagcaggaacatgatatcatcaagcaaaaaacccaaatcccactgcaggcacgtgaactgattgacactatcctggtcaagggtaacgcggctgcgaatatcttcaaaaactgtcttaaggaaattgattcaactctttacaagaatcttttcgtcgataagaatatgaagtatattcctaccgaagatgtgtccggacttagccttgaagagcaactccgcagactgcaggaggaaaggacgtgtaaggtgtgtatggataaggaagtgtcagtcgtgttcatcccatgcggtcacctggttgtgtgtcaggaatgtgcacccagcttgagaaagtgcccaatttgtagaggtatcatcaagggtaccgtgcgaacttttctgtcg

SEQ ID NO: 32186 - DNA, 1854 bp, synthetic construct
  misc_feature 1..1854: note = Description of Artificial Sequence: Synthetic coding sequence
  source 1..1854: mol_type = other DNA
atgcacaaaacagcatctcagcggctttttcctgggccttcttaccagaacataaaaagtataatggaggatagtacaatcttatctgactggactaattccaataaacagaagatgaaatacgatttctcttgtgagctatatcgaatgtccacatactccacattcccggctggagttccagtgtccgaaaggagtctagctcgcgcagggttctattacacaggggtcaatgataaagtcaaatgtttctgttgtgggctcatgctcgataattggaaactaggagattcaccaattcagaaacacaaacagctctatcctagttgcagtttcatacaaaatctcgtgagtgcttccctcgggtccacttctaaaaacacatcacctatgcgcaactctttcgcacactctctatctcccacactggaacatagttctttattctccggatcatattcttctttgtctcccaatcctctgaactctagagctgtggaggatatatcctcatccaggactaatccttatagttatgcaatgtccacagaggaggctcggttcctgacatatcatatgtggccactcacttttctgagtcccagtgaactcgctagagcagggttctattacatcggacccggggatcgagttgcatgtttcgcctgcggagggaaactgtctaactgggaaccaaaagatgatgctatgtccgaacacaggcggcatttccccaattgtcctttccttgaaaactccctagaaactttgaggttctctatctctaacctcagtatgcagacgcatgcagccaggatgcggactttcatgtattggccttctagtgtacctgtacagcctgaacagctcgcatccgcaggattttattatgtcggacgaaacgatgatgtaaaatgtttttgctgtgatggaggactccggtgttgggaatctggggacgatccctgggtagaacacgccaaatggttccctaggtgtgaattcctaatccgaatgaaagggcaggaatttgttgacgaaatccaggggcggtacccccatcttctcgagcagttactgtctacaagtgatacaacaggggaagaaaatgccgatcctccaatcattcacttcggaccaggggagtcctcatccgaggatgcagttatgatgaatacacccgtggtcaaatccgccctggaaatggggtttaacagggacctggttaaacagactgtccagagtaaaattctgactactggagaaaattataaaacagtaaatgacatcgtgtctgctctcctgaatgctgaagatgaaaaacgggaagaggaaaaagaaaaacaggctgaagaaatggcctccgacgatctatccctaatccggaaaaatcgaatggctctgtttcagcagcttacttgtgtgctccccatacttgataaccttcttaaggctaacgtgataaataagcaggagcacgatataataaagcagaaaactcagattccactccaagcaagggaactgatagatactatcctagtaaaagggaacgctgctgcaaatatttttaagaattgcctaaaagaaatagattctactctgtataaaaacttatttgtagataaaaatatgaagtatattcccacagaagatgtctcagggctctctctggaggaacagcttcgacggctgcaggaagaacgaacttgtaaagtttgtatggataaagaagtctctgtggtcttcataccctgcggacatctcgtggtgtgccaggagtgtgccccttccttaaggaagtgtcctatctgccgcggaatcataaagggaactgtccggacattcctatcc

SEQ ID NO: 32187 - DNA, 1854 bp, synthetic construct
  misc_feature 1..1854: note = Description of Artificial Sequence: Synthetic coding sequence
  source 1..1854: mol_type = other DNA
atgcacaaaactgcatctcagcgcctctttcccggcccaagctaccagaacatcaagagcatcatggaggactctactattctctctgactggacaaactcaaacaagcagaaaatgaagtacgacttcagctgcgagctgtatcgcatgtccacctatagtacctttccggccggggtccccgtgagtgagagaagtctggcaagggccgggttctactatacgggcgtcaacgataaagtgaagtgcttctgctgtgggctgatgctggataactggaaattaggggactcgcctatccaaaagcacaagcagctgtacccatcatgttcctttatccaaaatttggtctctgccagcctcggttccaccagcaagaacacatcgcccatgagaaactccttcgcccacagcctgagcccaactctcgagcactcttccctgtttagcggatcttatagctcgctgagtcccaacccactcaattcgagagccgtggaagacatatcgagctcccgaacaaatccctacagctacgcgatgagtacagaagaggcacggttcctcacctaccatatgtggcctctcactttcctttccccaagtgagttagcgcgcgccggcttctactatattggccccggggatagggtcgcatgcttcgcttgcgggggaaagctgagtaactgggaacctaaggatgacgctatgtctgagcacagacgccactttccgaactgtccctttttggagaacagtctcgagaccttacggttcagtatcagcaacctctctatgcagacacatgctgcaaggatgaggacgtttatgtattggccaagctccgtacctgtgcagcccgagcagctggcttctgctggcttctactatgtgggtcgaaacgacgacgtcaagtgcttctgttgtgacggaggactgcggtgttgggaatccggggatgatccttgggtggaacacgcaaagtggttccccagatgcgaattcttgattcgcatgaagggccaggaatttgtggacgaaatccagggtcgctacccgcacctgctggaacagttgctatccacgagtgacacgactggggaagaaaatgccgacccaccgataatccatttcggcccgggggagtcgtcaagcgaggatgctgtgatgatgaatactcccgtagtgaaaagcgccctggagatgggatttaaccgggacctggtcaagcagacggtccagagtaagatcctcacaactggcgagaattataaaacggtgaatgacatcgtgtctgcactgcttaacgcagaggatgaaaaacgtgaagaagagaaagagaagcaagctgaagaaatggcgtctgatgacctatccctcattaggaagaatcggatggcactgtttcagcagttaacttgcgttttacctatactggataatctcctgaaggccaatgttatcaataaacaagaacacgacatcatcaagcaaaagactcagattcccttgcaggcgagggaactgatagataccatcctggtcaaagggaatgctgccgcgaacattttcaaaaattgccttaaagagatcgacagcacattgtacaaaaatttattcgtcgataagaatatgaagtacatcccaactgaggacgttagcggcctgtcactggaagaacagctccgccggctccaagaagaacggacgtgtaaggtttgtatggacaaggaagtgtcagtagtttttatcccttgcggccacctcgtggtctgccaggaatgtgcccccagcctgcgaaagtgtccaatttgcaggggaatcataaagggaacggtgcgcactttcctgtcc

SEQ ID NO: 32188 - DNA, 1854 bp, synthetic construct
  misc_feature 1..1854: note = Description of Artificial Sequence: Synthetic coding sequence
  source 1..1854: mol_type = other DNA
atgcacaaaaccgcctctcagcgactctttccaggcccaagctaccaaaatattaaatcaatcatggaagactccacaatcctgtctgattggaccaacagcaacaaacagaagatgaaatatgatttttcttgtgaactttacaggatgagcacatacagcacctttcctgctggggtcccagtgtctgaacgtagccttgcgcgagctggcttctactacactggcgtcaatgacaaggtgaaatgcttctgctgcggactgatgctcgacaattggaagctgggcgattcccccatccagaaacataagcaactgtatccctcttgctcttttatccagaacctggtgagcgcttcccttggttccacctcaaaaaataccagcccgatgcgaaattccttcgcgcattcactgagccctacactggagcactcctccctgttttctggaagttatagttcactaagcccgaatcccctaaactcccgagccgtcgaggacatcagttcatcccgcactaatccctattcctatgccatgagtacagaagaggcccggttcctaacttaccacatgtggccactgaccttcttgagccccagcgaactggctcgagccgggttctactatatcggccccggcgatagggtggcctgtttcgcatgcgggggcaagttatcaaactgggaaccaaaagacgacgccatgagtgagcaccgacggcactttcctaattgcccgttcttggagaattcactggaaaccctccgattctctattagcaacctaagcatgcagacccacgcggccagaatgcgcacctttatgtactggcccagcagcgtaccagtacagccagaacagctagcgtccgccggattctactatgtcggtcgaaacgatgatgtgaaatgcttctgctgcgatgggggcctgcggtgctgggagtccggtgacgacccttgggtggaacacgccaagtggtttcctaggtgcgagttcctcatacggatgaaagggcaagaattcgtggatgaaatccaaggccggtatccccacctgctggagcagctcctttcaacctcagacactacaggcgaagagaacgcagatcccccgatcattcattttggcccaggcgagagttcgtccgaagatgctgtcatgatgaatacgcccgttgtgaagtctgcacttgagatggggtttaacagagatctcgtaaaacagaccgtccaatccaaaattctgacaacgggcgagaattataagaccgtgaatgacatagtgagcgcactacttaatgctgaggatgagaaaagggaagaggagaaggagaagcaagccgaggagatggccagtgatgacctcagtcttatccggaagaatagaatggccctcttccagcagttgacatgtgtgcttccaattcttgataatctgctgaaagctaatgtgattaataaacaggaacatgatatcattaaacagaaaacacagatccctttgcaggcccgggaattgatagatacaattctagtaaaagggaacgccgcggctaacatctttaaaaactgtctgaaagagatcgactcgacactgtacaaaaacctgtttgtcgataagaatatgaaatatatcccgacagaggatgtgtctgggctcagcctggaggaacaactgcggagactccaggaggagaggacgtgcaaagtgtgcatggataaggaagtgagcgtggtgtttatcccctgcggccacctagttgtttgccaggagtgtgctccctcgctgaggaagtgccccatctgtagaggcatcatcaagggcactgtgcgcacctttctcagt

SEQ ID NO: 32189 - DNA, 1854 bp, synthetic construct
  misc_feature 1..1854: note = Description of Artificial Sequence: Synthetic coding sequence
  source 1..1854: mol_type = other DNA
atgcataagacagcttcgcagaggctgtttccaggccctagctaccaaaacataaagtccatcatggaagattccacaatcctgagcgactggactaactctaacaagcagaaaatgaagtatgatttctcttgcgaactctatcgcatgtccacctacagcacttttcccgcaggcgtccccgtgagcgaacgctccttagcaagagcgggcttctattataccggcgttaacgacaaggttaagtgcttttgctgtggtctgatgctcgataactggaagctgggcgattccccaattcagaagcacaagcagttgtaccctagctgcagctttattcaaaacctggtgagtgcatccctgggaagcacctcaaaaaacacatcacctatgcggaactcattcgctcacagcttgtccccaaccctggagcatagtagcctcttctcagggtcatattcctctctttctcccaacccactgaacagcagagccgtcgaagacatctctagctcccgtaccaacccatactcctacgcgatgtcaactgaggaagcaaggttcctgacttaccatatgtggcccctgacattcctgagccccagcgaattggctcgtgcaggcttctactatatcggcccgggggaccgcgttgcttgttttgcctgcggagggaagttgtctaattgggagcccaaggacgacgctatgtcagagcaccggagacattttccgaactgcccctttcttgagaacagccttgagactctgaggttttccatttcaaaccttagcatgcaaacacacgctgcgaggatgcgcacctttatgtactggccttcgtcagtacctgtgcaacctgaacagctcgcttccgctggtttttactacgttgggcgaaatgatgatgttaaatgtttttgctgcgacggaggcctgcgctgttgggagagtggggacgatccatgggtggaacacgctaagtggttcccgagatgtgaatttttaatcaggatgaaaggccaagaatttgtggacgagatccagggaaggtacccccatcttctggaacaactgctgtccacaagtgacactaccggagaggagaacgctgatccaccaatcatacactttggcccaggagagtcaagctcagaagacgcagttatgatgaatacccctgtggtcaagagcgcactcgaaatggggtttaacagagacctggtgaagcaaacagtgcaaagcaagatactcacaaccggagaaaattataaaaccgtgaacgatatcgtgagcgcgctgttaaacgccgaggatgaaaagagagaagaagaaaaagaaaagcaggcagaagaaatggcaagcgatgacctgtcactcatcagaaagaatcgtatggccctgttccagcagctgacttgtgtcctccctatcctcgataacttgctgaaagctaatgtgatcaacaaacaggagcacgacatcatcaaacaaaaaacccagatccccctgcaggctagagaactcattgatacaatcttggtgaagggcaacgctgctgccaatatctttaagaactgtctaaaagaaatcgatagcaccctctacaagaatctttttgtcgacaaaaacatgaagtatatcccaacagaagacgtttctgggttgagcctggaggaacagctgcgcaggttgcaggaggaaaggacttgcaaggtgtgcatggataaagaagtttcagtcgtgtttataccatgtggacacctggttgtgtgccaggagtgtgctccaagcttgcgcaaatgccccatctgcagaggtatcatcaaaggcacggttcggactttcctttct

SEQ ID NO: 32190 - DNA, 1854 bp, synthetic construct
  misc_feature 1..1854: note = Description of Artificial Sequence: Synthetic coding sequence
  source 1..1854: mol_type = other DNA
atgcataagaccgcaagccaacggttgttcccaggaccaagctaccagaatatcaagtcgatcatggaggattccaccattctctccgactggaccaactcgaacaagcagaaaatgaaatacgatttttcatgtgaactgtatcgcatgtccacttactctacttttcctgctggcgtccctgtgtccgagagatcactcgcgcgcgcagggttctactacaccggtgtgaatgacaaagtgaaatgtttttgttgtggactcatgctcgataactggaagctcggagattccccaatccaaaaacataagcagctgtacccatcctgtagctttattcagaaccttgtgagcgccagcctcggatcgacttcgaaaaacacgagccctatgagaaattcctttgctcattctctttcgcccactctcgagcactcctcgcttttctccggttcctacagctcgctgtcgcccaacccgcttaattcccgggcggtcgaggacatttcgtcgagccgtactaatccttacagctacgcaatgagcactgaggaggcaagatttttgacttaccatatgtggccactgaccttcctgtcgccttccgaattggcccgcgcaggtttttactacatcggtccaggagatagagtggcatgctttgcgtgcggaggcaagctgtcgaactgggaacctaaggatgatgcaatgtccgagcatcggcggcactttccaaattgtcctttcctcgagaattcgctcgaaacccttcggttctccatatcgaacctgagcatgcaaacccatgccgcccgcatgcgtaccttcatgtactggccctccagcgtgcccgtgcaacctgagcaactggcatcggcagggttttactacgttggacgtaatgatgacgtcaaatgtttctgctgtgacggagggcttcgatgctgggagtcgggggacgatccctgggtggaacatgcaaagtggtttcctcggtgcgaattccttattcgcatgaagggccaggaattcgtggatgaaattcaaggccgctacccacatctgcttgagcaactcctgtcgacctcggatacgaccggcgaagagaacgctgaccctccgatcattcacttcgggcctggcgagtccagcagcgaagatgcggtgatgatgaacacccctgttgtgaagtccgccctggaaatgggattcaatcgtgacctggtcaagcaaaccgtccagtcaaaaatccttaccaccggtgaaaactacaaaacggtgaatgatatcgtgtcggccctccttaatgcagaggacgagaagagggaagaagaaaaagaaaagcaagccgaagaaatggcctcggatgacctttcgttgatccgcaaaaatcggatggcgctttttcagcagctgacctgtgtgctccctatactcgacaacctcctgaaggccaacgtgattaacaagcaagaacacgacataatcaagcagaaaacccaaatcccccttcaggcaagggaattgattgataccatcctggtcaagggtaatgcggcagcgaacatattcaagaattgcctgaaggaaattgattccaccctctacaagaatctgttcgtggataagaacatgaaatacattcccacggaggacgtttccggactttcacttgaggaacaacttcggagactgcaggaagagagaacctgcaaggtttgtatggataaagaagtgtcggtggtctttatcccttgcggtcatctggtcgtgtgccaagaatgcgcaccctctctgcggaagtgtcctatttgtagaggcattatcaagggtactgtgcgcactttcctgagc

SEQ ID NO: 32191 - DNA, 1854 bp, synthetic construct
  misc_feature 1..1854: note = Description of Artificial Sequence: Synthetic coding sequence
  source 1..1854: mol_type = other DNA
atgcacaaaacggcttcccaacggctgtttcctgggcctagttaccaaaacatcaagtccatcatggaggattctaccattctgtctgattggactaactccaacaagcagaagatgaagtacgacttctcctgcgagctctatcgtatgtcaacctattctacatttcctgccggagttccggtgtccgagcgtagcctggcccgtgctggtttctattacacaggcgtgaatgataaggtgaaatgcttctgttgtggccttatgctggacaactggaagctcggagacagtccaattcaaaaacacaagcaactttatccatcctgctcattcatccaaaacctggtgagcgcatctctggggagcacatccaagaatacgtcacccatgcgaaactcatttgcccacagtttatctcccactctcgaacattcgtctctgttctccggatcttattccagcttgtcccccaatcccctgaatagcagagccgtggaagatattagtagtagcagaacaaacccctacagctacgctatgagcactgaagaggcccgattcttgacctaccacatgtggcccttaacctttcttagtccgtccgagctggcccgcgccggtttctactatattggacctggagacagggtggcctgtttcgcctgtggggggaaactttcaaattgggaacccaaggatgatgcaatgtctgaacatcgccgccatttccccaactgcccctttcttgagaactccctcgagactctgcgattttccatttcgaatctgtcaatgcagacacacgccgcgaggatgcgaacttttatgtactggccttcttccgtgccagtccagcctgagcaactggctagtgccggattctactacgtaggacgcaatgacgacgtaaagtgtttctgctgcgacggggggctccggtgctgggagagcggagatgatccttgggtggaacacgccaagtggtttccgcgatgcgagtttttgatcagaatgaagggacaggaatttgtggatgagatccagggtcggtatccacaccttctcgagcagctcttatcgacatccgacaccaccggggaagagaacgccgatccacctatcattcattttggtccgggagaaagttcaagcgaggacgctgtgatgatgaatactccagttgtaaagtctgccctcgaaatgggctttaatagggaccttgttaagcagaccgtgcaatctaagattctcactaccggcgagaattacaagactgtgaatgacatcgtgtctgctttacttaatgccgaagatgagaaaagagaagaggaaaaggaaaaacaggcggaagagatggccagcgatgacctgtccctgataaggaagaacagaatggcacttttccagcagctaacttgtgtattacccattctggataacctcctgaaggcaaacgtgattaataagcaggagcacgacatcatcaagcagaaaacgcagatccctctccaggcccgcgagctgatcgataccattctggtgaaaggcaacgctgctgccaatatatttaaaaattgtctgaaggaaatcgatagtacactgtataagaatcttttcgttgacaagaatatgaagtatattcccacggaagacgtgtccggattgagccttgaagagcagttacgacggctgcaggaagagcgcacctgcaaggtttgcatggataaggaagtatccgtagtatttataccgtgcgggcatctggtggtctgccaggagtgtgcaccgtcactgcgaaaatgtcccatctgcagaggtatcattaagggaacagttagaacgtttttgagt

SEQ ID NO: 32192 - DNA, 1854 bp, synthetic construct
  misc_feature 1..1854: note = Description of Artificial Sequence: Synthetic coding sequence
  source 1..1854: mol_type = other DNA
atgcataaaaccgcgagccagagacttttccctggcccgagctaccaaaatattaagtccattatggaggactccactattttgtctgattggacgaactctaacaagcagaagatgaagtatgatttttcatgcgagttatatagaatgagtacctattcaacctttccagctggggttcctgtgagcgagaggtctttggctcgcgccggattctattacacaggtgtcaacgataaggtcaagtgtttttgctgcggcctcatgctagataactggaagttgggagatagcccaattcagaagcataaacagttatacccatcatgctctttcattcaaaatctggttagcgcgtctttgggatcgacatcaaagaatacatctcctatgagaaactctttcgcacactcattatctcctacgttagaacattccagcttgttcagtggatcttattccagtctttcccccaatccattgaatagccgcgcagtggaggatatctccagcagtcgcaccaacccctattcctatgccatgagcacagaagaagccaggtttctcacttatcatatgtggccccttacattccttagtccttctgaactcgctcgggctgggttttattatattgggcctggcgatcgtgtggcttgctttgcctgcggtggaaagctttcaaattgggagcctaaggatgacgctatgtccgaacaccggaggcatttcccgaactgtccatttcttgagaattctttggaaactctaagattttcaatctctaatctgtcaatgcaaacccacgctgcccgtatgcgaacttttatgtactggccctcgagtgttcctgtgcagcctgaacagttggcaagtgctggattctactacgttggccgtaacgacgatgtgaaatgcttttgctgtgacggtggtcttcgatgctgggagagcggagatgatccatgggttgaacatgctaaatggttccctaggtgcgaattcttaatcaggatgaagggacaagagtttgtagatgagattcaaggcagatatcctcacctccttgaacaacttctctcaacatccgatacgaccggggaggaaaatgcagatcctccaattatccactttggacctggagaatcttcgtccgaggatgctgttatgatgaacaccccagtggttaagagcgcactagagatggggttcaatagggaccttgttaagcagacagtgcagagtaagatcttgaccactggggaaaattacaaaacggtgaatgacatcgtttctgctctactcaatgctgaggacgaaaagagagaggaagagaaggaaaaacaggcagaagagatggcgtcagatgacttgagtttgattagaaagaaccgtatggcgttatttcaacagcttacatgcgtccttccaatactcgataacctcctcaaagccaacgttattaataaacaggagcatgacattattaagcaaaaaactcaaatcccccttcaggcacgagagttgattgatactatcttggtaaagggaaatgcagcggcgaacatattcaaaaattgcttaaaggagattgacagtacactttacaagaacctatttgtggacaagaatatgaaatacattcccaccgaagacgtgagtggtcttagtcttgaagagcagttgaggagattgcaggaagagcgcacttgcaaggtgtgcatggataaggaagtgtctgttgtgtttatcccttgcggacacctggttgtatgccaggagtgtgcaccaagccttcggaaatgtcctatctgtcggggtattattaaaggtactgtaaggacatttttgtca

SEQ ID NO: 32193 - DNA, 1854 bp, synthetic construct; identical to SEQ ID NO: 32188
  misc_feature 1..1854: note = Description of Artificial Sequence: Synthetic coding sequence
  source 1..1854: mol_type = other DNA

SEQ ID NO: 32194 - DNA, 1854 bp, synthetic construct
  misc_feature 1..1854: note = Description of Artificial Sequence: Synthetic coding sequence
  source 1..1854: mol_type = other DNA
atgcataagaccgcatctcagaggcttttcccgggaccgtcatatcaaaacatcaagagcataatggaagattcgaccatcctctcagactggactaattccaacaagcagaaaatgaagtacgacttctcctgcgagctgtacagaatgtcgacctactccactttccccgccggagtgccggtttcagaacgttccctggcacgcgcgggattttactatactggggtgaatgacaaggtgaaatgcttctgttgcggcctgatgctggataattggaagctcggcgattcgccaatccagaaacacaagcagctctacccctcgtgctccttcatccagaacttggtgtcagcgagcctcggctccacctcaaaaaacacctcaccgatgaggaacagtttcgcgcatagcttgtcgcccactcttgaacactcgtccctcttctcggggagctattcatcgctgagccctaaccctctgaattctcgcgccgtggaggacatcagctcgagccggactaatccctactcctacgcgatgtcgacggaagaagcacggttcctgacctaccacatgtggccgcttacttttctgtcccctagcgagctggctcgcgcaggattttactacattggaccaggtgaccgcgtggcttgcttcgcctgtggcgggaagctgagcaattgggagccgaaagacgatgcaatgtccgaacatcgccgccatttcccgaactgccctttcttggaaaattcgctggaaactctgcgcttttccatctccaacctgtcaatgcagacccacgccgctcgcatgcgaaccttcatgtactggccatcgagcgtccccgtccagccggaacaactggcctccgctggcttctactacgtcggacggaacgacgacgtgaagtgcttctgctgcgacggagggctgagatgctgggagtcgggagacgatccatgggtagagcacgctaagtggttcccgcgctgcgagtttcttatcagaatgaaaggtcaagaatttgtggacgaaatccagggtagataccctcacctcctcgaacagcttctgtcgacttcggacaccacgggagaggagaacgccgacccaccgatcatccatttcggacctggtgagtcctcttcagaggatgccgtgatgatgaacactccagttgtaaaaagtgcgcttgagatgggattcaatcgcgaccttgtaaaacagacggtccaaagcaagatcctgactacgggcgagaactacaagaccgtcaacgatattgtctctgccctgctcaacgcggaagatgaaaagcgtgaagaagagaaggaaaagcaagcggaagagatggcttcggatgatctctccctgatacggaaaaacaggatggccctgttccagcagttgacctgcgtgcttcctattctcgataatctcctgaaggcaaatgtgatcaacaaacaagaacacgatatcatcaagcaaaagactcaaatcccgttgcaggcccgggaattgatcgacactatcctggtgaaaggcaacgcggccgccaatatctttaagaattgtctgaaggagattgactcaaccctgtacaagaacctgtttgtggacaaaaacatgaagtacatcccaactgaggacgtgagcggcctctccttggaagagcagctcagacgccttcaggaagagcggacctgtaaagtgtgtatggacaaggaagtctcggtcgtgttcattccatgcggccacctcgtggtgtgccaagaatgcgccccgagcctccggaagtgcccaatctgtcgtggaatcatcaagggaaccgtccgaaccttcctgagc

SEQ ID NO: 32195 - DNA, 1854 bp, synthetic construct
  misc_feature 1..1854: note = Description of Artificial Sequence: Synthetic coding sequence
  source 1..1854: mol_type = other DNA
atgcacaaaactgcatcgcagcgcctgttccctggaccgtcctaccagaacatcaagtctatcatggaggactccacaatactcagcgactggacgaattcgaataaacagaagatgaaatatgacttctcctgcgagctgtaccggatgtctacctatagcacgtttccagccggagttcccgtgtctgagcggagtctggctagggcagggttttactataccggagtcaacgacaaagtgaaatgcttctgttgcggacttatgctggataattggaagctcggcgatagtccaattcagaagcacaagcagctatatccttcttgctcctttatccagaacctggtcagcgcgtctcttggcagcacttctaagaataccagtcctatgagaaacagcttcgcccactccctgtccccaacgttggaacattcttcccttttctcaggcagctactcatccttgtcaccgaatccattgaacagccgtgctgtcgaggacatctcttcctccaggactaacccttacagctacgcaatgagtaccgaagaggctagatttctgacttaccacatgtggccgctcacattcctttctccctctgaactggcccgcgccggattttattacatcggtcccggcgatagagtggcttgttttgcctgcggaggcaagctgtctaactgggagcccaaggatgatgcaatgagcgaacacagaagacactttcctaactgccccttcctggagaacagtctggagacattgcggttttccatttcgaatcttagtatgcaaactcacgcagcccggatgagaacctttatgtactggcctagcagtgtccccgtgcagcctgaacagttggcctccgcagggttctactacgtgggaagaaacgacgatgtgaagtgtttctgctgtgacggtggacttcgctgctgggaaagtggagacgacccctgggttgaacacgctaaatggtttccaaggtgcgagtttctaattcgaatgaagggccaagagtttgtggatgagatccagggcagatacccccatttacttgagcaactgctctcaactagcgatactactggcgaagaaaacgccgaccctcccatcattcattttggccctggcgaaagttcctctgaagacgctgttatgatgaacaccccagtggtgaagtctgctctggagatgggattcaatcgcgacctcgtgaagcagactgttcaaagtaaaatcctgacgactggtgagaactacaagactgttaacgatatcgtctctgcattgcttaatgccgaggatgagaaacgggaggaagaaaaggagaagcaggctgaggagatggcctccgatgacctgtctttgatcaggaagaaccggatggccctgtttcaacagctaacttgtgtgctccctattctggataatctgttgaaggccaacgtgatcaataagcaggagcatgatattattaaacagaaaactcagataccattgcaggcgcgagagcttatcgatactatccttgtgaagggcaatgccgccgctaatatctttaagaactgcctgaaggaaatcgatagcaccctatacaaaaatctctttgtggataaaaatatgaaatatatccctactgaggatgtcagcgggctcagcctggaggaacagttgcggcggctgcaggaggagcgcacctgtaaagtgtgcatggacaaggaagttagtgtcgtcttcattccgtgcggccatctggtggtgtgccaggagtgtgccccgagcctgcgcaagtgcccaatttgtcgcggcattatcaagggaaccgttcgaacctttctcagc

SEQ ID NO: 32196 - DNA, 1854 bp, synthetic construct
  misc_feature 1..1854: note = Description of Artificial Sequence: Synthetic coding sequence
  source 1..1854: mol_type = other DNA
atgcataagacggcgtctcaacgactcttccccggtccgtcatatcaaaacatcaaatccattatggaggatagcaccattctgtctgattggactaattcgaacaaacaaaagatgaagtacgactttagctgcgaactgtacaggatgtcaacgtactccacttttcccgcaggtgtgcctgtgtccgaacgaagcctggcacgtgcagggttctactacactggtgtgaatgataaagtgaagtgtttttgttgcggactcatgctggacaactggaagctcggtgattctccaattcagaaacacaaacagctgtacccctcgtgctccttcatccagaatttggtgtccgcatcgcttggatcgacttcaaagaacaccagcccaatgcgcaactcctttgcccactccctgtccccgactcttgaacattcgagcctgttctcagggagctattcatcgctgagcccaaatccactcaattccagggccgtggaggacatttcgtcatcgaggactaacccatattcatacgcaatgtcgacggaagaggctaggttcctgacttaccatatgtggcctcttaccttcctcagcccatcagaactggcccgggcaggcttttactacattggcccaggggatcgcgtggcttgttttgcctgcggaggaaaactttcgaactgggaaccaaaggatgatgctatgagcgaacaccgccgacattttccaaactgtccttttctcgaaaactctcttgaaactcttcggttttcaatttcaaacctttcgatgcaaacccatgccgcaagaatgcgcaccttcatgtactggccgtcctcggtgcccgtccagcctgaacaactggcatccgccggtttttactacgtcgggcgcaatgacgatgtgaagtgtttctgctgtgacggaggacttcggtgttgggaaagcggagacgatccgtgggtggagcacgcaaaatggttcccacgttgtgaatttcttattaggatgaagggtcaagagtttgtcgacgaaatacagggtcgctacccacatcttcttgagcagcttctttcgacttcagacactaccggcgaagagaatgcagatcctcccatcatacattttggacctggagagtcaagctctgaggatgcagtgatgatgaatactcccgtggtgaagtccgcacttgagatgggatttaacagagatctggtgaagcagacggtgcaatcaaagatcttgaccaccggcgaaaactacaagactgttaacgacattgttagcgccctcctgaatgcggaggatgagaagagagaagaagagaaggaaaagcaggccgaagagatggcgtctgacgatctctcactgattagaaaaaaccggatggcgctttttcaacaattgacctgcgtgctgcctattctggataacctcctgaaggccaacgtcataaacaagcaagaacacgacatcataaaacaaaagacccaaattccactgcaagctagagagttgatcgataccattcttgttaagggaaatgcagccgcaaacatcttcaagaattgtcttaaggaaatcgattctaccctttacaaaaacctttttgtggacaagaacatgaagtacatcccaaccgaggacgtgagcggcctttctctggaggaacaactccggagactgcaagaagaacgaacctgcaaggtgtgtatggataaagaagtctccgtggtctttatcccatgtggacatcttgtggtttgccaggagtgtgcaccgtcacttcgtaagtgtccaatttgtagaggcatcatcaagggtacggttcggacttttctgtct

SEQ ID NO: 32197 - DNA, 1854 bp, synthetic construct
  misc_feature 1..1854: note = Description of Artificial Sequence: Synthetic coding sequence
  source 1..1854: mol_type = other DNA
atgcataagaccgccagccaacgcctctttccgggaccgtcctaccagaatatcaagagtatcatggaggactcaaccattcttagcgactggaccaactcgaataagcagaagatgaagtacgacttctcatgcgagttgtacagaatgtcgacgtactccacgttcccagcaggagtgccggtgtcggaaaggtctttggcacgagccggattttactacactggcgttaatgacaaagtcaagtgcttctgttgcggacttatgctcgataattggaaattgggcgattcacctatccaaaaacataagcagctgtatccgtcatgcagtttcatccaaaacctggtgagcgcctcgctcggctccacttccaagaacacttctccgatgcgcaatagctttgcccactccctgtcgccgactctggaacattcctccctgttctccggatcgtactcaagcctctcaccaaacccactcaactcaagagcggtggaagatatttccagctcacgcaccaatccttactcgtatgccatgtccactgaggaggcccggttcctcacctaccatatgtggccgcttaccttcctctcgccgtccgagctggccagagctggcttctactacatcggcccgggcgaccgcgtcgcctgtttcgcatgtggaggaaagctgagcaactgggagccgaaggacgacgccatgtccgagcaccggcgacactttccgaattgtcccttcctggagaactcactcgaaacgctccggttctcaatctcgaatctgtcaatgcagactcatgcggcgagaatgcggaccttcatgtactggccgtcaagcgtgcctgtgcagccggaacagctggccagcgcgggtttctattacgtggggagaaacgacgatgtgaagtgcttttgctgtgacggtgggttgcgctgctgggaatcgggggatgacccgtgggtcgagcacgctaagtggttcccgaggtgcgagttcttgattcgaatgaaaggacaagaatttgtcgatgaaatccaggggcgctacccacacctcctcgaacagctcctgtccactagcgatactactggggaagaaaatgcagaccctccgatcattcatttcggacctggagagagctcgtccgaagatgccgtgatgatgaataccccggtcgttaagtcggcgctggagatgggcttcaatcgggacctcgtgaaacagacggtgcagagcaagatcctcactactggggagaattacaaaactgtgaacgatatagtatcggctttgctgaatgcagaagatgagaagcgggaggaggagaaagaaaagcaggcggaagaaatggcatccgacgatctgtccctcattagaaagaaccggatggccctgttccagcagctgacctgtgtactgccaatcctggacaacttgctgaaggccaacgtgatcaacaagcaagagcacgatatcatcaagcagaaaactcaaatcccgctccaggcacgggaattgatcgacaccatccttgtgaagggaaatgccgcggctaacatctttaagaattgcctgaaggaaatcgacagcactctttacaagaacctcttcgtggacaagaatatgaaatacatcccaactgaggacgtgtccggactttctctcgaggaacaactgcggcgcctccaggaagaaagaacttgcaaggtgtgcatggacaaggaagtcagcgtggtgttcatcccttgcggtcacctcgtggtgtgccaggagtgtgcgcccagcctcaggaaatgcccgatttgccgcggaatcatcaaggggactgttcggaccttcctttca

SEQ ID NO: 32198 - DNA, 1854 bp, synthetic construct
  misc_feature 1..1854: note = Description of Artificial Sequence: Synthetic coding sequence
  source 1..1854: mol_type = other DNA
atgcacaagacggccagccaacgcctttttccgggacctagctatcaaaacatcaagagcatcatggaggacagcaccatactgtccgattggaccaactctaacaaacaaaagatgaagtacgatttcagctgcgagttgtaccgaatgtccacgtacagcacgtttccagcgggtgtgccggtgtcagagcggagcctggcgagagctggcttttactatacaggcgttaatgacaaggttaagtgcttctgctgtggtctgatgctggacaattggaaactgggggattcgcctatccagaagcataagcaactgtatccttcttgttcctttatacagaaccttgtgagcgcatctctcggaagcacgagcaagaacacgagcccgatgcgcaactctttcgcccacagcttgtcaccaaccctggagcatagctccctgttctctggtagttatagcagccttagcccgaacccactgaattctagagccgtcgaagacattagcagtagccgcacgaatccttatagctacgcaatgagcacggaagaggcgcgcttcctgacgtatcatatgtggccactgacctttctctcgccgagcgagctggcgcgcgctggcttctactacattggcccgggtgaccgcgtggcgtgcttcgcatgcggcggtaagctgtctaattgggaacctaaagatgacgcaatgagtgaacaccgtcgtcatttccccaactgtccctttttggagaacagtttggagactctgcgctttagcatcagcaacttgagtatgcagacccatgccgcacgtatgcgcacttttatgtactggccaagcagcgtgcctgtgcagcctgagcaattggcgtccgccggtttttattacgttggccgcaacgatgacgtgaagtgtttctgttgcgatggcggcctccggtgttgggagagtggagatgacccgtgggtggagcacgccaagtggttcccacgctgtgagtttctgatccgcatgaaagggcaagaatttgtagatgagattcagggtcgctacccacatctgctggagcaactgctgtccacctctgataccacgggtgaggaaaacgcagatcctcctatcatccactttgggcccggcgagtcctcaagcgaggacgcggtcatgatgaacacccctgtggttaagtccgcgctggaaatggggtttaatcgtgatctggtgaaacagactgtccagtctaagatcctaaccaccggggagaactataagactgtgaacgacattgttagcgccctactgaacgccgaagacgaaaaacgcgaggaggaaaaggagaagcaggcagaggaaatggcatctgacgacttgtcactgatcaggaagaatcgcatggctctcttccaacagctcacgtgtgtgctgcccattctggataacctactaaaagcgaacgtgattaacaaacaggaacacgatatcatcaagcagaagacgcagatcccgctgcaggcaagggagctgattgatacaatcctggtcaaaggtaatgccgctgcgaatatctttaaaaactgcctgaaggaaattgatagcacgttatacaaaaacctgttcgtcgacaaaaacatgaagtatatacctaccgaagacgtctccggactctcattggaggaacagctgcgcaggctgcaagaggaacgaacctgcaaggtgtgcatggacaaggaagtgagcgtcgtttttatcccatgcgggcacctggttgtttgtcaagaatgcgcgccatctttgcgcaaatgccctatctgcaggggcatcatcaaaggtactgtgcgcaccttcctttcc

SEQ ID NO: 32199 - DNA, 1854 bp, synthetic construct
  misc_feature 1..1854: note = Description of Artificial Sequence: Synthetic coding sequence
  source 1..1854: mol_type = other DNA
atgcataaaaccgcctcccaaagactgttcccaggaccgagctaccaaaacattaagtcgattatggaggatagcaccatcctctccgattggactaactccaacaagcagaagatgaagtacgacttttcatgtgaactctaccggatgtccacttactccacttttcctgcaggtgtcccagtctcggaacggtcactggcaagagcaggattctactacaccggagtgaatgacaaagtgaaatgtttttgttgcggcctgatgttggataactggaagctgggagattcccctatacaaaagcataagcaactttacccgtcgtgttcgtttatccagaacctggtgtcggcatcgctgggttcaacttcgaagaacactagccctatgcgcaattcgtttgcacattccctgtcgccaacgttggaacattcatctctcttctcgggttcatactcgtctctctcgcctaatcctctgaatagccgtgcggtggaagatatttcctcctccaggaccaacccttattcatacgccatgagcaccgaagaggcacgattccttacttatcatatgtggcctctgacctttctgtcgccaagcgaacttgcacgcgcaggcttctactatatcggtccgggtgatagagtggcgtgctttgcatgcggaggcaaactcagcaactgggagcctaaagatgatgccatgtccgagcatcggagacattttccaaactgtcctttccttgaaaattcgctggaaactttgcggttttccattagcaatctcagcatgcaaacgcacgcagcaaggatgcgcaccttcatgtactggccctcgtcagtgccagtccagcctgagcagcttgcatcagcgggcttctactacgtcggacggaacgatgacgtgaaatgcttctgttgtgatggagggcttagatgctgggaatcgggagatgatccttgggttgagcacgccaaatggttccctaggtgcgaattccttataagaatgaagggacaagagttcgtcgatgagattcaggggaggtacccacatcttctcgaacaactgttgtcgaccagcgacaccaccggtgaggaaaatgctgatcccccaatcatccacttcggtcctggcgagtcgtcgtcggaggatgcagtgatgatgaatactcctgtcgtgaaatcagcattggagatgggctttaatcgagatttggttaagcagacggtccaatcaaagattttgaccacgggtgagaattacaaaaccgtgaatgacattgtgagcgcgctcctgaacgccgaggacgaaaagcgcgaagaggaaaaggagaagcaggcagaagaaatggcaagcgatgacctttcgcttattcgcaagaacagaatggccctgtttcagcagctcacctgtgtcctgccaattcttgacaatcttctgaaggcaaacgtgattaacaagcaagagcatgacatcattaaacaaaagacccagatccctctccaagccagagagctcatcgacactattcttgtcaagggtaacgcagcggccaacattttcaagaactgtctgaaggagattgactcgaccctttacaagaacctgttcgtcgataagaacatgaagtacataccgaccgaagatgtaagcggactttcacttgaagagcaacttcggagacttcaggaggaaagaacttgtaaggtgtgcatggataaagaggtgtcagtggtgtttattccatgtggacatcttgtggtgtgtcaagagtgcgcgcctagcctcaggaaatgccctatctgtaggggtatcattaagggcacggtgcggaccttcctttcg

SEQ ID NO: 32200 - DNA, 1854 bp, synthetic construct
  misc_feature 1..1854: note = Description of Artificial Sequence: Synthetic coding sequence
  source 1..1854: mol_type = other DNA
atgcataagacggcctctcaacggctgttccctggtccttcataccagaacatcaagtcgataatggaagattccaccattctgtcagattggaccaactccaacaagcagaaaatgaagtacgatttttcgtgcgagctctacagaatgtcgacctactcaacttttccagcaggggttcctgtctctgaacggtcactggcgcgtgcaggattctactacactggcgtgaatgataaggttaaatgtttctgttgcggccttatgcttgacaactggaagctgggggactccccaattcaaaagcataaacagctttacccttcctgtagctttattcagaatttggtgtcggcatcgcttggaagcactagcaagaacactagcccaatgaggaatagctttgcacactcgctgtcccccacgctcgaacactcgtctctgttcagcggctcctacagtagtctcagcccgaatcctttgaactcccgggcggtggaggacatttcttcgtcccgtacgaacccatactcttacgccatgagcaccgaggaagcaaggtttcttacgtaccatatgtggcccctgacctttctttccccaagcgaactcgcaagagctggtttctactacataggtcctggagatagggtggcgtgcttcgcatgtggggggaaactctcaaactgggaaccaaaggatgatgcaatgtcagaacacaggcgtcattttcctaattgcccttttcttgagaattcgcttgagacgcttagattctccattagcaacctctctatgcagacccatgcagccagaatgagaaccttcatgtactggcccagctcggttcccgtccagccggaacagctggcctccgcaggtttttactatgttggacgaaacgacgacgtcaagtgtttttgctgtgatggaggtcttaggtgctgggaatcgggagatgatccctgggtggaacatgcgaagtggttcccacggtgtgaattcctcatcagaatgaaagggcaggagttcgtcgacgagatccagggaagatatccccacttgctggagcaacttctgtcgacctccgacaccaccggagaagaaaatgccgatcccccgataatccactttggacctggtgaatcatcatccgaagatgctgtcatgatgaacaccccagtagtgaagtccgcactggagatgggttttaaccgcgatttggtgaagcagactgtgcaaagcaagattctgactactggagaaaactacaaaactgtgaacgatattgtgagcgccctcttgaacgcagaggacgagaaacgggaggaagagaaggaaaagcaagctgaggaaatggcatccgacgatttgtcgcttattagaaagaatcgtatggcactgtttcaacaactgacttgtgtgcttcctatcttggacaaccttttgaaagcaaatgtgataaacaagcaggaacacgacattatcaaacaaaagacccagatccctctgcaagcaagggagcttattgatactatcctggtgaaaggcaacgcagctgccaacattttcaagaattgtcttaaggagatagacagcactctgtataagaatctttttgtggacaaaaacatgaaatacatcccgactgaggatgtgtcaggactgtcattggaagaacaattgcgtcgcctccaagaagaacggacctgcaaggtatgtatggataaggaggtcagcgtggtgtttattccttgcggtcaccttgtggtctgtcaagaatgtgccccgagcctccgaaagtgccctatttgtcgcggaattatcaaggggaccgtgcggacttttctgagc

SEQ ID NO: 32201 - DNA, 1854 bp, synthetic construct
  misc_feature 1..1854: note = Description of Artificial Sequence: Synthetic coding sequence
  source 1..1854: mol_type = other DNA
atgcacaagactgcgagccagaggctctttccaggaccatcttaccagaacatcaagtccatcatggaagacagtaccattctcagcgactggaccaattcaaacaagcagaaaatgaagtatgattttagctgcgaactttacagaatgagtacctattccacattcccggccggcgtgcccgtgtcagagagatcactggcacgagccggattttactataccggcgtaaacgataaggttaaatgtttttgttgcggacttatgttggataattggaaactgggcgattctcccattcagaagcataaacagctatacccttcttgcagctttattcaaaacctggtcagtgcttcactggggtccacaagcaaaaataccagtcctatgcgaaactctttcgcccacagcctgagtcctactttagaacatagctcgctgttcagcggttcctattcgtccctcagtcctaatcctctgaactcccgagctgttgaggacatctcgtccagccgaacaaacccctattcctacgcaatgtctaccgaggaggccagattcttgacctaccacatgtggcctcttaccttcctctctccttcagagctcgccagggccggcttttactacattggccccggcgatcgagtcgcctgcttcgcctgcgggggaaagctttcaaattgggaacccaaagacgacgccatgagtgagcatagacgacatttcccgaactgtccctttctcgaaaattctttggagaccctacgattctccatctccaatttgagtatgcagacgcacgcagccagaatgaggaccttcatgtactggccttcgtcagtccctgtccagcccgagcagctagccagtgctgggttttactatgtgggtcgaaacgatgatgtgaagtgcttctgctgtgacggagggctcaggtgctgggagagtggagacgatccctgggtcgaacacgcaaaatggtttcccaggtgtgaatttctaatacgaatgaagggacaggagttcgtagatgaaattcaggggcgatatccacatctgttagagcagttactgtccacctctgatacaactggcgaggagaacgcggacccgcccataatccatttcggtcctggagaatcaagttccgaggatgcagtaatgatgaacacacccgtggtcaaaagcgccctggaaatgggtttcaaccgagatttagtgaaacagaccgtgcagtctaaaatcctgaccaccggtgaaaattataagacggttaatgatatcgttagcgcacttttaaatgcggaggacgagaaacgtgaagaggaaaaggaaaagcaagcagaagagatggctagtgacgacctgtctttgattcgaaaaaacaggatggctctctttcagcagttgacttgtgtgctgcccattctcgataacctgttaaaggccaacgttattaataaacaggagcacgatatcattaagcagaaaactcagattcctttgcaggcccgagaacttatcgataccatcctcgttaaaggtaatgctgcggctaatatatttaaaaactgcctcaaggagatagattctacgctttacaaaaacttgttcgtggacaaaaacatgaaatatatacctacagaagatgtgtcgggactttcgttggaagagcagctaagacgcttgcaggaggagcgcacctgtaaggtgtgtatggataaggaggtcagcgtcgtgttcattccctgcgggcacctagtcgtctgccaggaatgcgctccctccctccgaaagtgcccaatttgtagggggatcatcaaagggacagttcgtacatttttatct

SEQ ID NO: 32202 - DNA, 1854 bp, synthetic construct
  misc_feature 1..1854: note = Description of Artificial Sequence: Synthetic coding sequence
  source 1..1854: mol_type = other DNA
atgcataaaacagcttcgcagcggttgttccccggtccgtcgtaccagaatattaaatccatcatggaggacagcacgatcttgagcgattggactaatagcaataaacagaaaatgaagtacgactttagctgcgagttgtaccgaatgtcaacgtactctacattccccgctggtgtgccagtgagcgagaggtcccttgctagagcagggttttactatacgggcgtgaatgataaggtcaagtgcttctgctgcggacttatgctggataattggaaactaggtgattctcctattcagaagcacaagcagttgtatccctcctgttcatttattcagaatctcgtgagtgctagcctcggcagcacctctaaaaacacctctccaatgaggaatagcttcgctcattcgctgtctcctacgcttgagcactcttcattgttctctgggagttactcatctttgtccccaaacccactaaattcaagagctgttgaggatataagctccagccgtactaacccttactcttatgccatgagcactgaagaggccagatttctcacataccatatgtggcctctgaccttcctaagtccctccgaattagcccgggcaggtttttattatataggacccggggaccgggtggcttgctttgcttgcgggggcaaactaagcaattgggaacctaaggacgatgccatgagtgagcataggaggcattttcccaattgtccattcctggaaaactcgctagagacattacgattttctatctctaatctgtccatgcaaactcatgctgcccgcatgcgcacattcatgtactggcccagcagcgtccctgtccaacctgagcagcttgcctcagctgggttttattatgtgggtagaaacgacgatgttaaatgcttctgttgcgacggcggtctcaggtgctgggaatctggcgatgacccatgggtggagcacgcaaagtggtttccgcggtgcgagttccttatcaggatgaaaggccaggaatttgtggacgagatccagggacgttacccgcatctgttggagcaactcctgtctacctctgacactacaggagaggaaaacgcagacccacccattatccattttggtcctggggaaagcagctccgaagatgcagtgatgatgaatacaccagtggttaagtctgctctcgagatgggcttcaatcgagacctggtgaaacagaccgtgcagtccaaaattttaacaaccggtgagaattacaaaactgttaacgatatcgtgtcagccctactcaacgcagaggatgaaaagagagaagaagagaaagaaaagcaggccgaggagatggcaagtgatgacctctccctgatcaggaaaaataggatggctctcttccagcagttaacctgcgttttgcctatcctcgacaatttactgaaggcgaatgtcatcaacaagcaggaacatgacataataaagcagaagactcaaattcctctccaggcaagggagctgattgacactatacttgtaaagggaaatgcggctgccaatatctttaagaactgcttgaaggagatcgatagtacactgtacaaaaatttgtttgtggacaagaacatgaagtatattcctaccgaagacgtttctggcttgtctctggaagaacagcttcgacgattgcaggaagagaggacatgcaaagtatgtatggacaaagaggtgtctgtagtgttcattccctgcgggcacctcgttgtgtgccaggaatgcgccccttccctgcgaaagtgcccaatctgccgaggcataattaagggaaccgtgaggaccttcttgagc

SEQ ID NO: 32203 - DNA, 1854 bp, synthetic construct
  misc_feature 1..1854: note = Description of Artificial Sequence: Synthetic coding sequence
  source 1..1854: mol_type = other DNA
atgcacaagaccgcgagccaaaggctttttccaggcccttcatatcaaaacattaagagcataatggaagattccactattctgtccgactggaccaactctaacaagcagaagatgaaatacgatttttcatgcgaattgtaccggatgtccacttacagcacctttcctgcaggcgtccctgtgtcggagagatccctcgcgcgagcagggttttactacactggggtcaacgataaggtcaagtgtttttgttgtgggcttatgcttgataactggaagctgggcgactcacccattcaaaagcataaacagctttaccctagctgttcatttatccaaaaccttgtctccgcatccctgggatctacttccaagaacacttcaccaatgcgcaactccttcgcccattccctgtcccccaccctggagcattcatcacttttcagcgggtcctactcatcccttagcccgaatcccctgaattcaagggctgtcgaagatatatcctcgagccgaaccaacccatactcatacgccatgtcgaccgaagaagcacggtttcttacctaccacatgtggccactgacctttctgagcccttctgaacttgcacgcgcaggtttctattacataggacctggtgaccgggtggcctgttttgcatgtgggggtaagctctcgaactgggaacctaaagacgatgccatgtcggaacaccgtcgccattttcctaattgtccgttcctggaaaactcacttgaaaccctgcgattctccatatcaaatttgtctatgcaaactcatgccgcaaggatgcggacttttatgtactggccatcctccgtgccggtgcagcctgagcagcttgctagcgctggattttactacgtgggaagaaacgacgatgtgaagtgtttttgctgtgacggcggccttaggtgttgggagtcgggagatgacccttgggtagagcatgccaagtggttcccaaggtgcgagttcctgatcagaatgaaaggccaagagttcgtggatgaaattcagggtaggtacccccatttgctggagcaactgctttccacctccgatacgacgggagaagagaatgcagacccaccgatcatccacttcggcccaggagaaagttcatccgaagatgcggtgatgatgaatactcctgtggtgaaatcagcactcgaaatgggatttaaccgagatctggtgaaacagaccgtgcaatccaagattctgactaccggagaaaactacaagacggtgaacgatattgtctcagcacttctgaatgccgaagatgaaaagcgtgaagaggaaaaggaaaaacaagctgaagaaatggcgtcagatgatctgtcccttatccgtaagaacagaatggcactctttcaacaacttacgtgtgtcctgcctatcctcgacaatctccttaaagcaaacgttatcaataagcaggaacatgacataatcaaacaaaagacccagattcctctccaggcacgcgaactgattgatacgatcctcgtgaaagggaacgcggcagcgaacattttcaagaactgtcttaaggaaatagattccaccctgtacaaaaaccttttcgtggacaagaatatgaagtatattcccactgaagatgtgtctgggctctcacttgaagaacaactgcgcaggctgcaggaagaacggacttgcaaggtgtgcatggataaggaagtgtcggtggtgtttatcccgtgtggacacctggtggtgtgccaagaatgcgcaccctcccttcgtaagtgtcctatctgtagaggtattatcaagggtactgtgagaacctttcttagc

SEQ ID NO: 32204 - DNA, 1854 bp, synthetic construct
  misc_feature 1..1854: note = Description of Artificial Sequence: Synthetic coding sequence
  source 1..1854: mol_type = other DNA
atgcacaagaccgcaagtcagcgtctttttccggggccctcctatcagaatatcaagagcataatggaggactccaccatcctgagtgactggaccaacagcaacaagcaaaaaatgaaatacgattttagctgtgaactgtaccgcatgtccacctattcaacgttcccagcgggcgttcctgtaagtgagaggagcttggcccgcgccggcttctattataccggagtgaacgacaaagtgaaatgtttttgttgtggcctgatgttggataattggaaactgggcgatagtcccattcagaagcataaacaactgtacccaagctgctcatttatccagaacctagtgagtgcctccctgggttccacaagcaaaaacactagccccatgcgtaactcattcgcccattcactctcccctacattggagcactcctcactcttcagtgggtcctacagctccctctcccctaatccactgaatagtagggccgtggaggacatcagtagtagccgaacaaacccttattcttatgcaatgagcaccgaggaggcaagattcctgacttatcacatgtggccattaacattcttgagcccatcggagctggcacgggccgggttctactacattggccctggagaccgcgtggcttgtttcgcctgtggtggcaagctgtccaattgggaacccaaggatgacgccatgtcagaacatcggcgccacttcccaaactgccccttcctggaaaacagtctcgaaacccttagattcagcatttccaatttgtccatgcagacacacgctgctcgcatgcggacttttatgtattggccttcctctgtgcccgtgcagccagagcagctggcctctgcaggcttctattacgtaggtcggaatgacgacgtgaagtgtttctgttgcgacggtggactgagatgttgggagtcaggagatgatccttgggtggagcatgcgaagtggtttcctagatgcgaatttttgattcggatgaagggccaggagttcgtcgacgagatccaaggtagatacccacacttgctggaacagctcctcagcacttcggatactacgggagaagagaatgccgacccccctataatacattttggtcctggggagtcatcctcggaggacgctgtaatgatgaacaccccagtggtgaagagcgccctcgaaatgggcttcaaccgagatttagtcaagcagacagttcagtctaagatcctgaccactggcgagaattataaaactgtgaatgatatcgtgtccgccctcctaaacgctgaagatgagaaacgggaggaggaaaaggagaagcaggctgaggagatggcatccgacgacctgagcctgatcagaaagaaccgtatggctctcttccagcagctgacctgcgtgctgcctatcctcgacaacctgctgaaggctaatgtcatcaataaacaggagcacgatataatcaaacagaagacccagatccccctccaggcacgcgagcttatcgacactattctcgtcaagggcaatgcagccgccaatatctttaaaaattgcttaaaggaaatagattccacactgtacaagaatctgttcgtcgacaaaaatatgaaatacattccgactgaagatgtatcaggcctgtccttggaagagcagctcaggaggcttcaggaagaaaggacctgtaaggtctgcatggacaaagaagtgagtgtagtgttcatcccctgtggccatcttgtagtatgtcaggagtgcgccccttcattgaggaaatgtcctatctgcagagggatcatcaagggcactgtccgcaccttcctgagt

SEQ ID NO: 32205 - DNA, 1854 bp, synthetic construct
  misc_feature 1..1854: note = Description of Artificial Sequence: Synthetic coding sequence
  source 1..1854: mol_type = other DNA
atgcacaaaaccgcaagccaacggcttttccctggcccgtcataccaaaacattaagtctatcatggaagattctacgattctgtcggattggaccaattccaacaaacaaaagatgaagtatgacttctcgtgcgaactctacagaatgagcacgtactcgacctttccagcaggtgttcctgtctcggagcggtcactcgcacgcgccggattttactacactggggtgaatgataaggtgaaatgtttttgttgtgggcttatgcttgataattggaagttgggggattccccgatccaaaaacataaacaactttacccttcatgttcatttatccagaacctggtgtcggcgtccctgggcagcacctccaagaatacctcaccaatgagaaactcgttcgcccactccctgagccctaccctggagcattcatctttgttttcgggatcctattcatcgctgtcaccaaacccccttaattcgagagccgtggaggacatctcaagcagcagaaccaacccttactcatacgccatgtctaccgaagaggcaaggtttcttacctaccatatgtggcctttgacctttttgagcccttcggagcttgcacgagcaggattctactacattggcccaggagatcgggtcgcatgtttcgcgtgcggaggaaaactgtccaactgggaacctaaggatgacgcaatgagcgaacatagaaggcattttcctaattgtccattcctggaaaattcgctcgaaactcttcgcttctcaatttccaatctttcaatgcagactcatgcagcccgcatgagaacctttatgtactggccatcttcggtgcctgttcaacctgaacagctggcctcagcaggcttttactacgtgggccggaacgatgatgtgaagtgcttttgttgcgatggggggcttcgttgttgggaaagcggcgacgacccttgggtcgaacacgccaaatggtttccaaggtgtgaatttctgattagaatgaagggccaagagtttgtcgacgaaatacagggacgttatcctcacctcctcgaacaactgctgtcgacctcggatactaccggcgaagagaacgcggaccctccgatcattcatttcggaccgggagaaagctcatcggaagatgccgtgatgatgaatactcctgtagtgaagtccgcactggaaatggggtttaacagggaccttgtgaagcaaactgtccaatcgaagattctgaccactggtgagaattacaaaacggtcaacgatatagtgtccgctctgcttaacgcggaggacgagaagcgggaagaagaaaaagaaaagcaagcagaggaaatggcgtcggacgacctctcgctgattcgcaagaacaggatggcactctttcaacagctcacctgtgtgctgccaattcttgacaacctgctgaaagcaaacgttatcaataagcaggaacacgatatcattaaacaaaagacccagatccctctgcaagcaagagagcttattgatacgattctggtcaaaggtaacgcagcagcaaacatcttcaagaattgccttaaggaaatcgatagtactctttacaagaacctgtttgtggacaagaacatgaagtacatcccgactgaggacgtgtccgggctcagcctggaagagcaactgagaagattgcaggaagagaggacctgcaaagtctgtatggacaaagaagtatcagtcgtgttcattccatgtggacatctggtggtgtgccaagaatgtgcaccttcccttcgaaagtgccccatatgtcgcggtattatcaaggggactgtgcgaacctttctgtcg

SEQ ID NO: 32206 - DNA, 1854 bp, synthetic construct
  misc_feature 1..1854: note = Description of Artificial Sequence: Synthetic coding sequence
  source 1..1854: mol_type = other DNA
atgcacaagaccgcctcccagcgtctctttccaggcccctcctaccaaaacatcaagtccatcatggaggactccacaatcctgtctgattggactaatagtaataaacaaaagatgaagtatgatttctcctgcgagctataccggatgtcgacgtacagcaccttccctgcaggtgtgcccgttagtgagcggtcgctcgcccgcgccggtttctactacactggcgtgaacgataaggtcaagtgtttctgttgtggcctcatgctcgataattggaagctgggtgatagccccattcagaagcacaagcagctttacccctcctgctcgttcatccagaacctcgtttccgcctctcttggatcaacgagtaagaacaccagccccatgcggaactcgttcgctcactctttgtcgcctaccctcgaacactcttccctgttctccggctcgtatagctcgctgtctccaaaccccctcaattcgcgtgctgtcgaggacatctcctccagccgtacgaatccttattcgtatgctatgagcaccgaagaggctcgcttcctgacataccacatgtggcctttgacctttctatcgccttccgagctggcacgcgccggcttctattatatcggccccggagatcgtgtcgcctgctttgcctgcggcggcaaactcagcaactgggagcctaaggatgatgccatgtccgagcatcgccggcattttcctaactgcccctttttggagaactcgctcgagacgctcaggtttagcatttccaacctttccatgcagacccacgcggccagaatgcggaccttcatgtactggccttccagcgtcccggtccagccagagcagctcgcctctgccggtttctactacgtcggacgtaacgatgatgtcaagtgcttctgctgcgatggcggcttacgctgttgggaatccggcgacgacccttgggtcgagcatgctaagtggttccctcgctgtgagttcctcatccgcatgaaagggcaggagtttgttgacgagatccagggccgttacccacacctgcttgagcagctgctttctacgtccgatacgaccggtgaggaaaacgcggacccgcccatcatccacttcggtcctggtgagtcctcatctgaggacgctgtcatgatgaacacccccgtcgtgaagagcgctctcgagatgggtttcaatagagatctggtcaagcaaaccgtgcagtccaagatcctgacaactggagagaactacaagaccgtcaacgacatcgtgagtgccctcctgaacgcggaggatgagaagcgtgaggaggagaaggagaagcaggcggaagagatggcgtccgacgacctctccctgatccgcaagaaccgcatggccctgttccaacagctgacgtgcgtattgcccattctggacaacctgctaaaagctaatgtcatcaacaagcaggaacacgacattatcaagcagaagacgcagattcccctccaagcgcgtgaacttatcgacacgatcttggtcaagggcaacgcggcggcgaacatcttcaagaactgcctcaaggaaatcgattccacgttgtacaagaatctcttcgtcgacaaaaacatgaagtacattcccactgaggacgtctctggcctgagcttggaggagcagctgagacgcctccaggaagagcgcacatgcaaggtgtgcatggacaaggaggtcagcgtcgttttcattccctgcggccacctggtcgtctgccaggagtgcgccccatctctccggaagtgcccaatctgtcgcggtatcattaagggcaccgtgcgcactttcctatcc

SEQ ID NO: 32207 - DNA, 1854 bp, synthetic construct
  misc_feature 1..1854: note = Description of Artificial Sequence: Synthetic coding sequence
  source 1..1854: mol_type = other DNA
atgcacaaaactgcatctcagcgcctgtttcccggcccttcttatcagaatataaagagcatcatggaagattctaccatcttatctgattggactaattccaataagcaaaagatgaagtatgatttctcttgtgaactgtaccggatgagcacttacagcacatttcctgcaggcgtgcccgtgtcagagcgaagtctggcaagagctggcttctattatacaggggtgaatgacaaggttaagtgcttctgttgcggattgatgctagacaattggaaactgggggattccccaattcagaaacataaacagctttaccctagttgttcttttatccaaaatcttgtgagtgccagcctggggtccacctcaaagaatacttcccctatgagaaattcttttgctcattctctttctccaacactggagcacagctctctgtttagtgggagttactcgagcctatcacctaatcccctgaatagcagagccgtggaggatatatccagctctcgcaccaacccgtattcttacgccatgagcactgaggaggcgagattcttaacctatcacatgtggcccttgacttttctgagtccttctgaactggcccgcgcagggttttattacattggacccggtgatagagtcgcgtgcttcgcatgcggaggtaaactctccaactgggagcccaaggacgacgccatgagcgagcatcgcagacacttccctaactgccccttcttggaaaacagcctggagacccttaggttctcgatctccaacctgtccatgcagacacacgccgcacgcatgaggacctttatgtactggcctagttcagtgccggtccagccagagcagttagctagcgccgggttctactacgtgggacgtaacgatgacgtgaaatgtttctgttgcgacgggggtctgcgctgctgggagtctggcgacgatccctgggtggagcacgcaaagtggttcccaagatgtgaattcctgatccggatgaagggccaggagttcgtagacgagatccaggggcgatatccccacctgctggaacagctgttatccaccagcgacacgactggagaagagaacgcagacccccccatcatccacttcggaccaggagagagttccagcgaggatgccgtgatgatgaataccccggtcgtgaaatcagccctggagatgggattcaatcgcgatcttgtcaagcaaacagtccaatccaaaatattaaccaccggcgaaaattacaagactgtcaacgacatagtctcagctctgctaaacgccgaggacgaaaagcgcgaagaggaaaaagagaaacaggcagaggagatggcctccgacgacctatccctcatacgcaagaacagaatggcactttttcagcaattgacctgcgtcttgcctatattggataatctcctgaaggccaatgtaattaataaacaggaacacgatatcatcaagcagaagactcagatcccgctgcaagcaagagagctcatcgataccattctcgtgaagggaaacgctgctgctaatatcttcaagaattgcttgaaggagattgatagcaccctgtataaaaatttgttcgtggataagaatatgaaatatatcccaaccgaggatgttagcggcctcagcctggaagaacaactgaggcgcttgcaggaagagagaacatgcaaggtgtgtatggacaaagaagtgagcgtggtgtttatcccatgtgggcacctggtggtctgtcaggagtgtgcccctagtctcagaaaatgccccatctgtcgagggatcattaagggcacagtgaggacttttctgtct

SEQ ID NO: 32208 - DNA, 1854 bp, synthetic construct
  misc_feature 1..1854: note = Description of Artificial Sequence: Synthetic coding sequence
  source 1..1854: mol_type = other DNA
atgcataaaactgcatcacaaagactttttccaggaccatcttatcaaaacattaaatcaattatggaagattcaactattttatcagactggacaaattcaaataaacaaaaaatgaaatacgacttcagttgtgaattatatagaatgtcaacttatagtacttttcctgcaggagttccagtatctgaaagatctttagctagagcaggattctattatacaggagtaaatgataaagtaaaatgtttttgttgtggtttaatgcttgacaattggaaacttggagattcaccaattcaaaagcataaacaattatacccttcatgttcttttattcaaaatcttgtttcagcatcattaggtagtacttcaaaaaatacctctccaatgagaaattcattcgcacattcacttagtcctacactagagcattcatctttattttcaggttcttacagtagtttaagtccaaatcctttaaatagtagagctgtagaagatattagttcatctagaactaatccttattcatatgctatgtctacagaagaagcaagatttcttacctatcatatgtggccattaacttttttatctccatcagaattagctagagcaggattttattatataggacctggagaccgtgttgcatgtttcgcatgtgggggtaaattaagtaattgggaaccaaaggacgatgctatgtcagaacacagacgtcactttcctaattgtccatttttagaaaattcactcgaaacattaagatttagtatttctaatttaagtatgcaaacacatgctgcaagaatgcgtacatttatgtattggccttcatcagttcctgttcagcctgaacaacttgctagtgctggattctattacgttggaagaaacgatgatgtaaagtgtttttgttgtgatggaggacttagatgttgggaatcaggtgatgatccatgggtagaacatgcaaaatggtttcctagatgtgaatttttaattagaatgaaaggacaggaattcgttgacgagattcaaggaagatatcctcatcttcttgagcaattattaagtacttcagatacaacaggagaagaaaacgctgatccacctattattcattttggaccaggtgaatcaagttcagaagatgcagttatgatgaatactccagtagtaaagtcagcacttgaaatgggatttaacagagatttggttaaacaaacagttcaaagtaaaattttaacaacaggagaaaattataaaacagtaaatgatatagttagcgcattattgaacgcagaagatgaaaaaagagaggaagaaaaagaaaaacaagctgaagaaatggcttcagatgatttatctcttataagaaaaaacagaatggctttattccaacaattaacatgcgttttaccaattttagataatttattaaaagctaatgtaattaataaacaagaacatgacataattaaacaaaaaactcaaattcctttacaagctagagaacttattgatacaatcttggttaagggaaatgctgctgcaaatatttttaaaaattgtttaaaggaaattgattcaacactatataaaaatttattcgttgataaaaatatgaagtatattcctacagaggatgtttcaggattatcgcttgaagaacaactcagaagattacaagaggaaagaacatgtaaagtttgtatggataaagaagtaagtgttgtttttataccatgtggacatttggtagtctgtcaagaatgtgcaccaagtcttagaaaatgtccaatttgtagaggtattataaaaggaacagtaagaacatttttatct

SEQ ID NO: 32209 - DNA, 1854 bp, synthetic construct
  misc_feature 1..1854: note = Description of Artificial Sequence: Synthetic coding sequence
  source 1..1854: mol_type = other DNA
atgcacaagaccgcatcgcaaagactgttccccggccctagctaccagaatatcaaaagcatcatggaagattcgaccattttgtcggattggaccaattccaacaagcagaagatgaagtacgactttagctgcgaactgtacagaatgtcaacgtactccactttccctgccggagtgccggtgtcggagagatcgctggcccgcgccggattctactacaccggcgtgaacgacaaggtgaaatgcttctgctgtggactcatgcttgacaactggaagctgggtgactcgcctattcagaagcacaagcaactgtacccgtcctgcagcttcatccagaacctcgtctccgcctccctgggatcaacgtcgaagaataccagcccaatgcgaaacagcttcgcccactcgctgtctccgactctggaacattcctccttgttttctggatcctattcctcgctgtccccgaaccccttgaactctcgcgcagtggaagatatctcatcctcacggaccaatccatactcgtacgcgatgtccaccgaagaggcgcggttcttgacttaccatatgtggcctctcactttccttagcccttcggaactggccagagctgggttctattacattggaccgggggatcgcgtggcgtgcttcgcttgtggaggaaagctctctaattgggagcctaaggatgacgcaatgagcgaacacaggagacacttcccaaattgcccgttcctggagaactcgctggaaacgctgcgcttcagcatcagcaacctctcgatgcaaacccacgcggcgaggatgcggaccttcatgtactggccttcatcagtgccagtgcagccagagcagctcgcatccgcaggattctattacgtcgggcgcaacgacgacgtgaagtgcttctgctgcgatgggggtctgagatgctgggagtcgggcgacgatccttgggtcgaacacgccaagtggtttccgaggtgcgagttcttgatcaggatgaagggacaggagttcgtggatgagattcaaggcaggtacccacacctgcttgaacagctgctgtccacctcggacactaccggagaagaaaacgccgaccccccgattattcatttcggtccgggagagtcgtcatcggaggacgcagttatgatgaacactcctgtggttaaatcagcactggagatgggctttaaccgggacctcgtgaagcaaaccgtccagtccaagatcctcaccacgggcgaaaactataagactgttaacgacatagtctccgctctgctcaacgctgaggacgagaagagagaagaggaaaaggaaaagcaggcggaagagatggcatcggacgacctgagcctcatccgcaaaaaccgcatggccctcttccagcaattgacttgcgtcttgccaatcctggacaacctgctgaaagctaacgtcatcaacaagcaagaacacgacatcatcaagcagaaaacgcagatcccgttgcaagctcgcgaactcatcgacaccatcctcgtcaagggcaatgccgctgcaaatatcttcaagaactgcctcaaggaaatcgatagcaccctctacaagaatttgtttgtcgataagaacatgaagtatatcccgacggaggatgtgtccgggctgtccttggaggaacagctgcgccggctgcaagaagaacggacctgcaaagtttgcatggacaaagaggtgtccgtggtgttcatcccgtgcggacatctggtggtgtgtcaagaatgcgctccgtcgctgcgcaagtgtccgatttgtcggggaatcataaagggaaccgtgaggaccttcctctca

SEQ ID NO: 32210 - DNA, 1854 bp, synthetic construct
  misc_feature 1..1854: note = Description of Artificial Sequence: Synthetic coding sequence
  source 1..1854: mol_type = other DNA
atgcataagactgccagccagcgactgtttccggggccaagctatcagaatatcaaatcaattatggaggacagcaccatcctgtcagattggaccaactccaacaagcagaaaatgaagtacgacttctcctgcgaactctatcgtatgtctacttactccaccttcccagccggggtgccagtcagcgagcggtcacttgccagggccggcttttattacactggagtgaatgataaagtcaaatgtttttgctgtggacttatgctagataattggaaactgggggacagtccgattcagaagcataagcagctgtatccatcttgttccttcatccagaatcttgtctctgccagtttaggatcaacgtccaaaaatactagtccaatgcgaaatagcttcgctcattcactctctccaactctggagcactccagtcttttcagcgggtcctatagctccctcagccctaatccactaaacagccgcgccgtcgaggatatatctagctcccggaccaacccctactcatatgccatgtctaccgaagaagcccggttcttgacttatcacatgtggccgctgacattcttatccccaagtgagctcgcccgggccgggttttactatatcggaccgggggatcgggtcgcatgttttgcctgcggtggcaaacttagcaactgggaaccaaaagatgacgcaatgagtgaacatcggagacatttccctaactgtcccttcttagaaaattctttagagaccctcagattttccatatctaatctgagcatgcagactcacgccgccaggatgagaacattcatgtattggccctcttctgttcccgtccagccagagcagctcgcctcagctggattttattacgttggccggaatgatgatgtgaagtgcttctgttgcgacggagggctgaggtgttgggagagcggagacgatccttgggtagaacacgcaaagtggtttcccaggtgcgagttcttaatacgcatgaagggccaggaattcgtggacgaaatccagggtcgctatccccacctcttggaacaattgttgtcgacctccgatactaccggagaggagaacgcagacccccccataattcattttggcccaggggagtcatcatccgaggacgcagttatgatgaacacccctgtggtgaagtcagcactcgagatgggatttaaccgcgatctggtgaaacaaaccgtccagagtaagatcctgaccacaggtgagaattataagaccgtcaacgacattgtgtcggccctactcaatgctgaggacgaaaaaagggaagaggagaaggagaaacaagctgaagaaatggcgagtgacgacttgtctcttatccgaaagaaccgtatggctcttttccagcagctcacttgtgttcttcctattctggacaaccttctcaaggctaacgtgattaacaaacaggagcacgatatcattaaacagaagacacagataccgttgcaggcccgcgagctgatcgacacaattcttgttaaagggaacgccgccgcgaatatttttaaaaattgtcttaaggagatagacagcaccctgtacaagaacctcttcgttgataaaaatatgaagtatattccaaccgaagatgtgtcgggactttcccttgaggagcaactaagaaggctgcaggaagagcgtacttgtaaagtatgtatggataaggaggtgtcagtcgtgttcatcccctgtgggcacctcgtggtctgccaggagtgtgcaccctccttacgaaagtgccccatctgtagaggaatcatcaaaggcactgtgcggacgttcctctcg

SEQ ID NO: 32211 - DNA, 1854 bp, synthetic construct
  misc_feature 1..1854: note = Description of Artificial Sequence: Synthetic coding sequence
  source 1..1854: mol_type = other DNA
atgcacaagaccgccagccagcggctctttcccggcccatcatatcagaacatcaagtcgattatggaagatagcactattctgtcggattggactaactcgaacaaacaaaagatgaagtacgacttctcctgtgagctttaccgcatgtcgacgtactcgacctttccagcaggtgtgccggtcagcgaacgtagcctcgcaagggctgggttttactacaccggggttaacgataaggtgaagtgtttttgctgtgggttgatgctggataattggaaactcggcgattcaccgatacaaaagcataagcagttgtacccttcctgcagcttcatccaaaacctcgtgtcggcctcactgggcagcacctcgaaaaacacttcgcccatgcgtaattcgtttgcacattccctctcccccaccctcgaacattcctcgttgttcagcgggtcctatagctcccttagcccaaacccccttaatagcagagcagtcgaggacatttcctcctcccgcactaacccatactcctacgcaatgagtacggaagaagcgcgctttctgacctaccatatgtggcccttgaccttcctgtctccgtcagagctcgcccgggcaggattttactacattggtcctggcgatcgcgtggcatgcttcgcatgtggggggaagctctcaaattgggagcctaaggatgatgcaatgtccgaacatcgtagacactttcctaattgtccatttctggaaaacagcctggaaaccctgagatttagcatctcgaacctttccatgcagacccacgccgcccgcatgaggaccttcatgtattggccgtcctcagtgcccgtgcagccagaacaacttgcaagcgccggtttttactacgtcggacgtaatgatgatgtgaagtgtttctgttgtgacggcggtctgcgctgttgggaatcgggtgatgatccatgggtcgaacatgccaagtggtttccgcgctgtgaatttcttatccggatgaagggtcaggagttcgtggacgaaattcaaggacggtatccacatctcctggagcagctcctgtcgaccagcgatactaccggcgaagagaatgccgatccccctatcattcacttcggtccaggagagtcctcctcggaagatgcggtgatgatgaatacgcctgtggtgaagtcggcacttgagatggggtttaaccgagatctggtgaaacaaactgttcagtcaaagatattgaccactggagaaaactacaagaccgtgaacgatatcgtgtccgcactccttaatgcagaagatgaaaagagagaggaggagaaggaaaaacaagcagaggaaatggccagcgacgacctgtctctgataagaaagaatcgcatggcactgtttcagcagctcacctgcgtgcttcctatcttggataacctccttaaagctaacgtgattaacaagcaggaacacgacatcatcaaacaaaagactcaaatcccactccaggctagagaacttattgatactatacttgttaagggtaacgcagccgccaacatcttcaagaactgcttgaaagagattgattcgactctctacaagaacctcttcgtggataagaacatgaagtacatccccaccgaagatgtgtccggactgagccttgaagaacaactccgtaggctgcaagaggagcggacttgtaaggtgtgtatggacaaggaagtctccgtggtctttattccctgcggacatctcgtcgtctgtcaagagtgtgcaccttccttgcgcaaatgtcccatttgcagaggtatcataaaaggaaccgtgagaactttcctttcc

SEQ ID NO: 32212 - DNA, 1854 bp, synthetic construct
  misc_feature 1..1854: note = Description of Artificial Sequence: Synthetic coding sequence
  source 1..1854: mol_type = other DNA
atgcataagacggccagccaacgcctctttccgggaccttcctaccaaaacattaagtctattatggaggattcgaccatcttgtcggattggactaattcgaacaaacaaaagatgaaatacgatttttcttgtgaactttaccggatgtccacctactcgaccttcccggcaggtgtcccagtgtcggaacgttcgttggcaagagctggtttctattacaccggcgtcaatgacaaagtgaagtgtttctgctgtggactcatgctggacaactggaaacttggcgatagccctattcagaagcacaagcagctgtacccctcatgttcctttatccaaaacctggtgtcggcatccctcggttccacctctaagaatacctcgccaatgcggaattcctttgcacactcgctgtcccctactctcgaacattcatccctgttctctggttcctacagctcactgtcaccaaatccactgaactcccgggcagttgaggacattagcagcagccggaccaatccctactcatacgcgatgtccactgaagaagccagatttcttacctaccatatgtggcctctgacttttctgtcgccctcggaactcgcgagagccggtttttactacatcggtccaggggatcgtgtcgcgtgttttgcatgcggaggtaagctgagcaactgggagccaaaggatgatgccatgtccgagcatcggcggcattttccaaattgtcccttccttgaaaactcacttgaaactctgcgattttcgatatcaaacctctcgatgcaaactcatgccgcgcgaatgagaacgttcatgtattggccttcatccgtgccggtccagccagaacagctggcctcggccgggttctactacgtgggaagaaacgacgacgtgaagtgcttttgctgtgatggcggtctgagatgttgggagagcggggatgatccctgggtggagcatgccaagtggtttccacgctgtgaattcttgatacgtatgaagggtcaagagtttgtggatgaaatacagggccgttaccctcaccttctcgaacaactgctttcgacttcggatactactggagaggaaaatgctgatcctccaatcatccattttggaccgggagaaagctcatcggaagatgcggtgatgatgaacacgccagttgtgaagtccgcactggaaatgggattcaacagggacttggtgaagcagactgtgcaatcgaagatccttaccaccggtgaaaactacaagacggtgaacgatattgtgtctgcgttgcttaacgcagaggatgaaaaacgggaagaagaaaaggagaagcaggcagaagagatggcttcagacgacctgtccctgattaggaaaaatcgaatggcactgttccaacagttgacctgtgtgctcccaatccttgataatctgctcaaggccaatgtgattaacaaacaggaacacgatatcattaaacaaaaaacccagattccgctgcaggcacgggaactcattgataccatactggtgaagggaaacgcagcagcaaatatcttcaagaactgcctcaaggagatcgacagcaccctgtacaaaaacttgtttgtggacaaaaacatgaaatacattcctaccgaagatgtttcaggactctcgctcgaagaacaactgagacggcttcaagaggaaaggacgtgcaaagtgtgcatggacaaggaagtctccgtcgtgttcatcccatgtgggcaccttgtggtgtgtcaggagtgcgcaccatcgttgcgcaagtgtcctatttgtaggggaatcattaaaggaactgtgaggaccttcctgtcg

SEQ ID NO: 32213 - DNA, 1854 bp, synthetic construct
  misc_feature 1..1854: note = Description of Artificial Sequence: Synthetic coding sequence
  source 1..1854: mol_type = other DNA
atgcataagaccgcgtctcaacgcctgttcccgggcccttcctaccagaacatcaaatcaatcatggaggattcgaccatcctctccgattggacgaattcgaacaaacagaaaatgaagtatgacttcagctgcgaactgtaccggatgtccacttactccacgttcccagccggcgtgccggtgtcggagcgctcactcgcaagagccggcttttactatactggtgtgaacgataaggtgaagtgcttctgttgcggactgatgctggacaactggaagctcggagactcgccgatccagaagcataagcaactgtacccctcctgctccttcatccagaaccttgtgagcgcatcgctgggatcaacgtcgaagaatacttcccctatgcgcaactcgtttgcacattcactgtcaccgactctggagcattcttcccttttctcaggatcctacagctcgctttcgccgaatcctcttaattcgagagcggtcgaagatatctcatcctcaagaactaatccatactcctacgccatgtcgaccgaagaagcccgcttcctcacttaccatatgtggccgctgactttcctgtctccttcggaactcgcgagggcaggtttctactacatcggcccgggggaccgcgtggcatgcttcgcttgtggcggaaaactgagcaattgggagccgaaggatgacgccatgtcggaacatcggcggcattttccgaattgtccgttcctcgagaattccttggaaactttgcgcttctccatctcgaacctcagcatgcaaactcacgcggcgagaatgagaactttcatgtattggccaagcagcgtgccggtgcagcctgagcaactggcttcggcgggattctactacgtgggtcggaacgacgacgtgaagtgtttctgttgcgacggaggactccggtgttgggagagcggggacgatccatgggtcgaacatgctaagtggttcccgcgctgcgaatttcttatccgaatgaagggacaggagttcgtggacgagattcaggggagatacccgcatctgctggaacagctgctgtcgactagcgacaccactggcgaggaaaatgccgaccccccgatcattcacttcggacctggagagtcatcatcagaggacgccgtgatgatgaataccccagtcgtgaaatcagcgcttgaaatggggttcaaccgggatctcgtgaaacagactgtccaatcaaagatcctcactaccggagagaactacaagacggtcaacgacatagtctcagccctgctgaacgccgaagatgaaaagcgcgaagaggaaaaggagaagcaggcggaggaaatggcctccgatgatttgagcttgatccggaagaacagaatggctctcttccagcagttgacctgcgtgctcccgatcctggacaaccttctgaaggcgaacgtcatcaacaaacaggagcatgacattatcaagcagaaaacgcagatcccactgcaggcccgcgagctcatcgacaccatcctggtgaagggcaatgctgccgcaaacattttcaagaattgccttaaagagatcgacagcaccctctacaagaatctgttcgtcgataagaacatgaagtacatccctaccgaggacgtgagcggcctgtctttggaggaacagctgcggagacttcaggaggagcgcacgtgcaaggtctgcatggataaagaagtttcggtcgtgttcatcccctgcggacatctggtggtgtgtcaggaatgcgcaccgtcgttgcgcaaatgcccaatctgtcggggaatcatcaaggggaccgtgaggactttcctttca

SEQ ID NO: 32214 - DNA, 1854 bp, synthetic construct
  misc_feature 1..1854: note = Description of Artificial Sequence: Synthetic coding sequence
  source 1..1854: mol_type = other DNA
atgcacaaaactgcgtcacagagactgttcccaggaccatcctaccagaacataaagtccattatggaggactcgaccattctgagcgactggacgaactccaacaagcaaaagatgaaatacgacttctcctgcgagctctacagaatgtcgacctactcgactttccccgctggagtgccagtgtccgaaaggtcattggcccgcgcggggttttactacactggagtgaacgacaaggttaaatgcttctgttgcggccttatgctggataactggaagctgggggactccccgattcaaaaacataagcaattgtaccccagctgctccttcatccagaacttggtgtccgcctccctcggaagcacctcaaagaacacctcaccgatgcgcaacagcttcgcccatagtctctcacccaccctggagcattccagcctgttctcaggctcgtactcgtcgctttccccgaatcctctcaactcacgcgccgtggaggacatcagctccagccgcacgaacccgtactcatatgccatgtccactgaggaggctagattcctcacttatcacatgtggcctctgaccttcctgtcgccgtcagaactggcacgtgcgggattctactacatcggtccaggcgaccgcgtggcctgctttgcctgtggcggaaagctctcaaactgggagcccaaggacgacgccatgtcagaacacagacgccacttcccgaattgcccatttctggagaactcactggagactttgaggttctccatctccaacctctccatgcaaacccacgcagcgagaatgcgcaccttcatgtactggccgtcgtcggtcccggtccagccggagcagcttgcttccgcgggattttactacgtcggaagaaatgacgacgtgaagtgcttctgctgtgacggcggcctccggtgctgggagtccggggatgatccctgggtcgagcacgccaaatggtttccacgctgcgaatttctgataagaatgaagggccaggaattcgtcgacgagatccaaggacggtacccacatctccttgaacagttgctttcgacttccgatactactggggaggagaacgcggaccctccaatcatccattttggtccgggagaatcgtcgtcggaagatgccgtgatgatgaacactccagtggtgaagtcagccctcgaaatgggcttcaatcgagatctggtcaagcaaactgtgcaatccaagatcctcactactggagagaattacaagaccgtgaatgacattgtgtccgcgttgctgaacgccgaggacgaaaagagagaagaagagaaggaaaagcaggccgaggagatggcgtcagacgacctcagcctgattcgcaaaaatcggatggcacttttccagcagctgacctgcgtgctccccatccttgacaacctgttgaaggctaatgtcatcaataagcaggaacacgatatcatcaagcaaaagactcaaatcccgctccaggcgcgcgaactgatcgatacgatccttgtgaagggaaacgcagccgcaaacatcttcaaaaactgtctgaaggaaatcgattcgacgctgtacaaaaacctcttcgtcgataagaacatgaagtatattccgaccgaagatgtgtcaggactgtccctggaagagcaattgcggcgccttcaagaagagcggacctgtaaggtgtgcatggacaaggaagtgtcagtggtgttcattccgtgcggacatctcgtcgtttgtcaggaatgcgccccttccctcaggaagtgtccaatctgccgcggaatcattaagggcacggtgagaaccttcctttcc

SEQ ID NO: 32215 - DNA, 1854 bp, synthetic construct
  misc_feature 1..1854: note = Description of Artificial Sequence: Synthetic coding sequence
  source 1..1854: mol_type = other DNA
atgcataagaccgcttcgcaacggctttttccagggccttcttaccagaatatcaagagtattatggaggatagtacaatcctgtccgactggacgaactcaaacaaacagaagatgaagtacgacttctcctgcgaactctaccggatgtccacctattccacttttcccgccggggtgcctgtgtccgaaagatcgctggcccgggctggattttattatacaggcgttaacgataaagtgaaatgcttctgttgtgggttgatgctggacaattggaaactgggagactctcccattcaaaagcacaagcagctgtacccttcatgctcctttattcagaacttggtatcggcgtcattaggatcaacctctaaaaatacttctccaatgaggaacagcttcgcccatagcctaagtcccaccctggagcacagctctctctttagcggcagctactcatcgttaagccccaacccccttaatagtcgagcggttgaggacattagcagctcccggacgaatccatattcttatgcaatgagtacggaagaggcgagattcttaacctatcatatgtggccactgacgtttctatctcctagtgaactggccagagcagggttttactatattggtccaggggatcgtgtggcttgttttgcttgtggcggcaaactttcaaattgggagccgaaggatgacgctatgtccgagcaccggcgccacttccccaactgccccttcctggaaaactctctggaaactctgcgattctccatcagcaacttgtccatgcagacacatgcggcccgtatgagaacgtttatgtactggccgtcatcagtccccgttcagcctgaacagctggccagtgccggtttttattatgtgggacgcaatgatgatgtgaagtgtttttgttgtgatggtggcctacgctgctgggagagcggcgacgacccgtgggtggagcacgcaaaatggttcccaagatgtgagtttcttatccgaatgaaggggcaggaatttgtagatgaaatccagggccgttacccccatctgttggagcagctcctcagcacctccgacaccacgggcgaagagaacgcagacccaccaataattcatttcggaccaggcgagtctagctccgaggatgccgtgatgatgaatacccctgtcgttaagagcgccctggaaatgggttttaatcgcgatctggtgaaacagaccgtacagtccaaaatcttgaccacaggcgaaaactataagactgtcaacgatattgtgagcgcgctgctaaatgccgaagacgaaaagagggaggaggagaaggaaaaacaggcagaagagatggcctcggacgatctgtctttgatccgcaagaaccggatggctctgtttcagcagctgacttgcgtactgcctattctggacaacttactcaaagcaaatgttattaacaagcaggaacacgatattataaagcagaaaacccagattccactccaggcacgcgaattgattgacaccattttggtcaagggaaacgccgccgctaatattttcaaaaactgccttaaggagatcgattccactctttataagaacctattcgtcgataagaatatgaagtacattccgaccgaggatgttagtggtctgtctctcgaggaacagctgaggcgcctccaggaagaacgcacctgcaaagtgtgcatggataaagaagtctctgtggtgttcataccctgcggacacctggtcgtgtgccaagaatgtgcgcctagtttacggaagtgcccgatctgtcgagggattattaagggcacggtacgtacatttcttagt

SEQ ID NO: 32216 - DNA, 1854 bp, synthetic construct
  misc_feature 1..1854: note = Description of Artificial Sequence: Synthetic coding sequence
  source 1..1854: mol_type = other DNA
atgcacaagactgcctcacaaaggctgtttccaggcccgagttaccagaatatcaaatcaataatggaggattccactattctgtccgattggaccaacagcaacaagcaaaagatgaagtacgacttcagctgtgaactataccggatgtccacatactctacatttcccgccggggtgcccgtgagtgaacgcagcttagcaagggccgggttctattatacaggcgtgaacgacaaagtgaaatgtttttgctgcggcctgatgcttgacaactggaagctgggggatagcccaattcagaagcacaagcagctctatccctcttgctcatttatccagaatctggttagtgcaagtctagggtctaccagcaagaataccagccccatgagaaattctttcgcacactccttgagtccaacattggagcattctagcctgtttagcgggagctactcatcactatcccctaatcctctaaactcccgggctgtggaggatattagctctagtcgtaccaatccatactcttacgcaatgtcaaccgaggaggcacgcttcctgacctaccatatgtggcctctgacatttcttagtccatccgagttggctcgggcaggattttactacataggtcctggtgacagggtggcatgtttcgcttgtgggggcaaactgagcaattgggagcccaaggacgacgctatgtctgaacaccggcgccattttccaaactgtcctttcttggagaactctctggagactctgcgcttctctatatcaaatctgagcatgcagacacatgctgctagaatgcgtactttcatgtattggccctcatctgttcctgtgcagcccgagcaactggcatcagctggcttctactatgtgggccggaatgatgatgtgaagtgcttctgctgcgatggaggcttaaggtgttgggagagtggcgacgacccctgggtcgaacatgccaagtggtttcctagatgtgagttcttaattaggatgaagggccaggaattcgtggatgaaatacagggccggtacccacatctgctcgagcagttactgtctacttctgatacaacaggggaggagaacgccgaccctcctattatacacttcgggcctggggaatcatccagtgaagacgcagtcatgatgaacacccccgtggtgaagagtgctttagagatgggctttaatcgggacctcgtgaagcaaacagtccagagcaagattctgactaccggcgagaactataagacagtgaacgacatagtgagcgccctgctcaacgccgaagacgaaaagagagaggaggagaaagagaaacaagccgaggaaatggcaagtgatgatctatctctgattcgcaagaaccgcatggcattattccagcaattaacttgtgtcctgcctattctggataacctgctgaaggcaaatgtgatcaataaacaggagcatgacatcattaagcagaagacacagattcctctgcaggctagagagcttatcgacactatactcgtgaaaggcaacgctgccgccaatatatttaagaattgcctaaaggaaatcgactcaaccctgtacaagaatctgttcgtagataaaaatatgaaatatattcctacagaggacgtttccggactgtcactggaagaacagctgcgccggctgcaggaggaacggacctgcaaggtgtgtatggataaggaggtgtcagtagtgtttattccctgcggccacctcgtagtttgccaggagtgcgctcccagcctgaggaaatgccctatttgccgaggaattatcaaaggcaccgttcggaccttcctcagt

SEQ ID NO: 32217 - DNA, 1854 bp, synthetic construct
  misc_feature 1..1854: note = Description of Artificial Sequence: Synthetic coding sequence
  source 1..1854: mol_type = other DNA
atgcacaagaccgcctcccagaggctgttccctgggccgtcctaccagaacattaagagcatcatggaagattcgactattctctcggactggaccaatagcaacaagcagaaaatgaagtacgacttctcgtgtgagttgtacaggatgtccacttactccacttttccggctggcgtgcccgtcagcgagcggagcctggcgcgcgcgggcttctattacacgggagtcaatgacaaggtcaagtgcttttgctgcgggctgatgttggacaactggaagctcggggactcgccaatccagaagcacaagcagctctatccatcctgctcattcatccagaatcttgtgtcggcgtcgttgggttcgacgagcaagaatacgtcgccaatgcgcaactcattcgcacactcactgtcgccgacgctggagcactccagcctcttctccggatcatactcgtccttgagccccaacccgctcaactcgagagccgtggaagatatctcatcatccaggaccaatccctactcctacgcgatgagcaccgaagaggcccgttttctcacttaccatatgtggccattgactttcctgagcccttcagagctcgcgcgcgccggtttttactacatcggcccgggcgaccgcgttgcgtgcttcgcctgcggaggaaaactttcgaactgggaaccaaaggatgatgccatgtcggaacaccggcggcattttccaaattgcccattcctcgaaaattccttggagactctccgtttctcgatctcaaatctgagcatgcaaactcacgccgccagaatgcggaccttcatgtattggccgtcctcggtgcctgtgcaacccgaacaactcgcctccgcaggtttctactacgtggggcgcaacgacgacgtcaaatgtttctgctgcgatggaggactccggtgttgggaaagcggcgacgatccgtgggttgaacatgccaaatggttcccgagatgcgaatttctgattcgcatgaagggacaggagtttgtcgatgaaatccagggacggtacccgcacctgcttgaacaactgctctctacctcagataccaccggggaagagaacgcagacccacctataatccatttcggcccaggtgagagttcgagcgaggatgcggtgatgatgaacaccccggtcgttaagagcgccctggaaatgggattcaaccgcgatttggtgaaacagactgtgcaatcaaagatcctgacgaccggagaaaactacaagacggtgaatgatatcgtcagtgctttgctcaatgcagaggacgagaaacgcgaagaggaaaaggagaaacaggccgaagagatggcgtccgacgacctgtcgctgattcggaagaatcgcatggccttgtttcagcaactgacttgcgtgctgccaatccttgacaatcttctgaaagccaacgtgataaacaaacaagagcatgacattatcaagcagaaaactcagatcccgctccaggcccgcgagctgattgatactatcctggtgaagggaaatgcggcggcaaacatctttaagaactgcctgaaagagatcgatagcactctctacaagaatctgttcgtcgacaaaaacatgaaatacatcccgacggaggatgtgagcggcctgagcctggaggaacagctgcgccgccttcaagaagaacgcacctgcaaggtgtgcatggataaggaggtgtccgtggtgttcatcccgtgtggacacctcgtcgtgtgtcaggagtgtgctccgagcctcagaaagtgcccgatctgtcgggggatcataaagggtaccgtgcgcacttttctgagc

SEQ ID NO: 32218 - DNA, 1854 bp, synthetic construct
  misc_feature 1..1854: note = Description of Artificial Sequence: Synthetic coding sequence
  source 1..1854: mol_type = other DNA
atgcacaagaccgcctcccagagactttttcctggaccctcctaccaaaacattaagtcgatcatggaagattcgactattctgtcggactggactaactccaataagcagaagatgaaatacgattttagctgtgaactctacaggatgtccacctactcgaccttccctgctggcgtgcccgtgtccgaaagatctttggcaagagcaggattttactacacgggcgtgaatgacaaggtgaagtgcttttgttgcggactcatgcttgacaattggaagctgggtgacagcccaatccagaagcataaacaactgtacccttcctgttcgtttatacaaaatctcgtgtcagcatccctgggaagcaccagcaagaatacctcgcctatgcggaactcctttgctcattcactgtcgcccacgctcgaacattcgtcccttttttcgggctcgtactcaagcctttcgcctaatcctcttaactcccgcgcagtcgaagatatctcctccagcaggaccaacccgtattcctacgcaatgtcaaccgaggaagcccgtttcctcacttaccatatgtggcccctgacctttctttcgccttcagaacttgcaagagcaggtttctactacattggaccgggggaccgcgtagcatgtttcgcctgtggaggaaagctgagcaactgggaacctaaagatgatgcaatgtctgaacataggcgccattttccaaactgtcctttccttgaaaatagcctggaaactcttaggttttccattagcaatttgtccatgcagacccatgcagcccgaatgaggactttcatgtactggcctagctcagtcccggtgcaaccagagcagcttgcgtcagctgggttctactacgtgggccgcaacgacgatgttaaatgtttctgttgtgatgggggtctgcgttgttgggaatcgggagacgacccatgggtggaacatgctaagtggttccctcgctgtgaattccttatacgtatgaaggggcaagaatttgtggatgagattcaaggtagataccctcacctgcttgaacagcttttgtccactagcgacactaccggggaagaaaatgcagacccacccataatccacttcggcccgggtgaatccagctcggaagatgcggtgatgatgaacactcccgtggttaaaagcgccctcgaaatgggatttaacagagatcttgtcaagcaaactgtgcaatccaagattctgaccactggagagaattacaagacggtgaacgatatcgtctccgcacttctcaatgcagaagatgagaagagggaagaggagaaggagaagcaggcggaagagatggcgtctgacgacctgagcctgattaggaaaaaccgtatggcacttttccagcagctgacttgcgttctgcctatccttgataaccttctcaaggccaatgtgatcaacaagcaagaacatgatatcataaagcaaaagacgcaaattccactgcaagcacgggaactgattgataccattctcgtcaaggggaatgcagcggcaaacattttcaaaaactgcctgaaggaaattgatagcactctgtacaagaatctctttgtggacaaaaacatgaagtacatcccaaccgaagatgtgtcaggtctttcacttgaagaacagctgcggagacttcaggaggaacgaacgtgtaaggtgtgcatggataaggaggtttcagtcgtgtttattccttgtggccatcttgtggtatgccaggagtgtgcgccatcgctgaggaaatgtcctatctgcaggggcattatcaagggtactgtcagaaccttcctgtcg

SEQ ID NO: 32219 - DNA, 1854 bp, synthetic construct
  misc_feature 1..1854: note = Description of Artificial Sequence: Synthetic coding sequence
  source 1..1854: mol_type = other DNA
atgcacaagacggccagccagcggttgttcccgggaccatcgtaccaaaatattaaatccatcatggaagatagcactatactgtccgactggacgaatagtaataagcaaaaaatgaaatacgactttagttgtgagctatataggatgtccacctactctacgtttcccgcaggtgtgcccgtcagcgagcgatcgctggcacgtgccggcttctactacacaggggttaacgataaagtgaagtgcttttgctgtggcctcatgctggacaactggaagctgggcgattccccgattcagaagcataaacagctctacccctcctgttccttcatccagaacctggttagcgcgtcccttggcagcacatcaaagaacacatcccctatgcggaatagtttcgcacacagcctgtctccgactctcgagcatagttcactgtttagcggctcgtattcctccttaagcccgaatcccctgaactcgcgggccgtggaggatatctctagttcccgtaccaatccgtactcctatgctatgtctacagaggaggccaggttcttgacctatcacatgtggcccttgacctttttgagccctagtgaactggcgcgcgctggattctactacatcggcccaggagacagagttgcctgtttcgcatgtggcggaaagctttctaactgggagccgaaggacgacgccatgtcggagcatagacggcatttccctaattgccctttcctggagaactctcttgaaaccctgcgcttctccatttctaatctctcgatgcagactcatgctgcaaggatgaggaccttcatgtattggccctcgtccgtcccagttcaacccgagcagctcgcctccgccggcttctactacgtgggcaggaacgacgatgttaaatgcttttgctgcgacggtggcctccgatgctgggagagcggagacgatccctgggtcgagcacgctaagtggttcccccggtgcgagttcttgattcgaatgaaggggcaggaattcgtagatgagatccaaggacgctacccccacttgctggaacagctgctcagtacctcggacacgacgggagaggagaatgccgatccaccaatcatccacttcggccccggcgagagctccagtgaggacgcagtgatgatgaacacgcctgttgttaagagcgctttggagatgggcttcaatcgcgatctggtaaagcagaccgttcagtccaagatacttacgacaggcgagaattacaaaacggtgaatgatatcgtgtcggctttgttgaacgctgaggatgagaagagagaagaagaaaaagagaagcaggcggaggagatggccagcgatgatctctcgctgattcgcaagaatcgcatggccctcttccagcaactgacctgcgtgctgccaattctggataacctgttgaaggccaatgtgatcaataagcaggagcacgatattatcaagcagaagacgcagattcctctgcaggcacgcgaactgatcgatacgatattggtcaagggtaacgcagccgccaacatctttaagaattgcctgaaggaaatagacagtacactgtacaagaacctcttcgtggacaagaacatgaaatacatccccaccgaggatgtgagcgggcttagcttggaggagcagcttcgaagactccaggaagagcggacctgcaaggtgtgcatggacaaagaggtgtcagtggtttttatcccgtgcggccatttggtggtctgccaggagtgcgctccctccttgcgcaagtgtccgatctgcaggggcataattaaaggcacggttagaacgttccttagc

SEQ ID NO: 32220 - DNA, 1854 bp, synthetic construct
  misc_feature 1..1854: note = Description of Artificial Sequence: Synthetic coding sequence
  source 1..1854: mol_type = other DNA
atgcacaagaccgcttctcagagactctttcctgggccttcttatcagaatatcaagagtatcatggaagattcaactatcctttccgattggacaaatagcaataaacaaaagatgaagtacgacttctcttgtgaactttacagaatgtcaacgtactcaacgttccccgctggagtgcccgtttcagaacgcagcctcgcccgagctgggttttattacaccggcgttaatgacaaggtgaagtgcttttgctgcggtcttatgctggacaactggaagctgggcgacagtccgattcaaaaacataaacagctgtaccctagctgtagttttattcagaacctcgtgagtgctagtctggggtctacatcaaaaaacacaagtcctatgaggaatagctttgcccacagtctgagccccacactggagcactctagtcttttcagcggaagctactctagcctctctcccaacccccttaactcccgtgctgtggaagatataagctctagtaggaccaacccatattcctatgcaatgagtacggaagaagcccggttcctgacataccatatgtggcccttgactttcctaagcccatctgaactcgcccgcgccgggttttactatatagggccaggggaccgagtggcatgctttgcatgtgggggtaagctgtccaactgggaacccaaagacgacgcgatgtcagagcataggagacacttccctaattgtcccttcctagaaaactcattggaaaccttgagatttagtatttctaatcttagtatgcagacccatgccgctagaatgaggaccttcatgtactggccaagttcagtgccggtccaaccagagcagctggctagtgccgggttttattacgtgggacgaaacgacgacgtgaagtgtttctgttgtgacggtgggctgcgatgctgggagagcggggatgacccttgggtggagcacgctaagtggttcccccggtgtgagttcctgatccgaatgaaggggcaggaatttgttgacgaaatccagggtagataccctcatctgttggaacagttgttgtcaacctctgatacaacaggagaagaaaacgcagatccacccataattcattttggacctggtgagtcatctagtgaggacgccgtgatgatgaacaccccggtcgtcaaaagtgctctggagatgggatttaatagggacctggtcaagcagacggttcagtccaagatcctgaccaccggcgaaaactacaaaactgtaaacgacatcgttagcgcactgctgaatgctgaagatgagaaaagagaagaggaaaaggagaagcaggccgaagagatggcaagcgatgatctgagtttaatccgaaagaacagaatggcactgttccagcaattgacttgtgtgctgccgatcttagataacctgctgaaagcgaacgtgattaacaaacaggaacatgatatcataaaacagaagacacagataccactgcaggcccgtgagcttatcgatactatactagtgaaagggaatgccgccgccaacatctttaaaaactgtctcaaggaaatcgatagtaccctttacaaaaacttattcgtggataagaacatgaagtacatccctacggaagatgtgagcgggctttcgttagaggagcaactgcgacggttgcaggaagaacgaacctgtaaagtgtgcatggacaaggaggtgagcgtggtgttcatcccttgcgggcatctagttgtgtgtcaggagtgcgcgccgagcctacgaaaatgcccaatctgcagggggattattaaaggcaccgtgagaacctttctcagt

SEQ ID NO: 32221 - DNA, 1854 bp, synthetic construct
  misc_feature 1..1854: note = Description of Artificial Sequence: Synthetic coding sequence
  source 1..1854: mol_type = other DNA
atgcacaaaacagcctcacaacggttgttcccaggtccatcgtaccaaaatatcaagagtataatggaggattcaactatattgagcgactggactaacagtaataagcaaaaaatgaagtatgacttctcttgtgagttataccggatgagcacctattccaccttcccagctggagttccggtttccgagcgatccctggctcgagccgggttctattatacaggggtgaacgacaaggttaaatgcttttgttgcggtctgatgcttgataactggaagctcggggactcccccattcagaagcacaagcagctgtatccgtcctgcagtttcattcagaatctggtgagcgcttctctgggttccacctccaaaaatacgtctccgatgagaaacagttttgcccactctctttccccaacattagaacactctagcctgttcagtggtagttactctagcttgagtccaaacccactgaattccagggctgtggaagacatcagttcttcaaggaccaacccgtactcttatgcgatgagcaccgaggaagcccgtttccttacataccacatgtggcctctgaccttcctgagcccctctgagttagcccgcgccgggttctactatatcggccccggagatcgtgtagcttgcttcgcatgtggcgggaaactctctaactgggaacctaaagacgatgcaatgtcagagcacagaaggcattttccgaactgccccttcctggagaatagcctggaaacactgcgattttccatctccaacctgtctatgcagacccacgctgctcgtatgcgaaccttcatgtactggcccagcagcgtgcctgtgcagcctgagcagctggccagcgcaggcttttattatgtgggtcgcaatgatgatgtgaaatgcttctgttgtgatggaggactaaggtgctgggagagtggggacgatccatgggtcgagcacgccaaatggtttccccgctgtgagtttctgatccgcatgaaaggacaggaattcgtggatgaaatacagggtcgatacccacatctactggagcagcttctgtcaacttccgatacaaccggagaggaaaacgcagatccgcccattatccacttcggcccaggcgagtcatcatcagaggatgcagtaatgatgaatacaccggtggtcaagagtgccctggaaatgggttttaatcgagaccttgtaaagcaaacggtgcagagtaagatcctcacgacaggggaaaattacaagacggtgaacgacattgtctctgctctgctgaatgcagaagatgagaaaagggaagaagagaaggaaaaacaggcagaggaaatggcgtcagacgacttgagcctcataagaaaaaatcgcatggcactgtttcagcagctcacctgcgtgctcccaatcttggataacctgctaaaggccaacgtgatcaataagcaggagcacgacattattaagcagaaaacacaaatcccactgcaggcacgcgaactgattgatactatccttgtgaagggaaacgctgcagccaacatttttaagaactgcttaaaggagattgattcaacgttgtataagaatctttttgtggacaaaaacatgaagtacatcccaaccgaggacgtaagtggcctgtcattagaggaacagctgcgacgccttcaggaagaacgaacgtgcaaggtgtgcatggataaagaggtgtccgtcgtatttattccgtgtgggcaccttgtggtttgtcaggagtgcgctccgtctctgaggaagtgccctatttgtcggggtattatcaaggggacagtgagaacttttctctcc

SEQ ID NO: 32222 - DNA, 1854 bp, synthetic construct
  misc_feature 1..1854: note = Description of Artificial Sequence: Synthetic coding sequence
  source 1..1854: mol_type = other DNA
atgcataaaacggcgtcgcaacgattatttccgggtccgtcgtatcaaaatataaaatcgataatggaagattcgacgatattatcggattggacgaattcgaataaacaaaaaatgaaatatgatttttcgtgtgaactatatcgtatgtcgacgtattcgacgtttccggcgggtgttccggtttcggaacgttcgctagcgcgtgcgggtttttattatacgggtgtaaatgataaagtaaaatgtttttgttgtggtctaatgttagataattggaaactaggtgattcgccgatacaaaaacataaacaactatatccgtcgtgttcgtttatacaaaatctagtttcggcgtcgttaggttcgacgtcgaaaaatacgtcgccgatgcgaaattcgtttgcgcattcgctatcgccgacgttagaacattcgtcgttattttcgggttcgtattcgtcgctatcgccgaatccgttaaattcgcgagcggtagaagatatatcgtcgtcgcgtacgaatccgtattcgtatgcgatgtcgacggaagaagcgcgatttctaacgtatcatatgtggccgctaacgtttttatcgccgtcggaattagcgcgtgcgggtttttattatataggtccgggtgatcgtgtagcgtgttttgcgtgtggtggtaaattatcgaattgggaaccgaaagatgatgcgatgtcggaacatcgtcgacattttccgaattgtccgtttttagaaaattcgttagaaacgttacgattttcgatatcgaatttatcgatgcaaacgcatgcggcgcgtatgcgtacgtttatgtattggccgtcgtcggttccggttcaaccggaacaattagcgtcggcgggtttttattatgtaggtcgtaatgatgatgtaaaatgtttttgttgtgatggtggtctacgatgttgggaatcgggtgatgatccgtgggttgaacatgcgaaatggtttccgcgttgtgaatttttaatacgaatgaaaggtcaagaatttgtagatgaaatacaaggtcgttatccgcatctactagaacaactattatcgacgtcggatacgacgggtgaagaaaatgcggatccgccgataatacattttggtccgggtgaatcgtcgtcggaagatgcggtaatgatgaatacgccggtagttaaatcggcgctagaaatgggttttaatcgtgatctagtaaaacaaacggtacaatcgaaaatattaacgacgggtgaaaattataaaacggttaatgatatagtatcggcgctattaaatgcggaagatgaaaaacgtgaagaagaaaaagaaaaacaagcggaagaaatggcgtcggatgatttatcgttaatacgaaaaaatcgtatggcgttatttcaacaattaacgtgtgttttaccgatactagataatttattaaaagcgaatgttataaataaacaagaacatgatataataaaacaaaaaacgcaaataccgttacaagcgcgagaactaatagatacgatactagttaaaggtaatgcggcggcgaatatatttaaaaattgtttaaaagaaatagattcgacgctatataaaaatttatttgtagataaaaatatgaaatatataccgacggaagatgtttcgggtttatcgttagaagaacaactacgacgattacaagaagaacgtacgtgtaaagtttgtatggataaagaagtttcggtagtttttataccgtgtggtcatctagtagtttgtcaagaatgtgcgccgtcgctacgtaaatgtccgatatgtcgtggtataataaaaggtacggtacgtacgtttctatcg

SEQ ID NO: 32223 - DNA, 1854 bp, synthetic construct
  misc_feature 1..1854: note = Description of Artificial Sequence: Synthetic coding sequence
  source 1..1854: mol_type = other DNA
atgcacaaaacggcttcccagcggctgttccctgggccctcctatcagaatatcaaatccattatggaagacagcaccattcttagtgattggacaaatagcaacaaacagaagatgaagtacgattttagctgtgagctgtatcggatgagcacatacagcacctttcccgcaggagtgcccgtgagtgagcggtctctggctcgcgcgggcttctattacacgggcgttaatgacaaggttaagtgcttctgctgtggcctcatgctggataattggaagctaggagactcaccaattcaaaagcataagcaattgtacccatcatgttccttcatccagaatttggtgtccgcaagcctcggtagcacctccaagaacacctccccaatgaggaactctttcgcccattctttatctcccacacttgagcatagctccttgttcagtggcagttatagtagtttaagccccaatccgctgaactcaagggcggtggaagatatctcttccagccgtactaacccttattcatacgcaatgtctactgaggaggctcggttccttacctatcatatgtggcctctgacttttttgtcaccctcagagcttgcaagggctggattctattatataggcccgggggatcgcgtagcatgcttcgcttgtggcggcaaactctccaattgggagcccaaagacgatgccatgtccgagcatagaaggcacttccccaattgtccctttctggaaaactcattggaaactctgcgattctctatcagcaacctgagtatgcagacgcacgccgcgcggatgcggaccttcatgtattggccaagctctgtgcccgtgcaacctgagcagctggcatcggcagggttctattacgtggggagaaacgatgacgtgaagtgcttctgctgtgacggcggtttaaggtgctgggagtccggggatgatccctgggtagagcacgcaaagtggtttccacggtgtgagtttctaattcgtatgaaaggacaggagttcgtcgacgaaattcagggccggtacccacacctcctggaacagctgttgagtacctctgacaccacaggcgaggagaatgctgatccacctatcattcacttcggccctggcgaatcaagtagtgaagatgccgtaatgatgaacacaccagtggttaaatctgctcttgagatgggcttcaaccgggacctggttaagcagaccgtacagtccaaaattttgaccactggcgagaactataagacagttaatgacatcgtgtcagcccttcttaacgccgaggatgagaaaagggaggaggaaaaagagaagcaggcggaagaaatggcctccgacgatcttagcctgatcagaaagaaccggatggctttgttccagcagctcacgtgcgttttgcccatactcgataacctgcttaaggcgaatgtgattaataagcaggagcatgatatcatcaaacagaagacgcagatccccctgcaggctagagagctaattgacaccatcctggtaaagggaaacgcggcggctaatattttcaagaattgcctgaaggagatcgacagcaccttatacaaaaatttgttcgtcgataaaaacatgaaatacatcccaactgaggacgtgagcgggctgtccttggaggaacagcttcggcgtttgcaggaagagagaacttgtaaggtgtgcatggacaaggaggtttctgtcgtcttcataccatgcggccacttagtcgtctgccaggaatgtgccccatctctgagaaaatgtcctatatgtagaggtattatcaagggtaccgtcagaacttttctaagt

SEQ ID NO: 32224 - DNA, 1854 bp, synthetic construct
  misc_feature 1..1854: note = Description of Artificial Sequence: Synthetic coding sequence
  source 1..1854: mol_type = other DNA
atgcacaagactgcctcacagcggctcttccctggaccatcgtaccagaacattaagtcaatcatggaggactccaccatcctgtcggactggactaattcgaacaagcaaaagatgaaatacgacttctcgtgcgagctgtaccgaatgtcgacctactccacctttccggctggagtgccagtgtcggagcgttctctggcccgggcgggattttactacactggagtgaacgacaaagtgaagtgtttctgctgcgggctgatgctggacaattggaaactcggagactccccgatccagaaacataagcaattgtacccgtcatgctccttcatccagaatctggtgtcggcctcgctgggaagcaccagcaagaacacttcccctatgaggaactccttcgcacactcactctccccgactctcgagcactcctcactgttcagcggtagctacagctcactgtcaccgaacccgctgaattcccgcgcggtagaggatatctccagctccaggacgaacccgtattcctacgccatgtcgaccgaagaggcgcgtttccttacttaccatatgtggccgctgactttcctgagcccgagcgaattggctcgggcaggattctactatatcggccctggtgaccgcgtggcctgcttcgcttgcggcggaaaactgtccaattgggagcctaaggatgacgcaatgtcagaacacaggcgccattttccgaattgcccatttctcgaaaacagcctcgaaaccctccgcttctccatcagcaatctctcgatgcagacccatgcggcccgcatgcgcaccttcatgtactggcctagctccgtgccggtgcagccggagcagctcgcctccgccggcttctactacgtgggccggaacgatgacgtcaagtgcttctgctgtgacggaggactccggtgttgggaatccggagacgacccgtgggtcgaacacgccaagtggtttcctcgctgcgagttcttgattcgcatgaagggccaagaattcgtggatgaaatccagggaaggtacccgcatctgttggagcagctgctgtcgactagcgacactacgggagaggaaaacgccgacccaccgatcatccactttggtccgggcgaatcgtccagcgaggacgcggtgatgatgaacacccctgtggtcaagtctgcgctggaaatgggttttaacagggatctggtgaaacagacggtgcagtcaaagatcctgacgaccggagagaactacaagactgtgaacgacatcgtgtcagcactcctgaacgcggaagatgagaaacgggaggaagaaaaggagaagcaggctgaggaaatggcttcggatgacctctcccttatccgcaagaaccgcatggcgctcttccaacagcttacgtgcgtccttcctatactggataaccttcttaaggcaaatgttatcaataagcaggaacacgacatcatcaagcaaaagactcagatcccgctgcaggcaagggaactgatcgatactattctggttaagggaaacgcagccgcgaatatcttcaagaattgcctgaaggagattgactcgacgttgtacaagaatctgttcgtggataagaatatgaaatacattccgactgaggacgtgtcaggacttagcttggaagagcagctccgccggctccaagaagaaagaacttgtaaggtgtgcatggacaaagaagtcagcgtggttttcatcccgtgcggacatctcgtggtctgccaggagtgtgcaccaagcctcagaaagtgtccaatctgccgcggaatcatcaaaggtactgtgcgcactttcttgtcg

SEQ ID NO: 32225 - DNA, 1854 bp, synthetic construct
  misc_feature 1..1854: note = Description of Artificial Sequence: Synthetic coding sequence
  source 1..1854: mol_type = other DNA
atgcataaaacagcctcccagagactcttccccggcccctcataccagaacattaagagcatcatggaagacagtactatactgtctgattggaccaactcaaacaagcaaaaaatgaagtacgatttttcctgcgaactctataggatgagcacatacagcacctttcccgccggcgtcccagtgtctgaacggtctctggccagggccggcttttattacacgggagtgaatgacaaggtcaaatgcttttgctgtggactgatgctggacaattggaagctgggcgatagtcccattcaaaagcacaagcagttgtacccgagctgttcttttatccagaatctggtcagcgctagcctgggatctacttcaaaaaatacctcacccatgaggaattcctttgcccacagcctctcccccaccctggagcacagtagcctgttctcgggatcatactcttccctatcaccgaaccccctgaattcccgggccgtggaggatatttcctcatccaggaccaatccctactcctacgctatgtccaccgaggaggcacgtttcttgacttaccatatgtggcccttgaccttcttgagccctagcgagctggcccgcgcagggttttactacattggacctggcgaccgcgtggcctgcttcgcatgtggaggaaagctgtctaattgggaacctaaggatgatgccatgtcagaacaccgccggcattttcccaactgcccattccttgaaaacagtcttgagaccctgaggttcagcatctctaatctctccatgcagacacacgctgcgcgtatgcgcaccttcatgtattggccttcgagcgtccccgtccagccggaacagctggcctccgcaggtttctattacgtgggcaggaatgatgacgtgaaatgcttttgttgcgacggcggactgaggtgttgggagagcggtgatgatccatgggtcgaacacgcaaaatggttccctaggtgcgagtttctgatccggatgaaagggcaggagtttgtggacgaaatacaggggaggtaccctcacctccttgagcaattgttgtcaacctctgataccactggtgaggagaacgctgacccacctataatacactttggacctggagaatcttcctctgaggacgctgtaatgatgaatactcccgtggtaaagagtgccctggaaatgggattcaacagagatctcgtgaaacagactgtgcagagcaaaatattgaccactggagaaaattacaaaacggtgaatgacattgtatccgcgctactaaatgcggaggatgaaaagcgcgaagaggagaaggagaaacaggcagaggagatggcatcagatgatttatctttaatccgaaaaaatcgcatggccttatttcagcagcttacatgcgtcttgccgattttggacaatctgctcaaagccaacgtgattaacaagcaggagcatgacattattaaacagaaaacccagattcctttgcaggcacgcgaactgatagacacgattctggtgaaagggaacgcagccgcgaacatcttcaaaaactgccttaaagagattgatagtaccctttacaagaatttattcgtggacaagaacatgaaatatattcctactgaggacgtgagtggcctcagcctggaagaacagttgcgacgcttgcaggaggagcggacctgtaaggtgtgcatggacaaagaagtgagcgtagtcttcataccatgtggccaccttgtggtttgccaggaatgtgcaccgtccttgaggaaatgcccaatttgtagaggcatcattaaaggcactgtgcggacgttcctatct

SEQ ID NO: 32226 - DNA, 1854 bp, synthetic construct
  misc_feature 1..1854: note = Description of Artificial Sequence: Synthetic coding sequence
  source 1..1854: mol_type = other DNA
atgcataaaacagcgtcccagagattattcccaggcccatcgtatcagaacatcaagtcaatcatggaggattcaactatcttgagtgactggaccaattcaaacaaacagaaaatgaagtatgacttctcttgcgagctttatcgtatgtctacctatagcactttccctgcgggcgtgccagtatcagagaggtctctggcccgcgcaggattctattacactggcgttaacgataaggttaaatgcttctgttgtggcctaatgcttgacaattggaagcttggggatagtcccattcagaaacataaacaactgtacccctcttgcagcttcattcagaaccttgtgtcagcttccttagggagcacatctaaaaacacctccccaatgagaaattcgtttgctcatagtctttcccccacattagaacactcaagtctgttttcaggatcatattcatctttaagcccaaaccctctcaacagcagggccgttgaagacatcagctcgtctcggactaacccctattcatacgccatgtctacggaagaagcccgcttcctgacataccatatgtggccgttgactttcctcagcccttctgagctcgccagagcaggcttctattatattggtcctggggacagagtcgcttgcttcgcatgcggtgggaaattgagcaactgggaacctaaggatgatgccatgtcagaacaccgaagacactttccaaattgccccttccttgaaaatagcctggagacacttcgtttctccatcagtaatttatcaatgcaaacccacgcagctagaatgagaacatttatgtattggccctcctctgttcccgtccagccggaacagctggccagtgcaggtttttactatgttggtaggaatgatgacgtgaagtgtttctgttgcgatgggggactgcggtgctgggagagcggggatgacccctgggtagagcatgcaaaatggttcccgcgctgtgagtttctgattcggatgaaagggcaggaattcgttgatgaaattcaaggccggtaccctcatttgttagaacagttgctttccacaagtgacaccaccggtgaggagaacgccgatccaccaatcatacattttggccccggtgaatctagcagcgaagatgccgtcatgatgaacactcccgtggtgaaatccgctcttgagatgggctttaatcgtgacctcgtgaaacaaacggtgcagtctaagatactcactacaggggaaaattataagactgtgaacgacatcgtttccgcactcctcaacgccgaagatgagaaacgcgaagaagaaaaagaaaagcaggccgaggagatggccagcgatgaccttagcctcattcgcaaaaaccgcatggccctgttccaacagctgacatgcgtgctgcccatcctggacaacctcctcaaggccaatgtaatcaataagcaggaacacgacatcatcaagcaaaagacccagatacccctgcaggccagagaactgattgatactatactcgttaaaggtaacgccgccgccaacatattcaagaactgtctcaaggagatagacagtaccctttacaaaaatttgttcgtggacaagaacatgaagtacatccccacggaggacgtgtccggcttgtcactcgaagagcagctgcgacggctgcaagaggaaagaacctgcaaagtttgtatggacaaggaagtgtcagtcgttttcataccgtgtggacatctcgttgtgtgtcaagagtgtgccccatctctcaggaagtgccctatctgtcggggaattataaaggggaccgtgcggacttttctctct

SEQ ID NO: 32227 - DNA, 1854 bp, synthetic construct
  misc_feature 1..1854: note = Description of Artificial Sequence: Synthetic coding sequence
  source 1..1854: mol_type = other DNA
atgcataaaaccgccagccagagattgttccccggcccctcctatcagaacattaagtcgattatggaggactctaccattctgtccgattggacaaatagcaacaagcaaaaaatgaaatacgatttctcctgcgaattgtatagaatgtcaacctatagtaccttccccgcaggcgtgcctgtctccgaacgatctctagctagggcagggttctactatacaggagtcaacgataaggttaaatgtttttgctgcgggttgatgttagacaattggaaactaggtgactcacccattcagaaacacaagcagttatacccgagctgttcatttattcagaatctggtcagcgcatccctcgggtctactagtaagaacaccagccctatgaggaacagttttgctcactccctgagcccaaccttggaacattcctcgctgttctcaggcagttactcttccttaagccctaatcccttgaattctagggcggtcgaggatatctcaagctctcggaccaatccttatagctatgccatgagtacggaagaggcgcgtttcctgacgtatcacatgtggccactaacttttctctcgccgtcagaactcgctagggcaggtttctactatatcggacctggcgaccgagtggcatgtttcgcatgcgggggtaagttgtctaactgggagcccaaggatgatgctatgagcgaacaccgccgccacttccctaactgtcccttccttgagaatagcctggaaactctcaggttctccattagcaacttgtcgatgcagacccacgccgctcgcatgagaaccttcatgtactggccctcctctgtgcccgtgcagcctgagcaactcgccagcgcaggtttctattacgtcggaagaaacgatgatgtgaagtgtttctgctgtgacggtggcctccgctgttgggaatctggggatgacccttgggttgaacacgctaagtggttcccccggtgtgagttcctcatccgtatgaagggccaagagttcgtggacgagattcagggaaggtatccacatctgttagagcagttactgagcacttcagacaccacaggggaggagaatgctgaccctccaatcattcacttcgggcctggggagagtagctcagaagatgccgtgatgatgaacacacctgttgttaagtcagcgttagagatgggtttcaatagagacctcgtgaaacaaacggtgcagtcgaagatcctgacaacaggagagaactataaaactgtgaatgacattgtctcagccctactcaatgctgaagatgagaaaagggaggaggagaaagagaaacaggctgaagagatggccagcgacgatttatcattaattaggaagaaccgaatggcactatttcagcagttaacatgcgtcctgccaatcctggacaacctgttgaaggcgaacgtaatcaacaaacaggagcatgacatcataaagcagaaaacccaaattcctctgcaggcacgtgagttaattgataccatactcgtcaaggggaacgcagccgcaaatatttttaagaattgcctcaaggagatcgatagcacactgtataaaaatctgtttgtagataagaatatgaagtacatacccacagaagacgtcagcggactgagcttggaggaacagttacggcgactacaggaagagcggacatgcaaagtgtgcatggacaaggaagtgtctgtggtctttatcccctgcggacacctggtagtgtgccaggaatgcgctccatcgctgcgaaagtgcccgatctgtcgcgggatcatcaaagggacagtcagaacattccttagc

SEQ ID NO: 32228 - DNA, 1854 bp, synthetic construct
  misc_feature 1..1854: note = Description of Artificial Sequence: Synthetic coding sequence
  source 1..1854: mol_type = other DNA
atgcacaaaactgcaagccagcgcctattcccagggccctcttaccagaacatcaagagcatcatggaagacagcactatcctgtcagactggacgaattctaataagcagaaaatgaagtatgacttttcgtgcgaactgtatcggatgagtacatattccactttccccgcaggtgtcccagtgtcggaaagatctctcgctcgtgcaggcttttattatactggagtaaacgacaaagtaaaatgcttctgctgcggcctcatgttggacaactggaagctgggggattctcctattcagaagcacaagcagctgtacccctcctgttcattcatacagaatctcgtttctgcttctttagggtctacatccaagaatacttcacccatgaggaactccttcgctcattctctgtcacctacgctggagcattcgtctttgttttcaggatcatattctagcctgagccctaacccacttaacagccgcgctgtggaggacataagctcatcacggaccaacccttattcttacgcaatgtcgactgaggaggctagattcttaacatatcatatgtggcctctgactttcctgtcgcctagtgagctggcccgcgccggattctactacatcggtcctggggaccgagttgcatgcttcgcttgcggagggaagctgagcaactgggaaccgaaggatgacgctatgagcgagcataggcggcacttcccaaattgtccgttcctggaaaacagcttggagacgctcagattttctatcagtaatctaagcatgcaaactcacgccgcccgcatgcggacatttatgtactggccaagctctgtgcctgttcagccagagcagctggcgagcgcagggttttattacgtgggccgtaatgatgacgtcaaatgcttctgttgtgacgggggtcttaggtgctgggagtccggggacgatccatgggttgaacacgcgaaatggtttccccgatgcgaattcctcatccgcatgaaaggccaggagttcgtagacgaaatccagggccggtacccacatctgctggaacagctgctgagtacctccgacactacaggcgaagaaaacgctgaccctcccattattcacttcgggccaggagaaagtagttccgaggacgccgtaatgatgaacactcctgtggtcaaatccgctttagagatgggcttcaatcgggatctggttaagcagacagtgcagtccaaaatcctgaccactggcgaaaattataagaccgtgaatgatatcgtgagcgctctgctcaatgccgaggatgaaaaacgcgaagaggaaaaggagaaacaggctgaggaaatggcaagtgacgatttgagtctgatccgcaagaaccggatggcactgtttcagcaactaacctgcgtgttaccaatcttggataatctgttgaaagcgaatgtgatcaataaacaggagcacgatataatcaaacagaaaactcagatccccctccaagcccgggagcttatcgatacaatcttagtcaaaggcaacgccgccgctaacatttttaaaaactgcttgaaggagatagactcaacactctacaaaaacctgttcgtagacaagaacatgaaatatattcctacagaagatgtgtctgggttgtctctagaagaacagctcaggcgactccaagaagaaaggacctgcaaggtatgtatggacaaagaggtatcggtggtgttcattccctgtggacatctcgtcgtgtgtcaggagtgtgctccatcattgcgcaaatgccctatatgccgagggatcatcaaaggaacggttaggactttcctgtca

SEQ ID NO: 32229 - DNA, 1854 bp, synthetic construct
  misc_feature 1..1854: note = Description of Artificial Sequence: Synthetic coding sequence
  source 1..1854: mol_type = other DNA
atgcacaagacggccagtcagcgactctttccaggaccgagttaccaaaacataaaatccatcatggaggactctacaattcttagcgattggacaaattctaataagcagaagatgaagtatgacttctcctgtgagctataccgcatgtccacctatagtacgtttcccgcaggcgtaccggtgtcagaacgttccctcgcccgggctgggttctactacactggcgtgaatgataaggtgaagtgcttttgctgtggtctgatgcttgacaattggaaactgggagactcccctatccaaaagcataagcagctctacccctcatgttcctttatacagaacctggttagtgccagcctggggagcacctccaaaaatacgtcacccatgagaaactccttcgcccactccttatcaccgaccctggaacatagcagtttgtttagtggcagctatagcagtctgagtccaaacccactcaattcccgggccgtcgaggacatctccagctcaagaactaatccatacagctatgcaatgtcaactgaggaggcccgtttcctgacttatcatatgtggccactgacgtttctctccccctctgaactagcgagggctggattttattatattgggcctggagatagggtcgcttgttttgcctgcggcggcaagctgtcaaattgggagcccaaagacgacgccatgtcagaacatcgccggcatttccccaactgccccttcctggaaaattcgctagagactctgaggttcagtatcagcaacctatcgatgcagactcacgctgccaggatgcgaacctttatgtattggcctagctcggtaccggtgcagcctgagcagctggcatcagcaggcttctactatgtggggcgtaacgacgatgtcaagtgtttttgctgcgacggcggcctaagatgctgggaatctggggacgacccttgggtcgaacacgcaaagtggttcccgcggtgcgagttcttgatcagaatgaaaggacaggagtttgtcgatgagattcagggacgctacccccacttactggagcagctactctccacgtctgacactaccggagaagagaacgccgatccaccaataatccactttggccccggcgagtcttcaagcgaggatgcagtcatgatgaatactcctgtggtgaagagcgcactggaaatggggttcaaccgcgatttagtaaagcagacagtccagagcaaaatattgacaacaggcgaaaattacaaaacggtgaatgatattgtgtcagccctgctgaatgcagaggatgaaaagagagaggaagaaaaagagaaacaagcagaagaaatggcaagcgatgatctgtctctgataaggaagaacaggatggcactgtttcaacaacttacctgcgtcctgccgattttagataatttactgaaggctaatgtaattaataaacaggagcacgatattatcaaacaaaaaacacagatcccccttcaggcccgcgagttgatcgacaccatcttagtgaagggaaatgccgctgccaatattttcaagaattgcttgaaggagatagacagcaccctgtacaaaaacctcttcgttgataagaatatgaagtacataccaactgaagatgtctccggactttcgttagaggagcagcttcgccgcctgcaggaagaacgaacgtgcaaggtctgtatggataaagaagtgagtgtagtgttcatcccatgcggtcatcttgtggtgtgccaggaatgcgccccttctctgaggaagtgcccaatctgtcggggcattattaagggcactgtgaggacattcctgagt

SEQ ID NO: 32230 - DNA, 1854 bp, synthetic construct
  misc_feature 1..1854: note = Description of Artificial Sequence: Synthetic coding sequence
  source 1..1854: mol_type = other DNA
atgcataaaacggcatcccagagactttttccaggtccgtcgtaccaaaacattaagagcattatggaagattccaccattttgtcagattggaccaacagcaacaagcagaaaatgaaatacgatttttcctgtgagctgtaccgcatgagcacctactcgacttttccagcaggagtccctgtcagcgaacggtcactggcaagggctggattttactatactggtgtgaacgataaggtgaaatgtttctgctgtggtctgatgctcgataattggaagctgggagattcgccgattcaaaagcacaagcaactttacccctcgtgctccttcattcagaacctggtgtcggcatcattgggaagcacctcaaagaacacctcaccaatgcgcaactcctttgcccattcgctgtcgcctacgctcgagcatagcagccttttctccggttcgtacagctcgctttcccctaaccccctcaactcccgagcagtggaggatattagcagctcgagaactaacccttactcttacgcgatgtcgactgaagaagcacgcttccttacttaccatatgtggcctctgactttcctgtcgccctccgaactggcgagagcaggcttctactacattggcccaggtgatagagtggcatgtttcgcatgtgggggtaagctcagcaactgggagccaaaggacgatgcgatgtccgaacatagacggcattttcccaactgtccctttttggaaaactccctcgaaaccctgcgattctccatctcaaatctctcgatgcaaactcatgcagcaaggatgagaacttttatgtactggccatcatcagtgccagtgcaacctgagcagctggcctcagcaggattttactacgtgggtcggaatgacgatgtcaagtgtttttgttgcgatggggggcttcgctgctgggaatcgggtgacgacccttgggtcgaacatgcaaaatggtttcctcgctgcgagtttctcatacggatgaagggtcaagaatttgtggatgagattcaaggaagatacccgcatctccttgagcagctccttagtacttcggatactactggagaagaaaacgcggatccacccattattcattttggaccaggggaatcttcgtcagaggacgcggtgatgatgaataccccggtggtgaaaagtgcattggagatgggctttaatcgagatctcgtcaaacaaaccgtgcagtccaaaatcctgactactggtgaaaactacaagaccgtcaacgatatcgtgtcggcactcctgaacgcagaggacgagaaacgagaagaggaaaaagagaagcaggccgaggaaatggccagcgacgatctcagcttgatccgaaagaacagaatggcactttttcaacaacttacttgtgtgctgcccatcctggacaaccttcttaaggcaaacgttatcaacaagcaggagcacgacattatcaaacagaaaacccagatccccctgcaggctcgagaattgatcgatacgattttggtgaagggcaatgcagcggcgaacatattcaagaattgccttaaggaaatagattcaaccctttacaagaatctcttcgtggataagaacatgaagtatattcccactgaggacgtgtcgggtcttagcctggaggaacagcttagacgacttcaagaagaacgcacttgtaaagtgtgtatggataaggaggtgtcggtcgtgttcattccatgtggacacctggtggtgtgtcaggagtgtgcaccctctcttcggaagtgtccaatttgtcgtggaatcattaagggaactgtgcgcacgtttctttcg

SEQ ID NO: 32231 - DNA, 1854 bp, synthetic construct
  misc_feature 1..1854: note = Description of Artificial Sequence: Synthetic coding sequence
  source 1..1854: mol_type = other DNA
atgcacaagactgctagccagaggctgttcccggggccctcgtaccagaatatcaagtcgatcatggaggactcgaccatcttgtccgattggactaactccaacaaacagaagatgaaatacgacttctcatgtgagctttaccggatgtccacttactcgacctttccagcgggagtgcctgtgtcagagcgctcgctcgcgcgggcgggattttactacactggtgtgaacgataaggtgaagtgtttttgctgtggactgatgctcgataactggaagctcggagatagtccgattcagaaacataagcagctgtatccatcgtgttcgttcatccagaacctcgtctcagcgtccctgggctccacctcgaagaatacctcgcctatgcgaaactccttcgctcatagcctgtcgcctactttggagcattcatcgctgttctccggatcctactcgtcgctgtccccgaaccccctgaactcaagagccgtggaggacatcagctcgtcccggactaatccgtattcatacgcaatgtcaaccgaagaagcgcgctttctgacttaccatatgtggccgctgactttcttgagcccgtccgaactcgcacgcgccggcttttactacatcggaccaggagatcgggtcgcatgctttgcatgtggcggcaagctgtcaaactgggaaccaaaagacgacgcaatgtcagaacatcgcaggcactttccgaattgtccgttcttggagaactcgttggaaactctgcggttttctatttcaaacctgtcgatgcagacccacgccgcgagaatgaggacctttatgtactggccgtcgtccgtgccagtccagccagagcaacttgcaagcgccggattctactacgtgggacgcaacgatgacgtgaagtgcttctgttgcgacggtggcctgaggtgctgggagagcggagacgatccgtgggtggagcacgctaagtggttcccgcgctgcgagttcttgattcgcatgaaaggacaagaatttgtggacgaaatccaaggaagatacccgcatctgctggaacaactgctctcgacgtcagataccaccggagaggaaaacgccgatccaccaatcattcatttcgggccgggcgaatcgtccagcgaggacgccgtgatgatgaataccccggtggtgaaatcggctctcgagatgggatttaaccgggacctcgtcaagcaaaccgtccaatcgaaaatcctcaccactggagaaaactacaagactgtgaatgacatcgtctccgcgcttctcaacgccgaggatgaaaaacgcgaagaagaaaaggaaaagcaagctgaagagatggcgtcggacgatctgtcactgatccggaaaaaccgcatggcgctcttccagcagctgacctgcgtgctccccatattggacaacctgctcaaggccaacgtgattaacaaacaggaacatgatatcattaaacaaaagacccaaatcccactccaagcacgggaactgatcgacaccatccttgtcaagggaaacgcggctgccaacatctttaagaattgcctcaaggagatcgatagcactttgtacaagaacctcttcgtggacaagaacatgaaatacatcccgaccgaagatgtctcgggactgtcgcttgaggaacagctgaggcgactgcaggaagagaggacttgcaaggtgtgcatggacaaggaggttagcgtggtgttcatcccgtgtggacatttggtcgtctgccaagaatgcgcaccttccctgagaaagtgcccgatctgtcgaggaatcattaaaggcaccgtccgcactttcctgtct

SEQ ID NO: 32232 - DNA, 1854 bp, synthetic construct
  misc_feature 1..1854: note = Description of Artificial Sequence: Synthetic coding sequence
  source 1..1854: mol_type = other DNA
atgcacaaaactgcatcgcaacggttgttcccgggaccaagttatcaaaatattaaaagtattatggaagattctacaattttgtcggattggacaaactcaaacaagcaaaagatgaagtatgatttttcatgtgaactgtatcgtatgagtacgtacagcacttttccagcaggagtcccggtctcggagcgatctcttgccagagctggtttctactatacgggggtaaacgataaagtcaagtgtttttgttgtggtctcatgctcgataattggaagttgggagattctccgatccaaaaacataaacaattgtatccttcttgcagttttattcagaacttagtatccgcttcattgggtagtacgtctaagaacacatcaccgatgcgaaattcattcgcacactcactgtcaccgactttggaacactcgtccttgttttcgggtagttatagtagcctctcgccaaatcccctaaatagccgagcagttgaagacattagcagttcacgaacaaatccatatagctacgctatgtctactgaggaagctaggtttttgacttaccatatgtggccacttacatttttaagtccatctgaacttgcccgtgcaggattttattatatcggacctggagatagagtcgcttgcttcgcctgcggaggtaaacttagtaattgggaaccgaaagatgacgcaatgagtgagcatagaagacatttcccaaattgtccgtttctagaaaattcactggagaccttgagattttcaatatcaaatttatcaatgcaaacccacgcggcacgtatgagaacttttatgtattggccaagttctgtcccagttcaacctgaacaacttgcctcagccggattttattacgttggacgaaatgatgatgttaagtgcttttgttgcgacggaggactaagatgttgggaatccggggatgatccatgggtcgagcacgcaaagtggtttccacgttgtgagtttcttatccgtatgaaaggacaggagttcgttgacgaaatacagggacgttatcctcatctactcgaacaattgctctcgacaagtgatacaacaggcgaggaaaatgctgatccaccgattattcactttggtccgggtgaatcatcttctgaagacgctgtcatgatgaacacaccagttgtgaaaagcgctttggagatgggcttcaatcgagacctcgtcaaacagacagttcaatcgaaaattttgacaacgggcgaaaactataagacggttaatgatattgtttccgctttgctgaatgcagaggacgaaaaacgtgaggaggagaaggaaaaacaagcagaggagatggcctccgacgatctctcgctaatccgcaaaaacagaatggcactttttcaacaattgacatgtgttcttccaatcctcgataacctcttgaaggctaatgttattaacaagcaggaacatgacataattaagcaaaaaacccagatccctcttcaggcaagagaactaattgacacgattttggttaaaggtaatgcagctgcaaatatatttaagaattgcctgaaggaaattgactcaactttatataaaaatctcttcgtggataagaatatgaaatacatcccaacagaagatgtctcgggcctaagtctagaggaacaattgagacgtctacaagaagaaagaacttgcaaagtctgtatggataaagaagtgtctgtagtatttattccatgtgggcacttggtagtatgccaagagtgcgcccctagtcttcgcaaatgtccgatttgcagaggtattattaaaggaaccgttagaacgttcttaagt

SEQ ID NO: 32233 - DNA, 1854 bp, synthetic construct
  misc_feature 1..1854: note = Description of Artificial Sequence: Synthetic coding sequence
  source 1..1854: mol_type = other DNA
atgcataagactgcgtcacagcgcctctttccgggcccttcctatcagaacatcaaatcgatcatggaggatagcacgatcctgtccgactggaccaacagcaacaaacagaagatgaaatacgacttctcatgcgagctgtaccggatgtctacttactcgactttcccagctggtgtgccggtgtcggaacggtccctggcccgcgcaggattctactacaccggggtcaatgacaaggtcaagtgcttctgctgcggactgatgctggataattggaagctcggggactcgcctattcaaaagcacaagcagctgtacccgtcctgttccttcatccagaatctcgtgtcagcgagccttggatcgacgtcgaaaaacacttctccgatgcgaaactcgttcgctcattcgctgtccccgaccctggaacactcgtcattgttctccggctcctacagctccctgtcgccaaaccctctgaacagcagagccgtggaagatatctcatcatcccggactaacccgtactcgtacgccatgagcaccgaggaagcacgctttctgacctaccatatgtggccgctgactttcctgtcaccgtccgagctcgcccgagcaggcttctattacatcggacctggcgaccgggtggcttgtttcgcttgtggtgggaagctgtccaattgggagccgaaagatgatgccatgtccgagcaccgccggcactttccaaactgcccctttctggagaattcactggaaaccctgcgcttcagcatctcgaacctgagcatgcaaacccacgctgctcgcatgcggaccttcatgtactggccaagcagcgtgcctgtgcagccagagcaattggcatcagctggcttctactacgtgggacggaatgacgacgtgaagtgtttctgttgcgatggcgggttgcgatgttgggagtcgggagacgacccttgggtcgaacacgccaaatggttccctcgctgcgaatttctgatcaggatgaaaggccaagaattcgtggacgaaatacagggaaggtacccgcatctgctggaacagctgctctccactagcgatacgactggtgaagaaaacgccgacccgccaatcatccactttggacccggagagtcgtcatcagaggacgctgtgatgatgaataccccggtcgtgaagtcagcgctggaaatggggttcaaccgggacctggtgaaacagaccgtgcagagcaagatactgacgacgggtgagaactacaaaacggtcaatgatattgtgtccgcactgctgaatgccgaagatgagaagagagaagaagaaaaggaaaagcaggcggaggaaatggcctcagatgatttgtcacttatccggaagaacaggatggcattgtttcaacagcttacttgcgtgctcccaatcctcgacaacctgttgaaggcaaatgtcatcaataagcaagagcacgacatcatcaagcaaaagacccagatcccattgcaggcaagagaactgatcgacaccatcctggtgaaaggaaatgcggccgcgaacattttcaagaactgtctgaaagagattgactccaccctgtacaagaatctgtttgttgacaagaacatgaaatacatcccaaccgaagatgtgtcagggctttccctcgaggaacagctccggagactccaggaggaacggacttgcaaggtttgtatggacaaggaggtgtcggtggtgtttatcccgtgcggacatctggtcgtgtgccaggaatgcgccccttctctgaggaagtgtcccatctgtagaggaatcatcaagggaaccgtgcgcacctttctgtcc

SEQ ID NO: 32234 - DNA, 1854 bp, synthetic construct
  misc_feature 1..1854: note = Description of Artificial Sequence: Synthetic coding sequence
  source 1..1854: mol_type = other DNA
atgcacaagaccgcaagccaaagactcttcccaggtccgagctaccagaacatcaaatctatcatggaggacagtaccatcctctccgactggaccaacagcaacaagcagaagatgaaatacgacttctcctgtgagctgtaccgaatgtcgacttactcgactttcccagccggagtgccagtcagcgagagatcattggcgcgagctgggttctattacaccggtgtgaacgataaggtgaagtgcttttgctgcggactcatgcttgacaactggaagctcggggattcgccgatccaaaagcataagcagctgtacccgtcatgcagcttcatacagaacctggtgagcgcctcgttgggctccaccagtaagaacacttccccaatgcggaatagcttcgcacattcgctgtccccaaccctcgagcactcaagcctgttttcaggatcgtactcttcactgtcgcctaatcctttgaatagccgtgcggtcgaggacatttcatcctcacgcaccaacccatactcgtacgctatgtcgaccgaagaagcgcggttcctgacgtaccacatgtggccgcttactttcctctcgccgtccgaacttgcccgcgcgggattctactatatcgggccaggagacagagtcgcttgctttgcctgcgggggcaagctgtccaattgggaaccgaaggacgacgcgatgtcagaacataggcgccatttccccaactgtccatttctggagaactcgctggaaaccctgcgcttcagcatctccaacctgtccatgcaaacgcacgcagcgcggatgcgcactttcatgtactggccgagttcggttccggtccaaccagaacagctggcttccgcaggattttactacgtgggaagaaacgacgacgtgaaatgtttctgctgcgacggcggcctccgctgctgggaatccggcgacgatccctgggtggagcacgcaaagtggtttcccagatgtgaatttctgattcggatgaaaggacaggaattcgttgacgaaattcaaggacggtacccccatctgctggaacagctgctctcgacgtccgacaccaccggggaggaaaacgctgaccctccgattattcacttcgggccaggcgagtcgagctcagaggatgccgtcatgatgaatacccccgtcgtcaagtcagcactggaaatgggctttaatcgggacctggtgaaacagactgtgcaatctaagatcctcaccacgggcgagaattacaaaaccgtcaatgatatcgtgtcagccctgctgaacgctgaagatgaaaagcgggaggaggagaaagaaaagcaagccgaagaaatggcatccgacgatctgtcgcttattcggaaaaatcggatggccctgttccaacagctcacctgcgtccttccgatcctcgataatcttttgaaggcgaacgtgatcaacaaacaggagcacgatatcataaagcaaaaaactcagatccccctccaggccagggaacttattgacactatcctggtgaagggcaacgccgccgcaaacatattcaagaattgcttgaaagaaatcgattcgaccctgtacaagaatctcttcgtggacaaaaacatgaaatacataccgactgaagatgtgtccggattgtcgctggaagagcagttgcgcagactgcaggaggaacgcacttgtaaggtgtgcatggataaggaagtgagcgtggtgtttattccgtgcggacacctggtggtctgccaggagtgcgccccgtcacttagaaagtgcccgatttgtcgaggaatcatcaagggtacggtaagaacgttcctcagc

SEQ ID NO: 32235 - DNA, 1854 bp, synthetic construct
  misc_feature 1..1854: note = Description of Artificial Sequence: Synthetic coding sequence
  source 1..1854: mol_type = other DNA
atgcataagactgcatcacaaagactgtttcctggaccgtcgtaccaaaacataaagtcaattatggaggattccactattctgagcgattggactaattcgaataaacagaaaatgaagtatgatttttcatgcgagctttaccggatgagcacttacagcacttttcctgccggagtgcccgtctctgaaagatccctggccagagctgggttctactacaccggggtcaatgataaagtcaagtgtttttgttgcggtctgatgcttgacaattggaaacttggtgattcccctattcagaaacataagcagctctatccttcctgttcgtttattcaaaacctggtgtcggcaagcctgggatccacttctaagaacacctccccaatgcgtaactcgtttgcacactccctgagcccaactctggagcattcctcccttttttcagggtcatacagctccctctcgcccaatcctttgaactcacgtgccgtggaagatataagctcgtcgcgcaccaacccttacagctacgctatgtccactgaagaagcacgttttctcacctaccatatgtggcccctgacgtttctttcaccttcggaacttgctagggccggattctactatatagggcccggcgatagagtcgcttgcttcgcatgtgggggaaaactctcgaattgggagccgaaagacgacgcgatgtcggagcataggagacactttcccaattgtccattccttgaaaacagcctcgaaactctgagattttcgatctcgaatctgtccatgcagactcatgctgcgagaatgagaacctttatgtactggccatcgtcggtgcctgtgcaacccgaacaattggcatcggcaggattctattacgtgggacgcaacgacgatgttaagtgtttttgctgtgatggaggactgagatgctgggagtcaggtgatgacccctgggtcgaacacgccaagtggtttcctagatgtgaattcctgattcgcatgaaagggcaagagtttgtcgatgagattcaaggacggtacccacatctgctggagcaactgcttagcacctccgataccaccggtgaagaaaacgcagatcccccaatcattcatttcggaccaggggaaagctcatctgaagatgccgtcatgatgaacaccccggtggtgaaatcggcacttgagatgggttttaaccgtgatcttgtgaaacaaactgtccagtcaaagatccttaccaccggggagaactacaagaccgtgaacgatatcgtgagcgcattgctcaacgcagaggacgagaagcgcgaagaagagaaggagaaacaggcagaagaaatggcatcggatgacctctcccttatcagaaagaacaggatggcactttttcagcaactgacctgtgtcttgccaattctggacaaccttctgaaggcgaacgtcattaacaagcaggaacatgacattatcaagcagaaaactcaaattccactgcaggcgagagaacttatcgataccattctcgtgaagggaaatgcggcagcaaacattttcaaaaactgtctgaaggaaatcgattcgaccctgtacaagaacctctttgtggacaaaaacatgaagtacattcctactgaagatgtgtcaggcctcagccttgaagaacaactgcggagactccaagaggaacggacctgtaaggtgtgtatggacaaggaggtgtcggtggtgttcatcccctgtggccatcttgtggtgtgtcaggagtgtgcaccgtcccttcgcaagtgccctatttgtagagggatcataaaaggcaccgtcagaactttcctctct

SEQ ID NO: 32236 - DNA, 1854 bp, synthetic construct
  misc_feature 1..1854: note = Description of Artificial Sequence: Synthetic coding sequence
  source 1..1854: mol_type = other DNA
atgcataaaactgcttctcagaggctgttcccaggacctagctatcaaaatatcaagagcatcatggaggatagtaccatactgagcgactggacgaactctaacaagcagaaaatgaaatatgatttctcatgtgagctgtataggatgtctacctacagcacattcccagccggcgtgccggtatctgagcgcagcctggcccgcgctggattttactacacaggagtgaacgataaggtgaaatgcttctgctgtggactcatgctggacaactggaagctgggcgattcccccatccagaagcacaagcagctctacccttcatgttccttcatccagaatcttgtgtccgcttctttgggcagcacttcaaagaacacaagtcccatgaggaacagttttgcacattccctctccccaacactggagcattcttccctgttctctggttcctactcctctctgagccccaatcctctgaattctagggccgtggaggacatctccagctccaggaccaacccttatagctacgctatgtccacagaagaagcgcggttcctgacataccatatgtggccactgacattcttgagtcccagtgagctggccagagctggtttctattacatcgggcccggtgaccgcgtcgcttgttttgcatgcggtgggaaattgtccaactgggagcctaaggatgatgccatgagtgaacaccgcaggcactttccaaattgccctttcctcgaaaactcactggagactctgcggttttccatctctaacctgagtatgcagacccatgccgctcggatgcggacattcatgtactggcccagctctgttcctgtgcagcccgagcaacttgcatccgctggcttttattatgtcggacggaacgacgatgtgaagtgcttttgctgcgatggagggctgagatgttgggagtctggcgatgacccttgggtggagcatgcaaaatggttcccccggtgtgagttccttatcagaatgaaggggcaggaatttgtggacgaaatccaaggccggtacccacatctgctggagcagctgctctcaacatcagatacaactggagaagagaatgcggaccctccaatcatccatttcggccccggtgagtctagctccgaggatgcagtgatgatgaacactccagtcgtcaagtctgccctggagatgggttttaatcgggatctggtaaagcagaccgtgcagtcaaaaatacttacaactggagagaactacaaaactgttaatgacattgttagcgctcttcttaacgccgaagacgagaagcgggaggaagagaaggagaaacaagcagaagaaatggccagtgacgatttgtcacttataagaaaaaatcggatggccttgttccaacagctgacatgcgtgcttcccatactggataatctcctgaaggccaacgttatcaataagcaagaacatgacattataaaacaaaagacccagatccccctgcaggcccgggaactcatcgataccattcttgtgaagggaaacgccgctgctaatatctttaagaactgcctcaaagagatcgattctaccctttacaaaaatctcttcgttgataaaaacatgaagtacatcccaaccgaggatgtgagcggcctttcactggaagaacagctgcgaaggctgcaggaagagcggacatgcaaggtctgtatggacaaagaagtttcagtcgtcttcattccctgtggacatctcgtagtgtgtcaggaatgcgcccccagtctgcgaaagtgccctatctgtcgcggaataattaagggcactgtccggactttcctgagc

SEQ ID NO: 32237 - DNA, 1854 bp, synthetic construct
  misc_feature 1..1854: note = Description of Artificial Sequence: Synthetic coding sequence
  source 1..1854: mol_type = other DNA
atgcacaagactgcgtcacagaggctgttcccaggaccgtcctaccagaacatcaagtctattatggaggactccaccatcttgagcgactggacgaactcaaacaagcaaaagatgaaatatgacttctcctgcgaattgtaccggatgtcgacctactcaacgttccccgccggcgtcccggtgtccgaacgatcactcgcgcgcgcgggtttctactacaccggcgtcaacgataaggtgaaatgcttttgctgtggtctgatgctggacaattggaagctgggtgactcccccatccagaaacataagcagctctacccgtcgtgctcgttcatacagaatctcgtgtcagcatctctcgggtcaactagcaagaacacttcaccgatgcgcaactcctttgcccactccctttccccgaccctggaacattcgtcactgttttcgggctcgtactcctcactgagccctaaccctttgaactcccgcgccgtggaggacatctcaagcagcagaactaacccgtactcgtacgccatgtccactgaggaggcgcggttcttgacttatcacatgtggcctctgaccttcctgtcgccgagcgaactggcacgagcaggattttactacatcggaccgggggaccgcgtggcctgcttcgcatgcggcgggaaacttagtaattgggagccaaaggatgatgccatgtcggaacatagaaggcacttcccaaattgtccctttctggagaatagtctggaaaccctccggttcagcattagcaatctcagtatgcaaacccatgcggcgaggatgagaactttcatgtactggccgtcgagcgtgccggtccagccggaacagctcgcctctgctggattttactatgttggcagaaacgacgatgtcaagtgtttttgttgcgatgggggcctccgctgctgggaatcaggagacgacccatgggtggaacatgctaaatggtttcctagatgtgaattcctgattaggatgaaaggacaggaatttgtagatgagatccaggggcggtacccccacctcctggaacaactcctcagcacttccgatacgactggggaggagaatgcagatccaccgatcatacacttcggccctggagaatcgagctccgaagatgccgtgatgatgaacacgccagtggtgaaatccgccctggaaatggggttcaaccgcgacctggtgaaacagactgttcaatccaagatcctgacgaccggagaaaactacaagactgtcaatgacatcgtctctgcgctcctcaacgctgaggacgaaaagcgggaggaggagaaggaaaagcaagcggaggagatggcctcagacgatctttcgttgatacggaagaataggatggcactcttccaacagctcacctgtgtgctcccgatcctcgataatcttctcaaagccaacgtcatcaacaagcaagagcacgatatcattaaacagaaaacccagatcccgttgcaagcccgggaattgattgatactatcctcgtgaagggaaacgctgccgccaacatcttcaagaattgcttgaaggaaatcgactccactttgtataagaatctgttcgtggacaaaaacatgaaatacatcccaaccgaggacgtctctggactgtcgctggaggaacagcttcggcggctgcaggaggaaagaacttgcaaggtctgtatggataaggaagtgtcagtcgtattcatcccttgcggacaccttgtggtttgccaagagtgcgctccatcactgcgcaagtgccctatctgccgcggaatcatcaagggcaccgttcgcaccttcctctcg

SEQ ID NO: 32238 - DNA, 1854 bp, synthetic construct
  misc_feature 1..1854: note = Description of Artificial Sequence: Synthetic coding sequence
  source 1..1854: mol_type = other DNA
atgcacaagactgcttctcagaggctgttcccagggccctcttatcagaacatcaaatccattatggaagactcgacaattctctcagactggacaaattctaataagcagaagatgaaatatgatttttcttgtgaattatatagaatgtccacatattctacttttccagctggagtgcccgtttctgagcggagtctcgcacgggcaggattttattatactggggtcaacgacaaggtgaaatgcttctgctgtggactaatgctcgacaattggaaactgggggatagtcctattcagaaacataaacagctgtatccttcctgctccttcatccagaacctcgtatccgcatctctcgggagtacatccaaaaatacatccccaatgagaaattcctttgctcacagtttatctccaacactagaacattcctcgcttttcagtgggtcatactcgtccctaagtcccaatcctctcaattctagggcagtagaggatatatcttctagtagaacaaatccttacagttacgccatgtcaacagaggaagctcggttcctgacttatcacatgtggcctctcacattcctttcaccctccgaactcgcccgcgccgggttttattatatagggcctggagatcgcgttgcctgcttcgcatgcgggggaaaactctctaactgggaacctaaagatgacgctatgtctgaacaccggcggcactttccaaattgcccatttttggaaaattcattagaaactcttcgattttcaatatcaaacctatcaatgcagacacacgccgcacgcatgcggacattcatgtattggcccagtagtgtgcccgtacaaccagagcagttggcgagtgctggattttattatgttgggaggaatgacgatgtaaaatgcttttgctgtgacggggggctgcgatgctgggaatctggggacgatccttgggtagagcatgcgaaatggtttccacggtgtgagttcctcattagaatgaagggacaggaatttgttgatgagatccaggggaggtatcctcacttacttgaacagctcctctctacatccgatacaacgggagaagaaaacgctgatcctcccatcatccatttcgggcctggggaatcctcatccgaagacgccgtcatgatgaacactcccgtggtgaagtcagctctggaaatggggtttaatcgcgatctcgtcaaacagacagtgcagtccaaaatcctgactacaggagaaaattataaaacagtcaacgatatagtttcagcccttctgaacgcagaagatgaaaagagggaagaagaaaaagaaaaacaggccgaggagatggcctctgatgatctatctctcataaggaaaaaccggatggcactattccagcagctcacttgcgtgctccctatcctcgataaccttcttaaagctaatgtcattaataaacaggaacacgatataataaaacagaaaacacagatcccactacaggctagggagctgatagatacaatcctagttaaaggaaacgctgcggccaacatctttaagaattgccttaaagaaatcgattcaacattgtataagaacctgtttgtggataagaacatgaaatatatccctactgaagatgtgtctggacttagtcttgaagaacagctgcggcggcttcaggaagagagaacatgcaaagtgtgtatggacaaagaggtctctgtagtatttattccttgtgggcacctagtggtatgtcaggagtgcgcaccatccctcaggaagtgtccaatttgcagagggattattaaaggaactgtgcggacttttctgtct

SEQ ID NO: 32239 - DNA, 1854 bp, synthetic construct
  misc_feature 1..1854: note = Description of Artificial Sequence: Synthetic coding sequence
  source 1..1854: mol_type = other DNA
atgcacaagacagcgtctcaacgactgttcccaggtccaagttaccaaaacattaagtcgattatggaagactcgaccatcctgtctgattggacaaatagcaataaacagaaaatgaaatacgatttctcatgtgaactatatcgcatgtctacgtattcgacttttccggcaggtgtgcccgtgagcgagcgatcactggcgagggccggattctattatacgggggtgaatgacaaggtgaagtgtttctgttgtgggctgatgctggacaattggaaactgggcgattctccaatacagaagcataagcaattataccccagctgtagcttcatacagaatctggtgagtgccagcctgggttcaacatcaaagaacactagccccatgcgcaacagttttgctcattctctgtcacctactctggaacactccagcctgttttcaggctcttatagctccctcagccccaaccccctgaactcccgcgccgtggaagatatatcctcatcacgcactaacccgtactcgtacgctatgtcgaccgaagaggctcgttttttgacttaccatatgtggccgctgactttcctgagtccgagtgagctcgcacgtgcagggttctactacatagggcctggcgatagggtggcatgctttgcttgtgggggcaagctctctaattgggagcctaaagacgacgctatgtccgagcatcgccgccacttccctaactgtccctttctagaaaacagcttggagactcttcggttttctatcagcaacctgagtatgcaaacccacgccgcccgcatgcgaacttttatgtactggccctcctccgtccccgtacaacctgagcagctggcatccgcaggcttctactacgttggtcgcaacgatgatgtgaaatgtttttgctgcgacggtggactccggtgctgggagtcaggagatgacccctgggtcgaacacgccaagtggttccccaggtgcgaattcctgataaggatgaaggggcaggaattcgttgatgaaattcagggacggtacccacatctcctggagcagttgctttccacctcggacaccactggagaggaaaacgccgacccgccaatcattcacttcggtcccggtgagagtagcagtgaggatgctgtgatgatgaacacgccggtggtgaagtctgctttggagatgggtttcaatcgggacttggtaaagcaaacagttcaatcaaagatactgactacaggtgagaactataagactgttaacgatatcgtgtccgctttgttaaatgccgaagatgagaagcgtgaggaggagaaagaaaagcaggccgaagaaatggcgtcagacgacttaagcttgatcagaaaaaatagaatggccctattccagcaattgacgtgtgtccttccaattcttgataatctgctaaaggcaaatgtgatcaataagcaggaacatgatatcataaaacagaagactcagatccccctacaggcacgagaactgattgatactattctggtcaaagggaacgccgctgctaacatattcaagaattgtctgaaagaaatcgattcgacactgtacaaaaatctgtttgtggacaagaatatgaaatatatccctacagaggatgtgagcgggctaagtctggaagaacagcttcgcagactgcaggaagaaaggacatgtaaagtgtgcatggacaaggaagtctccgtggtctttatcccttgtggtcacttggttgtttgccaggagtgtgcaccaagcctccggaaatgccctatttgccgaggtatcatcaaaggtacagttcgcacttttttgagt

SEQ ID NO: 32240 - DNA, 1854 bp, synthetic construct
  misc_feature 1..1854: note = Description of Artificial Sequence: Synthetic coding sequence
  source 1..1854: mol_type = other DNA
atgcataaaactgctagccaacgtctttttccgggtcctagctatcagaatattaagtcgataatggaggatagcactatactttctgactggacgaattcgaataaacaaaagatgaagtatgacttctcctgcgaactgtataggatgtcaacgtactcgacattccccgcgggcgtcccggtgagcgagcgctccttagcccgcgcaggtttctattacacaggcgtcaacgacaaggtgaaatgtttttgctgcgggttaatgctggacaactggaagcttggcgattcgccgattcagaagcataaacaactgtatccatcatgtagctttattcaaaacttagttagtgctagtctcggcagcacttccaaaaatacaagtccaatgcgtaactcgttcgcccatagtctgtcccctacactagaacactctagtttgttcagcggatcctattcctccctcagtcccaacccccttaactcgcgtgcagtcgaggatatatcgagcagccggaccaatccgtacagctatgccatgagtacggaggaagcccgtttccttacatatcatatgtggcccctgacgtttcttagtcctagtgaacttgcgcgggctgggttctactatatcggcccaggggacagggtggcttgctttgcgtgcggaggtaaactctcgaattgggagcccaaggacgacgctatgtcggaacatcggcgacactttccaaattgcccttttttagaaaactctctcgagacattgcgtttctcgatctctaatttgtcgatgcaaactcatgcggcccgtatgcgtaccttcatgtattggccgtcgagcgtaccagttcagccggagcagctcgcatccgctgggttctattacgttgggcgaaatgacgacgttaagtgtttctgctgcgatgggggcctaagatgttgggaatcaggcgacgatccctgggtggagcacgcgaagtggttcccacgctgtgagttcctcattaggatgaaggggcaggaattcgtggatgaaattcagggacgctacccccaccttcttgagcagttgctcagcacgagtgacacaactggtgaagagaacgcagatcccccgatcattcatttcgggcctggcgagagttctagtgaagacgctgtcatgatgaataccccagttgtaaagtccgctctcgagatgggtttcaaccgggacctcgtgaagcaaacagttcagtcaaagatcttgacgacaggggagaattataagacggtaaatgatatcgttagtgcccttctcaatgcagaagacgagaagagggaggaagaaaaagagaagcaggcggaagagatggcctctgacgacctcagtttgatccggaagaatcgtatggcacttttccaacagttgacatgtgtcttacccatcctggacaacctcctgaaagctaatgtgatcaataagcaggaacatgatattatcaagcagaagacccagatcccgctgcaagcccgtgaactaattgatactatcctcgtaaaagggaatgcagccgccaacattttcaaaaattgtctaaaggaaatagacagcacgctctataagaatctgttcgttgacaagaatatgaagtatatccctacggaggatgtctccggactttctcttgaggagcagcttcgacgacttcaagaagagcgcacatgtaaagtttgcatggacaaagaggtctcggtggtatttattccgtgtggtcatttggtggtatgccaggaatgtgccccgtctcttcgcaagtgtccaatttgccggggtatcatcaagggtacggtccggacctttttgagt

SEQ ID NO: 32241 - DNA, 1854 bp, synthetic construct
  misc_feature 1..1854: note = Description of Artificial Sequence: Synthetic coding sequence
  source 1..1854: mol_type = other DNA
atgcataaaacggcatcccagcgcctgttcccaggaccgtcctaccaaaacataaagtcgatcatggaggacagcacgatcctctccgactggaccaactcgaacaaacagaagatgaagtacgatttttcgtgcgagctgtacaggatgtcaacctattcgactttcccggccggtgtcccggtgtccgagagatccctggcacgggcgggcttctactataccggagttaatgacaaggtcaaatgcttttgctgtggtctgatgctcgataattggaagctcggagacagccccatccaaaagcacaagcagctgtacccgtcctgctcgtttatccaaaatctggtgtcggcctccctgggtagcacctcgaagaacacctcaccaatgaggaatagctttgcccacagcctgtcaccgactcttgaacattcatcccttttctccggctcgtactcgagcttgagccctaacccccttaattcgagagctgtggaggacatttcgtcctcgcgcactaatccgtacagctacgcgatgtccaccgaggaagccaggtttctgacttaccacatgtggccgctgaccttcctgtcgccgagcgagctcgcccgcgccggcttctactacatcggcccgggagacagggtggcctgcttcgcctgcggcggaaagctgtccaattgggaaccaaaggacgacgcgatgagcgaacaccgccgacattttccaaactgtccgtttctcgagaactcgctggaaaccttgcgtttctccatttccaacctctcgatgcagacccacgccgcccgcatgcggactttcatgtattggccatcttcggtgccagtccagccggagcagttggcttcagcgggattctactacgtcggacgcaatgatgacgtgaagtgcttctgttgcgatgggggcctgcgctgctgggagtcgggagacgatccttgggtggagcacgcgaagtggtttccgcgctgcgagtttctgatcaggatgaaaggacaggaattcgtagatgaaattcagggaaggtacccacacctgctcgagcaactcttgtctaccagcgacactactggagaggagaacgccgatccaccgatcatccattttggaccgggggaaagctcctccgaggacgctgtcatgatgaatactcccgtcgtgaaatcggctctggaaatgggctttaatcgggaccttgtgaaacagacggtgcagagcaagatcctgaccaccggagaaaactacaagactgtgaacgacatcgtcagcgcgctgctcaatgcagaggacgagaagagagaggaagagaaggaaaagcaagctgaagaaatggcatccgatgatttgtctctgatccgcaagaatagaatggcactcttccagcagctcacgtgcgtccttccaatcctcgacaacctcctcaaagccaatgtgatcaataagcaggaacacgacatcatcaagcaaaagacccagatacccttgcaggctcgggagctgatcgacaccatcctcgtcaagggtaacgccgccgccaatatcttcaagaactgcttgaaggagatcgattcgacgttgtacaaaaatctctttgtggataagaacatgaagtacatcccgactgaggatgtgtcaggattgtcgttggaggagcaactgagacgcctccaggaagagcgcacgtgtaaagtctgcatggataaggaagtctccgtggtgttcatcccttgtggacatcttgtggtgtgtcaagagtgtgctccgtcgcttcgcaagtgccctatttgccggggtatcatcaaagggactgtgcggacttttctgtcg

SEQ ID NO: 32242 - DNA, 1854 bp, synthetic construct
  misc_feature 1..1854: note = Description of Artificial Sequence: Synthetic coding sequence
  source 1..1854: mol_type = other DNA
atgcacaaaactgcctcgcagagactgttcccgggcccatcataccaaaacatcaaatcgatcatggaggacagcacgatcctctcagattggactaatagcaataagcaaaagatgaagtacgacttctcgtgtgagctctaccgcatgtccacctactcgacctttcctgccggcgtgccagtgtccgaacgctcccttgctagagcaggtttctattacaccggggttaacgacaaagtgaagtgcttttgctgtggcctgatgcttgacaattggaaacttggagattcgccgatacaaaaacataaacagttgtatccgagctgctcgttcatccaaaacctcgtgtccgcttctctgggctccacctccaagaacacttcacctatgcggaactcgttcgctcactcgctcagccccactctcgaacattcttcgctgttcagcggctcttactccagcctttcaccgaacccgctgaactcccgcgccgtcgaggacatctctagctcacggacgaatccttatagctacgcgatgtcgaccgaagaggcccgattcttgacctaccatatgtggccactgaccttcttgtctccatccgaactggcgagggccggtttttactacatcggaccaggggaccgggttgcctgcttcgcatgcggaggtaagctgtccaactgggaacccaaggacgacgctatgtcggagcaccgcagacacttcccgaattgccccttcctcgaaaattcgctcgaaaccctgcggttttcgatttcaaacctgtccatgcagactcatgctgcgagaatgagaaccttcatgtactggccaagctctgtgccagtccagcctgagcagcttgcgtccgccggtttctactacgtgggaagaaacgacgacgtgaagtgtttttgctgtgacgggggactgcggtgctgggagtccggagatgatccgtgggtggagcacgccaagtggtttccgcgctgtgagttcctcattcgcatgaagggacaagaattcgtggatgagatccagggacgctacccgcacctcctggaacaactgctgagcacctcggacacgactggagaagaaaacgccgatcctcccatcatccactttggccctggtgagagcagctccgaagatgccgtcatgatgaacactccggtggtgaaaagcgcccttgagatgggcttcaatcgggacctggttaagcagaccgtccagtcaaagatcctgactaccggcgagaactacaagactgtcaacgacatcgtgtccgcgctcctgaatgcagaagatgagaagcgcgaagaggagaaggaaaagcaggcggaagaaatggcgtctgacgatctgtcgctcatccgcaagaataggatggcgctgtttcaacagctcacctgcgtcttgccgattctggataacctgctcaaagcaaacgtgatcaacaagcaagaacatgacatcattaagcaaaagactcagatcccgcttcaggccagggaactgattgacacgatcctcgtgaagggaaacgccgcagctaacatctttaagaattgtcttaaagagatcgatagcactctgtacaaaaacttgtttgtggacaaaaacatgaagtacatcccgaccgaagatgtgtccgggctctctttggaggaacagttgcgccgactgcaagaagaacgaacgtgcaaggtgtgcatggacaaggaagttagcgtggtgttcatcccgtgcggtcatctcgtggtgtgccaggaatgtgcaccaagcctgcgcaagtgcccaatttgccggggaatcatcaaaggaactgtgcgtactttcctctcg

SEQ ID NO: 32243 - DNA, 1854 bp, synthetic construct
  misc_feature 1..1854: note = Description of Artificial Sequence: Synthetic coding sequence
  source 1..1854: mol_type = other DNA
atgcataaaaccgcttcacaacggctgttccctggaccttcataccagaatatcaagtccataatggaagatagcaccatcttgtcggactggaccaactcaaacaagcagaagatgaaatacgattttagctgtgaactctaccgcatgtcgacttactcgacgtttccagcaggagtgcccgtgagcgaacggtcgctggccagagcaggtttctactacactggagtcaatgacaaggttaaatgcttctgttgtggtcttatgctcgataattggaaacttggagattcgcctattcagaagcacaagcagctctacccgtcttgctcctttatccaaaacttggtgtcagcatcactgggatccactagcaagaatacttcacctatgagaaacagctttgcccattccctctcccctaccctcgagcacagcagcctcttttcgggatcgtactcgtccctttccccgaatcctctgaattcgagagcggtggaagatatctcatcctccagaacgaacccctacagctacgcaatgagcactgaagaggcacggtttcttacttatcacatgtggcccctcaccttcctgagcccctccgaacttgcaagagcaggcttttactacatcggaccgggcgatagagtggcatgtttcgcttgtggaggtaagctgtcaaactgggagccaaaggatgacgccatgtccgaacatagacgccacttcccaaactgtccttttctggaaaactcgctggaaaccctgcgattctcgatttccaatctgtcgatgcagactcatgccgcgagaatgcgcacctttatgtactggccttcgtccgtgcctgtccaacctgaacagctggcatcagcagggttttactacgttggacggaacgacgatgtgaagtgcttctgttgcgatggcggtctgcggtgttgggaatccggtgatgatccttgggtggaacacgcaaagtggtttcctcgttgcgaattcttgatccggatgaagggacaggagtttgtggatgagattcaaggtagatatccgcatcttcttgaacagctgttgtcgaccagcgatactaccggcgaagaaaacgcggacccacctattatccatttcggccccggggagtcgtcgtcggaagatgcagtgatgatgaataccccggtggtgaagagcgccctcgagatgggtttcaacagagatcttgtgaagcaaaccgtgcaaagcaagatcttgaccaccggtgaaaactacaaaaccgtgaatgatattgtgtccgcgcttcttaacgccgaagatgaaaagcgcgaggaagaaaaagaaaagcaagcggaggaaatggcaagcgatgacctgtcgcttattcggaagaatcgaatggcactttttcagcaactgacctgtgtcctgcctattctggacaacctcctcaaggcgaatgtcattaacaaacaagagcacgacatcattaagcaaaagactcaaattccactccaagcgcgcgaactgattgatactatacttgtgaaggggaacgccgccgccaacatcttcaagaactgtctcaaggagattgattcaactctctacaaaaacctgttcgtggacaagaacatgaagtacataccaactgaggatgtgtccggactcagcttggaagagcaacttaggcgcctccaagaagagagaacgtgtaaggtgtgtatggataaggaagtctccgtggtgtttatcccgtgtggacatctcgtggtgtgtcaggaatgtgctccatcacttagaaaatgtcccatctgtagaggaatcattaagggaacggtcaggacctttctttcc

SEQ ID NO: 32244 - DNA, 1854 bp, synthetic construct
  misc_feature 1..1854: note = Description of Artificial Sequence: Synthetic coding sequence
  source 1..1854: mol_type = other DNA
atgcacaaaaccgcttcccaacgcttgtttccgggaccgtcataccagaacatcaagtcgatcatggaagatagcactatcctgtcggactggaccaattcgaacaagcagaagatgaagtatgacttctcctgcgagctgtacagaatgtccacctactctacgttcccggccggagtgccggtgtccgaacggagcctggcccgggcagggttctactacactggggtgaacgacaaagtgaagtgcttctgctgcgggcttatgttggacaactggaagttgggtgattcgccgatccaaaagcacaagcagctctacccgtcgtgcagcttcatccagaatctggtgagcgcgtcactgggatcgacttctaaaaacacctcgccgatgcggaactccttcgcccattctctctcgccaaccctggaacattcttctctgttctcgggaagctactcaagcctgagcccgaatccgctgaattcacgggccgtcgaggatatatcgtcgtcacggactaatccttactcatacgcgatgtcgactgaggaggcaaggttcctgacttaccacatgtggccgctcacgttcttgtccccgtcggaactggcgcgggccggattctactacattggtccaggagacagagtggcctgtttcgcatgtggagggaagctgagtaattgggagccgaaggacgatgccatgagcgaacaccggagacattttcccaactgcccattcctggaaaactcgctcgaaaccctccgcttctcgatctcgaacctgtctatgcagactcatgcagcccgcatgcggactttcatgtactggccttcgtcagtgccagtgcagcctgaacagcttgcctccgctggattctattacgtgggaagaaatgacgatgtcaagtgcttttgctgtgacggagggctgaggtgctgggaatcaggtgatgatccatgggtggaacacgcaaagtggttcccgcgctgcgagtttttgatccgcatgaagggacaggagtttgtcgacgagatccaaggacgctatccacacctgctggagcagctgctgtcaacctcagacactaccggcgaggagaatgccgacccacctatcatccacttcgggcctggggagtcctcctccgaggacgccgtcatgatgaacaccccagtcgtcaaatccgcactggaaatgggattcaacagggatctggtgaagcagactgtgcaatcgaaaatcctgacgaccggagaaaactacaagactgtgaacgatatcgtgtcggccctcctcaacgccgaggacgaaaagcgcgaggaggagaaggagaagcaagctgaggaaatggcctcggatgatctgtccctgattcgaaagaatcggatggccttgttccagcaactcacttgcgtgcttcccatcctggacaacctgctgaaagccaatgttatcaacaaacaggaacatgacatcatcaagcagaaaacccaaatcccgctgcaggctcgagagctcatcgacactatcttggtgaagggaaacgcagcagcaaacattttcaaaaactgcttgaaagaaattgactcgacgctctacaagaacctgttcgtggacaaaaacatgaagtacattcctaccgaggacgtgagcggactgtcccttgaagagcagctcaggaggctgcaggaagagcgcacctgcaaggtgtgtatggacaaggaagttagcgtggtctttatcccgtgtggacatctggtggtgtgccaagagtgcgcgccgagcctgcggaagtgccctatttgtcgcggaatcattaagggaaccgtcagaactttcttgtcg

SEQ ID NO: 32245 - DNA, 1854 bp, synthetic construct
  misc_feature 1..1854: note = Description of Artificial Sequence: Synthetic coding sequence
  source 1..1854: mol_type = other DNA
atgcacaagactgcatcccaacgcctgtttccgggtcccagctaccagaatatcaagagcatcatggaggactccactatccttagtgattggaccaacagtaataagcagaaaatgaagtacgatttctcatgtgaactttatcgtatgtcaacctactcgacttttccggccggggtccccgtctcggaaaggagcctcgcacgtgcaggattttactacaccggagtgaacgacaaggtgaagtgcttctgctgcggtctgatgctggacaactggaagctgggggactcgccaattcagaagcataaacaattgtacccgtcttgttcctttatccaaaatctggtatccgcttccctgggtagcacctcgaagaatacttcacctatgcgcaattccttcgcccactcattgtcgcccactctggaacacagcagcctgttctccggttcgtactcgtccctgtcgccaaacccgctgaactccagagcagtcgaggacatctcgtcatctcggactaacccttacagctacgcaatgtcaactgaagaagcccggttcctgacctaccacatgtggccgctcaccttcctgagcccatccgagttggctcgcgctggcttctactacatcggacccggcgacagggtggcttgctttgcctgcggaggtaagctctcgaactgggaaccaaaggacgacgccatgtccgaacaccgccggcactttccgaattgcccgttcctcgagaattcgctggaaacgctgaggttctcgatctcaaatctgtcaatgcaaacccatgctgcgcggatgagaaccttcatgtactggccctcatcagtgccggtgcaaccagaacagctcgcgtctgccggtttctactacgtcgggagaaacgatgatgtgaagtgtttttgttgcgacggtggccttcggtgttgggaatctggagacgatccatgggtcgaacatgccaaatggttccctagatgcgagttcctgatcagaatgaagggacaggaattcgtagatgagatccaggggcggtacccacatctgcttgagcagctcctctccacctcggatactacgggcgaggagaacgcagacccgcctatcattcacttcggaccgggagaatcctcatcggaggacgcggtgatgatgaacaccccggtggtgaagtccgccctggaaatggggttcaaccgggacctcgtcaaacaaacggtgcaatcaaagatcctgactactggagagaactataagaccgtcaacgacatcgtctccgctctcttgaacgcggaggacgaaaaacgcgaggaagaaaaggaaaagcaggccgaagaaatggcgtccgacgatctgtcacttatacgaaagaataggatggccttgtttcagcagctgacctgcgtgcttccgattctggataaccttctgaaagcgaacgtgatcaataaacaggagcatgatatcatcaagcagaaaactcaaatcccgctccaagcccgcgagctcattgacaccatcctggtgaaaggaaacgcagccgcgaacattttcaaaaactgtctgaaggagatcgacagcacgctttacaaaaatctgttcgtggacaaaaacatgaagtacatccctactgaagatgtctcgggactctccctcgaagaacagttgcgccggctccaggaggagaggacctgcaaggtgtgcatggataaggaagtgagcgttgtgttcataccatgcggacacttggttgtgtgccaggagtgcgcaccatccctgagaaagtgccctatctgccgcggcatcataaaaggaacggtccgtactttcctcagc

SEQ ID NO: 32246 - DNA, 1854 bp, synthetic construct
  misc_feature 1..1854: note = Description of Artificial Sequence: Synthetic coding sequence
  source 1..1854: mol_type = other DNA
atgcataagacggcttctcagagactatttcccggtcccagctaccaaaatatcaagtccatcatggaggacagtaccatcctgtccgattggactaactccaacaaacagaagatgaaatacgacttctcgtgcgagttgtaccgcatgagcacctactctacatttccagccggagtccccgtgtccgaaaggtcgcttgcccgggccggcttctactacaccggggtgaatgataaagttaaatgcttctgctgtggcctcatgctcgacaattggaagctgggtgactcacccattcagaagcacaaacagctctatccttcatgcagcttcattcagaatctcgtctctgcaagtttgggatcaacctcaaaaaacacatcgcctatgcggaatagctttgctcatagcctgtccccaactctcgagcattcctcactcttctcgggttcgtactcctcgctgtcccctaacccactcaacagcagggccgtagaagatatcagctcctctaggaccaacccttattcatatgccatgtccacagaggaagctaggttcttaacataccacatgtggccactgacgtttctgtcccctagcgagttggcccgggccggcttttattatatcgggccaggagatagagtggcttgcttcgcgtgcggtgggaaactctcaaactgggaacccaaggacgatgccatgagtgaacatcgcaggcacttccccaactgtccgtttttggaaaacagtttagagactctccgctttagcatctctaacctgagcatgcagactcacgccgcccgtatgagaactttcatgtattggccttcgagtgttccagtacagcccgaacagctcgcttcagcaggattctactatgtgggacgcaatgacgatgtcaaatgcttctgctgcgacggcgggctgagatgctgggagtccggcgatgatccttgggtcgagcatgcaaagtggtttccacgatgcgaattcctgattagaatgaaaggtcaggagtttgttgacgagattcagggccggtaccctcacttgcttgagcagctgttgagcacgagcgacacaacaggagaggagaatgcggacccacccattatccacttcgggcccggcgagtcttctagtgaggatgctgtgatgatgaatactccagtagtgaagagcgccctggagatgggctttaacagggatctcgtgaagcagacggtgcagtcaaagattttgactaccggtgagaactacaagacggtgaatgatattgtgtcagcattgctgaatgctgaggacgagaagcgggaggaggaaaaggagaagcaggccgaagagatggcgtccgacgacctgagcctgataaggaaaaacaggatggctttgttccagcagctcacctgcgtcttacccattttggacaaccttcttaaggccaacgtgatcaacaagcaggagcacgatatcataaagcagaagacccagatacctttgcaagccagggagctcattgatacaatcctggtcaagggcaacgcggctgccaatattttcaagaactgtctgaaagaaattgacagcactctctataagaacctcttcgtggacaaaaatatgaaatatatccccactgaggacgttagcggcctgtctttagaagagcaactccgtaggttgcaggaggagcggacctgtaaagtctgcatggacaaggaagtgtcagtagtattcattccatgtggtcatctcgtcgtgtgccaggagtgcgccccttcattaagaaaatgtcctatctgccgaggcatcatcaaaggaactgtccggacatttctctct

SEQ ID NO: 32247 - DNA, 1854 bp, synthetic construct
  misc_feature 1..1854: note = Description of Artificial Sequence: Synthetic coding sequence
  source 1..1854: mol_type = other DNA
atgcacaaaaccgcaagccagcgcctcttcccgggaccgtcctaccagaacatcaagtcaatcatggaggactccactatcctcagcgattggaccaacagcaacaagcagaagatgaagtacgatttctcctgcgagctgtacaggatgtccacgtactccaccttcccggccggagtcccagtgtcagaacggagcttggcccgcgccggattttactatacgggtgtgaatgataaggtgaagtgcttctgttgcggtctgatgctggacaattggaagttgggcgacagccctatccaaaagcacaagcagttgtacccttcctgctcgttcatccagaaccttgtctcggcctcattgggctctacctccaagaacactagcccgatgagaaactccttcgcacactctctctcgccgactctggagcacagctccttgttctccggatcatattcatccctgtccccgaacccactgaactcacgtgcggtggaagatatctctagctcccgcaccaacccatactcctacgctatgtcaactgaagaagccagattcttgacttaccatatgtggcctctgaccttcctttcgcctagcgagctggcgagagctggcttctattacattggcccaggagacagggtcgcatgcttcgcctgcggaggaaagctctcgaactgggaaccgaaggacgacgcgatgtcggaacatagaaggcattttccgaactgccctttcctggaaaattcgctggaaaccctgcgtttttcaatttctaacctctccatgcagacgcacgccgcacgcatgcggactttcatgtactggccgtcctccgtgccagtgcaaccggaacagcttgcctccgcaggcttttactacgtgggccggaatgacgacgtgaagtgtttctgctgcgacggcggactgcgctgttgggagtcaggagacgatccgtgggtcgagcatgctaaatggttcccgagatgcgaattcctcatcaggatgaaaggacaggagttcgtcgacgagatccaaggacggtacccccatctgctcgagcaactgctgagcactagcgacactaccggggaagaaaacgcggacccgcctattatccacttcggcccaggggaatcctcatcagaagatgcggtcatgatgaacaccccagtggtgaaaagcgcgctcgaaatgggtttcaatcgcgacctcgtgaaacagaccgtgcagtcgaaaatcctcacgacgggagagaactacaaaaccgtgaacgatatcgtgtcggcgttgttgaatgcggaggacgaaaagcgggaggaagaaaaggaaaaacaggccgaagaaatggcgtcggacgacctctcgctcatcagaaaaaacagaatggcactctttcaacagctgacgtgcgtgctgccgatccttgacaacctcctgaaggccaacgtgatcaataagcaggagcatgacatcattaagcaaaaaacccagatcccactccaagcacgcgagctcatcgacaccattctcgtcaagggaaacgctgccgcgaatatctttaagaattgcctcaaggaaattgactcaaccctgtacaaaaatctgttcgtcgataagaacatgaagtacatccctaccgaggacgtgtccgggctgagcctcgaggaacagctcagaagattgcaggaagagaggacctgcaaggtttgcatggataaggaggtttcggtcgtctttatcccatgcggccatctggtcgtgtgtcaggaatgcgccccgagtctcagaaagtgtccaatttgcaggggaatcatcaagggaactgtgaggacctttctctcc

SEQ ID NO: 32248 - DNA, 1854 bp, synthetic construct
  misc_feature 1..1854: note = Description of Artificial Sequence: Synthetic coding sequence
  source 1..1854: mol_type = other DNA
atgcataagacggctagtcagcgactgttcccggggcccagttaccaaaatatcaagtctattatggaggacagcacaatcctgtccgactggaccaatagcaacaagcagaagatgaaatatgatttctcctgcgaattgtaccggatgtctacctattctactttccccgccggggttcccgtatcagaaagatccctggcaagagctgggttctactacacgggcgttaacgataaggtgaagtgcttttgctgcggactgatgctagataattggaagctgggcgatagtccaattcagaagcacaagcaactgtatccctcttgttcttttatacagaatctagtgagcgcctccctcgggtccaccagcaagaacactagcccaatgagaaatagctttgcgcacagtctgtccccaactctagaacacagcagcctgttttcgggctcgtattccagtctttcaccaaatcccctaaattcacgcgccgttgaagacatttctagctctagaaccaatccatactcatacgctatgtccactgaggaggcacgattcctgacctatcatatgtggccgctaacattcttaagtccaagtgagttagcccgggcggggttctattatatcgggccaggagatagggtggcgtgctttgcctgtggcgggaaactatcgaattgggagcccaaagatgacgctatgtctgagcacagacggcacttccctaattgtccctttctggaaaacagtctggagactctacgcttcagtatctccaacctgtccatgcaaacacacgccgcaagaatgcggacctttatgtactggccatccagtgtgcctgttcagcctgaacagctagcgagtgccggattctactacgtgggccgcaacgacgacgtaaaatgtttctgctgcgacggtggacttcgctgctgggaatctggtgacgacccatgggtggaacatgcaaaatggtttccacgttgtgagtttctcatacggatgaaagggcaggaattcgtagacgagattcagggtagatatccacatcttctggaacagttgctcagcacctcagacacaacgggcgaggaaaacgccgatccacctattatccactttgggcctggcgagtctagtagcgaggatgccgtcatgatgaacacccccgtggtgaagtctgccctggagatgggatttaatcgggatctcgtcaaacagacagtgcagtccaagattctgactactggcgagaattataagaccgtcaacgatatagtgagtgccctattaaacgccgaggacgagaagagagaggaagagaaagagaagcaggccgaggaaatggcgtcggatgatctgagtttgattcggaagaaccgcatggcactctttcaacagctgacgtgcgtcttgccaattctggacaatcttttgaaggccaatgttatcaacaagcaagagcatgacatcattaaacaaaaaacacaaatcccgttacaggcccgtgaattaatagacactattctggttaagggaaacgccgccgccaacatttttaaaaattgtctgaaggagatcgactcaactctgtacaagaatctatttgttgacaaaaatatgaaatatattcccactgaagacgtgagcggattgagtttagaggagcaattgaggcgcctgcaggaggagcgcacgtgcaaggtttgtatggacaaagaggtctccgtggtgttcatcccttgtggtcacttggtggtgtgtcaggagtgtgccccctcgctgcggaagtgccccatatgtcgcggcattattaagggtaccgtgcgcaccttcctctct

SEQ ID NO: 32249 - DNA, 1854 bp, synthetic construct
  misc_feature 1..1854: note = Description of Artificial Sequence: Synthetic coding sequence
  source 1..1854: mol_type = other DNA
atgcataaaactgcctcacaacggctgttcccaggaccatcatatcagaacattaagtctatcatggaagacagcactatcctgtcagactggaccaactctaacaaacagaagatgaaatacgacttcagctgcgaactctataggatgtcgacatacagcacattccctgctggcgtccccgtgtctgagcgcagcctggcgagggccggtttttattacaccggtgtgaatgacaaagtcaagtgtttttgttgtggactgatgctggacaattggaagctgggcgacagtcctatccagaagcataaacagctctatccttcctgctcatttatccagaacctggtcagcgccagcttaggatccacatccaagaatacatcccctatgaggaatagctttgcacattctttatccccgacgcttgagcactcttcactgttcagcgggagttactcttcattgtccccgaatccactcaattctcgagccgtagaggatatcagtagttcgaggacaaatccatactcttacgccatgtctaccgaggaggcaagattcctcacctaccatatgtggccactgactttcttgtcccctagcgaactcgcccgtgccggattctattacattgggcccggagatcgcgtcgcatgctttgcttgtggtggaaagctcagtaactgggagccaaaggacgacgccatgtccgaacatcgtcggcattttcccaactgtccgtttctagaaaatagcctcgagaccctccggttctccatatctaacctgagcatgcagacgcatgccgccaggatgagaaccttcatgtattggcctagttcggtgcccgtccagcccgaacagctcgcctcggctgggttttactacgtaggaagaaacgacgatgtaaagtgtttttgttgcgatggcgggctccgatgctgggagtctggagacgatccctgggtggaacatgccaagtggttccccagatgtgagttcctgatcagaatgaaagggcaggagtttgtggacgagattcagggtcggtacccgcatctgctggaacaactgttatcaacctccgacactacaggagaagaaaatgccgatcctccaatcattcattttggccccggagagtcatcctccgaggacgcagtaatgatgaatactccagtcgtgaagtcggcattagagatgggctttaacagggacttggtgaagcagacggtccagtcaaaaatcctgaccactggtgagaactacaagacagtgaacgacatcgtcagcgctcttctgaacgctgaggatgaaaaacgggaggaggagaaagagaagcaggccgaagagatggccagcgacgacttgagtctgattaggaaaaataggatggctctgttccaacaacttacttgcgtcctgcctatcctagacaacctgctgaaagccaacgtgattaataagcaggaacacgacatcattaagcagaagacccagatacctctccaggcacgggaactgatcgatactatcctggtcaagggtaatgcagcagccaacatttttaagaactgcttgaaagaaatcgattctacactgtacaagaacctgtttgtggacaagaacatgaagtacatccccactgaagatgtatctgggctgtctttggaagagcagttgagacggctgcaagaagaacgaacctgcaaggtatgcatggataaagaagtctctgtggtctttatcccctgcggccacttggttgtttgtcaggagtgcgcacctagtctgagaaaatgcccaatctgccgcggtattattaaggggaccgtgcggacatttctatca

SEQ ID NO: 32250 - DNA, 1854 bp, synthetic construct
  misc_feature 1..1854: note = Description of Artificial Sequence: Synthetic coding sequence
  source 1..1854: mol_type = other DNA
atgcacaagacagcttcacagcgactatttccagggcctagctatcagaacatcaaaagtatcatggaggacagcaccatcctatcggactggaccaatagtaacaagcagaaaatgaagtacgattttagctgcgagctctaccggatgagcacttatagtactttccccgccggagtacctgtgagtgagcggtctctggccagagccggcttctattacaccggcgtgaacgataaagtgaaatgcttttgttgtgggcttatgcttgataactggaagctgggcgactctcccattcagaaacacaagcagctttacccatcctgctctttcattcaaaatctggtctccgccagtctgggcagcacatctaagaacacaagcccaatgcgcaatagttttgcgcattccttgagtccaacgctcgaacacagcagtctgttcagcggttcgtacagcagtttatctcccaaccccttaaattcacgggccgtggaagacattagctcttcccggaccaacccttattcttatgccatgtccaccgaggaggcaagattcctaacctatcacatgtggccactgaccttcctctcacccagcgaactcgcccgagccggcttctattatatcgggcccggagatcgggtggcctgcttcgcctgcggcggaaagttgtcaaactgggagcccaaggacgacgccatgagcgagcacagaaggcacttcccgaattgtcccttcttagagaattctctggaaacccttagatttagcatttctaatctctctatgcaaactcacgctgccaggatgaggaccttcatgtattggccttcgtccgtgccagtccaacccgagcagctggcatccgccgggttttactacgtggggcggaatgatgatgtgaagtgcttttgttgcgatgggggcctgcgatgttgggagtctggggatgacccatgggtggaacacgcaaaatggtttcccaggtgtgaattccttataaggatgaaggggcaggagttcgtggacgaaatccagggtaggtaccctcacctgctggaacagctcttatctacatctgataccaccggagaggaaaacgccgatcctccaattatacacttcggccctggcgaatctagctctgaggacgctgttatgatgaacacacctgtggtgaaaagcgctctggaaatgggattcaaccgggatctcgttaaacagacagtacaatcaaagattctgaccactggcgagaactacaagacagtcaatgacatcgtcagtgcactgctaaacgctgaggacgaaaagagggaagaggagaaggagaagcaggccgaggagatggcatctgacgatctgtcgctgatccgcaagaatcggatggcactgttccagcagctgacatgcgtgttgccgatactcgataatcttcttaaggcgaatgtaattaacaaacaggagcacgatatcattaaacagaagacacagattccattgcaggctagagaactgattgacaccattctggtaaaagggaacgctgcagctaatatcttcaaaaattgcttgaaggaaatcgattctactttgtataaaaacctatttgtcgataaaaacatgaagtacatcccaaccgaggacgtgtctggcctcagtttggaagagcaactcaggcggttacaggaagagcgcacgtgtaaagtgtgcatggacaaagaagtgtccgtggtgttcataccttgcggccacctcgtggtctgtcaggagtgtgcaccctcattgcgcaagtgcccaatctgcagagggataatcaagggtaccgtgcgcacgttcctctcg

SEQ ID NO: 32251 - DNA, 1854 bp, synthetic construct
  misc_feature 1..1854: note = Description of Artificial Sequence: Synthetic coding sequence
  source 1..1854: mol_type = other DNA
atgcacaaaactgcttcacagagactcttcccaggacctagctaccagaatattaagtccatcatggaggacagcacaatactgtctgactggacaaattcaaacaagcagaagatgaaatacgatttctcctgtgagctataccgtatgtctacttattcaaccttcccagccggggttcccgtgtccgaacgatccctggcaagggcaggattctattataccggggttaatgacaaagtgaaatgtttctgttgtggactgatgctggataattggaaacttggagattctcccatccagaaacacaagcagctatacccgagttgcagtttcattcagaacttggtaagcgccagtctcggcagtaccagtaagaacacctctcccatgcgcaatagcttcgctcattctttatcccccacactggagcattcatcactgttttccggaagctactcatccctttctccaaacccgctcaactcacgagctgtagaagatattagcagttcacggaccaacccctatagctacgccatgtctacagaggaggctcgatttctcacgtatcatatgtggcctctgacctttctgtcgccatccgagttagcccgggcaggcttttattacatcggaccaggggatcgtgtggcctgtttcgcatgtggcgggaaattatctaactgggaacccaaggacgatgcaatgtccgaacacaggagacatttccctaattgcccattcctggagaattcactcgaaactctaaggttcagtatatccaatcttagtatgcaaactcatgctgcgagaatgaggacttttatgtactggccctctagtgtgccggtacaacctgagcaactggctagcgctggtttttattatgtgggcagaaatgatgatgtcaaatgcttctgttgtgacgggggcttgcgctgctgggaaagcggcgacgatccatgggtggagcacgccaagtggttcccccgatgcgaattcctcatccggatgaagggacaagaatttgttgatgagattcagggtcgttacccgcacctgcttgagcagcttctctctacaagtgataccacaggagaagaaaacgccgatccccccattattcactttggtcccggcgaaagttctagcgaagacgcggttatgatgaacacccctgtggtgaaaagtgccctcgagatgggattcaatagggatctggtcaagcagaccgtgcagagcaaaatcttaaccaccggcgagaattacaagaccgttaacgatatcgtgtccgccttgttgaatgctgaggacgaaaagcgtgaggaggagaaagagaaacaggccgaggagatggcctctgacgatctgagcctgattcgcaagaataggatggctctgttccagcagctcacctgtgtcttgcctatcttggataatctgctcaaagctaacgtcattaataagcaagagcatgacatcatcaagcagaaaacccagattcctctccaggcaagagagctcattgataccatacttgtcaaagggaatgcggctgccaatatattcaagaactgcctaaaggaaatcgactcgacactgtacaagaatctttttgtggacaaaaatatgaagtatatcccaacggaggacgtgtctggcctctcactcgaggagcaactacgccgcctgcaagaggagcgcacatgtaaggtgtgcatggacaaggaagtgtctgtggtcttcattccatgcgggcacttggtggtgtgccaagagtgtgccccttctctgcggaagtgccctatttgccggggaatcattaagggaacagtcagaacgttcctcagc

SEQ ID NO: 32252 - DNA, 1854 bp, synthetic construct
  misc_feature 1..1854: note = Description of Artificial Sequence: Synthetic coding sequence
  source 1..1854: mol_type = other DNA
atgcacaaaactgcctcccagcgcctgtttcctggaccctcctaccaaaacataaagtccattatggaggactcgactattctctccgactggaccaattcgaataagcagaagatgaagtatgacttttcctgcgaactctacagaatgtcaacttattccacctttccagcgggtgttcctgtgtcggaaagatcactcgcccgggcgggcttctactatactggtgtgaatgataaagtcaaatgcttctgttgtggactgatgttggataactggaaactcggtgacagccctattcaaaagcataagcagctttacccatcatgttcctttattcagaacttggtgagcgcttccctgggttcaacttcgaagaacacttcaccaatgaggaacagctttgcacattccctctcgcccaccctggaacactcctccctcttctcaggttcgtactccagcttgagccccaacccgctgaatagcagagcagtggaggatatctcatcttccagaacgaacccctacagctacgcaatgtccaccgaggaggccagatttctgacctaccatatgtggcctctcacctttctgtcgccatcggagcttgcaagggccggattctactacatcggccctggagatagggtcgcatgttttgcgtgtggcggcaaactctcgaactgggagccaaaggatgatgctatgtcggaacatcggagacattttcctaactgccctttcctcgaaaattcactggagactctgagattttctatcagcaaccttagcatgcaaacccacgctgcacggatgcgaactttcatgtactggccatcgtcggtgccagtccaacctgaacagctggcttctgcaggtttttactacgtgggacgtaatgatgatgtgaagtgtttctgttgcgacggagggctcagatgttgggagtccggagatgatccatgggtggaacatgccaagtggtttccacggtgtgaatttctgatccgtatgaaaggtcaggagtttgtggatgaaatccagggaagatacccacatctcctggagcaactcctttccacctcggatactaccggagaagaaaacgccgatcctccaatcatccacttcggtccgggcgaatcatcgagcgaggacgcagtgatgatgaatactccagtggtgaagtcagctctggaaatgggtttcaacagagatcttgtcaagcagaccgtccagagcaagattctgaccactggcgaaaactacaagactgtgaatgatatagtttcagctcttctgaacgccgaagatgagaagcgcgaggaagagaaggaaaaacaggcagaggagatggccagcgacgacctttcgctgattcgcaagaaccggatggcactgttccaacagctgacctgcgtgctgcctatacttgacaaccttctgaaggctaacgtcatcaataagcaagagcacgatatcataaaacaaaagactcagatcccactgcaagcacgtgaactgattgataccattctcgtgaagggaaacgcagcagcgaatatcttcaagaattgcctcaaagaaattgactcaaccctttacaagaacctgttcgtggataagaacatgaagtatatcccgaccgaggacgtgtcgggcctttcgctggaagagcaactgaggcggcttcaggaggaaagaacctgcaaggtgtgtatggacaaggaagtctccgtcgtgtttatcccatgtggacatcttgtggtgtgtcaagagtgtgcaccatccttgaggaagtgtcccatatgtcgtggtatcattaaggggacggtcagaacgtttcttagc

SEQ ID NO: 32253 - DNA, 1854 bp, synthetic construct
  misc_feature 1..1854: note = Description of Artificial Sequence: Synthetic coding sequence
  source 1..1854: mol_type = other DNA
atgcacaaaaccgcatcacagcgactttttccggggcctagctaccagaatatcaagagcattatggaagattccaccattctttcagattggaccaactccaataagcaaaagatgaagtacgactttagctgcgaactctacagaatgtccacttactccaccttcccagccggagtccctgtgtcggagcgctcccttgcccgagcagggttttactacactggagtgaacgacaaggtgaaatgcttttgctgtggcctgatgcttgataattggaagctgggtgattcgcctattcaaaagcacaaacaactttacccttcgtgttcgtttattcagaatcttgtgagcgcatcgcttggaagcacttccaaaaacacttcaccaatgcgcaacagctttgcgcattcactctcgccaaccctggaacactcatctcttttctccggctcctactcttcactgagccccaatccactgaactccagagcagtcgaagatatctcgtcaagccgcactaatccttactcctatgcaatgtccaccgaagaagcccgcttcctgacgtaccatatgtggccacttacttttctgagcccttccgaacttgcaagagcaggattctattacattggaccaggcgatagggtggcctgctttgcttgtggaggaaaactgagcaactgggagcctaaggatgacgccatgtccgaacataggagacatttccccaactgtccctttctcgaaaactctctggaaactctgagattctccatttccaatctgtccatgcagactcatgcagcaagaatgcggacctttatgtactggccttccagcgtgcctgtgcagccagagcaactggcatcggcaggattttactacgtcggccgcaatgatgatgtgaagtgtttctgttgcgatggtggacttagatgttgggaaagcggagacgatccttgggtcgaacatgcaaagtggtttcctcggtgcgaatttcttattagaatgaagggacaagaatttgtggacgagatccaaggccgctacccacatctcctcgaacagcttctgtctaccagcgacactactggggaagaaaacgccgatcctcctatcatacattttggacctggtgagagctcgtccgaagatgcggttatgatgaacacccctgttgtgaagtccgccctggagatgggtttcaacagagatctggtgaagcagaccgtgcaatcgaagatcctgactaccggcgagaactacaaaaccgtgaatgatattgtgtccgccctcctcaacgcagaagatgagaagcgggaagaggagaaggaaaagcaggccgaagaaatggcgtcggatgatctgtcactcatccgtaagaacagaatggcacttttccaacaacttacttgcgtgctcccaatcctggacaacctccttaaggccaacgtcatcaacaagcaggaacacgacatcattaagcagaaaactcaaattccgctgcaagctcgcgaactgattgacactattctggtgaagggtaatgccgctgcgaacattttcaagaactgcctcaaggaaattgattcgactctgtataagaacctttttgtggataagaatatgaagtacattccgactgaagatgtctccgggctctcgctggaggaacagctgcggcggcttcaagaagagagaacttgcaaggtctgtatggacaaagaagtctcagtggtgttcattccctgcggtcacctggtggtctgccaggagtgtgcaccttcgctgagaaagtgccctatttgccgcgggataatcaaaggcactgtcagaaccttcctgtcc

SEQ ID NO: 32254 - DNA, 1854 bp, synthetic construct
  misc_feature 1..1854: note = Description of Artificial Sequence: Synthetic coding sequence
  source 1..1854: mol_type = other DNA
atgcataaaaccgcaagccagcgactttttccgggtccttcctatcaaaatatcaaatctattatggaggattcaacgatccttagcgattggacaaactcaaataagcaaaaaatgaaatacgatttttcctgcgagttgtatcgcatgagcacatactctaccttcccggctggagtcccagtgagtgaaaggagtcttgcaagagctgggttttattataccggcgtaaatgataaagtcaagtgcttctgttgcggcttgatgttggataattggaaactcggagattcacctatacaaaaacataaacagctctatccatcgtgtagtttcatacagaacctagtgtctgcaagtcttgggtcaacttcaaaaaacacgtctcctatgcgaaacagtttcgcccattcactgagtcctacattggagcattctagcttgttttcaggatcttattcgtctttaagcccgaatccgctcaattcacgggccgttgaagatatttctagttctcggacgaacccgtactcatatgcgatgtcaacggaagaggcccggttccttacataccacatgtggcctcttacgttcttgtcacctagtgagttagcgcgggccggcttttattacataggacctggtgatcgagtggcatgttttgcctgtggcggaaaacttagcaactgggaaccgaaagatgatgcaatgagcgaacatcgacgacatttcccaaactgcccgtttcttgaaaattctctggaaacactgcgcttttctattagtaatctttcaatgcaaacacatgcggctcggatgagaacgtttatgtactggccttcatctgttcctgtccaacctgaacaattggcgagcgcaggcttttattatgtgggcaggaacgatgatgtgaaatgcttttgctgcgatggaggactgcggtgctgggaatccggagatgatccatgggttgaacacgcaaagtggtttcctcgttgcgaattccttattcgcatgaaagggcaagaatttgttgacgagattcaaggcagatatccgcatcttcttgagcaattgctttccacgagtgacacaactggggaagagaatgctgatcctcctattatccattttggcccgggcgagtcaagttctgaagatgctgtcatgatgaatacccccgtcgtcaaatctgctctagagatgggattcaatagagatttagtcaaacaaacagtccaaagtaaaatattgaccactggggagaactataagacggttaatgacattgtaagcgccctcctaaacgccgaggatgaaaaacgggaagaagaaaaagaaaagcaagccgaagagatggcctcagatgatctctccctcattcggaaaaatcgcatggctctctttcaacaactgacatgcgtccttccgatccttgataatctccttaaagcgaatgtaattaacaagcaagaacacgatattatcaagcagaaaacacaaatcccactgcaggctcgggaacttattgatacgatactggtcaaaggtaacgcggccgcaaatatatttaagaattgcttaaaggagattgactcaactctgtacaaaaacttatttgtcgataaaaatatgaaatacatccctacagaagacgtgagcggacttagtcttgaagaacaattgcgtcgacttcaggaagaacgtacgtgtaaagtatgcatggataaagaggtaagtgttgttttcatcccttgcgggcacctagttgtgtgccaggaatgcgctccgtctctgagaaagtgcccgatttgccggggcatcattaaaggaaccgtccgtacgtttctatct

SEQ ID NO: 32255 - DNA, 1854 bp, synthetic construct
  misc_feature 1..1854: note = Description of Artificial Sequence: Synthetic coding sequence
  source 1..1854: mol_type = other DNA
atgcacaaaaccgcctctcagcggctgtttccagggcccagttaccaaaacattaaaagcattatggaggatagcactattctgagtgactggacaaactctaacaagcagaaaatgaagtatgacttcagctgcgagctttacagaatgagtacgtactccacgtttcccgcaggggttccggtgtcagaacgctccctcgcccgggccggattttactatacaggagttaatgacaaggtcaaatgcttctgttgtggtctgatgctcgacaattggaaactcggcgactcaccaatccaaaaacataagcagctgtatccgagctgttccttcatacagaaccttgttagcgcaagcttgggtagcacatcaaaaaacaccagccccatgaggaacagtttcgctcactctctgtctcccaccctggaacattctagtctgttttccgggtcatactctagcctttcccctaacccgctcaatagtagggctgtggaggacataagcagcagtcggacaaacccctactcatatgccatgagtaccgaggaagcccgattcctgacgtaccatatgtggcccctcacctttctctccccatccgagctggcacgcgctgggttttactatataggacccggggatagggttgcctgttttgcctgtggcgggaagctgagtaattgggaacccaaggacgacgcaatgtcagagcatagaaggcacttccctaattgcccttttctggaaaattctctggagaccttgagattctcaatctcaaacctgtccatgcagactcatgctgcgcggatgcgcaccttcatgtactggccttcctccgtgccagtacagcccgagcagctcgccagcgccggcttctattacgttggcaggaatgacgacgtcaaatgtttttgctgtgacggaggactgagatgttgggagagcggcgacgatccatgggtggaacacgcaaagtggtttccccggtgtgaatttctgatccggatgaaaggccaggaatttgtagatgagattcagggaaggtacccacaccttctggagcagctcctttcaacatccgatactacaggagaggaaaacgctgatccccccatcattcatttcggaccaggggagtcatcatccgaagatgccgtgatgatgaatacccctgtggttaagtctgccctggaaatggggttcaatagggacctggttaagcagaccgtgcagtccaaaatactgacaacaggagagaattataaaacagttaatgacatcgtgtcagctctgctgaatgctgaggacgagaagagagaggaggaaaaggagaaacaagccgaagaaatggcaagtgacgatctgtccctcatccggaagaaccgaatggcgctgttccagcagttgacctgcgtgctgcccattctggataacctgctgaaagccaatgtgatcaataagcaggagcatgacataattaagcagaaaacccagatccctctgcaagcccgggagctgattgataccatcctggtgaagggcaacgcagctgccaatatctttaaaaactgccttaaagagatcgactccacactgtataaaaatctctttgtcgacaaaaacatgaagtatattccaactgaggatgtcagcggactgagccttgaggagcagcttcggagacttcaggaggagcggacttgcaaggtgtgcatggacaaagaggtgtcagtggtgtttattccctgcgggcacctggtggtctgccaggagtgtgccccttccctgcggaagtgtccaatatgcagaggaattatcaaagggaccgtcagaaccttcctttcc

SEQ ID NO: 32256 - DNA, 1854 bp, synthetic construct
  misc_feature 1..1854: note = Description of Artificial Sequence: Synthetic coding sequence
  source 1..1854: mol_type = other DNA
atgcacaaaacagccagtcagcggctcttccctggtcccagctatcagaacattaagagtatcatggaggactccacaatcctgagcgattggactaactccaataaacagaaaatgaaatacgattttagttgtgaactgtacaggatgagcacctattctacatttcccgcaggcgtgcccgtcagtgagcgatccctggcccgcgcgggcttttactataccggcgtaaatgataaagtaaagtgcttctgctgtggactcatgctggacaactggaaactgggcgatagcccaatccagaaacataagcagctctacccttcttgctctttcatccaaaatctcgtcagtgcctccctggggagtacctcaaagaacacatccccgatgcgtaatagtttcgcccacagtctgtcccccacgctcgagcactctagcctgttttccggaagttattcctctctgtctcccaatccgctgaattccagggctgttgaagacatctcaagttctcgcacaaacccttactcttacgctatgtctacagaggaagcccgcttcttgacctaccacatgtggccacttacttttctgtctccatcagaattagcacgagcgggtttctattacatcggcccgggagaccgcgttgcttgtttcgcatgcggcggtaagctgtccaattgggagccaaaggacgacgccatgtctgaacacagacgtcacttccccaactgcccctttctggagaattcactcgaaaccctccgcttcagcatctcaaatctttcaatgcagacccatgcagcacgcatgcgaaccttcatgtattggccctcctcagtgccggttcaacccgaacaactagctagcgccggattctactacgtgggccggaatgacgacgttaaatgtttctgctgtgatggcgggctgagatgctgggaaagtggtgacgacccctgggtcgaacacgcgaagtggttccctcggtgtgaattcctgattagaatgaagggccaggaatttgttgatgaaatccagggccgatatcctcatctcctcgaacagctgctgagcactagcgacacgactggggaggagaacgcagaccccccgattattcatttcggtccaggcgagtcttcctccgaagatgccgtgatgatgaatacccctgtcgtgaagtcggccctggaaatgggtttcaatcgcgatttggtgaagcagactgttcagtctaagatattgacgacaggcgagaattacaaaacagttaatgatattgtgagcgcgctgctcaacgcagaggatgaaaagcgagaagaggagaaggagaaacaagctgaggagatggcctccgacgacctttctttgatccggaagaaccgtatggccctgtttcagcagcttacgtgtgttcttccgatacttgacaatctgttgaaagccaacgtcattaataagcaggagcacgatattattaaacagaagacacaaatcccactgcaggcccgggaactcattgatactatactggtcaagggcaatgctgccgcgaatattttcaagaactgcctgaaagaaatagactctacgttgtacaagaatctttttgtagataagaacatgaagtacataccgaccgaagatgttagtggtctgtccctcgaggaacagttgcggcgcttgcaggaggagcgcacctgcaaagtgtgtatggacaaggaagtgtcagttgtgttcattccctgcggccacctagtagtctgtcaggaatgtgctcctagtctgagaaaatgcccgatctgccgaggaataattaaggggaccgtaaggacatttttatct

SEQ ID NO: 32257 - DNA, 1854 bp, synthetic construct
  misc_feature 1..1854: note = Description of Artificial Sequence: Synthetic coding sequence
  source 1..1854: mol_type = other DNA
atgcacaagaccgctagccagaggttgttccctggcccgtcctaccaaaacatcaaatctatcatggaggactcgaccatcctctcagactggaccaactcaaataaacagaagatgaagtacgatttttcctgcgaactgtatcggatgtccacgtattcgaccttcccggccggggtccctgtctccgaacggagcttggccagagccggattttactacaccggcgtcaacgataaggtgaagtgcttctgttgcggattgatgctcgacaactggaagctcggagatagccctattcagaagcataagcagctttacccgtcctgctcgttcatccaaaacctggtgtccgccagcctcggtagcacctctaaaaacacttcccccatgcggaactcgttcgcccacagccttagccctacccttgagcactcgtctctcttctcaggcagctacagctcactttccccaaatcccctgaattcgcgggcggtggaggacatctcctcgtcgcggaccaatccctactcgtacgcgatgtctactgaggaagcgcggttcctcacttaccacatgtggccgctcactttcctctcaccgtcggaactggcccgcgctggattctattacatcggaccaggagatagggtggcatgctttgcgtgcggaggcaagctcagcaactgggaaccgaaagacgacgccatgagcgaacaccgcagacatttccctaactgcccgttcctggaaaattcgctcgaaacgctgcgcttttcaatctcaaatctgtcgatgcaaacccacgctgccagaatgcgcacctttatgtactggccgtcgagcgtcccagtgcagccggagcaactcgcgtcggcaggattctactacgtcggaaggaacgatgatgtcaaatgcttctgctgcgacggcggactgcggtgctgggaatcaggcgatgacccttgggtcgagcacgcgaagtggttcccacgctgcgaatttctgatccgcatgaaaggacaggagtttgtcgacgaaatccaaggtcgctacccgcatctcctggagcaactgctgtccaccagcgataccactggagaggaaaacgcagatcccccaatcattcattttggtcctggagaatcttcgtcagaagacgccgtgatgatgaataccccggtggtgaagagcgcactggagatgggtttcaaccgcgatctcgtgaagcaaaccgtgcaatcgaaaatcctgacgaccggtgaaaactataagactgtgaacgatatcgtcagcgctctcctcaacgcggaagacgaaaagagagaagaagagaaggagaagcaggccgaagagatggcatccgatgatctgagcctgatccgcaagaaccgcatggcactttttcaacagctgacgtgcgtgctccccatcttggacaacctgctcaaggctaacgtgattaacaaacaagagcacgacatcattaagcagaagactcagatcccactccaggcccgcgaacttatcgacacgatccttgtgaagggcaacgccgctgcgaacattttcaagaattgcctgaaggagatcgactcgactctctacaaaaatctgttcgtggataaaaacatgaagtacatccccacggaggacgtgtcgggtctgagcctcgaagagcagctgcgacggctgcaggaggaacggacttgcaaggtgtgtatggacaaggaagtcagtgtggtctttatcccttgcgggcatctggtggtctgccaggaatgtgccccttccctgcgcaaatgtccgatttgtcggggaatcatcaagggcactgtgagaacgttcctgtcc

SEQ ID NO: 32258 - DNA, 1854 bp, synthetic construct
  misc_feature 1..1854: note = Description of Artificial Sequence: Synthetic coding sequence
  source 1..1854: mol_type = other DNA
atgcataagacggcttctcagcgcctttttccaggccctagctaccagaatatcaagagtatcatggaggactcgacaatcttatccgattggactaattcgaataagcaaaaaatgaagtacgattttagctgtgagttatacagaatgagcacgtactccactttccctgcgggagtcccagtttcggaacggagcctggctcgtgcggggttttattacaccggcgtgaatgacaaggtaaaatgtttctgttgcggcctcatgttagataactggaagctgggcgattcccctattcagaagcacaaacagttgtacccatcctgcagcttcattcagaacttggtcagcgcaagccttggttcgacttcgaagaacacaagccccatgcgcaatagcttcgctcactcgctgtcccccacccttgagcacagcagtttgttcagtgggtcttacagctcactgtcccccaatccactgaactcgcgggccgtggaggatatctccagttctcggaccaacccatatagctacgccatgtctactgaagaggctagatttctgacataccatatgtggccacttacctttctgtctccctcggaactcgcccgtgccggcttctactatatcggccccggagaccgcgtggcttgctttgcctgcggcggtaagctgagtaattgggaacccaaggacgacgctatgagcgaacatcgaagacacttccctaattgcccatttctggaaaattccctggaaactcttcgctttagtattagcaatctgagcatgcagacccatgctgcccgaatgaggacctttatgtactggccttctagcgtgccagttcagccagagcagttggcatcagccggcttctattatgtcggcaggaatgacgacgtaaagtgcttttgttgcgacggcggtctgagatgttgggaatccggcgacgacccttgggtcgaacacgccaagtggtttcctagatgcgaattcctgatacgaatgaagggccaggaatttgtcgacgagattcaaggtcgataccctcatcttctagagcaactgctctccacctcagatacaacaggggaagagaatgcagacccgcccatcatccacttcggacctggcgagtcctctagcgaggatgccgtcatgatgaacaccccggttgtgaaatctgcactggaaatgggctttaaccgtgatttggtcaagcagacagtgcagtcgaagatccttacaaccggtgaaaactataagactgttaatgatatagtgagtgcgcttctgaacgccgaagacgagaaacgagaggaggagaaagaaaagcaagcagaagaaatggctagcgatgacttgtctctgatcagaaagaaccgaatggccctcttccagcaactgacttgtgttttaccaattctcgataaccttttaaaagctaacgtgatcaataagcaagagcatgacataatcaagcaaaaaacccagatccctctacaagcccgcgagttaatcgataccatactggtaaaggggaatgccgcagccaacattttcaaaaactgcctcaaagagattgattctaccttgtataaaaacttgttcgtcgacaaaaatatgaagtatatcccaactgaagatgtctccggactttcactggaagagcagcttcgacgcctccaggaagaaagaacctgtaaggtgtgtatggataaggaagtatctgtggtgttcattccctgcgggcacctcgttgtgtgtcaagaatgcgccccaagcctcagaaaatgtcccatctgcagagggattatcaagggcaccgttaggacttttctaagt

SEQ ID NO: 32259 - DNA, 1854 bp, synthetic construct
  misc_feature 1..1854: note = Description of Artificial Sequence: Synthetic coding sequence
  source 1..1854: mol_type = other DNA
atgcacaagaccgcctcgcagaggctcttcccaggaccttcctaccaaaacatcaaaagcataatggaagattccactatcctgtccgactggacgaattcaaataagcagaaaatgaagtacgatttctcctgtgagctctaccgcatgagcacctattcgactttccctgctggagtgccagtgtccgaacgttccctcgctcgcgccggattctactacaccggtgtgaatgataaggtgaaatgtttctgttgtggtttgatgcttgataattggaaactgggtgattccccaattcagaagcataaacaactctacccatcatgctcattcattcaaaacctggtttccgcatcacttggatccacttccaaaaacacctctcccatgagaaattcctttgcccatagcctgtcccctacccttgaacacagcagcctcttttcgggatcgtacagctcgctgtcgccaaaccccttgaactcaagagcagtggaggacatctcgtcaagccgtactaatccatattcatacgcaatgtcgaccgaagaagcacggtttctgacctaccacatgtggcctcttacttttctctcgccatccgagctcgctagggcaggtttttactacattggacctggggatcgggtggcatgcttcgcatgtgggggtaagctctcaaattgggaaccaaaggatgacgcaatgtcggagcataggagacactttcctaactgtccatttctggaaaactccttggaaaccctgagattttcgatttcgaacctgtccatgcaaacccacgcagctagaatgcgcacttttatgtattggccctcctctgtgccagtgcagcctgaacaacttgcaagcgcagggttctactacgtggggcggaacgacgacgtgaaatgcttttgttgtgatggaggtctgcgctgttgggagtccggagatgacccttgggtggaacatgcaaagtggttcccacgatgcgaattcctcatcagaatgaagggacaagagttcgttgacgaaatacagggaaggtaccctcacctgcttgaacagctcctttccacctccgacactactggtgaggagaacgcagatcctccaattatccattttggccccggggagtccagctcggaagatgcagtgatgatgaatactcctgtggtcaaatccgccctcgagatgggtttcaatagggacttggtcaagcagactgtgcagtcgaagattctgactaccggagaaaactacaaaaccgtcaacgatattgtgagcgcactgcttaacgcagaagatgaaaagagggaagaagaaaaagaaaagcaagcagaagaaatggcatccgatgatctttcacttatccgcaagaatagaatggcactctttcagcagctgacctgtgtcctcccgattctggataacctgcttaaggccaacgtgataaacaagcaggagcacgacatcattaaacaaaaaacccagataccgcttcaggcgagagaactcattgataccattcttgtgaaagggaatgcagccgccaacatcttcaaaaactgtttgaaggagatcgacagcaccctgtacaagaacctttttgtcgataagaatatgaagtacatacccaccgaggacgtgagcgggctctccctcgaggaacagcttagacggcttcaagaggaacgaacttgcaaggtctgtatggataaggaggtgagcgtggtgtttattccttgtggacacttggtggtctgtcaggaatgtgcaccatcgctgcgtaagtgccctatatgtcgggggatcattaaggggaccgtgcgcacgtttctctca

SEQ ID NO: 32260 - DNA, 1854 bp, synthetic construct
  misc_feature 1..1854: note = Description of Artificial Sequence: Synthetic coding sequence
  source 1..1854: mol_type = other DNA
atgcacaagacagccagccagaggctgttccccggcccctcttaccagaatatcaaatccataatggaggactctacaatcctatctgattggactaacagtaataagcaaaagatgaagtatgatttctcatgcgaattgtatagaatgtcaacatattccacatttccagcgggggtgccagtgtctgagcggtctctcgcaagggcaggcttctattacaccggggtaaacgacaaggttaagtgcttttgctgcgggcttatgttagacaattggaagcttggggatagtccaatccagaagcataagcaactgtacccttcctgctcattcattcagaatttggtgtctgcttcattaggatccacatccaagaacacatcacctatgagaaattcttttgctcactctctgtctcccaccctcgagcatagcagcctattttccggcagctactccagtctttccccaaacccactcaactccagagcggtggaagatatctcgagttctcgaactaacccatactcctacgccatgtccacggaggaggcacgtttcctgacttaccatatgtggccacttaccttcttatcacctagtgagctcgcgagagctggattctattacattggcccgggagacagggtggcctgcttcgcctgcgggggcaaattgtctaattgggaacccaaggatgacgcaatgagcgagcacagaagacacttccctaactgtcctttcttggagaatagtttggagacattacgcttttcaatatctaacctgtctatgcaaactcacgcggccaggatgagaacatttatgtattggccgagttcagttcccgtccaacctgagcagctggccagcgccggattctattacgtcggtcggaatgacgacgtgaagtgtttctgctgtgatggcgggctgagatgctgggaaagtggggacgatccctgggtggagcacgcaaagtggttcccccggtgtgagtttctaatacgcatgaagggccaggagttcgtggatgagattcagggaagatatccacatctgctcgagcagctgctctcaacatccgatactaccggtgaggaaaacgctgaccctcccatcatccacttcggccccggggagtcgagcagcgaagatgccgttatgatgaacactcctgttgtaaagagcgcgctggaaatggggttcaacagggatctcgtcaaacagaccgtgcagtcaaagatacttaccacaggagagaactataagacggtgaatgatattgtgtcagccttgctgaacgcggaagacgagaagcgggaggaggagaaagaaaagcaggccgaagaaatggccagtgacgatctctctctgataagaaaaaatcgcatggcgctttttcagcaacttacgtgcgtcctgccaattttggataatctgctgaaagcgaacgtaattaataagcaggaacatgatatcatcaagcagaaaacgcaaataccactgcaggccagggagcttattgatacgatactcgttaagggaaacgctgctgctaatatttttaagaactgtctgaaagaaattgactctactctgtacaaaaacctgttcgtggataagaatatgaagtacatccccacagaggatgtttcaggcctgtctttagaggagcaattgcgcaggctgcaggaggaaaggacctgtaaggtgtgcatggacaaggaggttagtgtcgttttcatcccgtgcggtcatcttgtcgtgtgtcaggagtgcgccccaagtcttagaaaatgtcctatctgccgcggaatcatcaagggcaccgttagaacgttcctgtct

SEQ ID NO: 32261 - DNA, 1854 bp, synthetic construct
  misc_feature 1..1854: note = Description of Artificial Sequence: Synthetic coding sequence
  source 1..1854: mol_type = other DNA
atgcataagacggcctcccagcgactgtttccgggaccaagctaccagaacattaagtctatcatggaagactccaccattctgtcagactggacgaactctaataagcagaagatgaagtatgatttcagctgtgagctgtatagaatgtcaacctatagtacatttcctgcaggtgtgccagtaagtgaacggtctttggcccgcgccggtttctattataccggagtaaacgataaggtcaagtgcttttgctgtggactgatgctggacaattggaagttaggtgacagcccgattcagaagcacaagcagctctacccctcttgtagctttatacagaacctcgtaagtgcttccctgggaagcacgtctaagaacacgagcccaatgcggaatagcttcgcacactcattgtctcccacacttgagcactcttcactttttagcggctcctatagctccttgagccctaaccccctcaactctcgggcagtcgaagacatatcctcgagccggaccaatccctacagctacgctatgtctaccgaagaggcccgctttctgacctatcacatgtggcccctaaccttcttgtcaccctccgaacttgctcgggccgggttttactatatcggaccaggggaccgggtggcctgttttgcttgtggaggaaaacttagcaattgggagcccaaagacgacgccatgtctgaacatagacggcactttccaaactgtccttttctcgaaaacagcctcgagaccttgagattcagcatctcgaacctcagcatgcagacccatgctgcacggatgcgaacgtttatgtactggccttcttcagtgccagttcagcccgagcagttggctagtgccggcttttactatgtcggacggaatgacgatgtaaagtgcttctgctgcgatggcggacttcggtgctgggagtcaggtgacgatccgtgggttgagcacgccaagtggttcccgaggtgcgaatttctgatccgcatgaaaggccaggagttcgtcgatgagatccaggggcgttatccccatctgctggagcaactgctgagcaccagcgacaccacaggtgaggagaatgcagaccctcccatcatacattttgggcccggcgagtccagcagtgaggatgcagtgatgatgaatacccccgtcgtgaagagcgcactggagatgggttttaatcgagacctcgtaaagcagacggtgcagagtaaaattctcacgacaggcgagaattacaagacagtgaatgacatagtgtcagccctgctgaacgccgaggacgaaaagcgagaggaggaaaaggaaaaacaggcagaagagatggcttccgacgatctgtcactcattcggaagaaccgcatggccctattccagcagctgacctgcgtgctgcccattctagacaatcttcttaaggcaaatgtgattaataagcaggagcatgatattatcaagcagaagacacagattcccctgcaggctagggaactgatagacactattctcgttaaaggcaacgccgcagccaacatttttaaaaactgcctcaaagagattgactctaccctgtataagaacctgttcgtggacaagaacatgaagtacatccctaccgaggatgtgtctggactgtctctggaggagcagttgaggagattgcaggaggagagaacttgcaaagtctgtatggacaaggaggtttccgtggtgtttattccatgcggtcacctggtggtctgccaggagtgtgccccatccctacgcaagtgccctatctgcaggggcatcattaaaggaacagttcggaccttcctcagc

SEQ ID NO: 32262 - DNA, 1854 bp, synthetic construct
  misc_feature 1..1854: note = Description of Artificial Sequence: Synthetic coding sequence
  source 1..1854: mol_type = other DNA
atgcacaagactgcatcccagaggctctttcccgggccctcttatcagaacatcaaaagcatcatggaagatagcacaatccttagcgattggactaactcaaataagcagaaaatgaagtacgatttcagttgcgaactttaccgaatgagcacctacagtacctttccagcgggcgttccagtgagtgagaggtcacttgcaagagccggattttactacaccggagtcaacgacaaagtgaagtgtttttgctgtggtttgatgcttgataactggaagctgggcgacagtccaatccagaagcataaacagctctacccctcttgttcttttattcaaaatctggttagtgctagtctgggtagtacctccaaaaacacatctccaatgagaaactcatttgcccactccttgagtccgactctggagcatagttcactgttcagcggatcgtactcctcactaagcccaaacccactgaactctagggctgttgaagatatcagcagttcaagaaccaatccgtactcctatgctatgagcaccgaagaggcgcgttttttaacctaccacatgtggccactgacttttctaagcccatccgagctcgccagggccggattttactatataggacccggggatcgggtagcttgctttgcctgtggcgggaagttgtcaaactgggaacctaaggatgacgcaatgagcgaacacaggcggcactttcctaattgtccttttttggaaaactcactggagacactgaggttctctatctcaaatctcagtatgcaaacccacgctgcacgaatgagaacgtttatgtattggccctcgagcgttcccgttcaacccgagcagctcgccagtgccggattctactatgtgggtcggaatgatgatgttaaatgcttttgttgcgacgggggactgagatgctgggagtccggggatgacccatgggttgaacatgcaaagtggtttcctaggtgtgaatttttgatcaggatgaaggggcaagagtttgtggatgagatacaggggcgctacccccacctgctggagcagttgctgagcaccagtgatactactggtgaagaaaatgccgatcctcctattattcatttcggccccggtgaaagcagcagtgaggacgctgtgatgatgaatacaccagtggtgaagtcggccctcgagatgggcttcaatagggatttagttaaacagacagttcaatctaagattctgacaacaggagagaactacaaaacagtgaacgatatcgtcagtgccttgctcaatgcagaagatgaaaagagagaagaggagaaagagaaacaggctgaggaaatggcatccgacgacctgagtctcatccgcaagaaccggatggccttgttccagcagctcacatgcgtcctgcctatccttgataatctgctgaaagccaatgtgattaacaagcaagagcatgatatcattaagcagaagacacagatcccccttcaggcgcgtgagctgatcgacacgatcctggtgaaaggcaatgctgccgccaatatctttaagaattgccttaaggagattgacagtaccttgtacaaaaatcttttcgtggacaagaacatgaagtatatccccacggaggacgtgtctggactgagtctcgaggagcagctccggcggcttcaggaggaaaggacgtgtaaagtgtgcatggacaaagaagtctccgtggttttcatcccttgcggtcacctggtggtgtgccaggagtgcgctccgtcactccgcaagtgtccaatctgtcgcggcatcataaaagggacagtgcgcaccttcttgtct

SEQ ID NO: 32263 - DNA, 1854 bp, synthetic construct
  misc_feature 1..1854: note = Description of Artificial Sequence: Synthetic coding sequence
  source 1..1854: mol_type = other DNA
atgcacaagactgcttctcagcgcctcttccctggcccaagctatcaaaacatcaaaagcatcatggaagattctactatcttgagcgattggaccaattctaacaagcaaaagatgaagtacgacttctcctgcgagctctacaggatgagcacctatagtaccttccctgcaggcgtccctgtgagcgagaggtcactggctcgcgcaggcttctactacaccggggtgaacgataaagtgaagtgtttctgctgcggcctcatgttggataattggaagctcggcgacagtcccatccagaagcacaagcagttgtacccaagttgcagttttatccaaaaccttgtttccgcgagcctcggttcaacgtcaaagaacacaagcccgatgcggaactcttttgcgcacagcctgagtcccactctggagcactcaagccttttctctggatcttacagctcactgtcaccaaaccccctgaacagccgcgcagttgaggatatctcgagcagtcgaactaacccttatagctacgccatgagcaccgaggaagcacgcttcctgacctaccatatgtggcccctgacttttttgtccccatctgaactggctagggcaggcttttactatatcggtcccggcgacagggtggcatgttttgcatgtggcggaaagctgtcaaattgggagcccaaggacgatgccatgagtgagcataggaggcattttcctaactgtccattcttggagaacagccttgaaactctgaggttctccatcagtaacctgtcaatgcagacgcatgctgcccgtatgcgcacatttatgtattggccaagctctgtgcctgttcaaccagagcagttggcaagtgctggcttctactacgtgggccgaaatgatgatgtgaagtgcttctgttgcgatggaggactgcgctgctgggagagtggagacgatccatgggtggaacacgctaagtggttccctcgatgcgaatttctgattaggatgaaaggacaggagttcgtggatgaaattcaaggccgctaccctcacctcttggaacagctactgtccacatcagatacgacaggcgaggagaatgccgatccaccaatcatccattttgggcccggagaatctagctctgaggatgctgttatgatgaacacacctgtggtgaagagtgccctggaaatgggattcaacagagacctggtgaaacagaccgtccagagcaaaatcctcaccaccggcgaaaactacaagactgtgaacgatatagtcagcgccctgctgaacgccgaagacgaaaagagggaagaggagaaagagaagcaggctgaggagatggcctccgacgatctgtccctcataaggaaaaatagaatggctctgtttcagcagctgacctgcgttttgcccattttggataatcttctgaaagcaaacgtgatcaacaaacaggagcacgatatcatcaagcaaaagacacagatcccactgcaggctcgagagctaatcgacaccatccttgtcaagggcaacgctgctgctaacatcttcaaaaactgcctgaaggagattgactccacgctctataagaacttgttcgtagataagaacatgaagtacatcccaaccgaagacgtcagcggccttagtctggaggagcaattgagaagacttcaggaagaacgcacctgtaaggtttgtatggataaggaagtaagcgtggtcttcatcccatgtggtcatctcgtggtgtgccaggagtgcgcacctagtctgaggaaatgtccaatctgtagggggattatcaagggaacagtaagaaccttcctgtcc

SEQ ID NO: 32264 - DNA, 1854 bp, synthetic construct
  misc_feature 1..1854: note = Description of Artificial Sequence: Synthetic coding sequence
  source 1..1854: mol_type = other DNA
atgcataagactgcttcccaacgtctgtttccaggaccttcctaccagaacatcaagtccattatggaggatagcacaatcctctccgactggactaactcaaacaagcagaagatgaagtacgatttctcttgcgagctgtataggatgtctacctactccaccttcccagccggagtacctgtttctgaaaggtctcttgcaagggctggtttctactacacaggcgtgaacgacaaggtgaagtgcttctgttgcggtctgatgctcgacaactggaagcttggtgactcacccatccagaagcacaagcagctttacccctcatgttctttcatacaaaatcttgtttctgcaagtcttggatccacctcaaagaatacttctcctatgcgtaacagctttgcacactctctgtctcctacattggaacatagctcactgttttcaggatcttactctagcttgtccccaaacccattgaatagccgtgctgtagaggacattagttcatcccgcaccaacccttactcctacgctatgtctactgaggaggctcgtttcctgacctaccatatgtggccactgacctttctctccccatccgagctcgctcgtgctggattctactacattggccccggcgaccgcgtcgcttgctttgcctgcggcggcaaactgtccaactgggaacccaaggacgatgccatgtccgagcatcgtaggcacttccccaattgtccattcctggagaacagtctggagactctgcgctttagcatttctaacctgagcatgcagactcatgctgccaggatgcgtacattcatgtactggccaagttccgtgcccgttcagccagagcagttggcttccgccggtttctattatgttggtcgcaatgacgacgtcaagtgcttttgctgcgacggcggactgcgctgttgggagtccggcgacgacccatgggtcgaacacgcaaagtggttccctcgctgcgagttcctgattcgtatgaaaggccaggagttcgtcgatgaaattcagggcagataccctcacttgctggagcagcttctctccactagtgacaccactggcgaggagaatgccgatccaccaattatccacttcggacccggagagagttcaagcgaggacgctgtaatgatgaacaccccagttgttaaatcagctctggagatgggattcaacagagacttggtcaagcagaccgtccagtccaagattttgactaccggagaaaactataagactgtgaacgatattgtgtccgccctgctgaacgcagaagatgaaaagcgcgaggaggaaaaggagaagcaggcagaggagatggcctccgacgatctgagcctgatacgcaaaaacagaatggccctgttccagcagctcacatgcgtgttgcctatacttgataacctcctgaaggccaatgtgatcaataagcaagagcatgatatcatcaagcagaagacacagatccctctccaggccagggagctcattgataccatcttggtaaagggtaacgctgctgctaatatttttaaaaactgtcttaaggaaatcgacagcacactgtataagaatctgttcgtggacaagaatatgaaatatatccctaccgaggatgtgtccggactctccctggaggaacagcttagacgcttgcaggaggagagaacctgcaaagtttgcatggataaggaagtgtcagtggtgtttatcccttgtggtcacctcgtagtttgccaagaatgtgctccatccttgaggaaatgcccaatttgtagaggtattattaaaggtacagttcgtacctttctgtca

SEQ ID NO: 32265 - DNA, 1854 bp, synthetic construct
  misc_feature 1..1854: note = Description of Artificial Sequence: Synthetic coding sequence
  source 1..1854: mol_type = other DNA
atgcataagactgcttcccagcggctgttccctggaccttcataccaaaacataaagtcaatcatggaggacagcactattctgtctgattggactaattccaacaaacaaaagatgaaatacgatttcagctgcgagctgtaccggatgtcaacttatagcacctttccggccggagtgccggtgagcgagaggtccctggctagagcgggattctactacactggagtgaatgacaaggtgaaatgtttctgctgcgggctgatgctggacaactggaaattgggggactcgccgattcagaagcataaacagctctaccccagctgctcatttatccagaacctcgtgtcggcgagcctgggaagcacctcgaagaacacttcacctatgcggaattcgttcgcgcattcgctctcgccgactttggaacacagctccctgttctccggtagctactcctcgctgagtccaaaccccctcaactcccgggccgtggaggacatctcatcgtccaggaccaacccgtactcctatgccatgtcgacggaagaggcccggttcctgacctaccacatgtggccgctcaccttcctgtcccctagcgaactggcaagagcaggattttactacatcggaccgggtgatcgggtcgcttgcttcgcgtgcggaggtaagctgtcgaattgggagcctaaggatgacgcgatgtccgagcacaggcgccatttccccaactgcccgttccttgagaactcgctggaaacgctccgcttctcaatctcaaatctctcaatgcagacccatgcagctcggatgagaacctttatgtactggccaagctccgtccctgttcagcccgaacaactggcttctgcaggcttctattatgtgggacggaacgacgatgtgaaatgcttctgctgcgacggaggactgcggtgctgggagtccggtgacgacccgtgggtcgaacatgcgaagtggtttccgcggtgcgaatttcttatcagaatgaaaggacaggagttcgtggatgagatccaaggtcggtacccgcaccttctcgagcaactcctgtcaacctcggacactaccggcgaagaaaatgccgatccacccattattcattttggccccggcgagagtagctctgaagatgccgtgatgatgaatactccagtggtgaagtccgccctcgaaatgggattcaaccgcgacctggttaaacaaaccgtgcagtcaaaaatcttgaccaccggagagaattacaagaccgtgaatgatattgtgtcagctttgctgaacgccgaagatgagaagcgggaagaagaaaaagagaagcaagcagaagagatggcatcggacgacctttccctgatccggaagaatagaatggccttgtttcagcagcttacttgcgtactgcccattctcgacaaccttttgaaggcgaacgtgatcaataaacaggagcacgatatcatcaagcaaaagacccaaattccgctgcaggctcgcgagctcatcgataccatcctggtgaaaggcaacgccgcggcgaacatcttcaagaactgtctcaaggaaattgattcgactctgtacaaaaacctgttcgtggacaagaatatgaagtacatcccgaccgaagatgtgtcgggactttcactggaagaacagcttaggcgccttcaggaggaacggacctgcaaggtgtgtatggacaaggaggtcagcgtcgtctttataccgtgcggacatctcgtggtctgccaggaatgtgcgccttcgcttcgcaagtgtccgatctgccgcggaatcattaaagggactgtgcgaactttcctctct

SEQ ID NO: 32266 - DNA, 1854 bp, synthetic construct
  misc_feature 1..1854: note = Description of Artificial Sequence: Synthetic coding sequence
  source 1..1854: mol_type = other DNA
atgcataagactgctagccaacgccttttcccaggtccctcctaccaaaatattaaaagcatcatggaagacagcaccatcctgtccgattggactaactcaaataagcagaagatgaaatatgacttctcctgcgaactttatcgcatgtccacgtactctacattcccggccggtgtccctgttagtgaacgcagtttggccagagcaggtttttactacaccggagtgaacgataaggtgaagtgcttctgctgtggactgatgttggacaattggaagcttggagactccccaattcagaaacacaagcagctctacccgagctgctcatttatacagaatctggtgtcagcttccctcggatcaactagtaaaaacacatccccaatgaggaatagtttcgcccactcccttagccctacgctcgaacactcttccttgttcagtggctcttacagttccctttcccccaaccccctgaacagtagagctgtggaggacatctccagcagtagaaccaacccttactcttacgctatgtctacggaggaggctaggtttctcacataccatatgtggccactcacttttctgagtccatctgaacttgctagggccggattctattacattggcccgggcgaccgcgtggcatgttttgcgtgcggtggcaaactgtccaattgggaaccaaaggacgatgctatgtcagagcaccgcagacacttcccaaattgccccttccttgagaacagcctggagaccctgaggttctcaataagtaacctgtccatgcagacccacgctgcaaggatgcgcaccttcatgtattggccatcctctgttcccgtacagcccgagcagctggcctccgctggattctactacgttggcagaaatgacgacgtgaagtgcttctgttgtgacggtggactcaggtgctgggaatccggtgatgacccatgggttgagcacgccaagtggttcccgagatgcgagttcttgatcaggatgaagggacaagagttcgtggatgaaattcagggccgctacccgcacctgctggaacagctgctgtccacctctgacaccactggcgaagagaacgccgatccacccatcattcactttggccctggtgagagctccagtgaagatgccgtcatgatgaacactcccgttgtgaaatctgctctcgagatgggcttcaatcgcgatctggtgaagcagaccgttcagagcaaaatcctgaccaccggagagaactacaaaaccgtgaatgatatcgtgtcagcacttctgaacgccgaggatgagaagagagaagaagaaaaagagaagcaggccgaggagatggcgtccgacgacctgagcctgatcaggaaaaataggatggcactttttcagcagttgacctgtgttttgccgattttggacaatctcctcaaggccaatgttattaacaagcaagagcatgacatcatcaaacagaagacccagattcccctccaagccagggaactcatagatactatcctggtaaagggtaatgcggccgctaatatattcaagaattgcttgaaggagatagattctaccctctacaagaatctctttgttgacaagaatatgaaatatatccccactgaagacgtatccggactttccctggaggaacagcttcgcaggcttcaggaagaacgcacctgtaaagtgtgcatggacaaagaagtgtcagtggtcttcataccttgcggtcacctggttgtctgtcaagagtgcgccccgtcactcagaaagtgccccatttgtagaggcattattaagggtaccgtacgcaccttcctgagc

SEQ ID NO: 32267 - DNA, 1812 bp, synthetic construct
  misc_feature 1..1812: note = Description of Artificial Sequence: Synthetic coding sequence
  source 1..1812: mol_type = other DNA
atgaatattgtggaaaactcaatcttcctttcaaacctgatgaaatctgccaacacgttcgagctcaagtacgacctgtcctgtgaactttaccggatgtcgacgtattcgacgtttccagcgggagtgccagtgtcggagcggtccctggcaagagccggcttttactatactggagtgaatgataaggtcaagtgcttctgctgtggtctgatgcttgacaattggaagcggggagactcgccaaccgaaaagcacaagaaactgtacccatcatgtcgttttgtccaatccctcaactccgttaacaatctcgaagccacctcccaacctaccttccctagcagcgtgacgaacagcactcattcacttctgcccgggacggaaaacagcggatactttagaggatcatattccaattctccttccaaccctgtcaactcaagggccaaccaggacttttccgcactgatgagatcgtcgtaccattgtgccatgaacaatgaaaacgcacgtctgcttacttttcaaacgtggcccctgacctttctttcgcctactgaccttgctaaggcaggtttttactacattggacccggtgatcgcgtcgcgtgtttcgcatgtggtggaaaattgtcgaactgggagcctaaggataatgcgatgtcggaacatttgaggcacttcccgaagtgtccctttatcgagaaccaactgcaagacaccagcagatacactgtctcgaatctttccatgcaaacccacgccgcacgcttcaaaacttttttcaactggcccagttcagtgcttgtgaatccagaacagctcgcgtcggccggtttctactatgtgggtaattccgacgatgttaagtgtttttgttgcgatggaggtttgagatgctgggaatctggcgacgatccatgggtgcagcacgcaaagtggtttccgcggtgtgaatacctgatacgcatcaaggggcaagaattcattagacaagtccaggcatcatacccacacttgctcgagcagcttctttcgacctctgactcaccaggcgacgagaatgctgaatctagcattatacattttgaacctggagaagatcattccgaggatgccattatgatgaacactccagtcattaacgcagcagttgaaatgggattcagtagatctcttgtcaaacaaaccgtgcagcggaagatactggcaaccggggaaaactacaggttggtgaatgatctggtgctcgatctcctgaatgcggaagatgaaattcgcgaagaagagcgtgaacgcgcaactgaggagaaggagtccaacgacctgctcctcattagaaaaaaccgaatggctctgtttcaacatctcacctgtgtgatacccattttggactcactgctgactgcaggcattatcaacgaacaagagcacgatgtgattaagcagaaaactcagacttcgctgcaggcaagggaactgatagataccatcctcgtgaaaggaaacatcgcagccactgtgtttaggaactccctgcaggaggccgaggcagtcttgtacgaacatctttttgtgcaacaggatatcaagtacattccaactgaagatgtctcggaccttccagtggaggaacagctcagacgtttgcaagaagaacggacctgcaaagtgtgcatggacaaagaggtgtctatcgtgtttataccatgtgggcacctcgtggtttgcaaagattgtgcaccgagcttgaggaagtgcccaatttgtcggtcgaccataaagggaaccgtgagaacttttctgagc

SEQ ID NO: 32268 - DNA, 1812 bp, synthetic construct
  misc_feature 1..1812: note = Description of Artificial Sequence: Synthetic coding sequence
  source 1..1812: mol_type = other DNA
atgaatattgtggaaaattctattttcctatctaaccttatgaaaagcgctaatacttttgaattgaagtacgatctctcttgtgaactctatagaatgtcaacgtattctactttcccagcaggagttccggtgagtgaacgcagtttggcccgtgctggtttctattacactggagtaaatgataaagttaaatgtttctgctgcggactcatgcttgataattggaagaggggagattcaccgaccgaaaagcacaaaaaactgtatccttcctgtcggttcgtacagtccttgaatagcgttaacaatcttgaagctacttctcaaccaacgtttcctagctcagttactaattcaacgcattcgcttttgccggggacagagaatagcggatactttagaggatcttattcaaactctccatccaatccggtaaattcgcgagcaaatcaagatttttctgcattgatgcgctcatcgtatcattgtgcgatgaataacgagaatgcccggttattgactttccaaacttggccgttgacgttccttagtcctacagatttggctaaagctggattttactatatcggtccgggagatagagttgcatgtttcgcatgtggtggaaaactttctaattgggaaccaaaagataatgcgatgagtgagcacctaagacattttcctaagtgccctttcatagagaatcagttgcaagatacgagtagatacactgtttcaaacctatcgatgcaaacacatgccgcccgattcaaaacgttttttaattggccatcttcagttcttgtcaatccagaacagctcgcctcggcaggattctattatgtgggtaatagtgacgatgtaaagtgtttttgttgtgatggtggactccgctgttgggaatcgggagatgatccttgggttcagcatgctaagtggttcccgaggtgtgaatatcttatccggatcaaaggacaggaattcattagacaggtccaagcctcgtatcctcatctgttagagcaattgctgtctactagcgattctccgggagatgagaatgcggagtcatcgattattcactttgagccaggggaagaccactccgaagacgcgattatgatgaatacccctgttatcaatgcagcagttgaaatgggttttagtcgatcgctagtcaagcaaaccgtacaacgcaaaatcttagcaacaggagaaaattatcgcttagttaatgatctggtcctcgatcttctaaatgcagaagatgaaattcgagaagaggagcgtgagagggcgactgaggaaaaggaatcaaatgatttgctattaatacgaaaaaatagaatggcactttttcaacatttaacctgcgtaatcccaattcttgacagtctcctaacagctggaatcattaacgaacaggaacatgatgtcatcaaacaaaaaacccagacttccttgcaggcgcgcgaattgattgataccattctagttaaaggcaatattgcagcaacagtgtttcgtaactcactccaggaagctgaagccgttttgtatgagcatcttttcgtacaacaggatattaagtacataccgaccgaagatgtgagcgatctgcctgttgaagaacagcttagaagactccaagaagaacgtacttgcaaagtttgtatggataaggaggtttcgattgtctttattccttgtggacatttggtcgtttgcaaagattgtgccccatcacttagaaaatgcccaatttgtagaagtacaataaaaggcacagtgcgcacatttttatcc

SEQ ID NO: 32269 - DNA, 1812 bp, synthetic construct
  misc_feature 1..1812: note = Description of Artificial Sequence: Synthetic coding sequence
  source 1..1812: mol_type = other DNA
atgaacatcgtggagaacagcatctttctctcgaacctgatgaagtccgcaaatacctttgaactgaagtacgacctgtcctgcgagttgtaccggatgtcaacttattccaccttccccgcaggtgtgccggtgtctgaacgctcactcgcgcgcgcaggattctactacacgggcgtcaatgacaaagtgaaatgtttctgctgcggattgatgctggataattggaagcggggcgacagcccaactgagaagcacaagaaattgtaccccagttgccggtttgtgcagtctctgaatagcgtgaacaatctggaggcgacctcgcagccaaccttcccatccagcgtaactaactctactcattcgctgctgccgggtactgagaactcaggctactttagggggtcctactcgaattccccatcaaacccagtgaactcgcgggcgaatcaagacttctctgctctgatgcggtcctcgtaccattgcgccatgaataacgagaatgcacggctgcttaccttccagacctggcccctgaccttcctctcacccaccgatctcgccaaggccggattttactacattggaccaggcgaccgcgtggcttgcttcgcatgtggcgggaagctgtccaactgggagcctaaggacaatgccatgtccgagcacctgcggcacttcccaaagtgcccgtttatcgaaaaccaactccaagacaccagccggtacaccgtgagcaacctctccatgcagactcacgcagcgcgcttcaagacgttcttcaactggcctagctccgtcctggtcaaccctgaacagctcgcaagcgcaggcttctactatgtgggaaattcagacgatgttaagtgtttttgttgcgacgggggcctgcgctgctgggaatccggggatgacccgtgggtgcagcatgccaagtggttccctcgctgcgaatacctcatccggatcaaaggtcaggaattcatcagacaagtgcaagcatcttacccgcatctgctggaacagctcctgtcaacctcagactcgccgggggatgaaaatgcagaaagctccattatccacttcgagccgggggaggaccacagcgaggacgccatcatgatgaacacgccagtgatcaatgctgccgtggaaatgggattctcgcggtccctcgtcaaacaaaccgtgcagcgcaaaatcctggcaaccggggaaaactaccgactggtgaatgatctcgtcctggatctgctcaacgcagaagatgagatacgcgaggaggaaagagagagagccactgaggaaaaagaatccaacgaccttctcttgattagaaagaaccggatggccctgtttcaacacctgacgtgcgtgatcccgattcttgactcactcctgaccgcgggaattatcaacgagcaggagcatgacgtgatcaagcaaaagactcaaaccagcctgcaagccagggaactcatcgatactatcctcgtgaaaggtaacatcgcggctaccgttttcagaaattccttgcaagaggcagaagccgtgctgtacgaacatctctttgtgcagcaagacatcaaatacatcccgactgaagatgtctcagacctgccagtcgaggagcagctgcgccggttgcaagaagaacgcacttgcaaggtctgcatggataaagaagtgagcatcgtgttcatcccatgcggacacctggtcgtgtgtaaggactgtgcaccgtcgctgcggaagtgccctatttgtagatccactatcaaaggcaccgtccgaacgtttcttagc

SEQ ID NO: 32270 - DNA, 1812 bp, synthetic construct
  misc_feature 1..1812: note = Description of Artificial Sequence: Synthetic coding sequence
  source 1..1812: mol_type = other DNA
atgaatatcgtagaaaactcgatttttttgagcaaccttatgaagtctgcaaacacgttcgaactcaagtacgatttgtcatgcgaactgtatcggatgagcacctatagcacttttccagccggagtgcccgtgagcgagcgaagtcttgccagagccggcttttattacaccggcgttaatgataaagttaagtgtttctgttgcggactgatgcttgacaattggaagagaggtgacagcccgacagagaagcacaaaaaactgtacccttcctgtagattcgtgcagagtctcaacagcgtgaataacctcgaagctacatcacagccgacattcccatcaagtgttaccaatagtacccattcattactgcccggcactgaaaattctggatactttcggggaagttactccaactcgccaagcaacccagtgaatagcagagccaaccaggattttagtgcactgatgcgctcctcttatcactgcgcgatgaataatgaaaacgcacgtctactgacatttcagacatggcctttgacctttttgtccccaactgatttggccaaggccggattttattatatcggaccgggagacagagtcgcttgtttcgcctgtggggggaagctctctaattgggaaccaaaggataatgctatgagtgagcacctgagacattttccgaagtgtccattcattgaaaaccagcttcaggatactagcaggtacaccgtgtccaatctttccatgcagacacatgctgcaagatttaaaacgttcttcaattggcctagctctgtgctggtgaatcccgaacagctggcctctgctgggttctattatgttggcaattcagacgacgtaaagtgcttctgttgcgacggcgggctgcgctgttgggagtccggcgatgatccctgggtgcagcacgcgaagtggttcccccgttgtgagtaccttataaggattaaaggccaggaattcattagacaggtgcaagcatcatacccccatcttcttgagcagctgctgtctacaagtgacagtccaggtgatgagaacgctgagtcttcgatcatccacttcgagcctggcgaggaccactccgaagatgcaattatgatgaacacccccgtgattaatgccgcagtggagatggggtttagcaggtcactggtgaagcaaacagttcagcgtaaaatattagcaactggagaaaactatcgactcgttaacgaccttgttcttgacctgcttaatgctgaggatgaaattcgggaggaagagagggaaagagcgacagaggagaaggaaagcaacgacttacttctgatccgaaagaacagaatggcactctttcagcatttgacctgtgtgattcccattttagacagcctgctgacggcaggcattatcaacgagcaggaacacgatgttattaagcagaagactcaaacgtctttacaagcacgtgagctgattgatacgatattggtgaaaggcaacatcgcggccaccgtgttcagaaattctctgcaggaggctgaggccgtgctctatgagcacttgtttgtgcaacaggacattaagtacatccctaccgaagacgtaagtgacctgcctgtggaggaacaactgcgacggctgcaagaggagcgtacttgtaaagtctgtatggataaagaagtgagtatcgtctttataccttgcggccatctcgttgtctgtaaggactgtgctccaagtttgcggaaatgtcctatatgtcggtctaccatcaaggggacagtgcgcaccttcctctca

SEQ ID NO: 32271 - DNA, 1812 bp, synthetic construct
  misc_feature 1..1812: note = Description of Artificial Sequence: Synthetic coding sequence
  source 1..1812: mol_type = other DNA
atgaatatagttgagaactctatttttttatccaacctgatgaagtccgctaacacctttgaactcaaatatgacctctcttgtgagctttatcgtatgagtacctattctactttcccggccggagttcccgtgtccgaaaggagtttggctcgagcgggcttctactatactggggtgaacgataaggtaaagtgtttctgctgtggcttgatgctcgacaactggaaaaggggggacagcccaacggagaaacacaaaaagttataccctagttgtaggtttgttcaaagtttaaactctgtaaataacctggaagcgacctcacagccaacctttccaagctccgtcaccaacagcactcactcgttgctgccagggacagaaaacagtggttacttccgcggctcatactccaactcaccttccaacccagtgaactctagagccaatcaagatttcagcgccctcatgcggtctagttaccattgtgcaatgaacaatgagaatgcccgcctgctcacctttcagacctggcctctgactttcctgtctccaactgacttggcaaaggctggcttttactatattggtcctggggaccgcgtggcttgcttcgcttgtgggggaaaactgtcgaattgggaaccaaaggacaacgcaatgagcgaacacctgcgacatttccctaagtgtcccttcattgagaaccagttgcaagacacttcacgctatacagtctccaacctgagcatgcagacgcacgctgcacgctttaagactttctttaactggccgtccagtgtgctggtaaaccctgagcaactggcctctgcgggcttttactatgttgggaacagcgatgatgtgaaatgtttctgctgcgatggagggttgcgttgctgggaatcaggcgacgacccctgggtgcagcacgcgaagtggtttccccgatgtgagtacctcatcaggatcaaaggccaggaattcatccgccaggtgcaggcctcttacccgcacctcttagagcagcttctgtctacctccgattcacctggcgacgagaacgcggagagctctattattcacttcgagccaggagaagatcatagcgaggatgccatcatgatgaacaccccagtcattaacgccgccgtcgaaatgggctttagccgctcactggtaaaacagaccgtgcagaggaagattctagccaccggcgaaaactatcgactcgtgaatgaccttgtgctagatctgctgaacgcagaagacgagattcgagaggaggagagggagcgcgccactgaggaaaaagagtctaacgacttactgctaattcgaaagaacaggatggcactcttccaacacctgacctgtgtaatccccattctggattctcttctaactgctgggattataaatgagcaagagcacgacgtgatcaaacagaagactcagaccagtcttcaagcccgcgagctgatagacacaattcttgtgaagggaaacatcgctgcaacagtcttccgtaactcccttcaggaagccgaagctgtgctgtatgagcatctgttcgtacagcaagacataaaatatattccaaccgaggacgtgagcgatctgcccgtcgaagagcaactccgtaggctgcaggaggaaaggacatgtaaggtgtgcatggacaaggaagtgtcgattgtgttcatcccttgtgggcatctggtggtttgtaaggattgtgcgcctagtcttcggaaatgccctatctgtcgatccactattaagggtactgtgcggacattccttagc

SEQ ID NO: 32272 - DNA, 1812 bp, synthetic construct
  misc_feature 1..1812: note = Description of Artificial Sequence: Synthetic coding sequence
  source 1..1812: mol_type = other DNA
atgaatatcgtggagaattctatctttttgagtaacctgatgaagagtgcgaacactttcgagcttaagtatgacttgagctgcgaactatatagaatgtccacctattcaacttttcctgcaggcgtacctgtgtcagagaggtctctcgcaagagcgggattttattacaccggtgtgaacgacaaagttaagtgtttctgttgtggcctgatgctggataactggaaacgtggtgatagtcctaccgaaaagcataaaaaactgtacccctcctgtcgcttcgtgcagagcctcaatagcgtcaacaacctggaagccacgtctcagcctactttcccctcttcagtaacgaactccacgcattccctattacccggaacggaaaacagcggctactttaggggcagttattctaattcgccgagtaatcctgtgaactctcgggccaatcaggattttagcgccctaatgcggagctcctaccactgcgcaatgaacaatgaaaacgcacgactgctgacctttcagacatggcctctgacatttctgtcccctacagatctggccaaggctggtttctactacatcggcccaggcgatcgggtggcatgcttcgcttgtgggggcaaactgtctaactgggagccgaaggataacgccatgtcagaacatttacggcacttcccaaaatgcccttttatcgagaatcaactgcaggacaccagtcgctacacagtgtccaatcttagtatgcagactcatgccgcacggtttaagacgttttttaactggccatcttccgtcctggtgaaccccgaacagttagctagtgcaggtttctactacgttggcaatagcgacgatgtaaaatgcttttgctgtgacggcgggttacgttgctgggaatctggagatgacccctgggttcagcatgctaagtggtttccgcggtgtgagtatctgattcggatcaaggggcaggaattcataagacaagtgcaggcttcttatccccatctgttagaacagctgctctcaacttctgacagtcctggagatgagaatgcagagagttccatcatccacttcgaacccggggaagaccacagtgaggatgctataatgatgaataccccggtcatcaacgctgccgtcgagatgggattctcaaggagtctggtgaagcagacagttcagagaaagattttggcaaccggcgaaaattacagactcgtaaacgatctagttctggacctcttgaacgccgaggacgagatcagggaggaagagcgggagcgtgccaccgaggaaaaggaatctaacgatcttctgctcatccgtaaaaatcggatggctctgtttcagcaccttacctgtgttattcctattctggactccttgctaaccgcagggatcattaatgaacaggagcacgatgttatcaagcagaaaacacaaactagtctgcaggctcgggagttaattgacaccatcctggtgaagggaaacatcgctgccactgtcttccgaaacagcctgcaggaagccgaggcggtgctgtatgagcatctcttcgtgcagcaggatattaagtatattccgacggaagatgtatctgacctgccagtagaggaacaactcaggcggctgcaggaggagaggacctgcaaggtatgtatggacaaagaagtgtctattgtctttataccttgcgggcatctcgtggtgtgcaaagattgtgccccctcattgcggaaatgtccgatttgccggtcaactatcaagggcactgtgagaacgttcctctct

SEQ ID NO: 32273 - DNA, 1812 bp, synthetic construct
  misc_feature 1..1812: note = Description of Artificial Sequence: Synthetic coding sequence
  source 1..1812: mol_type = other DNA
atgaacatcgtggaaaattcgatttttctttccaacctgatgaagagcgcaaatacctttgagcttaagtacgatctctcgtgtgagctctataggatgagcacttacagcacctttcctgcaggagtcccagtgtcggaacggtcgttggcacgggcagggttctactacaccggtgtgaatgataaggttaagtgtttctgctgcggactgatgcttgataattggaaacgtggagactcgcccacggaaaaacacaagaagctgtacccttcgtgccgcttcgtgcagtcgctcaattcggtcaacaatcttgaagcaacgtctcaacctaccttcccttcgtcggtgactaattcaactcatagccttcttccagggactgaaaactctggatacttccggggatcttattcaaacagcccatcaaacccggttaatagccgagcaaaccaagatttttctgctttgatgagatccagctaccactgcgcgatgaacaatgagaacgctcgactgctgacctttcagacttggccgttgacgtttctgtcgccgactgacctcgcaaaggcaggtttctactacattggccctggagatcgggtggcctgttttgcgtgtggaggtaaactttcgaattgggagccaaaagataacgcaatgtccgagcaccttagacattttcccaagtgtccattcattgaaaatcaactgcaggatacctccagatacactgtgtctaacctgagcatgcaaactcatgcagcccgctttaagaccttctttaactggcctagctcagtgctggttaaccctgaacagcttgcatcggctggattttactacgtggggaatagcgatgacgtcaagtgtttttgctgtgatgggggtcttagatgttgggagtcaggtgatgatccttgggtgcaacatgcgaaatggttcccccgctgtgaatacctgatccgtatcaagggtcaggagttcatcaggcaagtccaagcatcctacccccatctgctggaacaactgctgagcacctccgattcacctggcgacgaaaacgccgagagcagcattattcattttgaaccaggggaagatcattccgaagatgccatcatgatgaataccccagtgattaacgcagcggtggaaatgggtttctcccgcagcctggtgaaacagaccgtgcagagaaagattcttgcgaccggagagaattatcgccttgtgaacgacttggtcctggatcttctgaacgcggaagatgagattcgcgaagaagaaagggagagagcaacggaagagaaggaaagcaacgatctgctccttatcaggaagaatcgaatggcgttgtttcagcaccttacctgcgtgatccccatcctggattccctccttaccgccgggataatcaacgaacaggaacacgatgtgataaagcagaaaacccagaccagcctccaagcgagagagctgatcgataccatcctcgtgaaagggaatatagcagctacggtgttccggaactcactgcaggaagcagaggcagtcctttacgaacacctgtttgtgcaacaagatatcaagtacattcccaccgaggatgtctccgatcttccagtggaagaacagcttagacgcctgcaggaagagagaacttgtaaggtttgcatggataaggaggtgtcaattgtgttcatcccctgtggacatctggtggtgtgtaaggactgtgcaccttcactgagaaagtgccctatttgtcgatcaacgattaaggggaccgtgcgcacctttctttca

SEQ ID NO: 32274 - DNA, 1812 bp, synthetic construct
  misc_feature 1..1812: note = Description of Artificial Sequence: Synthetic coding sequence
  source 1..1812: mol_type = other DNA
atgaatatcgtcgaaaactctatctttctgagcaacctgatgaagagtgcaaatacctttgagcttaagtacgatttgagctgcgagctgtaccgcatgtccacctacagcactttcccagcgggagtgccggtgagcgaacgctcgctggcccgggcgggtttctattacaccggggtcaacgataaggttaagtgcttttgctgcggactgatgctggacaactggaagcgcggagactccccgactgaaaaacacaagaaactgtacccctcgtgtcggttcgtgcagagcttgaactcggtgaataacctggaagctacgtcccagccaacgttcccgtcatccgtgacgaattcgacccacagcttgctgcctggcaccgaaaattccggatacttccggggatcatattccaattcgccctctaatccggtgaatagccgggccaaccaggatttctccgcactcatgcgctcgtcctaccattgcgctatgaacaacgaaaatgcgcgactgctcaccttccagacttggccactgacctttctctcgcccacggatctggccaaggcgggattctactacatcggaccgggggaccgcgtggcctgttttgcgtgtgggggaaagctcagtaactgggaacccaaggacaatgctatgtcggagcaccttcgccatttcccgaagtgcccgtttatcgaaaatcaactgcaggatacctcccgctacaccgtgtccaacctgtccatgcaaacgcacgcggcgagattcaagactttcttcaattggccgagctcggtgctcgtgaacccggaacagctggcatccgcagggttctactacgtgggcaactctgacgacgtgaagtgtttctgttgtgacggtggacttagatgctgggaaagcggcgacgatccgtgggtgcagcatgccaaatggttccctcggtgcgaatacctcatcagaatcaaaggccaggagttcatccgccaagtccaggcgagctacccccacctgctcgaacagctgctctcgacttcggattcccccggggacgagaacgcggaatcgtcaattatccacttcgagccgggagaggatcacagcgaggacgccattatgatgaatacccctgtgattaacgcagcggtggaaatgggattctcaagaagcctggtgaagcagactgtgcagaggaagatcttggccaccggggagaattacagattggtaaacgatctcgtgctggatctgctgaatgccgaggacgaaattcgtgaggaggagagggaacgggcgactgaggaaaaggagtccaacgacctgctgctgattcgcaagaacaggatggctttgttccagcacctgacttgcgtcatcccaatcctcgattccctcctgaccgctggaatcatcaatgaacaagaacatgacgtgatcaaacagaaaactcagacttccctgcaagctcgagaactgatcgatacgatcctcgtgaagggaaacatcgcagccaccgtctttcgaaactcactccaggaagccgaagccgtgctgtacgaacatctgttcgtccagcaagacatcaagtacattcctactgaggacgtctccgatctgcccgtggaggaacagttgcgcagactccaagaagaacgcacctgtaaggtgtgtatggacaaggaggtttctatcgtgttcattccctgcggccacttggtcgtgtgcaaggattgtgctccgtccttgagaaagtgcccaatctgccgctcgactatcaagggaactgtgcgaacttttctctcg

SEQ ID NO: 32275 - DNA, 1812 bp, synthetic construct
  misc_feature 1..1812: note = Description of Artificial Sequence: Synthetic coding sequence
  source 1..1812: mol_type = other DNA
atgaatatcgtggagaactcaatcttcttgtccaatctgatgaagtccgcaaacactttcgaactgaaatatgatttgtcctgcgaactgtaccgtatgagcacatatagcactttccctgcaggcgtacctgtgtctgaaaggtcccttgctcgtgctggtttttactacacaggagttaacgacaaggtcaagtgcttctgctgtggtttgatgttggataactggaagcgtggcgactcccccactgagaagcacaaaaagctgtacccctcctgtagattcgtccagtccctgaattctgtcaacaatctggaggccacctcccagccaacttttccttcctctgtcactaactccacccacagtttgctgcccggcactgagaatagtggctacttccgcggctcctactcaaactcaccatccaatccagttaatagtagagctaaccaagatttttcagcccttatgagaagcagctaccactgcgctatgaacaacgaaaatgctagactgctgacctttcaaacatggcctctgaccttcttgagcccaactgacctggcaaaagcaggtttctactatatcggccccggagatcgtgtcgcctgttttgcttgcggtggcaaactctccaactgggagcccaaggacaacgctatgtctgagcatcttcgccattttcccaagtgcccattcattgagaaccagttgcaagacacttctcgctacacagtgtctaatctgtctatgcaaactcatgccgcccgcttcaaaacctttttcaattggcccagtagtgtcttggtcaaccccgagcagttggcctccgccggcttctactacgtaggtaatagtgatgacgttaagtgcttctgctgcgatggcggccttcgctgctgggaatccggcgatgacccttgggtgcagcacgccaagtggttccccagatgtgaatatcttatacgcatcaagggtcaggagtttataaggcaggtacaggcatcttacccacacctgctggaacagttgctctccactagtgattcaccaggtgacgaaaatgccgagtctagtatcattcacttcgaaccaggagaggaccacagcgaagacgctatcatgatgaatacccccgttattaacgccgcagtggagatgggattttctcgcagtcttgttaagcagactgtgcagcgtaagatcctggccactggtgagaactacagactcgtcaacgatctggtgctggaccttctcaacgccgaagacgaaattagagaagaggagagggagcgcgcaacagaggagaaggaatctaatgatctgttgctgatcagaaagaaccgcatggcattgttccagcatttgacatgcgtgattccaatcttggactcactgctgaccgcaggcattatcaacgaacaggagcacgatgtgatcaagcagaagactcagacatctctgcaggcaagggagctgatagacacaattctggtgaaaggtaatattgctgccacagtgtttagaaacagtttgcaggaggctgaggctgttctgtatgagcatcttttcgtgcagcaggatattaaatatatccctaccgaagacgtctcagatctgcctgtggaagagcagctgcgtaggctgcaggaggagcgtacctgtaaagtgtgtatggacaaggaagtgtccatagtcttcattccctgcggacacctggtcgtgtgtaaggactgtgctccctctctgcgtaaatgtcccatatgtagatccaccatcaaaggcaccgtgcgcacttttctttcc

SEQ ID NO: 32276 - DNA, 1812 bp, synthetic construct
  misc_feature 1..1812: note = Description of Artificial Sequence: Synthetic coding sequence
  source 1..1812: mol_type = other DNA
atgaatattgtggagaacagcatttttctttcaaacttgatgaaatcagccaatacttttgaacttaagtacgatctgagttgtgaactgtatcgaatgtcgacttactcgactttcccggccggagtgcctgtgtcggagagatccttggcaagggcgggtttttactacaccggagtgaatgacaaagtcaagtgcttctgttgtggcctcatgttggacaactggaagaggggagactcgcccactgaaaaacacaaaaagctgtacccaagctgtaggtttgtgcaatccctgaatagcgtcaacaacctggaagcgacctcccagcctacctttccttcctcagtgaccaattcaacccatagcctgcttcctggcaccgaaaattcgggatactttcgaggatcgtactccaactcgccttcgaaccctgtcaattccagggcaaaccaagatttttccgcactcatgaggagctcataccattgtgccatgaacaatgaaaacgcaaggttgttgaccttccagacttggccacttacttttctttcccccactgatctcgcaaaagcgggattctactacataggtcccggagacagagtcgcatgtttcgcatgtggtgggaagctgtcgaactgggaacctaaggataacgcaatgtcagagcatcttcggcattttccgaaatgtccattcattgagaaccagcttcaggacacgtcaagatacactgtctcgaatctgtccatgcaaacgcacgcagcgcgcttcaagactttcttcaattggccgagctcggtgctcgtcaacccagagcagcttgcgtcagcaggattctattatgtgggcaacagcgacgacgtgaagtgcttttgctgtgacggaggtctgaggtgttgggagtcaggtgatgacccctgggtgcaacatgcaaaatggtttccaaggtgtgaatacctcattaggattaagggacaagagtttatcaggcaggtccaggcttcctacccgcaccttcttgaacaactcctttcaacctccgactcccctggtgatgaaaatgctgaatcatccattatacatttcgagccaggcgaagatcattcggaagatgcaatcatgatgaacactcctgtgattaatgcagctgtggagatggggttttcgcgctcactcgtgaagcagacggtccaacgcaagatattggcaaccggagaaaactaccggcttgtgaacgaccttgtgctcgatctgttgaacgccgaagatgaaattagagaagaggaacgtgaaagagcaaccgaggagaaagagtccaacgatctccttcttatcagaaagaataggatggccctgttccaacacctgacttgtgtgatcccaattctggattccctcctcacggccggtatcattaacgagcaagaacacgacgtcatcaagcaaaagacgcaaactagccttcaggcccgggaactgatcgataccatacttgtgaagggtaacatcgccgccaccgtctttagaaactcgctgcaggaagcagaagccgtgctgtacgagcacctcttcgtgcaacaagacattaagtatattcctactgaggacgtgtcggatctgccagtggaagagcagctcagaagattgcaagaggaacgtacttgtaaagtgtgcatggacaaagaagtctctattgtctttatcccgtgcgggcatctggtcgtgtgcaaggactgtgcgcctagccttagaaagtgtccaatctgtagatccactattaaggggaccgttcgcacgtttctgtcc

SEQ ID NO: 32277 - DNA, 1812 bp, synthetic construct
  misc_feature 1..1812: note = Description of Artificial Sequence: Synthetic coding sequence
  source 1..1812: mol_type = other DNA
atgaatatagtcgagaattctatcttcctctcgaacctcatgaagtctgccaatactttcgaactgaagtacgacttaagctgtgagctgtatcgtatgtcaacatactcaactttcccggccggcgtccccgtctctgaaaggagcctcgcccgtgctggcttctactataccggcgtaaacgataaagttaagtgcttttgctgtggcctcatgctcgataattggaagcgcggcgattccccaaccgaaaaacacaagaagctgtatccctcatgtcggtttgtgcagtcactgaacagcgtgaacaatttggaggcaacttcacaaccaaccttccctagcagcgtgaccaactctacccattccttgctacccgggacagaaaactctgggtactttcgggggagttactctaactcgccgagtaaccccgtcaactcccgtgccaatcaggacttctccgccctcatgcggtcatcctatcattgtgcgatgaacaacgagaacgctcggctgctgacctttcagacgtggcctctaaccttcctgtcacccactgatctcgcgaaggcaggtttctattatatcggcccgggcgaccgcgtggcttgctttgcctgcgggggcaaactttccaactgggaacctaaggacaacgcgatgtccgagcacctgcggcatttccccaaatgtcccttcatcgagaaccagctccaggacacatcccgctacaccgtctcgaatttgagtatgcagacccatgccgccaggttcaaaacattttttaactggccgagttctgtactggttaatcctgaacagctcgcaagtgccgggttctactacgttgggaattccgacgacgtaaagtgcttctgctgcgacggaggacttcggtgctgggagtcgggagatgatccctgggtccagcatgcaaagtggtttccaagatgcgagtatcttattagaattaaaggacaggagttcattcgccaggtgcaggctagttaccctcatctgctagagcagctgttgtccacaagtgatagtcccggcgatgaaaacgcagagtcctctataatccatttcgagccaggtgaagaccactcagaggacgccattatgatgaacactcctgttatcaacgctgcagttgagatgggcttctctcgttccctggttaagcagacagtccagcgcaagattctggcaactggcgaaaactatcggctggttaacgaccttgtgctcgacctgcttaacgcggaggacgaaattcgcgaggaagaaagggagagagccacagaagaaaaggagtcaaatgacctcctgctgatccgcaaaaatagaatggcactgttccagcacctaacatgtgtgataccgattctagactccctgctcaccgcgggaattataaatgagcaagaacatgacgtcattaagcagaagacccagacgagcctgcaggcacgcgagcttatagatacaatcctggtgaaggggaatattgctgcgaccgtgtttcggaattctcttcaggaggccgaggctgtactttatgaacatctgtttgtgcagcaggatataaagtacattcccacggaggatgtgtcagatctgcctgttgaagagcagctgaggaggctgcaggaggagcgaacatgcaaggtctgtatggacaaggaggtgagcatcgtatttattccctgtggtcacctcgtggtctgtaaagattgcgccccgagcctgcggaagtgtcccatttgccgctctacaatcaagggtacagtcagaacatttctgagc

SEQ ID NO: 32278 - DNA, 1812 bp, synthetic construct
  misc_feature 1..1812: note = Description of Artificial Sequence: Synthetic coding sequence
  source 1..1812: mol_type = other DNA
atgaatattgtcgagaattccattttcctttcaaatcttatgaaatccgccaacacctttgagctcaagtacgacctcagctgcgagctctatcgcatgtccacgtacagcaccttccccgctggcgtccctgtatccgagcgttcgctggcccgagccggtttctactacacgggcgttaatgataaggtcaaatgtttttgttgcggtctaatgctggacaactggaagcgcggcgattctcccaccgagaaacataagaagttgtaccctagttgtcgcttcgtgcaaagcctgaactccgtaaataatctcgaggctaccagccaaccaacattcccttcgagcgttacgaactctacccactcccttctgcccggcacagagaatagtggatactttcgtggcagctacagcaactctccctccaaccccgttaactctcgcgcgaaccaggactttagcgctctgatgcgcagttcctaccactgcgccatgaacaatgagaacgcccgcttgctaacattccaaacctggcccctcaccttcctgtctcccaccgacttggcgaaggccggcttctattacatcggtccgggtgaccgcgttgcttgcttcgcctgcggtggtaagctatccaactgggaacccaaagataatgctatgtccgaacacctgcgtcacttccccaagtgccccttcatcgagaaccagctgcaagatacgagccgctacactgtctccaacctttccatgcagactcacgctgcccgcttcaaaacgttctttaactggccatcctccgtgctggtgaacccggagcaactagcctccgcaggtttctactacgtaggcaactctgatgacgtgaagtgtttctgctgtgatggcgggctccgctgctgggagtctggtgatgacccttgggttcagcacgcgaagtggttcccgcgctgcgagtatctcatccgtatcaagggacaggagttcatccgccaggtgcaagcgagctaccctcatctgctcgagcagcttctgtcgacttccgacagccctggagacgaaaacgctgagagctccatcattcacttcgagcccggtgaggatcactcggaagatgcgattatgatgaacaccccggtaatcaacgccgcggtcgagatgggtttttcacgcagcctcgtcaagcaaaccgtccagagaaagatccttgccactggagagaactaccgcctggtgaacgatctcgtcctcgatctccttaacgccgaagatgaaatccgcgaggaggagcgagaacgcgctaccgaggagaaggagtcaaatgacctgctgttgattcgtaagaaccgcatggccctgtttcagcacttgacgtgcgtcatccccatcctcgattcgctactgactgctggaatcattaatgagcaggagcacgatgtcattaagcagaagactcagacgagcctccaggcgcgtgagctcattgacaccatccttgtaaagggaaacatagctgccacagtgtttcgcaactcactgcaggaagcagaagctgtcctctatgaacacctgttcgttcagcaggacattaagtacatcccaaccgaggacgtttccgatctccccgtcgaggagcagttgcgccgattgcaggaagaacgtacgtgtaaggtctgcatggataaggaagtttctattgtcttcatcccttgcgggcatctggtggtctgtaaggattgtgccccaagccttcgcaaatgccccatctgccgttccaccatcaaggggaccgtccgtacattccttagt

SEQ ID NO: 32279 - DNA, 1812 bp, synthetic construct
  misc_feature 1..1812: note = Description of Artificial Sequence: Synthetic coding sequence
  source 1..1812: mol_type = other DNA
atgaacatcgtcgagaattccatcttcctatcgaacttgatgaaaagcgcaaacaccttcgaactgaaatacgacctgtcttgcgagctgtataggatgtctacctatagcacattccccgccggagttccggtatctgagaggtccttggcccgtgcaggcttttattacaccggcgtaaacgataaggtaaaatgcttttgttgtgggttgatgctagacaattggaagcgcggagattcacctaccgagaagcataaaaagctgtatccgtcatgtcgatttgttcagagcctgaactccgtcaacaacctggaggctacctctcagcctacattccctagtagtgttaccaactctacacactccctcctgcccggcacagagaattcagggtatttcagaggctcatacagtaattcgccgtcaaacccggttaactctcgggcaaaccaggatttctcagccttgatgcgctctagctaccattgcgcgatgaataatgagaacgctcgcctactcacattccagacttggcccctgactttcttgagccccaccgacctggccaaggcgggtttctactacatcggccctggagatcgggtagcatgtttcgcatgtggcggcaaactgtccaattgggaacccaaggacaacgcaatgtccgaacatttacggcactttcccaaatgcccatttattgagaatcagcttcaagacacgtctcgctacaccgtatcgaacctatccatgcagacccacgctgcccgtttcaaaactttctttaactggccctcctctgtgcttgttaatccggagcagctcgcctcagcaggattttactatgttggcaactctgatgacgtcaaatgcttctgctgcgatggcggactacggtgctgggagtcaggtgatgacccctgggtacagcacgccaagtggttccccagatgtgaatacctgatccggatcaaaggccaggagtttatacgccaggtgcaggcatcatacccacaccttttggagcagctgctgagcacctcggacagtccaggggacgaaaatgcagaatcctccataatccattttgagccaggagaagaccactcggaggatgcaattatgatgaatacaccagtcattaatgcggccgtcgagatggggttctcacggagcctcgtcaagcaaaccgtacagcggaagatcctagcaaccggcgagaattaccgcctggtgaacgacctggttctggacctcctgaatgccgaagacgagatccgcgaagaggagcgtgagcgcgccactgaagagaaggaaagcaatgacctgctgctgattcggaaaaatcgcatggcactctttcagcacctcacatgcgtgatacccatccttgatagcctgctgaccgctggaatcatcaatgagcaggaacatgacgttattaaacagaagacacagacctccctccaggcccgcgagcttatcgacactatactggtgaaggggaatattgccgctactgtttttcggaattcactacaggaggcggaggctgtcttatacgagcacctgtttgtacaacaggacatcaaatacataccaacagaggatgtgtcggatctgcctgttgaggagcagcttcgcagactgcaggaagaacgcacgtgtaaagtctgcatggataaggaagttagcatcgtctttatcccttgcggacatcttgtagtatgcaaggattgtgccccaagtctgagaaagtgccccatctgcaggtccacaatcaaagggacggttcgaaccttcctgtca

SEQ ID NO: 32280 - DNA, 1812 bp, synthetic construct
  misc_feature 1..1812: note = Description of Artificial Sequence: Synthetic coding sequence
  source 1..1812: mol_type = other DNA
atgaatatcgtggaaaactcaattttcctctctaacttaatgaagtctgctaacacgtttgaacttaagtacgacctgtcctgcgagttatacagaatgagcacatactctacgtttccagccggagtcccagtgtcagaacggtcactggcacgggccggcttctactataccggtgttaacgataaggtaaaatgtttctgttgtggtctgatgcttgacaactggaaacggggtgactctcccaccgaaaaacacaaaaagctgtatcccagttgcaggttcgtgcagtctctgaattctgtgaataacctggaagcaactagccagccaacattcccgagctcggtgaccaacagcacgcactcattactgcccggcacggagaatagcggttattttcgcgggagctactctaactctccttccaaccccgtgaactcgcgcgccaatcaggatttcagcgccttgatgcgaagctcgtatcattgtgccatgaataatgagaacgccaggctgctgacattccagacatggccactcaccttcttgtcccccaccgatcttgcaaaggccgggttctactatataggccccggcgaccgagtggcttgtttcgcctgtggcggcaaactgtctaactgggaacctaaggacaacgcgatgtccgagcatctaaggcacttcccgaagtgcccttttatcgaaaaccagctgcaggacacatcgaggtacaccgtgagcaacttatcaatgcagacacatgcagcccgattcaagaccttcttcaactggcctagttctgtgttagtcaatcccgagcagttggccagtgcaggattttattacgtgggtaattccgatgatgtaaaatgcttctgttgtgacggtggcctaagatgttgggaatcaggtgacgacccatgggtccagcacgcaaaatggttccccaggtgtgaatacctaattaggattaagggtcaggaattcatccggcaggtgcaggccagctatccacatttgctggaacagctcctgtcgacctccgattctcccggtgatgaaaacgccgagagctctatcatccatttcgagccaggggaggaccactctgaagatgcaatcatgatgaatacgccagtcattaacgccgctgtggagatgggcttcagcaggtcgcttgtaaaacagacagtccaacgcaaaatccttgccaccggcgagaactatcgcctcgtgaatgacctggtgctggacttgcttaatgccgaggatgagatcagagaagaagaacgcgaaagggccactgaagagaaggagtctaatgacttattgctgatccgtaaaaatcgtatggcactctttcagcacctgacctgcgtcatccccatcctggatagcctcctgactgccggcatcattaacgagcaagagcacgacgtcatcaagcagaaaacccaaactagcctgcaggctagggagctcatcgacaccatcttggtgaaagggaatatcgctgccaccgtgttcagaaattccctccaagaagccgaagccgtactttacgaacacctatttgttcaacaagacattaaatatattccaacagaggatgtgagcgacctgccagtagaagaacagctgcgccggttacaggaagagcgcacctgcaaagtgtgcatggataaggaggtctctatagtcttcatcccatgcgggcacctcgtcgtatgtaaagattgtgcgcccagcctccgaaagtgtccgatctgtcggtcaacgataaaggggaccgtccgcaccttcctcagc

SEQ ID NO: 32281 - DNA, 1812 bp, synthetic construct
  misc_feature 1..1812: note = Description of Artificial Sequence: Synthetic coding sequence
  source 1..1812: mol_type = other DNA
atgaatatcgtggaaaactctatttttttgagcaacttaatgaagagcgcaaacacatttgagcttaagtacgacctgagttgcgaactctacagaatgtctacatacagcactttccccgccggcgttcccgtgagcgagcgatctctggcaagagccggcttttactatacaggggtgaatgataaggtaaaatgtttttgttgtggtttaatgttagacaactggaaaaggggagactcaccaacagagaaacacaagaagctctacccatcttgtagatttgttcagagtctgaacagcgtcaacaatctagaagcaaccagtcaaccaacctttccctctagtgtgaccaattccacccatagtctactacccggcaccgagaattccggttatttccggggcagctatagcaattccccatccaatcccgtgaactcacgcgccaatcaggacttttctgctctgatgcggtcctcctaccattgtgctatgaataacgagaatgccagattattaacttttcagacatggccactgacttttttatcaccaaccgacttagctaaggctggattctattatattggccctggcgaccgcgttgcctgcttcgcttgtggcgggaagctaagcaattgggagcctaaagacaatgccatgtctgaacatctgagacacttccctaagtgcccatttatcgagaatcagctgcaggacacctcccgatataccgtttctaacctgtccatgcagactcatgctgccagattcaaaactttctttaactggccctcaagtgtactcgtgaatcccgagcaattagcttctgccggattttattatgtgggaaactctgacgatgtgaagtgcttctgctgcgacggtggcctccggtgctgggagagcggtgatgatccatgggtgcaacatgcaaagtggtttccacgatgcgaatatctcattcggattaaaggacaggaattcattagacaggtacaggcctcttatcctcacctactggagcagctactcagtacatcagatagcccgggcgatgaaaacgccgagtcctccattatacatttcgagcctggcgaggaccatagcgaagacgctataatgatgaatactccagtcataaatgctgccgtggaaatgggctttagcaggagcctagtgaaacagacagttcagaggaaaatccttgctaccggtgagaactaccgactggtgaatgatctggtcctggacctgctgaatgccgaggacgagatccgagaagaagagagagagcgtgctaccgaggaaaaggagtccaacgacctgctgctcatacggaagaacaggatggccctgtttcagcatcttacctgcgtgattcctatactcgactccctactgacagctggcattattaatgaacaggagcatgatgttataaaacaaaagacacagacctccctgcaggcccgcgaactaattgacaccatactggtcaaaggtaacatagctgccactgtgtttcggaactcactacaggaggctgaagcagtgctgtatgagcacctgtttgtgcaacaggatattaagtacatacctacagaagacgtgtctgatctaccagtcgaggagcaactgcggcgcctccaagaggagcgcacctgtaaggtgtgcatggacaaggaagtatccatcgtattcatcccatgcggccatttagtggtgtgcaaagattgtgctccttctctgagaaagtgtcccatttgtaggtctactatcaaggggactgtgaggacttttctatcc

SEQ ID NO: 32282 - DNA, 1812 bp, synthetic construct
  misc_feature 1..1812: note = Description of Artificial Sequence: Synthetic coding sequence
  source 1..1812: mol_type = other DNA
atgaacattgtggagaattcaatttttctgagcaacctgatgaagtccgccaatacctttgagctaaaatatgacctgtcctgcgaactatataggatgtctacctacagtacgttcccggcgggggtgcctgtaagcgagagaagcctggctcgcgctggcttctactacacaggtgttaacgacaaggtgaagtgcttctgttgtgggctgatgttggacaactggaagcgaggggattctcccacggaaaagcacaaaaagttgtatcctagttgcaggtttgtacagagcctgaacagtgtgaataatttggaggccacatctcaaccaacattcccttccagtgtcaccaactcaacacacagcttattgcccggcactgaaaatagtggatactttaggggctcatactcaaactcgcccagcaaccccgtcaatagtagagccaaccaagatttttcagcactgatgagatcctcctatcattgcgcaatgaacaatgaaaatgcaagactgctcaccttccagacttggcccttgaccttcctaagtccaaccgaccttgccaaagctgggttttattacatcggaccaggcgatagagttgcctgcttcgcttgtggaggaaaactcagcaattgggagcctaaggacaatgcgatgagtgaacatttgcgacattttcccaagtgcccatttatcgagaatcagctgcaggacaccagtcgatataccgtgagcaatctctccatgcaaacccacgccgccaggttcaagacctttttcaattggcctagcagcgtcctcgtgaacccagagcagcttgcctctgctggattttactacgttggcaactctgacgacgttaagtgcttttgttgtgatgggggccttcggtgctgggagagtggagatgacccttgggtgcaacatgccaaatggtttcccaggtgcgagtatcttatacgtataaagggacaggagtttataaggcaggtccaggcatcatacccccacctgctggagcagctgctgtctacttccgattctcctggcgacgagaacgctgagtcatcaattatccacttcgagcctggagaagatcacagtgaggatgccatcatgatgaacactccggtgataaacgcagccgtggaaatggggttcagtcgcagtctggtgaagcaaaccgtgcagcggaagatcctggcaaccggagagaactatcgcctggtaaacgacctggtactggatctgctaaacgccgaagatgagattcgagaagaagagcgcgaacgcgcgacagaagaaaaagaaagcaacgacctattgctgattcgaaaaaataggatggcactgtttcagcatctaacttgcgtgattcctattttggattcgcttcttaccgcgggcataattaacgaacaggaacacgatgttattaagcagaagacacagacgtctcttcaggcccgggaactcattgacaccattctggtcaaaggcaatattgccgcaactgtgttccgcaattcactacaggaggcagaggctgtgctgtatgagcacctgttcgtgcagcaggatatcaaatacatccctacggaagatgtcagtgatttgccagtcgaggagcaactcaggagactccaggaggagcgcacatgcaaggtctgcatggacaaagaagtgagcattgtgtttatcccttgcggtcatctggttgtgtgcaaagactgtgccccgtcgctccgcaagtgccccatctgccgttcaacaatcaaaggcactgttaggacatttctgtcc

SEQ ID NO: 32283 - DNA, 1812 bp, synthetic construct
  misc_feature 1..1812: note = Description of Artificial Sequence: Synthetic coding sequence
  source 1..1812: mol_type = other DNA
atgaatatcgttgagaatagcattttcctgtcaaatctgatgaaatccgccaacacctttgagctgaagtatgacctcagttgtgaactgtatcgcatgagtacctatagcacatttccagcaggcgtgcctgtgtcagagaggtcccttgcacgggcggggttttattacacaggggtcaatgacaaagtcaagtgcttttgctgtggactcatgttggacaattggaagcgcggagactcaccaacagagaagcataagaaactttaccccagctgtcgctttgtgcaaagtttaaactcagttaataatctggaggctacctcccagcctaccttcccctcctccgtgacaaactctacccacagtctgctgccaggaaccgaaaacagcggatatttccgtggaagttacagcaatagtcctagcaacccagtgaattcgagagccaaccaagactttagcgcactgatgcgtagcagctaccactgcgccatgaataacgagaacgcacggttactgacctttcagacatggccactcacgtttctctctccaacggacctggcaaaagcaggtttctattatattggacccggggatcgcgtagcgtgcttcgcctgcggtggaaagctgtctaactgggaacccaaggataatgccatgagcgagcaccttcgccatttccctaagtgcccctttatcgagaatcagctccaagacacttccaggtataccgtttccaacttgtctatgcagactcacgcagcaagatttaagacatttttcaactggccctctagcgtgttggtcaacccagaacaactggcatcggcaggattttactacgtgggaaactccgatgacgtcaaatgtttctgctgtgatggagggctgagatgttgggaaagtggagacgacccctgggtgcaacatgcaaagtggttcccgcgctgcgagtatctcatacgcataaaggggcaggagttcattagacaagtccaggcatcctatccccatctgttggaacagcttttatctacttccgactcccccggggatgaaaacgctgaaagtagcatcattcattttgagcccggagaggaccattctgaagatgccatcatgatgaacactcccgtaatcaatgcagcagtagaaatgggtttctctaggagcttagtcaaacagacagtgcagcggaagatacttgcgaccggagaaaattatcgcctggtgaatgacctagttcttgaccttctgaacgcggaagatgaaattagagaagaagagagagagagagctactgaggaaaaggaatctaatgatttgctgctcattcgtaagaatagaatggctctattccagcacttgacctgcgtaatcccgattctcgattcgctcctgaccgccggcatcatcaatgagcaggaacatgacgtgatcaaacagaagacccagacatcgctccaggccagagagcttatcgacaccattcttgttaagggtaacattgctgctacggtgttccgcaatagcctgcaggaggctgaagctgtgctctacgaacatctgttcgtacagcaggacatcaaatatattcccacggaggacgtgtccgacctgcccgtggaagagcagctaagaagactgcaggaagaaagaacttgcaaggtctgtatggacaaggaggtctctatcgtattcattccgtgcggacacctggtcgtctgcaaagattgcgccccttctctaaggaagtgccccatttgccgctccacaatcaagggcactgtcagaacctttctgtct

SEQ ID NO: 32284 - DNA, 1812 bp, synthetic construct
  misc_feature 1..1812: note = Description of Artificial Sequence: Synthetic coding sequence
  source 1..1812: mol_type = other DNA
atgaacatagtggagaattccatatttctgtccaatctaatgaaaagtgctaacactttcgagttgaagtacgacctctcttgtgaactgtatagaatgtcgacctattcaacctttcccgccggagtgcccgttagcgagaggtctctggctagagccgggttctactatacaggggtcaacgacaaggtgaaatgtttttgttgtgggctgatgctggataactggaaacgaggagattcacctactgaaaagcacaagaagctgtacccgtcttgccgatttgtccaaagcctgaacagcgttaataatttggaagccacaagtcagccgactttcccaagttccgttactaatagcacccactcgctgcttcctgggaccgagaatagcgggtacttccgaggatcttatagtaatagcccgagtaacccggtcaactcaagggctaaccaggattttagcgcattaatgaggtcttcctaccattgcgcaatgaacaatgagaatgctcgattgctgaccttccagacgtggccccttacatttctgagccccactgacctcgcaaaggcaggtttctattatattggtcccggtgatagggttgcttgcttcgcatgcggcggaaaattatctaattgggagcctaaagataacgctatgtccgaacatctgcgtcattttccaaaatgtcctttcattgaaaatcagctgcaggacacctcgagatataccgtgtctaacctgtcaatgcagacccacgccgccagatttaagacctttttcaactggccttctagcgtgctggtgaatccagagcagttggcctccgcagggttttattacgttggtaactctgacgacgtgaaatgtttctgctgcgacgggggtctcaggtgttgggaaagtggagatgatccttgggtccaacacgccaaatggttccccagatgcgagtatttgattagaatcaaggggcaggaatttattcggcaagtacaggcaagctaccctcatttactggagcagctcctgagcacatccgatagcccaggggatgagaatgcagagtctagcattatacacttcgaacccggcgaggaccacagcgaagatgctatcatgatgaatactcccgtgattaacgcagccgtcgagatgggcttcagtagatcccttgtcaaacaaacagtccagcgtaagattctggcaaccggcgagaattaccgtttagttaatgacttggtactcgatctgctgaacgcagaagatgagataagggaggaggaaagagaacgtgcgacagaggagaaggagagcaatgatctgctgctcatcagaaaaaacagaatggcattgttccagcatctgacttgtgtaattcccatcctggacagcctgctgaccgccggcatcataaacgagcaggaacatgatgttataaaacagaaaacccagacctccctacaggcacgagagcttatcgataccattctagtcaaggggaatatcgcggctactgtcttcagaaattctctgcaggaagccgaggcggttctgtatgagcatctgttcgttcagcaggacattaaatatatcccgacggaagacgtgtctgatctgcctgtagaagaacaactgcgacggttgcaagaggagcgcacatgtaaggtgtgcatggataaagaggtgtctattgttttcataccgtgtgggcacctggtggtgtgcaaagactgcgcaccaagcctcaggaaatgccccatttgtcgctccacaattaaaggtacagttcgtaccttcctgagc

SEQ ID NO: 32285 - DNA, 1812 bp, synthetic construct
  misc_feature 1..1812: note = Description of Artificial Sequence: Synthetic coding sequence
  source 1..1812: mol_type = other DNA
atgaatattgtggagaattcaatcttcctgtccaatttgatgaaatccgccaacaccttcgagctgaaatatgatctatcttgtgaactatacagaatgtcaacttattcgacttttcccgcaggtgtgcctgtctcagagcgcagccttgccagggcagggttctattataccggagtgaatgataaagtcaagtgtttttgctgtggcctcatgctcgataactggaagaggggggactccccgactgagaaacacaaaaagctgtatccttcgtgtaggttcgtgcaatctctcaacagtgtcaataacttagaggccacatcccagccgacatttccaagcagcgtgactaacagtacccatagtctgctgccaggaacagaaaactctggatattttcggggaagttattctaattcccccagcaacccggtgaactctcgcgccaaccaggacttttccgctctcatgaggagttcctatcactgtgctatgaacaatgaaaatgccagactcctcactttccagacttggcctctcacctttctgtcccctactgacttagcaaaagcagggttttactatatcggccctggcgaccgcgtcgcctgctttgcctgtggcggaaaactcagcaactgggagccgaaggacaacgccatgagcgagcatctgcgccactttcccaagtgtccatttatcgaaaatcagctccaggacactagcagatatacagtgagtaatctgtcgatgcagactcacgcagctagatttaagactttcttcaattggcccagctctgtacttgtcaatccggaacagctggcctcagccgggttctactacgtaggcaattccgatgacgtcaagtgtttctgttgtgacggtgggctccgttgttgggagagtggtgacgacccttgggtccagcacgctaagtggtttccgaggtgtgagtatctgattcgcatcaaagggcaggagtttatcaggcaggtgcaggcctcctacccacatcttcttgaacagctactttccacttcggatagtcctggtgatgagaacgccgaaagttctataattcactttgagccgggcgaggaccattctgaggatgctattatgatgaatacgcccgtgattaatgctgctgtggaaatgggtttcagccgctcactcgtgaaacagactgtccaaaggaagatcttggctacaggagaaaattaccgcctcgttaatgatctggtcctcgatttgctgaacgcagaggatgaaatccgagaggaggagagggaacgcgcaacagaggagaaagaatccaacgacctactgcttattcgtaagaaccggatggctctattccaacacctgacttgtgtcatacccattctagactctttgctgaccgctggcatcatcaatgaacaagagcatgacgtaataaaacagaaaacacaaacctccctgcaggcacgagaactgattgacactatcctggtcaaagggaacatcgccgcaactgtgttcagaaatagcctgcaggaggctgaggctgtcttgtacgagcacctgttcgtgcagcaggacatcaaatacattccaaccgaagacgtctccgacttgccggtggaggagcagcttcgaagactccaggaagagcggacatgtaaagtgtgcatggataaggaggtctcgattgttttcattccatgtgggcacctggtcgtctgcaaagactgcgcccccagtctccgtaagtgccccatttgccggagcaccatcaaagggaccgttagaacctttctgtct

SEQ ID NO: 32286 - DNA, 1812 bp, synthetic construct
  misc_feature 1..1812: note = Description of Artificial Sequence: Synthetic coding sequence
  source 1..1812: mol_type = other DNA
atgaacatcgtggaaaattctatttttctgagtaacctaatgaagtccgcaaatacattcgaacttaaatacgatctgtcatgcgagctgtaccgaatgtctacgtacagcacctttcctgccggggtcccggtcagcgagcggtctctggctagagcaggtttttactataccggcgtcaacgacaaggtcaagtgcttctgttgtggtcttatgttggacaattggaagagaggtgattcacccaccgaaaaacacaaaaaactatacccgtcttgccgctttgtacagtcattgaactcagtaaacaacctcgaggccacctctcagccgacttttccatcatctgtaacgaactcgacacattctcttctgccgggcaccgaaaattctggatatttcaggggctcttatagtaactcaccctccaatcccgttaatagtagagctaatcaggacttctccgctctgatgcgctccagctaccattgcgcgatgaacaatgaaaacgcaagactactgacctttcagacctggccactaaccttcctttctccaaccgacttggccaaggccggcttttattacattggcccaggtgacagagtggcttgtttcgcctgcggcggcaaattgtccaattgggaacctaaggataacgcgatgtctgagcatctgcgacacttccccaagtgccccttcatagaaaatcagttgcaggatacttccaggtacactgtgtcaaacctcagcatgcagacccatgccgctcgcttcaagactttctttaactggccaagcagcgtcctagtgaacccagaacaactggcctcagcgggcttttactacgtgggtaactcagatgacgttaaatgcttttgctgcgacggtggtctgcgctgctgggagtctggtgatgatccgtgggtacagcatgccaaatggtttcctagatgtgagtatttgattcggatcaagggccaggagttcatccgccaggtccaagcttcttatccacatctactcgagcagctcctgtcaacatcagatagccccggagatgaaaatgccgaatcatctatcatccattttgagcctggcgaagatcacagcgaagatgctattatgatgaacaccccggtaattaatgccgccgtggaaatggggttttcccgctctctggtcaaacagacagttcagagaaaaatcctagctaccggggagaattatcgtttggtaaacgatctggtgctggatctgctgaacgccgaggatgagatacgagaggaggagcgtgagcgggctacagaggaaaaggaaagtaacgacctgctgctgattcgaaaaaacaggatggccctgttccaacatctcacctgcgtaatccccattctggacagcctgctgaccgccgggattatcaatgaacaggagcatgacgtgattaagcagaagactcagacaagcttgcaggctcgggagcttattgacactattctggtcaaaggcaacattgcagccactgttttccgtaattcacttcaagaggcggaagcagtcctctatgaacacttattcgtccagcaggatatcaagtatattcctacggaggacgtttctgacctgcccgtcgaagagcaactccgaaggctccaagaggagagaacctgtaaggtgtgcatggataaggaagtgagcattgtttttattccctgtggtcatctggtcgtttgcaaagactgcgcccctagtctcagaaagtgccccatctgtagatcgacgattaagggcactgtgaggacgtttctgagc

SEQ ID NO: 32287 - DNA, 1812 bp, synthetic construct
  misc_feature 1..1812: note = Description of Artificial Sequence: Synthetic coding sequence
  source 1..1812: mol_type = other DNA
atgaacattgtcgagaactcgattttcctgtccaaccttatgaaaagcgcaaatacttttgagttgaagtacgacctgtcgtgtgagctttaccgcatgtctacgtactccaccttcccagcaggggtgcctgtgtcggagagatcactggcacgcgccggcttttactacaccggagttaatgataaggtcaagtgcttctgttgcggactgatgctcgataattggaaaaggggtgattcgcctactgaaaagcacaagaaactttaccctagctgtcggtttgtgcaatccttgaactcggtgaacaacctggaagccacctcgcaacccactttcccatcgagtgtcacgaatagcacgcactccctcttgcccggaaccgaaaactcgggatactttaggggttcctactcgaactccccttcaaatcccgtcaacagcagagctaaccaggatttctccgcactgatgcgctcatcgtaccattgtgctatgaacaacgagaacgctaggctgttgactttccaaacctggccacttacttttctgtcgccgaccgacctggcaaaggcgggattctactacatcggaccaggggaccgcgtggcatgctttgcatgcgggggaaaactcagcaactgggaacctaaggacaacgcaatgtccgagcatcttcgacacttcccaaagtgcccctttatagagaaccaacttcaagatacttccaggtatactgtgtcgaatctgagcatgcagacgcacgcagcaagatttaagaccttcttcaattggccttcttcggtcctcgtgaatccagaacaactcgcatccgccggtttttactacgtgggtaacagcgatgacgtcaagtgcttttgttgtgatggaggactgagatgttgggagtccggagacgatccttgggttcagcacgccaaatggttcccaagatgtgaataccttatccgtatcaagggacaagagttcattagacaggtgcaagcctcctacccccatctcctggaacaacttctttcaacttccgactcgccaggagatgaaaacgccgaatcctcgattattcatttcgaaccaggggaagatcactccgaggacgcaatcatgatgaatactcccgtgattaacgcagcagtggagatgggattttcacgctcccttgtgaagcagactgtgcaacgcaagatactcgccactggggagaactatcgactggtcaatgacctggtgcttgatctccttaacgccgaagatgagatcagagaggaagagcgcgaacgagcaaccgaagagaaagagtcgaacgacctccttttgataaggaaaaatcgcatggcactttttcagcatctgacttgcgtgataccaattttggactcgctccttactgcaggaatcataaacgaacaagaacatgatgtcattaagcaaaagactcaaaccagccttcaggctcgcgaacttatcgacactatcctggtgaagggcaacatcgccgccactgtttttcgtaactctttgcaagaagcggaagcggtgctgtacgaacatctttttgtgcaacaagatatcaaatacattccaaccgaagatgtgtcagacctccctgtggaggaacaactgcggaggttgcaggaggaaagaacgtgtaaggtttgcatggataaggaagtttccattgtgttcataccatgtggtcatctggtggtctgcaaagattgtgctccatcgctcagaaaatgtcctatctgtaggtccaccatcaaaggcaccgtgagaacttttctttcc

SEQ ID NO: 32288 - DNA, 1812 bp, synthetic construct
  misc_feature 1..1812: note = Description of Artificial Sequence: Synthetic coding sequence
  source 1..1812: mol_type = other DNA
atgaatattgtggaaaactccatttttctctcaaatctcatgaagtcggcgaatactttcgaacttaagtacgatctttcgtgcgagctctaccgaatgtccacctactcgacgttcccggccggggtgcccgtgtcggagcgcagcctggccagagccggattttactacactggagtgaacgataaagtgaagtgcttctgttgtggccttatgctggacaattggaaacgcggggattcaccgactgaaaagcataagaagttgtacccatcttgtcgttttgtgcaatctctcaattccgtgaataaccttgaggcgacctcccaacccaccttcccttcgagcgtgaccaattccacccactccttgctgcccgggactgagaactcgggatactttcgtgggtcgtacagcaattccccatcgaaccctgtcaactcaagagcaaaccaggacttctcagcgctcatgagatcctcctaccattgcgctatgaataacgaaaatgcccggctgctgacttttcaaacctggccactgacctttctgagcccgactgatttggcaaaggcaggtttctattacattggaccgggagatcgcgtcgcttgttttgcatgtggaggtaagctctccaactgggaacccaaagataatgcaatgtcggagcaccttcgccattttcctaagtgtcccttcatcgagaaccaactgcaggatacctcgcgatacactgtgagcaacttgagcatgcaaacgcatgcagcaagatttaagacttttttcaactggccttcatcggtgctggtgaaccctgagcaactggcctcagcaggcttttactacgtgggcaactcagatgatgtgaaatgtttctgctgtgacggtgggttgcggtgttgggaatccggagatgatccctgggtccaacatgccaaatggttcccgcgctgtgagtatttgatacgaatcaaggggcaggagtttatacggcaagtgcaggcttcctatccccacctcctggaacagctgctttcgacgtccgacagcccaggagatgaaaacgcagagtcatcgattattcacttcgaaccaggtgaggaccattccgaggatgccataatgatgaacaccccagtgatcaacgcagctgtcgaaatgggattttcccgttccctggtgaagcaaaccgtgcagcgcaagattctggcaaccggcgagaactaccggctggttaatgacctcgtgcttgatcttctgaatgccgaagatgaaataagagaagaagagagagaaagagcaaccgaagaaaaggaatccaacgatcttctgctgatacgcaagaataggatggccttgtttcagcatctcacttgcgttattcctatcctggacagccttctgacggctgggatcatcaacgagcaagagcatgatgtgattaaacaaaaaacccagaccagcttgcaagcccgcgaactcatcgatactattcttgtgaaaggaaacattgcggcaaccgtgtttagaaactcacttcaggaagcagaagccgtcctgtacgaacatctgtttgtccaacaggacatcaaatacatacctaccgaggacgtgagcgacctccctgtcgaagagcagcttcgacgacttcaagaagaacggacttgcaaggtctgtatggataaggaagtgtccattgtgttcatcccttgtggacatctcgtggtctgtaaagactgcgcgccttcacttcgcaagtgtccaatctgccgtagcaccataaagggtactgtccgaacctttctttca

SEQ ID NO: 32289 - DNA, 1812 bp, synthetic construct
  misc_feature 1..1812: note = Description of Artificial Sequence: Synthetic coding sequence
  source 1..1812: mol_type = other DNA
atgaacatcgttgaaaactccatcttcctcagtaacttgatgaagtccgcaaacacattcgagctgaaatacgacctgtcatgtgagctgtatcgcatgtccacctactccactttccccgccggagtgccagtgtccgaacgctcccttgcgcgcgccggattctattacaccggtgtgaacgacaaggtcaagtgcttctgttgtggtcttatgttggataactggaaaaggggagattcaccgaccgagaaacacaaaaagctgtacccgtcctgtcgatttgtgcagtcgttaaattcggtgaacaaccttgaggctacaagccagcccaccttcccttcttccgttaccaactcaacacatagcctgctccccgggacagagaacagtgggtactttcgcggctcttatagcaactccccctctaatccagttaacagtagagctaaccaggactttagtgctctgatgagaagcagttaccactgtgctatgaacaacgagaatgctcgcctactgacctttcagacatggccacttacctttttaagccctacggatctggccaaggctggcttctattatataggaccaggcgatcgcgtggcttgctttgcctgcggcgggaaactgtccaactgggagccgaaagacaatgctatgagcgagcacttaagacatttcccgaagtgtcccttcatagagaaccagttgcaagatacatctcggtacacagttagcaatttaagcatgcagacacatgctgccaggttcaaaaccttcttcaattggccctcgtccgtgctcgtgaatcctgagcaattagcatccgccggattctattacgtcgggaactccgacgacgtcaagtgcttctgctgtgacggaggtctgcgttgctgggagtcgggagatgacccgtgggtgcagcatgccaaatggttcccaagatgtgagtatctgatccgcataaagggacaggagtttatccggcaggttcaggctagttacccccacctgctcgaacagttactgtcaacctctgattcaccaggggacgaaaacgcagaaagctctattattcatttcgagcctggagaagaccacagcgaagacgcaataatgatgaacactcccgttattaacgcagcagttgaaatggggttcagccggtccttggtgaagcagactgtccagagaaaaattcttgctaccggagaaaattaccgcctggtgaacgatcttgtgctagacctgctaaacgcggaggacgagattagagaggaagagcgcgaacgcgcgaccgaggagaaggagtctaacgatctgctgctcatcagaaagaaccggatggctctttttcaacacctgacgtgcgtcatcccaattttagatagccttctgaccgctggcataatcaatgagcaagagcacgacgtgattaagcagaagacccaaacatcgctgcaggcgcgagagctgatcgatacgatcctggtgaagggaaatatagcagccactgtttttaggaacagcctccaagaggccgaggctgtgttgtacgagcacctgttcgtgcaacaggatatcaagtacatccctaccgaggacgtgagcgacctacctgttgaggagcagctcagaaggctgcaggaggagagaacttgcaaggtgtgcatggacaaggaggtatcaattgtgtttatcccatgcggacatttagtcgtttgtaaagattgtgccccgagcctcagaaagtgccctatttgtaggagcaccatcaaggggactgtcagaactttcctgagt

SEQ ID NO: 32290 - DNA, 1812 bp, synthetic construct
  misc_feature 1..1812: note = Description of Artificial Sequence: Synthetic coding sequence
  source 1..1812: mol_type = other DNA
atgaacatcgtggagaactccattttcttgagcaacctgatgaagtcagcgaatacttttgaattgaaatacgacctgtcgtgcgaattgtaccggatgtcaacctattccacttttcccgcaggcgtccctgtgtccgaaaggtcgctcgcgcgcgccggcttctactacaccggagtgaatgacaaagtcaaatgtttctgttgcggactgatgctcgacaactggaaacggggggactccccgacggaaaaacacaagaagctctacccttcctgcaggttcgttcaatcccttaattccgtgaataacctggaagcgacttcgcagcctaccttcccgtcctcggtgaccaacagcactcactccttgctgccaggaactgagaattcgggatacttccggggaagctactcgaatagtccaagcaatccagtgaattcgcgggcaaaccaggacttctccgcactcatgagatcgtcctaccactgcgctatgaacaatgagaacgcccggctgctgacttttcagacttggccactgactttcctctctcctactgatcttgctaaggccggattctactacattggacccggagatagagtagcttgtttcgcttgtggtgggaagctgtcgaattgggaaccgaaagacaacgccatgtccgagcatcttagacatttcccgaagtgcccgtttatcgaaaaccaactgcaggataccagccgctacaccgtgtccaacttgagcatgcagactcacgctgcccgatttaagacgtttttcaattggccatcaagcgtacttgtgaacccggagcagctcgcctctgcaggattctattacgtgggcaactcggacgatgtgaaatgcttctgctgcgacggagggctccggtgctgggaatctggcgatgacccgtgggtgcagcacgctaagtggtttccgcgatgcgaatacctgattaggatcaaaggccaggaattcatccgtcaagtccaggcatcatacccgcatctgctcgagcaactgttgagcacttcagacagccccggagatgaaaacgccgagtcatcaatcatccacttcgaaccgggagaggatcattccgaggacgcgatcatgatgaacactcctgttatcaatgccgcggtggaaatgggattctcacgcagccttgtcaagcagactgtccagagaaagatccttgccactggagagaactaccgcttggtgaacgacctggtgctggatctgctgaacgccgaagatgaaatcagagaggaagaacgggaacgcgccacggaagaaaaggaatcgaacgaccttctcctcattcgcaagaaccggatggcactctttcagcatcttacttgtgtgattccaatcctcgacagcctgcttacggccggtattatcaacgaacaggaacacgacgtgatcaagcagaaaacccaaacgtccctccaagctcgggagctcattgacaccatcctggtgaagggcaatattgctgctactgtgttcagaaactcgctgcaagaagcggaggccgtgctgtacgagcacctcttcgtgcaacaggacatcaagtacattccgaccgaggatgtctccgatctcccagtggaggagcagctgcgccggctgcaggaagagagaacctgtaaggtttgtatggacaaggaagtttcgattgtgttcataccatgcgggcacctggtggtttgtaaggattgcgcaccgagcttgcgtaagtgtcccatctgtcgctctactatcaaagggactgtgcggaccttcctgagc

SEQ ID NO: 32291 - DNA, 1812 bp, synthetic construct
  misc_feature 1..1812: note = Description of Artificial Sequence: Synthetic coding sequence
  source 1..1812: mol_type = other DNA
atgaatattgtggagaactcaattttcctgagtaaccttatgaagtccgccaacaccttcgagctaaagtatgacctgtcgtgcgagctttatagaatgtccacctactccacctttcctgcaggagtccctgtgtccgaacgctctcttgcccgagccggattctactacacaggcgttaatgataaggtcaagtgtttctgctgtggattaatgctggacaattggaagaggggggacagccccacagagaagcacaagaaactgtacccctcgtgtcgatttgtgcagtcattaaactctgtcaacaatctggaggcaacctcacaacccacgttcccttcgtccgtcactaattccacccatagtctgctgcccgggacagaaaattccgggtactttcgcgggtcctactccaattcgccttctaacccggttaactcaagggctaaccaagactttagcgctttaatgaggagttcataccattgcgcgatgaacaatgaaaatgcacgactgctaacatttcaaacgtggccactcacctttctgtctccgactgacctagctaaggctgggttctactacatcggacctggtgatcgcgtggcctgctttgcctgcggcggcaagctgtctaactgggaaccaaaggacaacgccatgtccgagcatctgagacatttccctaagtgcccattcattgaaaatcagttacaggatacttctcgatacaccgtgtctaatctgtctatgcaaacacatgctgctaggttcaaaacatttttcaactggccgtcatccgtcttggttaacccagagcagctcgcatccgcggggttctactatgtggggaacagtgacgatgtgaaatgcttctgttgcgatggaggactgcgctgctgggaatctggcgatgatccatgggtgcagcacgccaagtggttccccaggtgtgagtatctgatcaggattaagggtcaggagttcattcggcaagttcaggcctcatatcctcacttgctcgaacagctcctgagcacaagcgattccccaggtgatgagaacgccgaaagctctataattcatttcgagccaggagaggaccatagtgaggatgccatcatgatgaacacccctgtgatcaacgcggcggtcgagatgggctttagtagatccttagtgaagcaaactgtgcagaggaagatactggcaactggagaaaactatcgcctcgtgaatgatctagtcttggacttgctaaacgcagaggacgaaattcgggaggaggaacgagaaagggccactgaagagaaagaaagtaatgacctgctgttaatacgcaagaatcggatggctttgtttcagcatttgacctgtgtgatccccattctcgactcactccttactgctggaattatcaacgagcaggagcatgatgttatcaagcagaaaactcaaacgagtctccaggctcgggagctaattgacaccatcctggtgaaagggaatatcgctgcaactgtgttcaggaactccttacaagaagccgaagcagtcctgtacgagcatctgtttgtgcaacaagacatcaagtacatacctactgaagacgtctcagacttgcccgtggaggagcagcttagaagactacaggaggaacgtacctgcaaggtgtgtatggacaaagaggtttctattgtgtttataccatgtggccatctcgtcgtgtgcaaagattgcgctccttcattgagaaaatgtccaatctgccgatcaacaattaaaggaaccgtgagaaccttcctgagt

SEQ ID NO: 32292 - DNA, 1812 bp, synthetic construct
  misc_feature 1..1812: note = Description of Artificial Sequence: Synthetic coding sequence
  source 1..1812: mol_type = other DNA
atgaacattgtggagaattccatctttctttcaaacctgatgaaatctgcaaatacattcgaactgaagtatgacctatcttgcgaactgtatcggatgagtacctacagcacctttcctgccggggtgcccgtgtcggaacgctccctggcccgcgcgggcttctactacaccggggtaaacgataaagtcaaatgcttttgctgtgggctgatgctggacaattggaagcggggggattcccctacagagaaacataagaaactttatcccagctgccggttcgtgcagagcttaaactctgttaataatcttgaagctacctcgcagccaacattcccgagctctgttaccaatagcacacattcccttcttcctggaaccgagaattctggctatttccgtggctcctattcaaactcaccctccaaccccgtgaactccagagctaatcaggactttagcgctctgatgcggagttcatatcattgcgccatgaataatgagaatgctcgtctgcttacctttcagacctggcccttgaccttcctctccccaaccgatttggccaaggcgggcttctactatataggccctggagatcgggtggcttgttttgcctgtggcgggaagctgtccaactgggaacctaaggacaacgccatgtctgagcatctgaggcactttccgaagtgccctttcatcgagaaccagctgcaggatacatcacgttacactgttagcaacctgagcatgcagactcatgcagcgcggttcaaaaccttctttaattggccatctagcgtgctggtgaatccggaacaactagccagcgccgggttctattacgttggaaacagcgatgacgtgaaatgcttctgctgtgatggagggcttcgatgttgggagtcaggcgacgatccatgggtgcaacatgccaaatggttcccacgatgtgagtacctgatcaggatcaagggtcaagaatttatccgtcaggtgcaggcatcttatccccatttgttggagcaactgctgtccacaagtgatagcccgggggatgagaatgccgagagctctatcatccacttcgaaccgggtgaagaccactcagaagacgctatcatgatgaatactcccgtcattaatgccgccgtagagatgggattctcacgaagtctagttaagcagacagttcaacgtaaaattctggccactggcgaaaactaccgtctcgttaacgaccttgttctagatctgcttaacgcagaggacgagatccgcgaggaagaaagagagcgggccacagaagagaaggaatccaatgacttactgctcattcggaaaaataggatggcattatttcagcatctcacctgcgtgatacctattctggactcactgctcaccgccgggatcattaacgagcaagagcatgatgtcataaagcaaaaaacacagacatcactgcaggcccgcgagctcattgatactattctggtcaagggaaatattgccgccacagtatttcgcaacagcttgcaggaggccgaggccgtcctgtatgagcatctttttgtgcagcaggatatcaagtatatccctactgaggatgtcagtgacctgcctgtggaagaacagttaagaaggctgcaggaggaacgcacctgcaaggtgtgtatggacaaagaggtttccatcgtgttcatcccctgtgggcatcttgtggtttgtaaagattgtgcaccctctcttaggaagtgccctatctgtaggtctacaataaaaggcacggtgcgcacatttctgtcc

SEQ ID NO: 32293 - DNA, 1812 bp, synthetic construct
  misc_feature 1..1812: note = Description of Artificial Sequence: Synthetic coding sequence
  source 1..1812: mol_type = other DNA
atgaacatcgtggagaattccatcttcctctcaaaccttatgaagtccgcgaacacgttcgagctgaagtacgacctgtcgtgcgaattgtaccggatgtctacctactcgacgttcccggcgggagtgccggtatcggaacgtagtctcgcacgcgctggtttctactacaccggagtgaacgataaagtgaagtgcttctgctgcggactcatgctggataattggaaaagaggggatagcccaactgagaaacataagaaactctacccttcttgtcggttcgttcagtcgctgaactcagtgaacaatttggaggccacttcacaaccgactttcccatcctcggtgactaactcaactcactccctgctgccgggcactgaaaatagcggatactttcggggaagctacagcaactccccatcgaatcccgtgaattcgagagccaatcaggatttttccgctttgatgcgctcttcgtatcattgcgcgatgaacaatgagaacgctcggctgctgacgttccaaacgtggcccttgacttttcttagccctaccgatctggccaaagccggattctactacatcggtcccggcgaccgcgtggcctgtttcgcgtgcggaggcaagttgagcaactgggaacctaaggacaacgcgatgtccgaacacctgaggcattttccgaagtgcccgttcatcgaaaatcagctgcaggatacttcaagatacaccgtctcgaacctctctatgcaaacgcatgccgcccgtttcaagaccttctttaactggccgtccagcgttctggttaacccagaacagttggcatcggcaggcttctattacgtcgggaacagcgacgacgtcaaatgtttttgctgcgacggtggacttaggtgttgggagtccggggacgacccttgggtccagcacgcgaaatggttcccgaggtgcgaataccttatccgcatcaagggtcaggaattcatccgccaggtccaggctagctatccacacctcctggaacagctcctcagcaccagtgactcgccaggcgacgaaaacgccgagtcatcaatcattcacttcgagccgggcgaggatcatagcgaggatgcgatcatgatgaacacccctgtcattaacgcagctgtcgaaatgggattctctcgcagccttgtcaagcagaccgtccagcggaagatcctggcaaccggagagaattacagactggtgaacgatctggtgctggatttgctgaatgcagaggacgaaatccgcgaggaggagcgagaacgcgctaccgaggagaaggaatcaaatgatctgctgctcatcagaaagaacagaatggccctcttccaacacctgacctgtgtaatccctatccttgactccctgcttactgcaggaattatcaacgaacaagaacacgacgtaatcaaacaaaagacccaaaccagcttgcaggcccgggaactgattgacactattctcgtcaagggtaatatcgctgcgactgtgttccggaactcgcttcaagaagccgaggcggtgttgtacgagcacctgtttgtgcagcaggacatcaagtacatcccaacggaagatgtgtcggaccttccggtcgaagagcaacttcgccgactccaggaagagcgcacctgcaaggtgtgcatggacaaggaagtttcgatagtgttcatcccgtgcggacacctcgtggtttgcaaggactgcgcgccgtcactgaggaaatgcccgatttgtcgctccactataaagggaaccgtccggacctttctgtcg

SEQ ID NO: 32294 - DNA, 1812 bp, synthetic construct
  misc_feature 1..1812: note = Description of Artificial Sequence: Synthetic coding sequence
  source 1..1812: mol_type = other DNA
atgaatatagtggaaaattctatattcctatccaaccttatgaaaagtgctaatactttcgaattgaaatacgatctctcttgtgaattgtatcggatgtctacatattccacttttcctgctggagttcccgtgagtgaacgttctctggcccgagctggattttattatactggagttaacgataaagttaaatgtttctgttgcgggttaatgctcgataattggaaacggggggactcccccacagaaaaacataaaaaactgtacccctcttgccggttcgtgcagtccctcaattctgttaacaatctggaagccacaagtcagcctactttcccttcttctgtgacgaattccactcattctctcctgcctgggacagaaaattcagggtattttagagggagttattccaactctcctagtaatcccgtgaattctcgcgccaaccaggatttcagtgctctcatgcgctcaagttaccactgcgccatgaacaacgagaatgcaaggctactgacttttcagacatggcccttaacttttctcagtccaacagatctcgctaaagccggattttattacatcgggccgggagatagagtagcctgttttgcatgtgggggaaaactgtccaactgggaacctaaagataatgccatgtccgagcacctaagacactttcccaaatgtccctttatcgagaatcagctccaggatacatctcgatatactgtatctaacctctccatgcagacgcacgccgctcggtttaaaactttctttaactggccttcgtcagtcctcgtgaaccccgagcagctagcttctgccggattctattacgttgggaactcagacgatgtaaaatgcttctgttgtgatggaggactgagatgctgggaatctggggatgatccatgggtgcagcatgccaaatggtttccaagatgcgaataccttatcaggataaaaggacaggagttcatacggcaggtgcaggcctcctacccccatctcctcgaacagctgctgtcaacttcagatagtcccggagatgagaatgccgagagtagtataattcattttgaacccggggaagatcactctgaggatgccataatgatgaacacaccagtcatcaatgccgctgtagaaatgggattctcccgctccctggtaaaacagacagttcagaggaagattctagcaacaggagaaaattatcgacttgtgaacgacttagtgttggacctgcttaacgcagaggatgaaataagagaggaagagcgagaacgcgctacagaagaaaaagaatcaaatgacctcctcctgatacgcaagaatcgaatggccttgtttcagcatctcacatgtgttatacctatcctcgatagtctccttacagccgggattataaatgaacaggaacacgatgtcataaaacagaaaacacagacttctcttcaagcacgtgaacttattgatacaatactagtgaaaggaaacatcgccgccacggtattccgcaactctctccaggaagcagaagcggtgctgtacgaacatctgtttgttcagcaggatataaaatacataccaacagaggatgtctcggatttgcccgtggaagaacagcttagaaggctacaggaggaacggacatgtaaagtgtgcatggataaagaagtcagtatcgtgttcataccctgtggacacctggttgtgtgcaaagactgcgctccctctctgcggaaatgtccaatatgccgcagtacaatcaaagggacagtgaggacatttctatcc

SEQ ID NO: 32295 - DNA, 1812 bp, synthetic construct
  misc_feature 1..1812: note = Description of Artificial Sequence: Synthetic coding sequence
  source 1..1812: mol_type = other DNA
atgaatattgttgaaaattcgatcttcctttccaacctgatgaagtcagcgaatacctttgaactgaagtacgacctgtcgtgcgaattgtaccgaatgtcgacgtactcaacctttcctgccggagtgccagtgtcggaaagatccctggcacgggcaggtttctactacaccggagtgaacgacaaggtcaagtgtttttgttgtggcctgatgcttgataattggaagagaggagatagccctaccgaaaagcataagaagctgtacccatcctgcaggttcgtccaaagcctcaactcggtgaataacctggaagccacttcgcagccaacgttcccatcatccgtgactaacagcactcattccctgctgcctggtaccgagaatagcggttactttaggggctcatacagcaactcgccatcgaatcctgtgaattcacgcgcaaatcaggatttcagcgcactcatgcgctcatcgtaccattgtgccatgaacaacgagaacgcaagactgttgactttccagacgtggccgctgacttttctttcgccaaccgacctggccaaggccggattttactacataggacccggtgatagggtggcatgttttgcatgtggagggaagctctccaactgggaacctaaagacaatgcgatgtccgagcatttgagacatttccccaagtgtccctttatcgagaatcagcttcaggatactagccgctacactgtcagcaatctgagcatgcagacccatgctgcacgcttcaaaaccttcttcaactggccctcgagcgtgctggtgaaccctgaacagctggcttcagccgggttctattacgtgggtaactcggatgatgtgaagtgtttttgctgcgatggagggcttcgctgttgggaatcaggagatgatccttgggtgcagcacgctaaatggtttccaagatgtgagtaccttattaggattaagggacaggagtttatccgacaggtccaggcttcgtacccacacctgttggaacagctcctttcgacctccgattcccctggtgacgaaaatgcagaatcgagcattatacacttcgaacctggtgaggatcattccgaagatgccatcatgatgaatactccagtgattaacgccgcagtggaaatggggttttccagatcactggtcaagcaaactgtgcaaaggaagattctggccaccggtgagaattatcgtcttgtaaacgatttggtgctggacttgcttaatgccgaggacgaaattagggaggaagagcgggaacgagccaccgaagaaaaggagagcaacgatctgcttctgattcggaagaacagaatggccctttttcaacatctcacctgtgtgattccaatactggattccctgctgacggcaggaatcattaatgaacaggagcatgatgtgattaagcaaaagactcaaacctcccttcaagcacgggaactcattgatactatcctggtgaagggaaatatcgctgctaccgtgtttcgcaactctcttcaagaggcagaagcagtcctgtacgaacatctttttgtgcaacaagatatcaagtacatccccaccgaagatgtgtctgatctgcctgtggaagagcagctgcggcgcctccaagaagagcgtacttgtaaggtgtgtatggacaaagaggtcagcattgtgtttattccctgtggacatcttgtggtgtgtaaggattgcgcaccttcgctcaggaagtgccctatatgtcgcagtaccattaagggaaccgtgcggaccttccttagc

SEQ ID NO: 32296 - DNA, 1812 bp, synthetic construct
  misc_feature 1..1812: note = Description of Artificial Sequence: Synthetic coding sequence
  source 1..1812: mol_type = other DNA
atgaatatcgttgagaactccattttcctttccaacctaatgaagtcagcgaatacctttgagctgaagtacgatttgtcttgcgaactctatcgaatgagcacctactcgacattcccagccggcgtcccagtcagcgagagaagccttgcaagagctggattctattatactggagtgaatgataaagtgaaatgcttttgttgcggattaatgctggacaattggaagagaggagattcccccacggagaaacacaaaaaactgtaccccagctgcagattcgtacagtcactgaattccgtgaacaatttggaggcaacaagccagcccacattcccttccagtgtgacaaacagcactcactcgctcttacctggaaccgagaacagtggatatttccgagggagctacagtaatagcccatccaaccctgttaatagtagagctaatcaagacttctctgctctgatgagaagttcctaccattgtgccatgaacaacgaaaacgcccgcttgctgacttttcagacatggcccctgaccttcctttcaccgacagacttagcaaaggcaggattttactacatcggcccaggggaccgtgtcgcctgctttgcctgcggcgggaaactgagcaactgggaaccaaaagacaacgcgatgtcagaacatctccgccattttccaaagtgtcccttcatcgagaaccagttgcaggatacaagccggtatacagtgtcgaatctctccatgcagacacacgctgcgcgttttaagactttctttaactggccctcaagtgtactggtgaatcctgaacagttagccagcgcaggattctactacgtgggaaatagcgatgacgtgaagtgcttttgctgcgacggtggtctgaggtgctgggaatcaggagatgatccctgggtgcagcacgcgaagtggttcccacgatgtgagtacttgatacgaatcaagggccaggagttcatccgacaggtccaggccagttacccccacttactcgaacaacttttgtctacctctgattcccccggagatgaaaatgccgaatcgtctataatccacttcgagccaggcgaggaccacagcgaggacgccattatgatgaatactcccgttatcaatgccgctgtggaaatggggttctctcggagcctggttaagcagacagtccaaagaaagattcttgccactggtgagaactacaggctcgtcaatgacctagtcctggacctgctgaatgcggaagacgaaatccgcgaggaggaacgtgagcgagctaccgaagagaaagaatctaacgacctactgttgattagaaagaaccgtatggccctgtttcagcacttgacttgtgtcattcccattctggatagcctgctcaccgcgggaataattaacgaacaagaacacgatgtaataaaacagaagactcagaccagcctccaggcccgggaactcattgacaccattctggtgaaagggaacattgcagccacagtgtttagaaactcactgcaggaggctgaggcagtgctctacgaacacctgtttgtacaacaagacattaagtacatccctaccgaagatgttagcgatctccctgtggaggagcagctgcggcgtctgcaggaagagagaacctgtaaagtttgtatggataaagaggtgtctattgtgtttatcccgtgtgggcatctggtggtatgtaaggactgcgcaccgagccttcgtaaatgtccaatctgtaggagcacaattaaaggcacggtccggactttcctttca

SEQ ID NO: 32297 - DNA, 1812 bp, synthetic construct
  misc_feature 1..1812: note = Description of Artificial Sequence: Synthetic coding sequence
  source 1..1812: mol_type = other DNA
atgaacatcgtggaaaactcgatttttctgtccaatctcatgaaaagcgctaatactttcgaactgaagtacgatttgtcctgtgagctgtaccggatgtccacctacagcaccttcccagctggtgtgcctgtctccgaacggtccctggcaagagcaggattttattacaccggagtcaacgacaaagttaagtgcttttgctgcggacttatgctggataattggaagcgcggggacagtccgaccgagaagcacaagaaactctaccccagctgccgattcgtccaatccctcaattcagttaacaatctggaggccactagccagccgacctttccgtcgtcggtgaccaactctactcactcgctgctgcctggaaccgaaaactccggatacttcagaggctcgtacagcaactccccgagcaaccccgtcaactcacgcgcgaaccaggacttctcggcactgatgagatcctcctaccattgtgccatgaataatgagaacgccagacttctcactttccaaacttggccgctgactttcctgtcccccaccgacctggcgaaggcgggattctactatatcggaccaggagacagagtggcctgcttcgcctgcggaggcaaactttcgaattgggaaccaaaggacaacgccatgagcgaacatctccgacactttccgaagtgcccttttatcgaaaaccaactgcaagatacctctcggtacaccgtgagcaacctgtcgatgcagacccatgccgccaggttcaagaccttcttcaactggccgtcatcggtgctggtcaaccctgaacagctcgcttctgccgggttctactacgtcggtaactcggatgatgtgaagtgcttctgctgtgacgggggcctgaggtgctgggagagcggggacgacccgtgggtacagcatgctaagtggttcccacggtgtgaatacctcatccgtatcaagggtcaagagttcatcagacaggtgcaagcgtcatacccacacctcctggagcagttgctcagcacttccgattccccaggtgacgaaaacgcggagtcatcgataatccacttcgaaccaggcgaagatcacagcgaagatgcgattatgatgaacaccccggtgatcaacgcggcagtggagatgggattctcgcgctcactggtgaaacagaccgtccaaaggaaaatccttgcgaccggagagaactacaggctcgtgaacgatctggtcttggacctcctcaacgccgaggacgagatccgcgaagaagaacgcgagagagcaacggaggaaaaagagagcaatgacttgcttctgatccgcaagaatcggatggccctgtttcaacacttgacttgtgtgatccctattttggactcactgctcacggcaggcatcatcaatgaacaggaacatgacgtgattaaacaaaagactcagacctcactgcaggcccgcgaactgatcgacacgattcttgtgaagggaaatatcgccgccactgtgttccgcaattcacttcaggaagcagaggctgtgctctacgagcatctgttcgtgcagcaggatatcaagtacatccctactgaagatgtctcggacctcccggtcgaggaacagctgcggcgcctgcaggaggagcgcacttgcaaagtgtgcatggataaggaagtgtccatcgtgtttatcccgtgcggacacctggtggtgtgcaaggactgcgctccctcgctgcggaagtgcccgatctgtcggtcaactattaagggcactgtccggacgttcctctcg

SEQ ID NO: 32298 - DNA, 1812 bp, synthetic construct
  misc_feature 1..1812: note = Description of Artificial Sequence: Synthetic coding sequence
  source 1..1812: mol_type = other DNA
atgaacattgtggagaattccatctttctgtctaacctcatgaagagcgcaaacacctttgagctcaagtatgatttgtcatgcgaattgtacaggatgtcgacttacagtactttcccagcaggtgtacctgtgtccgaacgttctctggccagagctgggttctattacactggggttaacgataaggtaaaatgcttttgttgtggactgatgcttgataattggaagagaggagactcaccaactgaaaaacacaaaaagctttatccctcgtgtcggtttgtacaatccctcaatagcgtgaataacttggaagccacctcccagcccaccttcccatcatctgtgactaactctacccactccctgttaccaggtacggaaaattctggctattttcgggggtcatatagtaactcgccatccaatcctgtcaactcccgggctaatcaggatttctccgctcttatgaggtcctcttatcactgtgccatgaataatgagaacgcgaggctgctgacctttcagacatggccactcacgtttctgagtccaacagatctcgctaaagccggtttttattacattggacccggggatcgtgtggcgtgcttcgcctgtggtgggaaactcagtaattgggaacccaaagataacgccatgtcagagcacctacggcatttcccaaaatgcccatttatcgagaatcagctccaagacacgagcaggtacaccgtgtcaaacctcagcatgcagacccacgccgcacggtttaagaccttcttcaattggcctagcagcgtcttggtgaatccagagcagctggcctctgctggattctactacgtgggaaactccgatgacgtcaagtgtttttgctgcgatgggggcctgaggtgttgggagtctggggacgacccatgggtgcagcatgctaagtggttcccacgctgtgaatacctgattagaattaaaggtcaggagttcatccgccaggtacaagcaagctacccccaccttctcgaacaacttctgagtacatcagactccccaggagatgaaaacgcggaatctagcatcattcattttgagccgggcgaagaccacagcgaggatgctatcatgatgaacactcctgtgataaatgccgctgtggagatgggtttttcacggagcctggtgaagcagactgtccagagaaaaatactggctactggagaaaattataggctggtcaatgacctggtgctcgatctgttaaacgctgaggacgaaattcgagaggaggagagggaacgggcaaccgaagagaaggaatctaatgatctgttgctgatccggaagaataggatggcattattccagcacctgacgtgtgttatccccatactggactctttactcacagcaggcataatcaatgagcaggagcacgatgtgataaagcagaagacacagacctccctgcaggcccgagaactcatcgatacaatactcgttaaaggtaacatcgcggccacggttttcagaaactcgcttcaggaagccgaggccgttctttatgagcatctgttcgtgcaacaagacattaagtacatccccactgaggatgtgtccgacctcccagttgaagagcaactgcggaggctgcaagaagagcggacatgcaaggtatgcatggacaaagaagtttccatcgtattcatcccatgcggacatcttgtggtttgtaaggactgtgccccttcccttagaaagtgcccaatctgcaggtcaaccatcaaaggcacagtgaggactttcttatct

SEQ ID NO: 32299 - DNA, 1812 bp, synthetic construct
  misc_feature 1..1812: note = Description of Artificial Sequence: Synthetic coding sequence
  source 1..1812: mol_type = other DNA
atgaatatcgtcgaaaactcaatctttctgagtaacctcatgaagtccgctaacacctttgaactgaaatatgacctgtcttgcgaactataccggatgagcacatactctaccttccccgctggcgtgccggtgagcgagcgaagtctagcccgggcaggattctactataccggagtgaatgacaaggtgaaatgcttttgttgtggcctcatgcttgacaattggaaaaggggcgacagtcctaccgaaaagcacaaaaagttgtacccgagttgtcgattcgtgcagtcactgaacagcgtcaacaatttagaagcaactagccagccaacttttccctcctccgtcacaaattctactcacagcctgctgcctggcaccgaaaattccggatactttcggggaagctacagcaattctccttccaaccccgtaaattcccgagcaaatcaggatttttcagccctgatgcggagctcttaccactgtgccatgaataacgagaatgcaagacttctgaccttccaaacctggcctcttacctttttatcccctaccgacctggcaaaggccgggttctattacataggccctggcgatagagttgcgtgcttcgcgtgcgggggcaaactttccaactgggagcccaaggataatgccatgtctgaacacttgcggcatttccccaagtgtcctttcattgagaaccagctgcaagatacaagtagatacacagtttcaaatctgagcatgcaaacacacgcagccaggttcaagaccttctttaattggccatctagcgtgcttgtgaacccggaacaacttgcatccgctggcttttattacgtagggaacagcgatgatgtgaaatgtttttgctgtgacggtggactgcgctgctgggagtcaggcgatgacccctgggttcagcacgcgaagtggttccctcgctgcgaatacctgattaggatcaagggccaagagtttattcgacaggtgcaggcctcttatccccacctgctggagcaactgctcagtactagcgacagtcctggggacgaaaatgctgagagtagcattatccactttgagcctggagaagatcatagcgaagatgctattatgatgaatactcctgtcatcaatgccgccgtggagatggggttctctaggtctttggttaagcagaccgtacagagaaagatcttggctaccggagagaattataggctcgtgaacgatctagtgctggacctgctgaacgcagaggacgagattcgggaggaggagagagagagagccaccgaagaaaaagaatccaacgatcttctgttgatcaggaaaaacagaatggctctcttccagcatttgacttgcgtgatacccatcctggatagcttgctcaccgccggtatcataaatgagcaagagcacgacgtgatcaagcaaaaaacccagaccagtttgcaagctcgggaactgatagacacaatcctagttaaggggaatattgctgctaccgtgttccggaactctctgcaggaggccgaggctgtgctgtacgagcatctgtttgtgcagcaagatattaaatacattcctacagaggatgtgagtgacctgcctgtagaagagcagctgcggcgcctgcaggaagagaggacctgcaaagtgtgtatggataaagaggtctccatagttttcattccttgcgggcacctagtcgtctgtaaggattgcgccccttcccttcgtaagtgcccaatctgtaggtcaactattaaagggaccgtgcgcacgttcctgagc

SEQ ID NO: 32300 - DNA, 1812 bp, synthetic construct
  misc_feature 1..1812: note = Description of Artificial Sequence: Synthetic coding sequence
  source 1..1812: mol_type = other DNA
atgaacatcgtcgaaaattctatctttctgagcaaccttatgaaatccgctaacacctttgagctgaaatacgacctctcctgcgagctttacaggatgtccacatattccactttccctgcaggtgtccccgtgtctgaaaggagtctggcacgggccggattttattacactggcgtgaatgataaggtgaagtgcttctgttgcggcctcatgctggataactggaagcgcggtgattccccgacagagaaacataaaaaactctatcccagttgtcgattcgtacagagccttaatagtgtaaacaacctggaggcaactagccagcccacctttcctagctccgtaaccaattcaacccattccctgctgccagggaccgaaaacagcggctacttccgggggagttacagtaacagcccgagcaatcctgtgaatagcagggccaaccaggatttcagcgccctcatgcgatcatcttatcattgtgctatgaacaacgagaacgcaagactgctgacgtttcagacgtggcctctgactttcctgtcaccaactgacctggccaaggccggcttttactatattggtccaggagaccgagtggcctgttttgcctgcggtggtaaactttcaaactgggaacccaaagataatgccatgtctgaacatctcagacattttcccaagtgtccctttatcgagaatcagctgcaggatacatctaggtacacagtgagtaaccttagcatgcagacccatgccgcgcggttcaaaactttcttcaactggccatcaagtgttcttgtgaacccagagcaactggcatctgctggtttttactacgtagggaactcagacgacgtgaagtgcttttgctgcgatggaggactgcggtgctgggaatccggagatgatccttgggtacaacatgccaaatggttcccccggtgcgagtatcttataaggattaaaggacaggaatttatcagacaggttcaggccagttatcctcatcttctggaacagctgctctccacctctgatagcccaggggatgaaaacgccgagtcctccatcattcatttcgagcctggcgaggatcactccgaggatgccattatgatgaacacccccgtgatcaatgccgctgtcgaaatggggtttagccggagcctcgtgaaacagaccgttcagaggaaaatccttgcaaccggggaaaactatcggctggttaatgatttggtgctggacttgctgaatgccgaggacgagatccgggaagaagaaagggaacgcgcaacagaggagaaagagtccaatgacttgcttcttataaggaagaaccgcatggctctcttccagcacctcacctgtgtcatcccaattctcgacagtctgcttactgcgggcattatcaacgaacaggagcacgacgtgatcaaacagaagacacagacctcactccaggccagggaactgatagatacaattctggtcaaggggaatatcgccgcaaccgtcttccggaattccctccaggaggcagaagcagtgctgtatgagcacctgtttgtccagcaagacatcaagtacatccccacagaagacgtcagcgatctgcccgtcgaggagcaactgcggcgattgcaggaggaacgcacatgcaaggtttgcatggacaaggaggtgtctattgtgttcatcccgtgcggacatctggtcgtgtgtaaggactgcgccccatccctccgaaagtgtccaatctgcaggagcaccataaaagggacagtgcggacatttctgtcc

SEQ ID NO: 32301 - DNA, 1812 bp, synthetic construct
  misc_feature 1..1812: note = Description of Artificial Sequence: Synthetic coding sequence
  source 1..1812: mol_type = other DNA
atgaatatcgtcgaaaattccatttttctttcgaatctgatgaaatcggcaaacactttcgaattgaaatacgatctttcctgtgaattgtaccggatgtccacttactcgacttttcctgcaggtgtgccggtgtcggaaagaagcctcgccagagcaggattctactacaccggtgtcaatgataaagtgaagtgcttctgctgtggacttatgctggataattggaaaaggggagattcgccaaccgagaagcacaagaagctgtacccctcctgtaggtttgtgcaatcgctgaattcggtcaataacctggaggccacctcccaaccaactttcccgtctagcgtgacgaattcaacccactcgctgctgccaggtactgagaattcaggatatttcagaggttcgtactctaactcaccgtccaacccagtcaactcaagagctaatcaagatttttcggcgctcatgagatcctcgtaccactgcgctatgaacaatgagaacgcaagactcctcacttttcagacttggcccctgacttttctgtcccctactgacttggcgaaggcagggttctactacattgggcctggagatcgtgtggcatgctttgcatgtggcggtaagctctctaactgggaacccaaggataatgcaatgtcggagcacctccggcactttccaaaatgcccctttattgagaatcaactccaggatacctcaaggtacacggtgtcgaacctgagcatgcaaacccatgccgccagatttaagaccttctttaactggccttcgtcggtgctggtcaacccagaacagcttgcatctgcgggattttactacgtgggaaactccgatgacgtgaagtgtttttgttgtgacggagggctgaggtgctgggaatcgggtgatgatccatgggtacagcatgccaagtggttcccgcggtgtgagtaccttattaggattaaaggccaggagttcattagacaggtgcaggcatcataccctcatttgcttgaacagcttctttcaacttctgattcgcctggtgacgagaacgcagaatcaagcattatacacttcgaaccaggagaagatcattccgaggacgcaattatgatgaacacccctgtgattaatgcagctgtggaaatggggttctctcgctccctcgtgaagcagaccgtgcaaagaaagatcctcgccactggtgaaaactacaggcttgtgaatgatcttgtgcttgatcttctgaacgcagaagatgagatcagggaagaagaacgcgaaagggccactgaggaaaaggagagcaacgacctgctgctgattcggaagaacagaatggcgttgtttcaacatcttacgtgtgtgatccctattctggactcccttttgacggcaggaatcataaacgagcaggagcatgatgtgattaagcaaaagactcaaaccagccttcaagcccgcgagctgatcgacaccatcctggtgaaggggaatatcgcagcaaccgtgtttagaaactcgctgcaggaagcagaagcagtgctgtatgaacacctgttcgttcagcaggacatcaagtacatcccaacggaagatgtgagcgatctcccagtggaggaacaactccgccgcctgcaagaggaacgtacgtgtaaggtgtgcatggataaagaagtgtcgattgttttcattccttgtggacatcttgtggtgtgtaaggactgtgctccttcgctgcggaagtgccccatctgccggtccactatcaaaggcactgtgagaactttcctgagc

SEQ ID NO: 32302 - DNA, 1812 bp, synthetic construct
  misc_feature 1..1812: note = Description of Artificial Sequence: Synthetic coding sequence
  source 1..1812: mol_type = other DNA
atgaatattgttgaaaattctatttttttgtcaaatcttatgaaatcagctaatacatttgaattaaaatatgatttatcttgtgaattatatagaatgtctacttattcaacttttccagcaggagtgccagttagtgagagatcacttgctcgtgcaggattttattataccggagttaatgataaagttaaatgcttttgttgtggacttatgttagacaattggaaaagaggagattcaccaactgaaaaacataaaaagttgtacccatcttgtagatttgttcaaagtttaaattcagttaataatttagaagctacatcacaaccaacttttccatctagtgttactaattcaacacatagtttattaccaggaacagaaaattcaggttattttagagggtcttatagtaattctccatctaatccagtaaattcaagagcaaatcaagatttttctgcacttatgaggagttcatatcattgtgcaatgaataatgaaaatgcaagattattaacatttcaaacttggccattaactttcctttctccaacagatttagcaaaagcaggattttattatattggaccaggagatagagtagcttgctttgcttgtggaggaaaattatcaaattgggaacctaaagataatgcaatgagtgaacatttacgacatttccctaaatgtccttttatagaaaatcaattacaagatacaagtagatataccgtttctaatttatcaatgcaaacgcatgctgctagatttaaaactttttttaattggccatcaagtgttcttgttaacccagaacaactcgcttcagctggattttattatgttggtaattcagatgatgtaaaatgtttttgttgtgatgggggattaagatgttgggaatctggagatgatccttgggttcaacatgctaaatggtttccacgatgtgaatatttaattagaattaagggacaagaatttataagacaagtacaagcaagttatccacatcttttagaacaattacttagtacttcagattctcctggtgatgaaaacgcagaaagttctattattcactttgaacctggtgaagatcatagcgaggatgctattatgatgaacactccagttattaatgctgctgttgagatgggattttctcgttcacttgttaaacaaacagttcaaagaaaaattcttgctacaggagaaaattatcgtcttgttaatgatttggtactagatttacttaatgctgaagacgaaataagagaagaagaaagagaaagagcaacagaagaaaaagagagtaacgacttacttttaataagaaagaatcgtatggctttattccaacatttgacatgtgttattccaattttagattcattattaacagctggaattattaacgagcaagaacatgatgtaattaagcaaaaaacacaaacaagtcttcaggcaagagaattaatcgatacaattcttgttaaaggaaatattgcagcaacagtttttagaaattcacttcaagaagctgaagctgtattgtatgaacatctttttgttcaacaagatattaaatatattcctacagaagatgtttcagatttaccagttgaagaacaacttagaagacttcaagaagaaagaacttgtaaagtatgcatggataaagaagttagtattgtattcattccatgtggtcatttagttgtatgtaaagattgtgctccatctttaagaaaatgtccaatatgtagatctactattaagggaactgttagaactttccttagt

SEQ ID NO: 32303 - DNA, 1812 bp, synthetic construct
  misc_feature 1..1812: note = Description of Artificial Sequence: Synthetic coding sequence
  source 1..1812: mol_type = other DNA
atgaatatagtggaaaactccatattcctttcaaacctgatgaaatccgctaatactttcgaactgaaatacgatctgtcgtgcgagctttacagaatgtcgacctactccacgttccctgcaggggtccccgtgagcgaacggtcgcttgctagggcagggttctactacactggtgtgaacgataaggtgaagtgtttttgctgtgggctcatgctcgacaactggaagaggggagacagccctaccgagaagcacaaaaaactctacccttcctgtcgattcgtgcagtcgcttaattccgtgaataaccttgaagcaacttcgcaacccaccttcccttcgagcgtgactaacagcacccatagcctgcttccgggaactgaaaactccggttacttcaggggttcatacagcaactcacctagtaacccagtgaacagcagagcaaaccaagacttcagcgcactgatgcggagcagctaccattgcgctatgaacaatgaaaatgcacgtctgctgactttccagacttggccactcacgttcttgagccccaccgacctcgcaaaggcaggtttttactacatcgggcccggtgatcgagtggcatgtttcgcatgtggcggtaagttgtcgaactgggagccgaaggataacgcgatgtcagaacatcttagacacttcccaaaatgcccttttatcgaaaatcagctccaagataccagccgatacaccgtgagcaacctttcgatgcagacccatgcggcacgcttcaagacttttttcaactggccaagctcagtcctcgtgaacccagaacagcttgcgtccgctggtttctactacgtgggcaattcggatgacgtgaagtgcttttgttgtgacggcgggctgcgctgctgggaatcgggagatgatccatgggtgcaacacgccaaatggtttcctcgatgtgaatacctgatccggattaaggggcaggagttcattagacaagtgcaagcatcgtacccccacctgctggagcaacttctgtcgacttcggacagccctggagacgaaaatgcagagtcctcaattatccattttgaacccggggaggatcattctgaagatgcaattatgatgaacaccccagtgattaacgccgcagtggaaatgggcttcagccgatcgcttgtgaagcaaaccgtgcaacgcaaaattctcgccactggagagaactacagattggtgaacgacctggtattggacctcctgaatgccgaagatgaaataagagaggaggaacgggagagggcaactgaagaaaaggaatcgaacgacctgcttctgattcgcaaaaaccgcatggccctgtttcaacatctgacctgcgtcattcccatactggattcgctgctgaccgccgggatcattaacgagcaagaacacgatgtgataaaacaaaagacgcaaacctccctgcaagcacgtgaactgattgataccattctggttaagggaaacatcgcagccactgtctttaggaattcgctgcaggaagcagaagcggtcctttatgagcatctctttgtgcagcaggatatcaagtacatacccactgaggacgtctcagaccttccagtggaggaacaacttcggagactgcaggaagaaaggacttgcaaggtctgtatggataaggaagtgtcaatagtgttcattccttgtggtcacctcgtggtgtgtaaggactgcgcgccttccctgagaaagtgcccgatctgtaggtcgaccattaaaggaaccgtgcgcacttttctgtcg

SEQ ID NO: 32304 - DNA, 1812 bp, synthetic construct
  misc_feature 1..1812: note = Description of Artificial Sequence: Synthetic coding sequence
  source 1..1812: mol_type = other DNA
atgaacattgtcgaaaattcaattttcctgtcgaacttgatgaaatctgcaaacaccttcgaacttaagtacgatcttagctgtgagctgtataggatgtccacctacagcacgtttcctgcaggtgtgcccgtgtcggagcgttctctggccagggcagggttttactacactggggtcaatgataaggtgaagtgcttttgttgtgggcttatgctcgataattggaaacggggcgactcgccaaccgagaaacataagaagctgtacccatcatgtcgatttgttcagtcgcttaattcagtcaacaaccttgaggctacttcacaaccaaccttcccctcaagcgtgaccaattcaacccattcacttctgcctggaactgaaaactccggttacttcaggggctcatactccaactcgccgtccaaccctgtgaattcacgtgccaatcaagattttagcgcactgatgcgctccagctatcactgcgctatgaataatgaaaacgcacggctgcttaccttccaaacttggccgttgacctttctttcgcccaccgatctggcaaaggcaggattctactacatcggccctggggatagagtggcatgttttgcctgtggtggtaagttgtccaactgggagcctaaggacaacgctatgtcagaacatctgagacacttccctaaatgtcccttcatagagaaccaactgcaagacacctcccggtacacggtgagcaacctttccatgcaaactcacgcagctcggttcaagaccttctttaactggccttcatccgttctcgtgaacccagagcagctcgcctcggcgggattttactacgttggcaacagcgatgatgtcaaatgcttttgctgcgatggaggcttgaggtgttgggagagcggggatgacccatgggtgcagcacgccaagtggttccctcggtgcgaatacctgatccgaattaagggacaggaattcattagacaagtccaagcatcctacccacatctgctggagcagcttctttcgacttccgacagccctggagatgagaacgctgaaagctccatcatccattttgaaccaggtgaagatcattcagaggatgcaatcatgatgaataccccagtgattaatgcagcagtcgagatgggttttagccgctcgctcgtaaaacagactgtgcagaggaagattttggcgaccggggagaactaccggttggtgaacgatctggtgctggatcttctcaacgccgaagatgaaatccgggaggaagaaagagaaagggcgactgaagaaaaggaatcgaatgatctccttctgattaggaagaatcggatggcactctttcagcatctgacttgtgtgatccctattcttgattctctgcttactgcaggcatcattaacgagcaagaacatgatgtcattaagcaaaagactcagacttccctccaggcccgagaacttattgataccattctcgtcaagggcaatattgcagcaaccgtgtttcgcaactccctgcaggaagccgaggcggtgctgtacgaacatctgtttgtgcaacaagacatcaagtacattccgaccgaggacgtgtcagaccttccagtggaggaacagctgcgcaggctgcaggaagaacgcacctgtaaggtttgtatggataaagaagtgtcgattgtgttcattccttgcggacatctggtggtttgtaaggattgtgccccatcgctgcgcaagtgtcccatctgcaggtcgacgatcaagggcaccgtgcgcacgtttctttcc

SEQ ID NO: 32305 - DNA, 1812 bp, synthetic construct
  misc_feature 1..1812: note = Description of Artificial Sequence: Synthetic coding sequence
  source 1..1812: mol_type = other DNA
atgaacattgtcgaaaattccatcttcctctccaaccttatgaagtccgcgaataccttcgagcttaagtacgatttgtcgtgcgaactgtatcgaatgtccacctactcgaccttcccggccggcgtgccggtgtcagaacggagcctggcaagagccggattctattacactggagtcaatgacaaggttaaatgcttttgttgcgggctcatgctggataactggaagcgcggcgactcccctaccgaaaagcacaaaaaactttaccccagctgcagatttgtgcagagcctgaactcggtgaacaacctggaagcaacttcccagccgaccttcccatcgagcgtcaccaactcaactcatagcctccttccaggaaccgagaatagcggatacttcagaggaagctactcgaactccccgagcaacccggtgaattcccgggctaatcaagacttctcggctctcatgcggtcgagctaccactgcgcaatgaacaatgaaaatgcccggctgctcaccttccagacttggccgttgactttcctttcgcctaccgacctcgcgaaggccggtttctactacattgggccaggcgatagagtcgcgtgcttcgcctgcgggggcaaactctcaaattgggaaccgaaggataatgcaatgtccgagcatctgcggcactttccgaagtgcccattcattgaaaaccaactgcaggacacttcacggtacaccgtgagcaatctgtcaatgcaaactcatgccgcgcggttcaagacgttcttcaactggccatcttccgtgctggtgaacccggaacaactggcctcagcgggcttctactacgtgggaaattcggacgacgtgaaatgcttttgctgtgacgggggcctgcggtgctgggaaagcggggatgacccgtgggtgcagcacgccaaatggttcccgcgctgcgaatacctcatccgcatcaaaggacaggagtttattcggcaggtgcaggcatcatacccccacctgctggagcagttgctctcgaccagcgactcaccgggagacgaaaatgcagaaagctcgatcattcacttcgagccgggagaagatcattcggaggacgccattatgatgaacactccggtgatcaatgcggccgtcgagatgggctttagccgctcgctggtcaagcaaaccgtgcagcgcaagatcctcgctaccggggagaactaccgcctcgtgaacgatctcgtgctcgatctgctgaacgccgaggacgagatccgcgaagaggagcgagagcgcgcgaccgaagagaaggagtcaaacgatttgctcttgatccggaagaacagaatggcgttgttccagcacctgacgtgcgtgatccccatactcgatagcctgctgactgcaggaattatcaatgaacaagagcatgacgtgatcaaacagaaaactcaaacctcactgcaggcacgggaactcatcgacactatcctggtcaagggaaatatcgccgccaccgtgttcaggaactcgctccaggaggcagaggcggtgctgtacgaacatctctttgtgcagcaggacatcaagtacatcccgaccgaggacgtctctgatctgcctgtggaggaacagttgcggcggctgcaagaagaacgcacttgcaaggtgtgtatggataaggaagtgtcgatcgtgttcatcccatgcggtcatctcgtggtctgcaaagactgcgctccgtccctccgcaaatgcccgatctgccgctcgaccatcaagggcactgtcagaactttcctctcc

SEQ ID NO: 32306 - DNA, 1812 bp, synthetic construct
  misc_feature 1..1812: note = Description of Artificial Sequence: Synthetic coding sequence
  source 1..1812: mol_type = other DNA
atgaacatcgtggaaaactcaatcttcctgagtaacctgatgaagagcgctaacacttttgagttgaaatacgacctgtcctgcgagctgtacagaatgtctacttacagtacttttccagccggggttcccgtcagcgagcggagccttgcacgcgctggcttttattacacaggggtcaacgataaagtgaagtgcttttgctgcggactgatgttggataactggaaaaggggcgattctcccacggagaagcataaaaagctgtacccctcatgtcgcttcgtccagtcactcaatagcgtaaacaacttggaggctacatcacagcccacgttcccgtcttccgtgaccaacagcacacattccctgctgcccggcacagaaaacagcggatatttccgcggctcctatagcaattcacccagcaatcccgtaaactcacgggctaaccaggatttttccgccttgatgcgctcttcttaccactgtgcgatgaataatgaaaacgccagactcctgacattccagacctggcccctgactttcctgagcccaaccgacctcgccaaggctgggttttattatatcggtcccggtgacagagtggcctgttttgcgtgcggcggtaagctttccaattgggagccgaaagacaacgccatgagcgagcacctgcgacatttccctaagtgtccttttatcgagaaccagttgcaagacaccagcaggtacaccgtctccaatctcagtatgcagacgcatgctgccaggtttaagaccttctttaactggccatcatcagtcctggtgaatcccgaacagctcgcttccgcagggttttattatgtgggaaattccgatgacgtgaaatgtttctgctgcgacggaggactgagatgctgggaatccggcgacgatccatgggtgcaacacgccaaatggtttccacgatgtgaatatttgatacggattaaaggccaggagtttattcgccaggtgcaggctagttacccacacctgttggagcaactgctgagcacgtctgactccccaggcgacgagaatgcggagtcaagcatcatccacttcgagcccggagaagatcacagcgaggatgcaattatgatgaacacccctgtgattaatgccgccgtggaaatgggtttctcaagatcactcgttaagcagactgttcagcgaaagatacttgccacaggggagaactaccggctcgtcaatgacctggtgcttgacctcctgaatgccgaagacgaaattcgagaagaggagcgagagagggctacagaggagaaggaatccaatgatctgctcctgatacgaaagaataggatggcactgttccagcacctgacgtgtgtcatacctattctggactccctgttgacagcagggatcatcaatgaacaagagcatgacgttataaagcagaaaacccaaacctctctccaggctagggagctcattgacaccatactggtcaagggaaatattgccgctaccgtcttcaggaattctctgcaggaggcggaagcggtactgtatgaacacctctttgtgcagcaggacatcaaatacatacccactgaagatgtctctgacctcccagtcgaggagcaactgcggcggctccaggaagagaggacatgcaaagtgtgcatggacaaggaagtcagcatcgtgttcatcccctgtgggcacctcgtggtctgcaaggactgcgccccctcactgagaaagtgtcctatttgcagatctaccattaagggcactgtccgcactttcttgtca

SEQ ID NO: 32307 - DNA, 1812 bp, synthetic construct
  misc_feature 1..1812: note = Description of Artificial Sequence: Synthetic coding sequence
  source 1..1812: mol_type = other DNA
atgaatatagtggaaaattcaattttcctctcgaaccttatgaagtccgctaacacttttgaactgaagtacgatttgtcctgcgaactttaccgtatgtccacttactcgacttttcctgctggagtgcctgtctccgaacgatcccttgcacgggcaggtttttactacaccggtgtgaacgataaggttaagtgcttttgttgcgggctcatgctggataactggaaaagaggtgactcacctactgaaaaacacaagaagctgtacccgtcttgccggttcgttcaatcgctgaactcggtgaacaatctcgaagcaacgagtcagccgacctttccctcgtccgttactaatagcacccacagccttctgcccggtaccgaaaactccggttacttccgaggttcgtattctaattcaccatcgaaccctgtgaactcccgcgctaatcaagatttttccgcacttatgaggtcatcgtatcactgtgccatgaacaatgagaacgcaagactgcttaccttccaaacttggcctctgacctttctgagcccgactgatcttgcaaaggcaggattttactacatcggtcccggcgatcgtgtggcctgttttgcatgtggaggtaagctgagcaactgggaacctaaggataatgcaatgtcggagcatcttcggcattttcctaaatgtccctttatcgagaatcaacttcaagatacttccagatacaccgtctcaaacttgtccatgcaaactcatgctgcccggttcaagacctttttcaattggccaagcagcgtgctggtcaaccctgagcaacttgcaagcgccggtttctactacgtgggtaacagcgatgatgtgaaatgtttctgttgcgatggcggtttgcgctgttgggaatcaggagacgacccttgggtccaacacgccaagtggttcccaagatgtgaatacctgattagaattaaggggcaagagtttatccgacaggtccaggcctcatacccacaccttttggaacagcttctctccacttccgattcccctggagatgaaaacgcggaatcaagcattatccatttcgagccgggggaagatcatagtgaagatgcaataatgatgaatacccccgtcattaacgcagcagtcgaaatgggtttctcgagaagcctcgtcaagcagaccgtccaacgaaagattcttgcaaccggagagaattatcggctcgtgaacgatctcgtgcttgacttgctcaacgcggaggatgaaattcgtgaagaggaaagagagagggcaactgaggaaaaggaatcgaatgatctcctgctgatcaggaagaatcgtatggccctcttccagcaccttacttgtgtcattcctattctggattcccttctcacggccggaatcataaacgaacaggaacacgacgttatcaagcaaaagactcagacttcgcttcaagcacgggaattgatagacaccattcttgtgaaggggaacatcgcagcaactgtgttcagaaacagcctgcaggaggcagaagcagtgctttacgagcatctgttcgtgcagcaagatatcaagtacattcccactgaagatgtctccgatcttccagtggaggaacaactgcgccgcctccaggaagaacggacctgcaaagtgtgtatggacaaggaagttagcattgtgttcattccatgcggacatcttgtggtttgtaaggactgcgcaccctccttgcgaaagtgtcctatctgtagatcgaccataaagggaaccgtgagaacttttctgagc

SEQ ID NO: 32308 - DNA, 1812 bp, synthetic construct
  misc_feature 1..1812: note = Description of Artificial Sequence: Synthetic coding sequence
  source 1..1812: mol_type = other DNA
atgaacatagtggagaattccatcttcctatccaacttgatgaagagtgccaacaccttcgagctcaagtatgacctgtcctgcgagctttaccgcatgtccacctattcaacgttccccgctggcgtcccggtgagtgaaagatctctggccagagctggcttctattacactggagtgaacgataaggtgaagtgtttttgctgcggcctgatgctggacaactggaagaggggagattcccccacagagaaacacaagaaactgtacccatcctgtagatttgtccagtccctcaattcagttaataacctggaggccacttcccaaccaacctttcctagcagtgtgactaattccactcattcccttctgcctggcactgaaaacagcggttatttccggggaagctactccaactccccctctaatcctgtcaactcacgggctaaccaggatttttccgccctgatgcggtcttcctatcactgtgctatgaacaacgagaatgcccgtctgttaacctttcaaacttggccactgacattcctgtcccccacagacctagccaaggccggattttattatatcggtcctggcgatagggtcgcctgctttgcctgtgggggtaaactctctaactgggaaccgaaggacaatgctatgagcgagcatcttcgccacttccccaaatgccccttcatcgaaaatcagctgcaagatacatcccgctacaccgtatcaaacctttctatgcaaacacatgctgcccgattcaaaacatttttcaactggccctccagtgtcctagtcaatcctgagcagttagcatctgcagggttttactacgtgggcaattctgatgatgtaaagtgtttttgttgtgatggcggactgcgctgttgggagtccggcgacgatccctgggtgcagcatgcaaagtggtttccccgttgtgaatacctgatccggataaagggccaggaattcatccggcaggtgcaagctagttatccacacctactggagcagttgttgtcaacgtccgactcacctggggatgaaaacgcggaaagttcaatcattcattttgaaccaggcgaggatcactcagaagatgctattatgatgaacaccccagtgatcaacgcagctgtcgaaatgggtttttccagatccttggtaaagcagaccgtgcagcggaaaatcctcgccacaggtgaaaactatcgcctcgtgaatgacttggtgctggacctcctcaatgcagaggacgaaattcgggaggaagagagggagcgcgctaccgaagagaaggagtcgaacgatctcctgctgatcaggaagaatagaatggcccttttccaacatctcacgtgcgtcatccccatcctcgactctcttctgacagccggcataattaatgaacaagaacatgacgtgattaagcagaagacccagactagtctccaggcgcgggagctgatcgataccatcctggtgaagggaaatatcgcagccaccgtgttccgtaactcccttcaagaagctgaagctgtgctgtatgaacaccttttcgtacagcaggacatcaagtacatcccaactgaagatgtctccgatctgcccgtcgaggaacaactgcgaaggctgcaggaggaacgtacctgtaaggtgtgtatggataaggaggttagcattgtgttcattccatgcggccacttggtggtgtgtaaggactgcgcaccatctttgaggaagtgccccatttgccgatccaccatcaagggcacagtgagaactttcctaagc

SEQ ID NO: 32309 - DNA, 1812 bp, synthetic construct
  misc_feature 1..1812: note = Description of Artificial Sequence: Synthetic coding sequence
  source 1..1812: mol_type = other DNA
atgaatatcgtggagaattcaatcttcctctctaacctcatgaaatccgcgaacaccttcgagttgaagtacgacctgtcgtgcgagctctaccggatgtcgacctacagcactttcccagcaggagtcccggtgtcggagcggtcgctggctcgcgcgggattctattacacgggagtcaatgacaaggtgaagtgcttctgctgtggactgatgcttgacaactggaagagaggtgattccccgactgaaaagcataagaagctgtacccttcctgccgcttcgtgcaatcactgaactcagtgaacaatctggaagcaacctcgcagcccaccttcccgtccagcgtgacgaattctactcatagcctcctgccgggaactgaaaacagcgggtacttcagaggctcctactctaattccccgtccaacccagtgaattcaagagccaaccaggatttctcggccctgatgagatcgtcctaccactgcgcgatgaacaacgaaaatgccaggctgctcactttccagacttggcctctgaccttcctttcccccaccgaccttgccaaagcgggattttactacatcggtcctggcgatagagtcgcctgcttcgcatgcggaggtaagctgtccaactgggaacctaaagacaatgccatgtccgagcatctgagacatttcccaaaatgtccctttatcgagaaccagctgcaagacacgtcgcgctacactgtctcgaaccttagcatgcagacccacgccgctaggttcaagactttcttcaactggccatcatcggtgctggtgaacccggagcagctggccagcgccgggttttactacgtcggaaatagcgacgatgtcaagtgtttctgctgtgacggaggtctgcggtgctgggaatcaggggatgatccgtgggtgcagcacgccaagtggttcccgcggtgtgagtatttgatccgcattaaagggcaagagttcatcagacaggtgcaagccagctacccgcatcttctggaacaacttctgagcacctcggacagcccgggagacgagaacgcagagtcatccatcatccattttgaaccaggagaggaccattccgaagatgccatcatgatgaataccccggtgatcaacgccgctgtggagatgggattttccagatcgctggtcaagcagaccgtgcaacgtaagattctggcgacgggagaaaactacaggctggtgaatgaccttgtcctcgatctcctcaatgcggaggacgagatccgggaagaagagagggaacgcgcaactgaggaaaaggagagcaatgacctcttgctcataaggaaaaaccgcatggcgctgttccaacacctgacttgcgtcatccctatcctggactcgctgctcaccgccggtatcatcaacgagcaggagcacgacgtgatcaagcagaaaacgcagacctcacttcaggcgcgcgagctcatcgatacgattctggtcaagggaaacattgccgcgactgtctttcggaactcgctgcaggaggcggaagctgtgttgtacgagcatctgttcgtgcagcaagatatcaaatacatccctaccgaagatgtcagcgacctgcccgtcgaagaacagctgcgcaggctccaggaagaacgcacttgtaaggtgtgcatggataaggaagtttccattgtgttcatcccctgcggccatttggtggtgtgcaaggattgcgctccgagcctgcgcaagtgtccaatttgtcggagcactatcaaagggaccgtgaggactttcctgtca

SEQ ID NO: 32310 - DNA, 1812 bp, synthetic construct
  misc_feature 1..1812: note = Description of Artificial Sequence: Synthetic coding sequence
  source 1..1812: mol_type = other DNA
atgaacattgtggagaatagcattttcctgtctaatctgatgaagtccgccaacaccttcgagctaaaatatgacctgtcgtgcgaactttaccgtatgagcacctattccacgttcccggccggcgtgccagtaagtgagcggagtctcgcccgcgccggtttttattatactggcgtcaatgataaggtaaagtgcttttgctgtggcttgatgctggataattggaaaaggggagactcgccgacagaaaagcataagaagctatatccttcgtgccgatttgtgcagagtctgaatagtgtgaataacctggaggcgacttcgcagcccacctttccgtctagtgtaaccaactcgacgcacagcctgttgcccggcaccgagaattccggctatttccgaggctcgtattcgaactcgccatcgaaccctgtgaactcccgggcgaatcaggatttcagcgccctgatgcggtcttcttatcattgcgctatgaacaatgagaacgcgcgtctgctgacgttccagacttggccattgacttttctgagtcccacggatctcgccaaggctggtttctactacatcggcccaggcgatcgtgtagcatgcttcgcttgcggaggtaaactgagtaactgggaaccgaaggacaacgccatgtcggagcacttgcggcactttcccaagtgtccgtttatcgaaaaccaactgcaggacactagcagatacactgtctcgaatctgtcgatgcagacccatgccgcacgttttaagactttctttaactggccctcgagtgtgctagtgaacccagagcagttggcaagcgcgggattctactacgtcgggaactcggatgatgttaagtgcttctgctgtgacggaggtctccggtgttgggagagcggcgacgacccgtgggtgcaacacgcaaagtggtttccccgctgcgaatatcttatcaggataaaaggtcaggagtttatccgtcaagtccaagccagttacccgcatcttctggaacagctgctgagtacgagcgacagccctggcgatgagaacgccgagtcgagcatcatccatttcgagcctggagaagaccatagcgaggacgccattatgatgaatacaccagtgatcaatgccgccgtcgaaatgggattcagccgatccttggtgaaacagactgtacagcgcaaaatcctagctactggtgaaaactaccgccttgttaacgatctagtgctggacttacttaacgcagaggatgagatacgggaggaggagcgcgagagggctactgaggaaaaggagtctaacgatctgcttctcatccgtaaaaaccgcatggctctgttccagcatttgacctgcgtgatccccatcctcgactcactcctgactgcaggaattataaatgagcaagagcatgacgtaattaaacagaagacccagacctcgctgcaagcccgcgagctgatcgacaccatcctggtcaagggtaacattgctgccaccgtgtttcgcaacagtctccaggaggccgaggccgtcctatatgagcatttgttcgtgcagcaggatataaagtacatacctacggaggacgtgagtgatttgcccgtcgaagagcagctcagacggctgcaagaagagcgcacttgtaaggtgtgcatggacaaggaagtgagtatagtgtttatcccgtgcggccacctggtggtgtgcaaagattgcgcgcctagcctcagaaagtgcccaatctgtagatcgacgatcaagggcaccgtacggacgttcttgagt

SEQ ID NO: 32311 - DNA, 1812 bp, synthetic construct
  misc_feature 1..1812: note = Description of Artificial Sequence: Synthetic coding sequence
  source 1..1812: mol_type = other DNA
atgaacatcgtggaaaactctattttcctgtctaacttgatgaagtcagcaaacaccttcgaactaaagtacgacctgtcatgcgagttatacagaatgtcaacttatagcaccttccccgctggagttcccgtgagcgagagaagtcttgctcgcgccggtttctactacaccggagttaatgacaaggtgaaatgcttctgctgcggcctaatgctagacaactggaaacgaggggattcgcccacagagaaacataaaaaactgtacccgagctgcaggtttgttcagagtctgaatagcgtgaacaatctggaagccacgagccagccaacatttcctagttctgtgaccaactccactcacagtcttctgcctgggaccgagaactctgggtacttccgaggatcttactcaaacagccctagcaaccccgttaactcaagagcaaatcaggacttttctgcactgatgcgtagtagctaccactgcgccatgaacaacgaaaacgcccgcctgttgacttttcaaacttggccattgacgttcctaagcccaactgatctggctaaagcaggcttctactatataggccctggtgatcgggttgcgtgtttcgcgtgcggtggtaagctcagcaattgggagccaaaagacaacgcaatgtctgaacacctccggcatttccccaagtgtcccttcatcgagaaccaactccaggataccagcagatacacggtctcgaatctttctatgcaaacccatgctgccagattcaaaacgttttttaactggcccagtagcgtgcttgtcaatccagagcaactagcttccgctggcttctactatgtcggcaatagcgatgacgtcaagtgtttttgctgtgatggcggcttacggtgctgggagagtggggatgatccttgggtccagcacgccaagtggtttccacgctgtgaatatctaattcgtatcaaggggcaggagtttatcagacaggtgcaggcttcctatccacacttgcttgagcagctcttatccacatcagactctcctggagacgagaatgccgaatctagcatcatacacttcgagcccggagaggaccactcggaggacgccataatgatgaacactcccgtaatcaatgctgcagtggagatgggatttagccgctcactggtaaagcaaacagtgcagagaaagatccttgcaaccggagagaattatcgcctagttaacgatctggtgttggacctgctcaacgcagaggacgagattcgggaggaagaaagggagcgcgctacagaggagaaagaaagcaacgaccttcttctcattagaaagaatcgcatggcacttttccagcacctcacttgtgtaattccaatcctagactccctgctaactgccgggattatcaacgagcaggagcacgacgtgatcaagcaaaaaacacagacaagcctgcaggctcgggaactgatagatacaatcctcgtgaagggaaacatcgccgcaactgtgttccggaattctttgcaagaagcggaggccgtcttgtatgaacacctttttgtgcagcaggacatcaaatatattcctactgaagatgtttcagaccttcccgtagaggaacagctgcgaaggctccaggaggagcgtacttgtaaggtgtgcatggataaagaagtcagcatagtgttcataccttgcgggcacctcgttgtttgcaaagactgcgctccctcccttcggaagtgtcctatttgccgatcaacaattaagggtacagtgaggacattcctctcc

SEQ ID NO: 32312 - DNA, 1812 bp, synthetic construct
  misc_feature 1..1812: note = Description of Artificial Sequence: Synthetic coding sequence
  source 1..1812: mol_type = other DNA
atgaacattgtcgaaaatagtatatttctgtctaatctgatgaagtcagccaatactttcgaacttaaatacgacctgtcatgcgagctgtaccgcatgagcacttactccaccttccccgcgggagtgccagtgagcgagagaagcctggctcgggccggcttctactacacgggtgttaacgacaaagtgaaatgcttctgttgtggcctcatgttagataattggaaaaggggcgactccccaacagagaagcataagaaactatacccctcctgccggttcgtgcagtctttgaattctgtcaataacctggaagctacctcccagccaacctttccttcttctgtaacaaacagcacgcattctctcctccctggaactgagaactccggttacttccgtgggtcctactcaaattcaccctctaatccagtgaatagtagggccaaccaagacttttccgcgctgatgaggagctcataccactgcgctatgaataacgagaatgctaggcttctcacattccagacgtggccactcacctttctgtccccgaccgatctcgctaaagctgggttctactacatcgggcctggcgaccgcgtagcctgcttcgcatgtggggggaaattgtctaactgggagccaaaggacaatgccatgtcagagcatttaagacatttcccaaagtgtcctttcatcgaaaatcaacttcaagacacaagcaggtacacggtttccaatctgtctatgcagacccacgcagcccgcttcaaaacattctttaactggccatcgtctgtcctcgtgaacccggagcagctggccagcgctggcttctactatgttggtaactcagatgatgtgaagtgtttttgctgtgacgggggactgcgctgttgggaatcaggggatgatccttgggtgcagcacgctaagtggttccctcggtgtgagtacctcatccgcatcaagggccaggagtttatccgccaagtgcaggcatcctatccacacctccttgaacagttgctgtccacaagcgactctcctggtgacgagaatgccgaatctagtatcatccatttcgaaccgggggaagatcattccgaagacgccattatgatgaatactcccgtgatcaatgcggccgtggagatggggttttctaggtccctggtgaaacagaccgtccagagaaaaatacttgctaccggcgaaaactacaggttggtcaacgatttggtgctggatcttctaaacgctgaagatgagattagagaagaagagcgggagagagctacagaagaaaaagaaagcaatgatctgctgctgatcaggaagaacaggatggcacttttccaacacttgacatgtgtgattccaatccttgatagcctgctgacagcaggaatcatcaacgagcaggagcatgacgttattaaacagaagactcagaccagcttacaggctcgagagctgatcgataccatcctggtcaaaggaaatatcgcggccaccgtctttaggaatagcctgcaggaggccgaggcggtcctttatgagcatttgttcgtgcaacaagatattaaatatatcccgaccgaagacgtgagcgacctgccagtcgaggaacagcttaggagactccaggaggagagaacctgcaaagtgtgcatggacaaagaagtgtctatagtttttatcccctgcggtcacctcgtagtgtgcaaagattgtgctcccagcctgagaaagtgccctatctgccgctcgacaataaagggtactgtgaggacatttctgagc

SEQ ID NO: 32313 - DNA, 1812 bp, synthetic construct
  misc_feature 1..1812: note = Description of Artificial Sequence: Synthetic coding sequence
  source 1..1812: mol_type = other DNA
atgaatatcgtggaaaactcgatctttctgtccaatcttatgaagagcgccaacaccttcgaactcaaatacgacctcagctgtgaactgtacagaatgagcacctactcgaccttccctgccggcgttcccgtttcagagagatccctcgcacgagcgggtttctactacactggtgtgaacgacaaggtgaaatgtttctgttgcgggctgatgctggacaattggaagcgcggcgattcccctaccgaaaagcataagaaactgtacccttcttgtcgatttgttcaatcactgaactctgtgaacaacctcgaagccacttcgcagccaaccttcccttcttccgtgacgaattccacgcattcgctgttgcccggcactgaaaacagcggctattttcggggctcgtactccaactccccgagcaaccccgtcaactcccgcgctaaccaggacttttcggcactcatgcggtcctcctaccattgtgcgatgaataatgaaaacgcaaggctgctgaccttccaaacctggccacttactttcctgtccccaactgatcttgcaaaagcaggcttttactacattggaccaggagatcgggtggcttgtttcgcctgcggaggaaagctctccaactgggaaccgaaagataatgcaatgtcggaacatctgcgacatttcccaaaatgtccctttatcgaaaaccaactgcaagatacctcccgctacaccgtgtccaatctgagcatgcagactcatgcggccaggtttaagacctttttcaattggccatcctcagtgcttgtgaaccctgaacagctggcatcggcaggtttttactacgtcgggaactccgatgacgtgaagtgcttctgctgcgatggagggctcagatgctgggaatctggagacgatccatgggtgcagcacgccaagtggttcccaaggtgcgaatatctgataagaatcaaaggccaggagtttattcggcaggtgcaggcttcgtaccctcatctgctggaacaactccttagcaccagcgattcacccggcgatgaaaatgcagaatcgtcgattatccattttgaaccgggtgaagatcatagcgaggatgcgattatgatgaacactcctgtcatcaacgccgcagtcgaaatgggttttagccgttcacttgtgaagcaaaccgtgcaacggaaaattctggcaaccggtgaaaactacaggcttgtgaacgatctggtgcttgaccttcttaacgcagaggacgaaatacgagaagaagagagggaacgagcgactgaggagaaggaatcgaacgacctccttctcattagaaagaatcgcatggccctttttcaacatctgacctgtgtgatcccaattcttgactcgctgctgaccgcaggtattatcaatgaacaagagcatgatgtcatcaagcaaaaaactcagacttccctgcaggcacgtgaacttatagataccatcctggtcaaggggaacattgccgccacggtgttccgcaactcattgcaggaagcagaagcggtgttgtacgaacacctgtttgtgcagcaagatatcaagtacattcctaccgaggatgttagcgacctccctgtggaagagcagctgcgtagactccaggaagaaagaacttgtaaagtgtgcatggataaagaggtgtcaattgtgttcattccctgtggacatctcgttgtgtgtaaagactgcgcaccctcccttaggaaatgtcctatctgtcggtcgaccatcaaaggtaccgtgcggaccttcctttcg

SEQ ID NO: 32314 - DNA, 1812 bp, synthetic construct
  misc_feature 1..1812: note = Description of Artificial Sequence: Synthetic coding sequence
  source 1..1812: mol_type = other DNA
atgaatatcgtggaaaattccatcttcctctcgaacctcatgaagtcagccaatacgttcgagctcaaatatgacctgtcttgcgaattgtaccgcatgtcgacctatagcacgttcccggcaggagtgccagtttcagagcgatcgttggctagagccggcttttactacactggcgtgaacgataaagtcaaatgtttctgctgcggactgatgctggataattggaagcggggagactcaccaacggaaaagcataagaagctgtacccgagctgcaggttcgttcagtcactcaactctgtgaacaatctcgaagcaactagccaaccgaccttcccgtcgtccgtcaccaattcaactcactcgttgctcccgggaaccgaaaattcgggatacttccgggggtcgtacagcaacagcccttcgaacccggtgaactcccgcgcgaaccaggatttcagcgccctgatgcgctcatcttaccattgtgccatgaacaatgaaaacgcccggctgctgaccttccaaacttggccgctcactttcctgagcccgactgatctggccaaagccggcttctattacatcggacccggagatcgggtggcgtgtttcgcctgcggaggtaaactcagcaactgggagccaaaggacaatgcgatgtccgaacacctgaggcatttcccaaagtgtccgttcatcgaaaatcagctgcaagacacctcacgatacactgtcagcaatttgtccatgcagacccatgccgccaggttcaagacgttcttcaactggccatcgtccgtgctggtgaatcctgaacagctcgccagcgccgggttctactatgtgggtaattcggacgacgtgaagtgcttctgctgcgacggggggctgcggtgctgggaatccggcgacgatccatgggtccaacacgccaaatggttccccagatgcgagtacctcatcagaatcaagggacaggagtttatacgccaggtgcaggcgtcgtacccgcaccttctggaacagctcctgagcactagcgattccccaggagacgaaaatgccgaatcctccattatccatttcgaaccaggagaggaccatagcgaagatgctattatgatgaacacccctgtgatcaacgccgcggtggaaatggggtttagccggagcctcgtgaagcaaactgtccagcggaagatcctggccactggcgagaactatcgcctggtgaatgacctcgtccttgacctgctcaatgctgaggacgagatcagagaggaagaacgcgagcgcgcaactgaggaaaaggaatcaaacgatctcctgctgatccgcaagaaccgcatggcgctgttccagcacctgacctgcgtgatcccgatcttggactcgctgctgacggcgggaatcattaatgaacaagaacacgacgtgatcaagcaaaagactcagacttccctgcaggcgcgcgaacttattgatactatcctcgtcaagggcaacatcgcggcaaccgtgttcagaaattccctgcaggaggccgaggccgttctgtacgaacaccttttcgtgcaacaagatatcaagtacatccccactgaggacgtctcagacttgccagtcgaagaacagctgagacggctgcaggaagaacgcacttgcaaggtgtgcatggacaaggaggtgtctatcgtgttcatcccgtgcggacatctggtggtgtgtaaggattgtgcgccgagcctccggaagtgtccgatctgtcggtcaactatcaaaggaaccgtgcggaccttcctctcg

SEQ ID NO: 32315 - DNA, 1812 bp, synthetic construct
  misc_feature 1..1812: note = Description of Artificial Sequence: Synthetic coding sequence
  source 1..1812: mol_type = other DNA
atgaatattgtcgaaaactcgatcttcttatcgaatctcatgaaatctgccaacactttcgaactcaagtacgacctctcgtgcgaactttatcgtatgtccacctacagcaccttccctgctggtgttccggtctctgagagatcattggcaagggcgggcttctactacacaggtgtcaacgataaggtgaagtgtttctgttgcgggctcatgctagataattggaagaggggcgattcccccactgaaaagcacaagaagctctacccatcatgcagattcgtccagtcactaaactctgtcaacaatctggaagcgacctcccaaccgaccttcccgtctagtgttaccaacagcacccattctctcttgccagggactgaaaactcgggctacttccgaggttcctattcaaacagtcccagcaaccctgtgaactcgagagctaaccaagatttttccgctctaatgcgtagctcttaccattgtgcaatgaataacgaaaatgccaggcttctcacgttccagacctggcctcttacctttctgtccccaacagacctcgcaaaagctggtttttactatattggtcccggagacagagtcgcatgtttcgcttgtggaggcaagttgagtaattgggagcccaaggacaatgcgatgagcgagcatcttcgacacttccctaaatgtccgttcatcgagaaccagttgcaagacacctctaggtacacagtgtcgaacctttcaatgcaaacgcacgccgctcgattcaagacctttttcaactggccctcttctgtgttggtaaatccagagcaacttgccagcgcgggtttttattacgttgggaactccgatgatgttaaatgcttctgctgtgacggcgggctcaggtgctgggagtcgggcgatgatccttgggtccagcacgcaaagtggttcccacgttgtgagtatctgatcaggataaaggggcaagagttcatacgccaagtccaagcttcctatccccacctgcttgagcaactgctctcgacctccgattcgcccggagatgagaacgcagaatcatctatcatacattttgagccaggcgaagatcactcagaggatgctatcatgatgaacacaccggttatcaatgccgcagtggagatgggcttctcacgttcccttgttaagcaaacagttcagcgtaagatcttggctaccggtgagaattatcgattagtaaatgatctcgtcttagatctgttgaacgcagaggatgagatcagagaggaggagcgtgaacgggcgacagaggagaaggaatcgaacgatctactcttgattaggaaaaaccgcatggctttgttccaacatcttacttgtgtcatcccgatcctcgactcgttgctaacggccggcatcatcaatgaacaggaacatgacgtgatcaaacagaagacgcaaacgagtctgcaagctcgtgagttgatagataccattctagttaaaggaaatatagcagcaaccgttttccgaaacagcctacaagaagccgaagcggtcttgtacgaacacctttttgtacagcaagatatcaaatatataccgacagaggacgtaagcgatctccccgtggaagagcagctcaggcgtttacaggaggaacgtacatgtaaggtgtgcatggacaaggaggttagtattgtgttcattccgtgcggacatttagtagtctgcaaagactgcgccccctcactgcgaaagtgcccgatctgtaggagcaccataaagggaacggtccgtacctttctgtca

SEQ ID NO: 32316 - DNA, 1812 bp, synthetic construct
  misc_feature 1..1812: note = Description of Artificial Sequence: Synthetic coding sequence
  source 1..1812: mol_type = other DNA
atgaacatcgtcgaaaactccatcttcctctcaaatctgatgaagtcggcgaatacgttcgaactcaagtacgacctgtcctgcgagctgtaccggatgagcacttactccacgtttccggccggcgtgccggtcagcgagagatcacttgcacgcgctggcttctactacacgggagttaatgataaggtgaagtgtttctgctgtggactgatgctcgataattggaagcgcggcgacagcccgaccgaaaaacacaaaaaactgtacccatcatgcaggttcgtccaatctctgaactcagtgaataacctcgaagcaacttcccagcctacttttccaagcagcgtcacgaactctacccactcgctgctgccaggcactgaaaattcaggctattttcgaggatcgtactccaactccccgtcgaatcccgtgaactcgagagctaaccaagatttctccgccctcatgcggagcagctaccactgcgcaatgaacaacgagaacgcccgcttgctcaccttccagacctggccgctgacgttcctctcccccaccgacttggccaaggctggcttttactacatcggacccggcgaccgcgtggcctgcttcgcctgcggcggaaaactgtccaactgggagccaaaggacaacgccatgagcgaacacctgagacacttccccaagtgccccttcattgaaaatcaactccaggacacttccagatacaccgtgagcaacctctcaatgcagactcatgcagccagatttaagaccttctttaactggccgtcctcagtcctggtgaaccctgaacaactggcctcggcgggattttactacgtcggtaactcggatgacgttaagtgcttttgctgtgatggtggacttcggtgctgggagtcgggagacgatccgtgggtgcaacacgccaaatggttcccgaggtgtgagtacctgatccgcatcaaaggccaggaattcatccgccaggtccaagcctcgtacccacacctgctggaacagctgctgtccaccagcgattcccctggagacgaaaatgccgaatcatcaatcatacatttcgaaccaggagaagatcatagcgaggatgcaatcatgatgaacaccccggtcatcaacgcggctgtggaaatgggattttcccgcagcctggtcaagcagaccgtgcaacggaagatcctcgccaccggagaaaactaccgcctggtgaacgacctggtgttggatctcctcaatgccgaggatgagatccgcgaggaggagcgtgaacgggcaaccgaagagaaggagtcgaatgacctgctgctgatcagaaagaaccgcatggcccttttccagcatctgacctgcgtcatccctattttggactcattgctgaccgctggtattatcaacgagcaggagcacgacgtcattaaacaaaaaacccagaccagtttgcaggcgcgggaactcatcgatacgatcctggttaagggtaatatcgctgcgactgtattcaggaatagcctgcaggaagccgaggcggtcctctacgaacatctctttgtgcaacaggatatcaagtacatcccgaccgaggacgtcagcgacctgccggtggaggagcagttgcggcgcctgcaggaggagcgcacctgcaaagtgtgtatggataaagaagtatcaatcgtgttcatcccttgtggccaccttgtggtctgtaaggactgtgccccgtcactgcggaaatgcccgatctgccgctccaccattaaggggaccgtgaggaccttcctgtcg

SEQ ID NO: 32317 - DNA, 1812 bp, synthetic construct
  misc_feature 1..1812: note = Description of Artificial Sequence: Synthetic coding sequence
  source 1..1812: mol_type = other DNA
atgaacattgtggaaaactccatattcctttccaatctgatgaagagcgctaacacattcgagctcaagtacgacctcagctgcgagctgtataggatgagtacttacagtactttccctgcaggagtgcccgtgtccgaaaggagcttagctagagcagggttctactacacaggagtaaacgacaaggtaaagtgcttctgttgtggtctgatgttggacaactggaaaagaggtgattccccgaccgaaaagcataaaaagctctacccatcttgccggtttgtccaatctcttaacagcgtaaacaatctcgaggctaccagccagcccacttttccctcttccgttacaaatagtacacattccctcctgcctggcaccgaaaactccggctacttccgcgggtcctatagtaactcgccctcgaatcccgtcaacagtagagctaaccaggatttcagtgccttaatgaggtctagctatcactgcgcaatgaataacgagaatgcgagattactcacttttcagacttggccactcacattcctaagtccaacggatttggccaaggccgggttttattacatagggcccggcgatcgtgtcgcttgctttgcgtgcggcggcaaactctcaaattgggagccgaaagacaatgccatgtcggaacaccttaggcatttccccaaatgcccattcatcgaaaaccaactgcaagacacctcacgatacacagtgtctaacctcagtatgcaaacgcacgccgctcgattcaaaacgttttttaattggccctccagcgtgctggttaaccccgagcagttggcctccgccggcttttattacgtgggcaatagtgacgatgtgaaatgtttctgttgcgacggggggctccgatgttgggaatccggcgacgacccctgggttcagcacgctaagtggtttccgcggtgcgagtatcttattcgcattaaaggccaggagttcattaggcaggttcaggcctcatacccccatctgctagagcagctcctttcgaccagcgattcgcctggcgacgaaaacgccgagagcagtataatccatttcgagcccggggaggaccacagtgaggatgctattatgatgaacacgcctgtgattaatgcagcagtggaaatggggttctccagatcccttgtcaagcaaactgtgcagcgaaagattctggccacaggagagaattatcgattggttaacgacctcgtcctcgatctgctgaacgctgaggatgagatccgggaggaggaacgggaacgggctactgaggagaaggagagcaatgacctgttgcttatcaggaagaatagaatggctttattccaacatttaacatgtgtgatccccattctggacagtctactgaccgcaggtattatcaatgaacaggagcatgatgtcatcaaacagaagacccagacttctctgcaggctcgggagcttatcgatactatattagtcaagggcaacattgccgccaccgtttttaggaattcactacaggaagccgaggccgtgctctacgagcacctcttcgtacagcaggacatcaagtacatacccaccgaggatgtcagcgatctgcctgtagaggagcagctaaggaggttgcaagaggaacgaacatgcaaagtgtgtatggataaagaggtctctattgttttcataccatgcggtcatttggtagtctgtaaagattgcgccccttctttacgaaagtgcccaatttgcagatccaccattaaagggaccgtgaggacctttctgtcc

SEQ ID NO: 32318 - DNA, 1812 bp, synthetic construct
  misc_feature 1..1812: note = Description of Artificial Sequence: Synthetic coding sequence
  source 1..1812: mol_type = other DNA
atgaatatcgtggaaaactcaatctttttgagcaatctgatgaagtcggccaacaccttcgaactgaagtacgacctgtcatgcgagctttataggatgtcgacttactcgacctttccggcaggagtccctgtcagcgagcggagcctggcgcgcgccggcttttactacactggagtgaacgacaaggtgaaatgcttttgttgtggattgatgctcgataactggaagcggggcgattcccccacggagaagcataagaaactctacccgtcgtgcagattcgtgcagtcgctgaactcagtcaataacctcgaggccacctctcaaccaaccttcccgtcatcggtgactaactccactcactcactgctccccggcaccgaaaacagcgggtacttcagggggagctactcgaactcgccgtctaaccctgtcaattccagggcgaaccaggatttctcagccctgatgcgctcctcgtaccactgcgctatgaataacgaaaatgctcgcctgctgaccttccagacctggccactgacttttctctcaccgactgatctggccaaggctggattctactacatcggaccgggcgaccgcgtggcttgctttgcgtgtgggggcaagctctctaactgggagccgaaggacaacgcgatgtcagaacacttgcgccatttcccaaagtgtccgttcatcgagaaccaactgcaggatactagccggtataccgtgtccaacctgtcgatgcagacccacgcggccagattcaagaccttcttcaactggccgtcgtccgttctggtgaatccggaacagcttgcctccgcgggattctattacgtgggaaatagcgatgacgtgaagtgcttctgctgtgacgggggactgcgctgctgggagtcaggggatgacccttgggtccaacatgcgaagtggttcccacgctgcgaatacctcatccgcattaaaggccaggagttcatcagacaggtccaggcatcatatccacatctcctggagcaactcctctccacgtccgactcccccggcgatgagaacgcggaatcaagcattatccacttcgaaccgggcgaagatcactcggaagatgccattatgatgaacaccccggtgataaacgcagcagtggagatgggattttcgcgctcactcgtcaagcaaaccgttcaacgcaaaatccttgctaccggagaaaactaccgccttgtcaatgatcttgtcctggacctgctgaacgctgaggatgaaatcagagaggaagagcgggagagagcaacggaagagaaggagagcaacgacctgctgctcatccgcaagaaccggatggcactgttccaacacctcacttgcgtgatcccaatccttgactccctgctcaccgccggaatcatcaacgaacaggagcatgacgtgatcaagcagaaaacgcaaacgtcactccaagctcgggagctcatcgacaccattttggtcaagggaaatatcgccgccaccgtctttcgcaactctctgcaagaagccgaagccgtgctgtacgaacacctgttcgttcagcaagatatcaagtacatcccaactgaggacgtctccgatctgccagtggaagaacaactgcggcggctccaagaggaacggacttgtaaagtctgtatggataaagaagtgagcatcgtgttcatcccctgcggccatctggtggtgtgcaaagactgcgccccgtcactgaggaaatgcccgatttgccggagcaccatcaaggggactgttcggacttttctgtcg

SEQ ID NO: 32319 - DNA, 1812 bp, synthetic construct
  misc_feature 1..1812: note = Description of Artificial Sequence: Synthetic coding sequence
  source 1..1812: mol_type = other DNA
atgaatatagtggagaattccatcttcctcagtaatcttatgaagagtgccaatacatttgaactcaagtatgacctgtcttgtgaattgtaccgcatgagcacgtatagcacgttccccgctggagtgccggtctcggagaggtctctggcgagggcaggcttctattacaccggggtgaacgataaagtgaaatgcttctgctgtgggttaatgctcgacaactggaagcgcggcgacagtcccaccgagaagcacaaaaagctctatccctcttgccgattcgttcaatctttaaatagcgtcaataacctcgaggccacaagtcagccgacctttcccagttctgtaaccaacagtactcactctctgctgccaggaacggaaaatagtggctattttcggggatcttacagcaattccccttctaacccagtgaacagccgcgcgaaccaggacttctcagctctgatgaggtcctcataccattgcgccatgaacaacgagaacgcaagactgttgacttttcagacctggccactgaccttcctctctcccactgacttggcaaaagctggcttctactacattgggccaggcgaccgcgttgcatgcttcgcgtgcggcggaaaattgagtaattgggaacctaaagataatgccatgtccgagcatttgagacacttccctaagtgtcccttcatagagaaccagctccaagacactagccgttatacagtcagcaatctgtctatgcaaactcacgccgcgcgttttaagactttttttaactggcccagtagcgttcttgtgaaccccgagcagctcgcctctgccggattctactacgtgggtaacagtgacgatgtaaagtgcttttgctgtgatggtggcctccggtgttgggaatccggcgatgatccgtgggtacagcacgccaagtggttcccacgttgcgaatatctgattaggatcaagggacaggaattcattcgccaggtgcaagcctcctacccccatctgctagaacagttgctgtctacgtccgattcccctggcgatgagaacgccgaatcgtccatcattcatttcgaacctggggaggatcattccgaagatgccattatgatgaacactccagtgattaatgccgcagtggagatgggtttcagccggtctttggtcaagcaaaccgtgcagcgaaagattctggcaacgggcgaaaactataggctcgtgaatgatctggtgcttgacctactcaatgccgaagacgagatcagggaggaagaacgggaacgagctaccgaggagaaagagtctaatgatctcctgctgatccggaagaaccgtatggccttattccagcaccttacttgtgtgattcctatcttggattccctcttgactgccggcatcataaacgagcaagagcatgatgtaatcaagcaaaagacacagactagcctgcaggcccgggaactcattgacactatcctcgtcaaaggaaatatcgcagcaaccgtcttccgcaattccctgcaggaggctgaagcggtgctttatgagcatttgttcgttcaacaggatatcaagtacatcccaactgaagatgtgtccgatctgccagtcgaggagcagttacgacggctccaagaggaacggacttgtaaggtgtgcatggacaaggaggtctcaatagtattcataccgtgtggccacttggtggtgtgtaaggactgtgctccttcattgagaaagtgcccgatttgccgcagcacaattaaggggaccgtcaggaccttcctgtcc

SEQ ID NO: 32320 - DNA, 1812 bp, synthetic construct
  misc_feature 1..1812: note = Description of Artificial Sequence: Synthetic coding sequence
  source 1..1812: mol_type = other DNA
atgaacatcgtggagaattccatctttctctctaatctgatgaagagtgccaacacctttgaactgaaatacgacctgtcttgcgaactgtacaggatgagcacttactccacatttcctgccggcgtgcccgtgagcgagcggagtctggcacgggctggcttttactataccggcgtgaatgataaggtcaaatgcttttgctgtggacttatgctggacaactggaaacgcggagatagcccaacggagaagcacaagaagctgtatccatcctgccggttcgtgcagtctcttaacagcgtaaataacctggaagccactagtcaacccacgttcccgtccagtgtaacgaatagcacacactcgctgctgcccggtactgagaatagtggctattttcggggatcatacagcaattctccttctaatcccgtgaacagtcgcgccaaccaagacttctccgctttgatgcgatcgtcttatcactgtgccatgaacaatgaaaacgcgcgcttgttgacctttcaaacgtggcccttaacctttttgtctccgactgacctggcaaaggctggattctactacataggacccggggacagggtagcttgctttgcatgcggcggcaaattgtcaaattgggagccaaaagacaacgctatgtccgaacatttacggcactttcctaagtgcccttttatcgagaaccaactccaggacacatccaggtacacagtgagcaacctcagcatgcagacacatgccgccagattcaagacattcttcaattggccttcttctgtcctcgtgaatcccgagcaactcgcgagcgccgggttctattatgttggtaattcagacgatgtgaagtgtttctgctgcgacggcggccttcgatgctgggaatccggagatgacccttgggtgcagcacgctaagtggtttcccagatgtgagtatctgattcgaatcaagggccaggagtttatcaggcaagtgcaggcttcctatccacacctccttgagcagctgctgtctacaagtgactcaccaggcgatgagaacgccgaatcttccataatccacttcgagcccggagaggatcactctgaggatgctatcatgatgaacacccctgtgataaatgctgcagtagagatgggcttctcccgctcgttagttaagcaaacggtccaacgcaaaatcctggcgactggcgaaaactatcgtttagtgaatgaccttgttcttgacctgcttaatgctgaagacgagatacgggaagaagagagggagagagctacggaagaaaaagaatcgaatgatctgcttctgatcagaaaaaatcgaatggccctttttcagcacctgacttgcgtcattccaatactggatagccttcttacagccggcatcattaatgagcaagaacacgacgtaattaaacagaagactcagacatctttgcaggcccgcgagctaatcgacacaatccttgtcaaaggcaacatcgctgccaccgtgttccggaattccctccaggaagcggaggcagtgctttatgagcatctatttgtgcaacaggacatcaaatacatccctaccgaagatgtaagtgatctgcctgttgaagagcaactcaggaggctacaggaagaacggacatgcaaggtttgcatggacaaagaagtttccattgtgttcattccctgcgggcaccttgtggtatgtaaagactgcgctccctccctgcggaaatgccctatctgtcggtccacgattaaagggaccgtccgcaccttcctgagc

SEQ ID NO: 32321 - DNA, 1812 bp, synthetic construct
  misc_feature 1..1812: note = Description of Artificial Sequence: Synthetic coding sequence
  source 1..1812: mol_type = other DNA
atgaatatagtagaaaattcgatatttctatcgaatttaatgaaatcggcgaatacgtttgaactaaaatatgatttatcgtgtgaactatatcgaatgtcgacgtattcgacgtttccggcgggtgttccggtttcggaacgttcgctagcgcgtgcgggtttttattatacgggtgttaatgataaagtaaaatgtttttgttgtggtctaatgctagataattggaaacgtggtgattcgccgacggaaaaacataaaaaattatatccgtcgtgtcgttttgtacaatcgttaaattcggtaaataatttagaagcgacgtcgcaaccgacgtttccgtcgtcggtaacgaattcgacgcattcgttactaccgggtacggaaaattcgggttattttcgtggttcgtattcgaattcgccgtcgaatccggtaaattcgcgagcgaatcaagatttttcggcgctaatgcgttcgtcgtatcattgtgcgatgaataatgaaaatgcgcgtctactaacgtttcaaacgtggccgctaacgtttttatcgccgacggatctagcgaaagcgggtttttattatataggtccgggtgatcgagttgcgtgttttgcgtgtggtggtaaactatcgaattgggaaccgaaagataatgcgatgtcggaacatttacgacattttccgaaatgtccgtttatagaaaatcaattacaagatacgtcgcgatatacggtatcgaatttatcgatgcaaacgcatgcggcgcgatttaaaacgttttttaattggccgtcgtcggtattagtaaatccggaacaattagcgtcggcgggtttttattatgtaggtaattcggatgatgttaaatgtttttgttgtgatggtggtctacgatgttgggaatcgggtgatgatccgtgggttcaacatgcgaaatggtttccgcgatgtgaatatctaatacgtataaaaggtcaagaatttatacgacaagtacaagcgtcgtatccgcatttattagaacaactattatcgacgtcggattcgccgggtgatgaaaatgcggaatcgtcgataatacattttgaaccgggtgaagatcattcggaagatgcgataatgatgaatacgccggtaataaatgcggcggtagaaatgggtttttcgcgttcgttagtaaaacaaacggttcaacgtaaaatactagcgacgggtgaaaattatcgattagtaaatgatctagttctagatttactaaatgcggaagatgaaatacgtgaagaagaacgagaacgagcgacggaagaaaaagaatcgaatgatttattattaatacgaaaaaatcgaatggcgctatttcaacatctaacgtgtgtaataccgatattagattcgttactaacggcgggtataataaatgaacaagaacatgatgtaataaaacaaaaaacgcaaacgtcgttacaagcgcgagaactaatagatacgatattagttaaaggtaatatagcggcgacggtttttcgtaattcgttacaagaagcggaagcggttttatatgaacatttatttgtacaacaagatataaaatatataccgacggaagatgtatcggatttaccggtagaagaacaactacgtcgtttacaagaagaacgaacgtgtaaagtttgtatggataaagaagtatcgatagtttttataccgtgtggtcatctagtagtttgtaaagattgtgcgccgtcgctacgtaaatgtccgatatgtcgttcgacgataaaaggtacggttcgaacgtttttatcg

SEQ ID NO: 32322 - DNA, 1812 bp, synthetic construct
  misc_feature 1..1812: note = Description of Artificial Sequence: Synthetic coding sequence
  source 1..1812: mol_type = other DNA
atgaacatcgtggagaactctattttcttgtcaaatctcatgaagtccgctaacacgttcgagctcaagtacgacctctcatgcgagctctatcggatgagcacctactcgaccttcccggctggagtcccagtgtcagagcgaagtctggcccgggcgggtttctactacaccggagtgaacgacaaggtgaagtgtttctgctgcggtctgatgctggataactggaagagaggggactccccaactgaaaagcacaaaaagctgtacccgagctgccggttcgtgcagtccctgaattcagtgaataacctggaagccacctcgcaacctactttcccatcgtctgtgaccaattcgacccactcgcttctgcccggtaccgaaaactccggctacttccgtggatcctacagcaattcgccatccaacccggtgaactccagggctaatcaagacttttcagctttgatgcggtcatcctaccactgcgccatgaacaacgagaacgcccggcttcttactttccagacctggcctctcactttcctctccccgaccgacctcgcaaaagcaggattctactacatcggaccaggggaccgggtggcttgtttcgcttgcgggggaaaactgtccaattgggagccgaaggataatgccatgtccgagcacctccgtcatttccctaagtgtccattcatcgaaaaccagctccaagacacttctcgctacacggtgagcaacctgtcgatgcaaacccacgccgctagattcaagacctttttcaattggccgtcgtcagtgctcgtgaaccccgagcaactggctagcgcgggcttttactacgtgggaaacagcgatgacgtgaaatgcttctgttgtgatggcggattgcgctgctgggagtcgggggatgatccctgggttcagcacgcgaaatggtttccccgttgtgagtacctgattcggatcaaagggcaggaattcattcggcaagtgcaagcctcgtacccacacctgctcgaacagctgctttccacgtccgatagcccgggggatgaaaatgcggagagctcgatcatccatttcgagccgggagaggaccattccgaagatgccatcatgatgaacactcccgtgattaacgccgccgtggagatgggattctccagatcgcttgtgaaacaaactgtccaaaggaagattctggcgaccggagagaattacagactggtcaacgacctcgtgctggacctgcttaatgccgaggacgaaatccgcgaggaagagcgcgagagagcgaccgaagaaaaagaatcgaacgatctgctgctgattagaaagaaccggatggccctgttccagcacctcacttgcgtcatcccaatactcgactcacttctgactgccggaatcatcaatgaacaggaacacgatgtgattaaacaaaagacccaaacctcgctgcaagcgcgtgaactgatcgacactatcctggtcaagggcaatatcgctgcgaccgttttcagaaacagcttgcaggaagcagaagcagtcttgtacgaacatttgtttgtgcagcaggacatcaagtacatcccgaccgaagatgtgtccgacctcccggtcgaggagcaactgcgcagactgcaggaagaacgcacctgcaaggtgtgcatggacaaggaagtatcgatcgtgttcattccgtgcggacatctggttgtgtgcaaggactgcgcccctagcctgcggaaatgcccaatctgccgcagcaccatcaagggcaccgtgaggacctttctgtcg

SEQ ID NO: 32323 - DNA, 1812 bp, synthetic construct
  misc_feature 1..1812: note = Description of Artificial Sequence: Synthetic coding sequence
  source 1..1812: mol_type = other DNA
atgaacatcgtggagaactccatcttcctgagtaatcttatgaagagtgctaatacctttgagctgaagtacgatctctcttgcgagctttacagaatgagcacgtatagtactttcccagctggtgtaccggtgtccgagcgttccctggcccgcgctggcttttactacactggagtgaacgacaaggtgaaatgcttttgctgtggtttgatgctggataactggaagcgcggggatagtcccaccgaaaagcacaagaaactctacccaagctgccgcttcgttcaatctctcaacagcgttaataatttggaagcgaccagccaacccacctttccctcttctgtgacaaactcgacccattctttattgccaggcaccgagaactctggatattttagaggaagctattcaaactcaccaagcaatccagtgaattctcgcgctaaccaggattttagtgccctcatgagaagctcttaccattgcgctatgaataacgagaacgcccggcttctgacttttcagacatggccacttactttcctttccccaacagatcttgcaaaggcgggtttctactatattggacccggcgatagggtggcatgttttgcttgtgggggcaaactgagtaactgggagcctaaagacaatgcaatgtccgagcacctgagacacttccctaaatgcccgttcatcgagaaccagttgcaggacacttctaggtacacggtcagtaacctgtctatgcaaacacatgccgccagatttaaaaccttcttcaactggccttctagtgtgctcgttaaccctgagcaacttgcaagtgcaggcttttactatgtgggtaactccgacgacgttaagtgtttctgctgtgacgggggtctgcgctgctgggagtccggagacgatccttgggtgcaacacgcgaaatggttccccaggtgtgagtacctgatacggatcaaaggccaagagttcatcagacaggtgcaagcgtcttacccacatctccttgagcagctgctgtctacatctgattcccccggcgatgaaaacgcggagtcgtcaatcattcattttgagcctggagaggatcatagtgaggatgctattatgatgaacaccccagtcatcaacgcggccgtggagatgggattctctcggagtctagtcaagcaaaccgtgcaaagaaaaatcctcgctaccggagagaactaccgtctcgtaaacgatctggtgctggacctgctgaatgctgaggacgagatcagagaggaagaaagagagagggcgaccgaggaaaaggagtctaacgatcttctgctcatccgcaagaatcggatggccctcttccagcatctgacatgcgtgatccccatcctggattccttgctgactgccggaattataaacgagcaagaacacgacgtgattaaacagaagactcagacatctctccaggccagagaactgattgacacaatactggtcaaaggcaacatagccgctaccgtgttccgcaattctctccaggaagcagaggctgtgctgtacgaacatttgtttgtgcagcaagacatcaagtacatccccaccgaggatgttagtgacctgccggtggaggagcagttacgtaggcttcaagaagaacgaacatgtaaggtctgcatggacaaggaagttagtatagtcttcattccctgcggccaccttgttgtttgtaaagactgtgcaccatcactgagaaagtgtcccatatgccgcagcactataaaagggactgtgaggacatttctgtca

SEQ ID NO: 32324 - DNA, 1812 bp, synthetic construct
  misc_feature 1..1812: note = Description of Artificial Sequence: Synthetic coding sequence
  source 1..1812: mol_type = other DNA
atgaatatagtggaaaactccatcttcctatccaaccttatgaagtctgctaacactttcgaactcaaatatgacttgtcatgtgaactgtatcgcatgagcacatatagcacgttccccgcgggagtccctgtgtccgaaaggagcctcgcccgagctgggttctactacaccggtgtgaacgataaggtgaagtgcttctgttgtggtctcatgctggataattggaaaagaggggactcccccaccgagaagcataaaaagctgtacccttcatgccgatttgttcagtccctcaactccgtgaataatttggaagcaacatcacagccgacttttcctagctctgttactaacagcacccactccctccttcccggcaccgaaaattctggttactttcgggggtcttactctaactccccctccaacccagtgaactcgagggcgaaccaagatttctcagcactcatgcgaagcagttaccactgcgccatgaacaatgaaaacgccaggctgcttacctttcaaacttggcctttgaccttcctgagccccacagacctcgccaaggccggcttttattatattgggccaggagatcgcgtagcgtgcttcgcatgtggtgggaagctcagcaactgggaaccaaaggacaatgccatgagcgaacatctgagacattttcccaagtgtccctttattgagaaccagctgcaggatacatctagatacactgtgtccaacctgtcaatgcagacacacgctgcgagatttaaaacgttctttaactggcctagcagcgtgctggtgaatccagaacagctggcgtcagctggattttactacgtcggtaattcagacgacgttaaatgtttctgctgtgacgggggccttaggtgttgggagtccggtgacgatccttgggtgcagcacgcgaaatggttcccaagatgcgaatacctcatccgaattaagggacaggagttcatcaggcaggtacaggcttcctatccccatctccttgaacagttactgagtacttcagacagccccggcgacgaaaatgctgaatccagtattatccatttcgagccaggtgaagaccactcagaggatgccatcatgatgaatactccagtcatcaacgctgccgtggagatgggtttcagccgaagcctggtgaaacagactgtccaacgaaagatcttggccactggcgagaattaccgcctggtgaacgacctcgtgttggatctgttgaatgctgaagatgaaatcagggaggaggaaagggaacgagcaactgaagaaaaggaatcaaacgacctgttgctgattcgcaaaaacagaatggcactctttcagcacctgacttgtgtgataccaatcctggactcgctgcttactgcagggattattaatgaacaggagcacgatgttatcaaacagaaaacacagaccagtctccaggctagagagttgattgacaccatcctagtcaaaggtaacattgccgccaccgtgttcaggaactccctacaggaagccgaagcggtgctctacgaacacctgttcgtgcaacaagacattaaatacataccaaccgaagacgtttcagacttgcctgtagaagaacagctgaggaggcttcaggaagagcgcacctgtaaggtgtgtatggacaaagaagtaagcattgtttttataccgtgcgggcacctggtggtctgcaaggactgcgctccctccctcagaaagtgcccaatatgtagatccaccatcaagggcactgttagaacctttctgtca

SEQ ID NO: 32325 - DNA, 1812 bp, synthetic construct
  misc_feature 1..1812: note = Description of Artificial Sequence: Synthetic coding sequence
  source 1..1812: mol_type = other DNA
atgaacattgtggagaactcgatttttctgtcgaacctgatgaagtcagcgaatacctttgagttgaaatatgatctttcgtgcgaactgtaccgcatgagcacctactccacttttcctgcaggtgtgccagtgtcggaacgctccctggcacgagcaggattctattacactggagtgaacgataaagtgaagtgcttttgttgtggccttatgcttgataactggaagagaggtgactcgcctactgagaagcacaaaaaactgtacccttcctgtcgcttcgtccagtccctcaactcggttaacaaccttgaggcgacttcgcagccaacctttccatcatcggtgactaattcgactcacagcctcctgcccggaaccgaaaactcggggtactttaggggttcctactccaactctccgtcgaatcctgtgaactcacgggcaaaccaagatttttccgcactgatgaggtcatcgtaccactgtgccatgaataacgagaacgcaaggcttctgaccttccagacctggccactgacctttttgtccccgactgatctggcgaaagctggattctactacattggtccaggagatagggtcgcatgctttgcatgtggaggaaagctgtctaactgggaaccaaaagataacgccatgtcagagcatttgagacactttcccaaatgtccattcattgaaaaccaactgcaggatacttcgaggtatactgtgtccaacctctcaatgcagacccatgcggcacgctttaagaccttctttaactggccatcctcggtccttgtcaatccagaacagctggcaagcgctggcttttactacgtgggcaatagcgatgatgtgaagtgtttttgctgtgatggcggacttcgctgttgggaatctggtgatgacccttgggtccaacatgccaagtggtttccgcggtgcgagtacctgatccgcataaagggacaagaattcattcgtcaggtgcaagcctcatacccccacctgctggagcagctccttagcacttcggattcaccaggagatgaaaatgcagagtcgtccataattcatttcgaacctggagaggatcactcagaggacgccattatgatgaataccccagtgatcaacgccgcagtggaaatggggttttcacgatcacttgtgaagcaaactgtgcagagaaagatccttgccactggtgagaattaccgtcttgtgaacgacctggtgctcgacctgcttaatgccgaagatgaaattcgggaagaagaacgtgaacgtgccaccgaagaaaaggaatccaacgatctcctgttgattagaaagaaccgcatggcgttgtttcagcaccttacttgtgtgatcccaatccttgactcgctccttacggccggtatcattaacgagcaagaacatgatgtcataaagcagaaaacccagacctctctccaggcaagggaacttatcgacaccatcctcgtgaaaggtaacatcgctgccactgtctttcgcaactccctgcaggaagcggaagcggtcctttacgagcatctgtttgtgcagcaggacattaagtatatacctaccgaagatgtctcagatcttcccgtcgaggaacaacttcgcagactccaggaggagaggacctgtaaggtgtgtatggacaaggaagtcagcatagtgtttattccatgcggtcatctggtcgtgtgtaaggattgcgcaccttcgctgcggaagtgtcccatctgtcggtcgaccatcaaggggactgttaggacctttctctca

SEQ ID NO: 32326 - DNA, 1812 bp, synthetic construct
  misc_feature 1..1812: note = Description of Artificial Sequence: Synthetic coding sequence
  source 1..1812: mol_type = other DNA
atgaacattgtggaaaatagcatattcctttcgaacctgatgaagtccgcaaatactttcgagctgaaatacgacctgagctgtgaactgtacagaatgtcgacctactcaacttttcccgccggggttccagtgtcggaaagatcgctggcacgtgcagggttctactacaccggagtgaacgataaggtgaagtgcttctgctgtggtctgatgctggacaactggaagcggggagattccccgaccgagaagcacaaaaaactttacccgtcgtgtagatttgtccaatcccttaattcggttaacaacctcgaagcaaccagccaaccaacgtttccctcctcagtgactaactccacccattcgcttcttccaggtactgaaaactccggctacttccgagggtcttactctaacagcccctcgaatccagtgaattcgcgcgccaaccaagattttagcgccctgatgagaagcagctaccactgtgctatgaacaatgaaaacgcccgtttgctgacttttcaaacttggccattgacttttctctcccccaccgatctggccaaggcaggcttttactacatcgggcctggcgatcgggttgcctgttttgcatgtggggggaagttgtcgaattgggaaccaaaagacaacgcaatgtcggagcacctcagacatttcccaaaatgcccttttatcgaaaaccagctgcaggatacctcccgttacactgtgtcaaatctttccatgcagactcatgcagcaaggttcaaaacctttttcaattggccgtcctccgtccttgtgaatcccgaacaactggccagcgcaggtttttactacgtgggcaacagcgacgacgtgaaatgtttttgttgtgacggaggactccgatgttgggagtcgggtgatgatccctgggtccagcatgccaagtggtttccacgctgtgagtaccttattagaatcaagggccaagaattcattaggcaagtgcaagcatcatacccacatctgctggaacaactgctttcgacgtcggattcacctggtgacgaaaatgcagagtcatccatcatccatttcgaacctggagaggaccattctgaagatgcaataatgatgaatacgcctgtgattaatgcagcggtggaaatgggattttccagaagcctggtcaagcagaccgtgcaaagaaagatccttgccactggcgagaactacaggctcgtcaatgatctggtgctggacctgctgaatgcagaagatgaaattagagaggaagagcgggagcgggccaccgaagaaaaggagtcgaatgatctgctgcttattagaaagaaccggatggcacttttccagcacctgacttgcgtgattcccattctggactccctgttgaccgcggggattatcaatgaacaagagcatgatgtcatcaagcagaaaacgcaaacctcgctgcaagcacgggaactcattgacaccattttggtgaaaggcaatattgcggcaaccgtctttcgcaacagcctgcaagaggctgaagctgtcctctacgagcaccttttcgtgcagcaagacattaagtacatcccaacggaagatgtgtccgacctgccggtggaagaacaactgcggcgcctgcaggaagaaaggacttgcaaggtttgtatggataaggaagtctcaattgtctttattccttgtggccatctcgtcgtctgcaaggactgcgcacctagcttgcgaaagtgtcccatttgtcgctcgactatcaaaggaactgtgcggacttttctgagc

SEQ ID NO: 32327 - DNA, 1812 bp, synthetic construct
  misc_feature 1..1812: note = Description of Artificial Sequence: Synthetic coding sequence
  source 1..1812: mol_type = other DNA
atgaacatagtggaaaacagcatctttttgagcaacctgatgaagtctgcgaatactttcgagctcaagtacgatctgagctgcgagctatacagaatgtctacctacagtacgttccccgccggcgttcccgtcagtgagcgctctctggcccgagctggcttctattataccggggtgaacgataaggtcaagtgcttctgctgtggcctgatgctcgacaactggaaaaggggtgattctccaaccgaaaaacacaagaagttgtacccctcttgccgatttgttcagtccctgaactcggttaacaacctcgaggcaacctctcaacctaccttcccaagcagtgtgactaactcaacccatagcctgcttcctgggacagaaaattcaggttacttcagaggtagttactcaaacagcccaagcaaccccgtgaacagtcgggcgaaccaggacttttcagctctgatgaggagtagttatcactgtgctatgaataacgagaacgcccggctactgaccttccagacgtggccactgacattcttaagcccgacagaccttgcaaaggccggcttctattatataggccccggagatagagtcgcttgtttcgcttgcggcggaaaattgagcaattgggagccgaaagataatgctatgagtgaacacttacgtcactttccaaaatgtccatttattgaaaaccagttacaagacacctctcgctacaccgtcagcaacctgtcaatgcagacccacgccgcaagatttaagacattcttcaactggccgtccagcgtgctggttaatccagaacagctggcctccgctggattctattatgttggcaatagtgatgatgtaaagtgcttttgttgcgacggcggcttgcgatgttgggagtctggcgatgacccctgggtgcaacacgccaagtggtttcctcggtgcgagtacctgataaggattaaaggtcaggaattcattcgccaggtacaggcttcttatcctcatcttctggagcaactgctcagcacctccgacagtcccggcgatgagaatgcagagtcttcgattatacactttgagcctggagaggaccacagcgaggacgccattatgatgaacacgcctgtgattaatgccgccgtcgagatggggtttagccggagccttgtcaagcagacggtgcagcgcaagatattagcaaccggtgagaattatcgactggttaacgatctcgtcttggacttacttaacgccgaagatgagatccgtgaggaggaaagggaacgcgccacggaggagaaagagagtaatgaccttctgcttattaggaagaatcgcatggccctatttcagcacctgacatgtgtgattcccatccttgactccctgctgacggctggtatcataaatgaacaggaacacgacgtcattaagcaaaagacccaaacttccctgcaggcacgggaactgatagatactatcctggtaaaggggaacattgccgctactgtgttcaggaatagcttgcaggaagctgaggccgtcctctacgaacatctgtttgttcagcaagatatcaagtacatacccacggaagacgtgtctgacctaccagtggaggagcagctcaggcgcctgcaggaagaaaggacttgcaaagtatgcatggataaggaagtgtctatagtgtttatcccgtgcggtcatctggttgtctgcaaagactgcgctccctcactccggaagtgccccatttgtaggagcaccattaaggggaccgttcggacgtttttatca

SEQ ID NO: 32328 - DNA, 1812 bp, synthetic construct
  misc_feature 1..1812: note = Description of Artificial Sequence: Synthetic coding sequence
  source 1..1812: mol_type = other DNA
atgaacattgtggagaactcgatcttcctgtcaaacttaatgaagtcagcgaacacattcgaacttaaatatgatctttcctgcgagctgtatcgcatgtccacatatagcacctttcccgccggggtgcccgtcagtgagcggagcctggcgagagcaggattttattatactggtgttaacgataaggtcaagtgcttttgctgcggtcttatgcttgacaactggaagcgtggagacagccccactgagaaacacaagaagttatacccttcctgcagatttgtgcagtcccttaatagcgtgaacaacctcgaggctactagccagcccacattccccagttcggtgaccaactcaacgcattccctgttgcccgggactgagaatagcggttattttagggggagctattccaactccccttctaatccagttaattcccgtgccaatcaggatttttccgctctgatgcgttcgtcttatcactgcgccatgaacaacgaaaacgcccgccttctgacttttcagacatggccactgaccttcctgtcccccactgacctggccaaggccgggttttactatattggaccaggtgaccgggtcgcctgtttcgcgtgcggaggcaaacttagcaattgggaaccaaaagataacgctatgtctgagcacttaaggcacttcccaaagtgcccttttattgagaaccagctacaggatacctctcgttacaccgtttccaatctgagcatgcagacgcatgccgcccgctttaagacgttctttaactggccttcatctgtgcttgtgaatcctgagcaactggcgtctgccggcttctattatgtcggtaattccgacgacgtgaaatgcttctgctgcgacggggggctccgttgctgggagtctggagacgacccctgggtgcagcacgccaaatggtttcctcggtgcgagtatctgatcagaattaagggccaagaattcatcaggcaagtgcaggcctcctatcctcatctgctggagcaactcctgtctacctctgattccccgggcgatgaaaacgcggagagttccattatccactttgagcccggcgaagatcactcagaagacgcaattatgatgaatacacccgtaattaacgctgccgtcgagatggggttcagtcggtcgctcgtgaagcagactgttcagcgtaagatcctggccactggggaaaactatcgcctggtgaatgaccttgtcctagatctgctcaatgcagaagatgagatccgggaggaagaacgcgaaagagcgaccgaggaaaaagaatctaacgatctcttgctgatcaggaaaaaccggatggctctgttccagcacctcacttgcgtgattccgatacttgacagtctgttaaccgcaggaataataaacgagcaggagcacgatgtgataaaacagaaaacccagacatccctccaggctcgtgaactgattgataccatactggtgaagggcaacatcgctgccactgtctttaggaacagcctgcaggaggccgaagccgttctttatgaacatctcttcgtgcaacaggacatcaaatacataccaaccgaggatgtaagcgatctgcccgtagaggaacagcttagacgcctgcaagaggaacggacctgtaaggtttgcatggacaaggaagtttccatagtcttcatcccctgtggccacctggtggtgtgcaaggattgcgctccgagcctgcgtaagtgccccatttgtcgcagcaccataaaaggaacggttcgcacattcttgtca

SEQ ID NO: 32329 - DNA, 1812 bp, synthetic construct
  misc_feature 1..1812: note = Description of Artificial Sequence: Synthetic coding sequence
  source 1..1812: mol_type = other DNA
atgaacatcgtcgagaattccatctttctttctaacttgatgaagtctgctaacacatttgagctgaagtatgatctttcttgtgaactgtacaggatgtccacctattcaacctttcccgccggggtccctgtgagcgagcggtctctggcccgggctggcttctactacacgggggtgaacgacaaggttaagtgcttctgttgcgggcttatgctggataactggaagagaggcgatagcccaacagagaagcacaaaaaactctacccgtcttgtcggttcgtccagtctctgaattcggtcaacaatttggaggctactagtcagcctacatttcccagctctgtgaccaatagcacacactcccttctgccaggaacagagaatagcgggtactttagaggcagttactcaaacagccctagcaacccggttaactctagagctaatcaggacttttccgccctgatgcggtctagctatcactgcgctatgaacaacgaaaacgcccggctgctgacgttccaaacatggccactcacattcttgtcaccaacggatcttgcaaaggccggcttctattatatcggcccaggggacagagtggcatgcttcgcctgtgggggcaaactctccaattgggagcccaaggacaatgctatgagcgagcatctgcggcactttcccaaatgcccattcatcgagaatcagctacaggacaccagccgctataccgttagtaacctgagtatgcagacccatgccgctcggtttaaaacgttctttaattggccttcatccgtgctcgtaaatcccgagcagctggcaagcgcggggttttattacgtcgggaactccgacgatgtgaaatgcttctgttgcgatggggggttgcggtgttgggagtccggagacgatccgtgggtacagcacgctaagtggttcccccgttgcgaatacctcattcgaatcaagggccaggagttcatcagacaggtgcaggcctcttacccccatttattagagcagctgctatccaccagcgattcgcccggggacgagaatgctgagtcgtcgatcattcacttcgaacctggggaagatcatagcgaagacgccatcatgatgaacacacccgtgattaacgctgctgtggagatgggcttttctcgttctctcgttaaacagaccgtgcaaagaaagatcctggctaccggcgagaactatcggctggtgaacgatctggtgcttgacctcctcaatgccgaggacgagatcagggaagaggaacgggaaagagccaccgaagagaaagagtctaacgacctgctgttgatccgcaagaatcgcatggcactgttccagcacctgacctgtgtgattccaattctggattccctcctgactgcaggtattatcaatgaacaggaacacgacgttatcaagcagaagacccagacaagcctccaggcgagagaattgatcgatacgatcctggtaaaagggaacatcgccgccaccgtgttccgcaatagcctgcaggaggcggaagcagttctgtatgagcacctgttcgtacaacaggatatcaagtacatccctacagaggacgtgagcgacctgccggttgaagagcagctgagacggttgcaggaagagcggacttgcaaggtctgtatggataaagaagtttcaatcgtgtttataccctgtggccacttagtggtatgcaaggactgcgctccatcgttaagaaaatgccccatatgtaggtctaccattaaggggacagtccgcaccttcctctct

SEQ ID NO: 32330 - DNA, 1812 bp, synthetic construct
  misc_feature 1..1812: note = Description of Artificial Sequence: Synthetic coding sequence
  source 1..1812: mol_type = other DNA
atgaacattgtggagaactcgatctttctctccaaccttatgaaatcggcgaacactttcgaactcaagtacgacctgtcttgcgagttgtacagaatgagcacgtattccactttcccagcaggtgtgcctgtgagcgaacgcagcctcgcgagagcaggattttactacactggagttaacgacaaggttaagtgcttctgctgcggcctgatgctggacaattggaagcgcggagattccccaaccgagaaacacaaaaagctgtacccgtcctgccggttcgtgcagagcctgaactccgtcaacaatctcgaggcaacctcccagccgaccttcccttcgtcggttaccaacagcacccactccctgcttccaggcaccgaaaattccggctattttcgggggtcatactcaaatagcccgtccaaccctgtcaactcacgggccaatcaggacttctcggcccttatgcggtcgtcgtaccactgcgcgatgaacaatgaaaatgctcggcttctcaccttccaaacctggccgctgacttttctttcaccaactgaccttgcgaaggccggattctattacattgggccaggggatcgcgtggcctgttttgcctgcgggggcaaactgtcgaattgggagcctaaggacaacgccatgtcagaacacctccgccacttcccgaagtgccctttcatcgaaaaccagctccaagatacctcacgctacacggtatcgaatctgtccatgcagacccatgccgcacgtttcaagacctttttcaattggccgtcatcagtccttgtgaatcctgagcagctggcctcagcgggattctactatgtgggtaattccgatgacgtcaagtgtttttgttgtgacggaggactgcgctgttgggaatcgggcgacgacccgtgggtgcagcatgccaagtggttcccacggtgcgaatacctgattcggatcaagggccaggaattcatccggcaagtccaagcatcgtacccacatctgctcgaacaattgcttagcaccagcgacagcccgggggacgagaacgctgaatccagcatcatccacttcgagccgggcgaggaccattcagaggatgcgattatgatgaacaccccggtgatcaacgcggccgtggagatgggtttctcaagaagtctcgtgaagcagactgtgcagaggaaaatactggctaccggagagaactaccgcttggtgaatgacctcgtgctggatttgttgaatgccgaagatgaaatccgcgaagaggaacgggaacgtgccaccgaagaaaaggaatccaacgatctgctcctgatcagaaagaaccgaatggcgctgttccagcacctgacctgcgtgatccctatcctcgattctcttctgacggccgggatcataaacgaacaggagcacgacgtaatcaagcaaaaaactcagacgtcgctgcaagctcgggagctgatcgatacgatcctggtgaaaggcaacattgccgccacggtgtttcgcaattcgcttcaagaggccgaggcagtgctgtacgaacatttgttcgtgcaacaagacattaagtacatccccactgaggacgtctccgacctgccggtggaggaacagctgcgcagattgcaggaagagagaacctgcaaggtgtgcatggataaggaagtttccatcgtgttcatcccctgcggacatcttgtcgtgtgcaaagattgcgcgccttcactgcggaaatgtccaatctgtagatcgactatcaagggaaccgtccggacttttctgtcg

SEQ ID NO: 32331 - DNA, 1812 bp, synthetic construct
  misc_feature 1..1812: note = Description of Artificial Sequence: Synthetic coding sequence
  source 1..1812: mol_type = other DNA
atgaacatcgtagaaaactccatctttctgagcaatcttatgaaaagtgccaacacctttgagttgaaatatgacttgtcatgtgaactctaccgcatgagtacatattccacattccctgctggcgtgcccgtgtctgagaggtccttggctagggcaggcttttactacacgggagtgaacgacaaggttaagtgcttctgctgcggcctgatgctcgataactggaaacggggcgatagccccactgaaaaacataaaaagctctacccttcatgcagattcgtgcagagtctgaatagtgtaaataacctggaggctacatctcagccaaccttcccatcctctgtgaccaactcaacccattccctgctccccggcacggagaacagcggttatttccggggctcctactctaacagcccaagcaatccagtgaatagtagggcaaaccaggattttagcgctttgatgaggtcatcttatcactgcgcaatgaacaatgaaaacgctcgactgctgacatttcaaacttggcccctcacattcctgtcaccaaccgatctggcaaaagccggattctattatatcgggccaggagatagggttgcctgcttcgcatgtggggggaagctttccaactgggagcctaaggacaacgctatgtctgagcacctgagacacttccctaagtgtcctttcatcgaaaaccagctgcaagacacttctaggtacacggtatctaacctgtccatgcagactcatgccgccagattcaagaccttctttaactggcctagctcagtgctggtcaacccggagcaactggccagcgccggtttttattatgtaggtaacagcgacgacgtcaagtgtttctgctgcgacggaggattgcggtgttgggagagcggcgacgacccctgggtgcagcacgcaaaatggtttccacgatgcgaatacctgattaggattaaggggcaggagttcattcgccaggtgcaggcgagctatccgcatctgctggagcagctcctcagcacgtcagattctcccggggatgagaacgccgagtcctccataatacacttcgaacccggtgaggatcacagcgaggacgcgatcatgatgaatacccccgtgatcaacgctgccgttgaaatgggcttttcaagaagcctggtgaagcagacagtgcaaagaaagattctggccacaggcgagaactacagactggtcaacgacctggtgttggacctcctcaacgctgaggatgagatcagagaggaggaacgagagagggcaacagaagagaaggaatcaaacgatcttctgctgatcaggaagaatcggatggctctgtttcagcacctcacctgtgtgatcccgattctggacagtctgttgacggctgggataataaacgagcaagaacatgacgtcatcaaacagaaaacgcagacatcacttcaggccagggagctcattgacacgattctggtaaaagggaatatcgctgcaacagtgttccgcaactccctgcaggaggccgaggccgtgttgtacgagcatttgttcgtgcagcaggacatcaagtacatcccaacggaggatgtgtcagatctcccagtggaggaacagttgaggaggctgcaggaggagagaacatgcaaagtttgcatggacaaggaggtctcaattgtgttcattccctgcggccaccttgtcgtgtgcaaagattgtgccccatccctccgaaagtgcccaatctgtcggtctacaatcaaagggacagtgcggacattcctctcc

SEQ ID NO: 32332 - DNA, 1812 bp, synthetic construct
  misc_feature 1..1812: note = Description of Artificial Sequence: Synthetic coding sequence
  source 1..1812: mol_type = other DNA
atgaatatcgttgagaacagcatctttctttcaaatctaatgaaatctgccaatactttcgagctgaaatatgatctctcttgtgaactgtatagaatgagcacttacagtacatttcctgctggggtaccagtgtctgagcgatctctcgccagggccggattctactacacgggggtgaacgacaaggtcaaatgcttttgctgtggcctcatgctcgacaattggaaaaggggtgatagcccaacagagaagcacaaaaagctctacccaagctgcagattcgtccagtcgctgaatagtgtgaacaatctggaagcaacttcccagcccacatttcccagctcagtaacaaactcgacccacagcttattgccaggaacagaaaactctggctatttccggggctcatactcaaacagccccagtaatccagtcaacagcagagctaatcaggattttagcgctttgatgcgctcctcttaccactgtgctatgaacaatgagaatgcacgactcctgacattccagacatggccacttacattccttagccctaccgatctcgcaaaagccggattttactacatcggcccaggcgaccgcgtggcttgctttgcctgtggggggaagttgtcaaattgggagccaaaggataatgccatgtccgagcacctcagacacttcccaaagtgtcccttcatcgagaatcagctccaggatacgtcccgctatacagtctccaacctctcgatgcagacacacgctgctagattcaagacattttttaattggcccagctccgtactggtaaaccccgaacagttagcttccgccggtttctattatgttgggaattcagacgacgtcaagtgtttttgctgcgacgggggcctgaggtgttgggaatctggagacgacccatgggtacaacatgcgaaatggtttcctagatgcgagtacctcattcgcataaagggccaggagtttataaggcaggtgcaagccagctatccgcatctcctggaacaattgctgtcaacatccgattcccccggcgacgaaaatgccgagagctccattatacatttcgagccaggcgaagatcactccgaggatgccatcatgatgaatacacccgttataaatgccgctgtcgaaatgggttttagccgttctcttgttaagcagactgtgcagaggaagattctggccaccggagagaattaccggcttgtcaacgatttggtgcttgacctgctaaacgcagaggacgagataagggaggaagagcgggagcgtgctacggaagagaaggagagtaatgatctgctgctgatacggaagaacagaatggcattgttccaacacctcacctgcgtgatcccaatcctcgacagcctgctcaccgcaggcattattaacgaacaggagcatgatgtgattaagcaaaaaacccagacatcactacaagcccgcgaactgattgataccattctcgtgaaaggcaacatagccgccacagtgttccgcaacagccttcaagaagccgaagccgtcttgtacgagcacctatttgtgcaacaggatataaagtacatacccactgaagatgtgagcgatctgccagtcgaggaacagctccggagactgcaggaggagaggacctgcaaggtctgcatggacaaggaagtatccatcgtgttcataccctgcgggcatttagtcgtgtgtaaggattgcgctcctagcctccggaaatgccccatatgcaggtcgacaataaaagggactgttcgcactttcttatcc

SEQ ID NO: 32333 - DNA, 1812 bp, synthetic construct
  misc_feature 1..1812: note = Description of Artificial Sequence: Synthetic coding sequence
  source 1..1812: mol_type = other DNA
atgaatatcgtggaaaatagcatcttcctgtcgaacctcatgaagtccgcaaacaccttcgaactgaagtacgatctgtcgtgcgagctgtaccggatgtccacttacagcaccttcccagccggagtgcctgtctccgagcggagcctcgcccgtgcaggattttactatactggagtgaacgataaggtgaaatgcttttgttgcggtctgatgctggataactggaagcgcggagacagcccgacggaaaagcataagaaactttatcccagctgccgtttcgtccagagcctcaattcagtaaacaaccttgaagcgacctcgcagcctaccttcccgtcgtccgtgactaactcgactcactctcttcttccgggcactgagaactctggatacttccgcgggagctactcgaacagcccaagcaacccagtgaattcgagagccaatcaagatttctccgccctcatgagatcctcctaccactgcgccatgaacaacgagaatgcccgcttgctcactttccaaacttggccactcacttttctgagcccgaccgatctcgcgaaagcaggcttctactacatcggacctggagatcgcgtcgcgtgttttgcatgcggagggaagctgtcgaactgggaaccgaaagacaacgccatgtccgagcatcttcggcactttccgaagtgcccatttatcgaaaatcagttgcaggacaccagcagatacactgtgagcaacctgtccatgcaaacccatgctgctcggtttaagactttcttcaactggccttcaagcgtgctggttaaccccgagcagctcgcttccgccggattctactatgtgggcaactcagacgatgtgaagtgcttctgctgtgacggcgggcttaggtgctgggaatcaggtgatgacccctgggtgcaacacgcgaagtggttcccgcggtgcgaataccttatccggatcaaaggccaggaattcatacgccaagttcaggcctcttatccgcacttgcttgaacagcttctgtcgacttccgactccccgggagatgaaaacgcggaaagctccatcatccactttgagccaggagaggatcactcagaggacgcaattatgatgaacaccccggtgatcaatgccgccgtcgaaatgggcttctcacgaagtctggtgaagcagacggtgcagaggaaaatcctggcgacgggtgagaactaccgcctggtgaacgatttggtccttgacctgctgaatgccgaggacgagatccgggaagaagaaagagaacgggcaactgaggagaaagaatccaatgaccttctgctgatccgaaagaatagaatggctttgttccagcaccttacctgcgtcatccccatcctcgactccctgctcaccgctggcatcataaatgaacaagaacatgacgtgattaagcaaaagacccagacctccctgcaagctcgcgaactgatcgatactatcctggtgaagggtaatatcgcggccaccgtgtttcgcaatagcctgcaggaagccgaagccgtcctgtacgagcaccttttcgtccagcaggatatcaaatacattcctaccgaggatgtgtcggacttgccagtcgaggaacaactgcgcaggctccaggaggagcggacctgtaaggtctgtatggacaaggaagtctctatcgtgttcatcccttgtggacatctggtagtgtgcaaggactgcgctccgtcgctgagaaagtgcccgatttgccggtcgacgatcaaaggtaccgtgcgcactttcctgtcg

SEQ ID NO: 32334 - DNA, 1812 bp, synthetic construct; identical to SEQ ID NO: 32317
  misc_feature 1..1812: note = Description of Artificial Sequence: Synthetic coding sequence
  source 1..1812: mol_type = other DNA

SEQ ID NO: 32335 - DNA, 1812 bp, synthetic construct
  misc_feature 1..1812: note = Description of Artificial Sequence: Synthetic coding sequence
  source 1..1812: mol_type = other DNA
atgaacattgtcgagaattccatttttctctcgaatcttatgaagtccgcaaacaccttcgaactcaaatacgacctgtcgtgtgaactttataggatgagcacctattcgaccttcccagcaggggtccccgtgtccgagagatcccttgcaagagccggcttttactacaccggagtgaacgataaagtgaaatgtttttgttgcggtctgatgttggataactggaagagaggagatagccctactgaaaaacacaagaagctctacccaagctgccggtttgtccagtccctcaactcagtcaacaatcttgaagcaacttcgcaacccacgttcccttccagcgtgactaattccacccatagcctgctccctggtaccgaaaattccggatacttcaggggtagctactctaactcgccgtccaaccctgtgaacagccgcgctaatcaggatttttcggcactgatgaggagctcataccattgcgccatgaataacgaaaacgctagacttctgaccttccagacttggccactgacctttctttcgcctacggatctggctaaggcaggcttctactacatcggacctggtgatcgggtcgcgtgttttgcatgtggtggaaagctgtcaaactgggaaccgaaggacaacgcaatgtcggagcatcttagacattttcccaagtgtccgtttatagagaatcagctgcaagacacctcgcggtacacggtgtcgaacttgtccatgcagacgcatgccgcacgttttaagacctttttcaattggccctcatcggtcttggtcaacccagaacaactggcaagcgcagggttctattacgtggggaacagcgatgatgtcaagtgtttctgttgcgacggtggcctgaggtgctgggaaagtggtgatgacccttgggtgcagcatgcaaagtggtttcctcgctgcgagtacctgattcgaattaagggtcaagagtttattcgtcaggtccaagcatcatacccgcatctgcttgaacagctgctcagcacctcggacagccctggtgatgaaaacgcagagagctcgataattcattttgaaccaggcgaagatcactccgaggacgcgatcatgatgaatactcctgtgattaatgcagctgtggaaatgggcttttcacgaagcctggtgaagcaaaccgtccaaaggaagattctggccaccggggagaattacagacttgttaacgaccttgtcttggatcttctcaatgccgaggacgagatccgggaggaagaacgcgaaagagccaccgaagagaaagagtccaacgatctgctcctgataaggaagaacaggatggcactcttccagcatctgacctgtgtgatacctatcctggactcccttcttaccgcagggatcataaacgaacaagaacacgatgtgattaagcaaaagacccaaacttcccttcaagcccgggagctgattgatactattctggtcaaggggaatatagcagcgaccgtctttcgcaattcgttgcaagaagcagaggcggtgctctacgagcatctgttcgtccagcaagacattaagtacattccgaccgaggacgtgagcgatcttcctgtggaggagcaactgagacgtctccaagaggagaggacctgtaaggtgtgcatggataaggaggtgagcattgttttcatcccatgtgggcatctggtggtgtgtaaggactgtgcaccttcgctgaggaagtgtccaatttgtcggtccaccatcaagggaactgtgcgcacttttttgtcg

SEQ ID NO: 32336 - DNA, 1812 bp, synthetic construct
  misc_feature 1..1812: note = Description of Artificial Sequence: Synthetic coding sequence
  source 1..1812: mol_type = other DNA
atgaatatcgtggagaactccatcttcttgtcgaatctcatgaagagcgccaataccttcgaactgaaatacgatctcagctgcgaactctaccgcatgtcgacgtattcgacctttccagctggtgtgcccgtgagcgagcggtccctggcgcgcgcaggtttctactacactggcgtgaacgacaaggtgaagtgtttctgctgcggactgatgcttgacaactggaagcggggagacagcccaactgaaaaacacaagaagctgtacccatcatgcaggttcgttcagtcccttaactcggtaaacaacctcgaagctacctcacaaccgactttccctagctcagtgactaattcgactcactccctgctcccagggaccgagaactcgggatactttcggggaagctactctaattcccctagcaacccagtgaactcccgggcgaaccaagacttctcagcgctcatgaggtcgtcctaccactgtgctatgaataacgagaacgctcgccttctcacctttcagacttggcctctgaccttcctgtccccgaccgacctggccaaggcgggattctactacattggaccgggagatagagtggcttgcttcgcctgcggcggtaaactgtccaattgggaaccgaaggataacgcgatgtcagagcacctgaggcacttcccgaagtgtccgttcatcgaaaaccaacttcaagacacctcccgctacactgtctccaatctctcaatgcaaacccatgccgcgcgctttaagactttcttcaactggccgagctcagtgctggtgaaccccgaacagttggcgtcagcaggattttactacgtgggcaactcagacgatgtgaagtgcttctgctgcgatggggggcttcgctgctgggagtccggcgacgacccttgggtgcaacatgcaaaatggttcccgcgctgtgagtacttgattagaatcaaaggacaggaattcatcagacaagtccaggccagctacccgcacctgctggagcagctcctgtctacttcggacagccctggcgatgaaaatgcagaaagctcgatcatccacttcgagcctggagaggatcactccgaggacgccattatgatgaacactccagtcatcaacgcagcggtcgaaatgggattttcgcgctccctcgtgaagcagaccgtgcagcgcaagatcctggcgactggggagaattaccggctcgtgaatgacctcgtgctcgacctcctgaatgcagaagatgaaatccgggaagaggaacgggaaagagctaccgaggaaaaggagtccaatgacctgctgctgatcaggaaaaatcggatggctctgttccagcacctgacttgcgtgatccctatcctcgacagcttgcttactgcggggatcattaacgaacaggaacatgatgttatcaagcagaaaactcagacctccctgcaggcacgcgagctgattgacactatccttgtgaagggaaacattgcggccactgtctttcgcaactcactgcaggaagcggaagcagtgctgtacgaacacctgtttgtccagcaagatatcaaatacatcccaactgaagatgtttcagatctccccgtggaagaacaactgagacgactgcaggaggagcggacctgcaaggtctgcatggacaaggaagtgagcatcgtctttatcccgtgcggacatctggtcgtctgtaaggattgcgcaccgtccctgaggaagtgtcctatctgtcgctcgacgatcaagggaaccgtgagaaccttcctgtca

SEQ ID NO: 32337 - DNA, 1812 bp, synthetic construct
  misc_feature 1..1812: note = Description of Artificial Sequence: Synthetic coding sequence
  source 1..1812: mol_type = other DNA
atgaatatagttgagaattctatctttttgtccaatcttatgaaatctgccaacactttcgagcttaaatatgacctctcatgtgagctatatcgcatgagtacatattcgacttttcccgctggggtgcccgtatcagaacggtcactcgctagggcaggattttattatactggggtgaacgacaaagtgaaatgcttctgttgcgggttaatgctcgataattggaaacggggggactctcctacagagaagcataaaaaattgtatccctcttgtcggtttgtgcagtcactcaatagtgtgaacaaccttgaggccacatctcagcccacatttccctcatccgttacgaattccacacatagtcttctgcctggaactgaaaactccgggtatttcagggggtcttattctaactctccctctaaccctgtgaactcgcgggcaaatcaggatttctcagctctcatgagaagtagttatcattgtgcaatgaataatgaaaatgcgcggctcttaactttccagacatggccactcacattcctgtcccccacagatctagcaaaagccggattctactacattgggcccggggatagagtagcctgttttgcttgtgggggaaaactctcaaactgggagcctaaagataatgctatgagtgaacacctccggcattttcccaagtgtccttttatagagaaccaattgcaggacacatcacggtacacagtatcgaatttgtccatgcagactcacgctgcaaggtttaaaacattctttaattggccttcaagtgtcctcgtgaatcctgagcagctagccagtgccggattttattacgtgggaaattctgatgatgtgaagtgcttctgttgcgacgggggactccgatgctgggagtccggagatgacccttgggtgcagcatgccaaatggttccccagatgcgaatacctcattagaatcaaagggcaggagttcataagacaggttcaggcatcttatccacatctattagaacagttactttccacaagtgattcacctggggacgagaacgcagaatcttccatcatacattttgaacctggagaagatcatagtgaggacgccatcatgatgaatacacctgtgattaacgccgccgtggaaatgggattcagtcggtccttggttaaacaaactgtacaacggaagatccttgccacaggagaaaactaccgactcgttaacgatctagttctagatcttctgaatgccgaggacgaaataagggaagaagaaagagagagagcaacagaagaaaaagagagtaacgatctcttgcttataagaaaaaatcggatggctctcttccaacatctaacttgcgtgatccctatcctagattccctgctgacagccggaataattaatgaacaagaacacgatgtgattaaacagaaaacacagacttctttacaggctagagaactaatcgacactatccttgtgaaagggaacattgctgccactgtctttaggaattccttacaggaggcagaagctgtcctctatgaacacctgttcgtccagcaagatattaaatatatccccactgaggatgtcagtgatctaccagttgaagagcagctcagaaggctgcaggaagagcgcacttgtaaagtgtgtatggacaaagaagtctctatagtcttcataccctgcgggcacctcgttgtgtgtaaagattgtgctcctagtcttaggaaatgccctatttgtcggtccacaataaaagggactgtgcgcacttttctctct

SEQ ID NO: 32338 - DNA, 1812 bp, synthetic construct
  misc_feature 1..1812: note = Description of Artificial Sequence: Synthetic coding sequence
  source 1..1812: mol_type = other DNA
atgaatatcgtcgagaactcgatctttctcagtaaccttatgaaatcagccaataccttcgaactgaagtacgacctttcgtgcgagctgtacaggatgtccacgtactccacctttccagccggagtgcccgtgtcggaacggtccctggctcgcgcgggcttttactacactggagtgaacgataaagtcaagtgcttctgttgtggcctcatgctcgacaactggaagcggggtgactcacccactgagaaacacaagaagctctacccgagctgccggttcgtgcagagcctgaattctgtgaataacctggaggccacttcacagccgacgttcccatcaagcgtaactaattctactcactcactgcttcctggaacggaaaactccggatatttccggggatcgtacagcaacagcccatcgaaccctgtgaattcgcgggcgaaccaagacttttccgcactgatgaggtcgtcctatcattgtgccatgaacaacgaaaacgcacgcctgctgactttccagacttggcctctcaccttcctcagcccgaccgacctggcaaaggctggattttactacatcggtccgggggaccgcgtagcttgcttcgcgtgcggcggtaagctgtccaactgggaaccgaaggacaacgccatgtcagagcatttgcgccacttccctaaatgcccctttatagagaatcaactgcaggacacttcgcggtacaccgtgtccaatctcagcatgcagacccacgcagcacgcttcaagaccttcttcaattggccttcatcggtcctggtgaacccagaacaactggcgtccgcaggcttctactacgtcgggaactcagacgatgtgaagtgcttctgctgcgacggaggtttgagatgttgggaaagcggagacgatccgtgggtccaacacgctaagtggttcccgcgctgcgaataccttatccgcattaaaggccaggagttcattaggcaagtgcaagcgtcgtacccacatctcctggaacaactgctctccacctctgactcaccaggcgacgagaacgctgaatcatcaatcatccatttcgagccgggagaggatcactcggaggacgctatcatgatgaatacgccggttatcaatgcggccgtggaaatgggattctcccgctccctcgttaagcaaaccgtccaaagaaaaatcctggcaacgggcgaaaactacagactcgtgaatgatcttgtgcttgacctcctgaatgccgaagatgagatacgcgaggaggaacgggagcgggcgaccgaagaaaaggaatctaacgacctgcttctcattcgcaaaaaccggatggcgctgttccagcatctgacctgcgtgatccccattctggactcgctgttgaccgcaggaatcatcaacgagcaggaacacgatgtgatcaagcagaaaacccagacctcactccaggcaagagaactgatcgacaccatcctcgtgaagggaaacatcgccgcaactgtctttcgaaattctctgcaggaggccgaagccgttttgtacgaacatctcttcgtccagcaggatatcaaatacattccgaccgaagatgtgagcgatctgccagtcgaggagcagctgaggcgtctgcaggaagaacgcacctgcaaggtgtgcatggataaggaggtgtcgatcgtgtttattccttgcggccacctcgtagtctgtaaggattgtgccccgagccttagaaagtgcccgatctgtagatcgactatcaaggggaccgttcgtacgttcctgtct

SEQ ID NO: 32339 - DNA, 1812 bp, synthetic construct
  misc_feature 1..1812: note = Description of Artificial Sequence: Synthetic coding sequence
  source 1..1812: mol_type = other DNA
atgaacattgtggagaacagcattttcttatctaatctaatgaagagcgccaatacttttgaactgaagtacgacttgtcgtgtgagttgtaccgtatgagtacgtactcaacttttcctgcgggggtgccggtatcggagaggtctctggcaagggcaggtttctactacactggtgtcaacgacaaggtgaaatgcttctgctgcggtctgatgctggataactggaaacgcggtgatagccctacggagaagcacaagaagctgtacccttcttgtagatttgtgcaaagcctgaacagcgtgaataacttggaagcaacctcacaaccaacctttccttccagcgtcactaatagcactcactctctgctgcccggtactgagaactccggttacttccgggggtcttattccaatagcccttccaatcctgtcaacagccgcgcgaaccaggattttagcgcgctgatgagatcctcttaccactgtgccatgaataacgaaaatgcgcgcctgttaacttttcaaacgtggcccctcaccttcctgagcccaaccgacctggccaaggccgggttctattacattgggcctggcgatagagtcgcatgtttcgcgtgtggaggtaaactgtccaactgggagccgaaggataatgctatgagcgagcatctgcggcatttcccaaagtgcccattcattgagaaccagttacaggacacgagcaggtatactgtcagcaacctgtctatgcagacccacgccgctcgctttaaaacgttctttaattggcccagctctgttctggttaacccagagcagttggcaagtgctgggttttactacgttggtaattcagacgacgtcaagtgtttctgttgtgacggaggtctgagatgctgggaaagcggagacgacccgtgggtgcagcatgctaaatggttcccacgctgcgaatatctgattaggatcaagggtcaagaattcattcgccaggttcaagcgagctacccgcacctcctggagcagctgctgagtacgtccgacagccctggcgacgagaatgcggagtcctcaattatccactttgaacctggggaggatcactccgaagacgccattatgatgaatactccagtgataaacgcggcggtcgaaatgggtttcagtcggagtctcgtgaaacagaccgtgcaacgcaagattctggcaacgggcgaaaattatcgcctggtgaatgatctagtgctggatctgttgaacgctgaggacgagattcgtgaggaggagcgcgaacgcgctaccgaagagaaggaaagcaatgacctgttgctgatccgaaaaaataggatggccctgtttcagcacctgacgtgtgtcatccccatcctggatagcctgctgacggcgggtattatcaatgagcaagaacacgatgtgatcaaacagaaaacgcagactagcctgcaagcacgcgagctgatcgacaccattctagtcaaaggtaacattgctgccacggtctttcggaatagcctgcaggaagccgaggccgtgctctacgaacatctgttcgtgcagcaggacattaaatatattccgacggaggacgttagcgatctgcctgtcgaggagcagttgagacgcctgcaagaggaacgaacctgtaaggtctgcatggacaaggaagtatctatagtgtttatcccatgcgggcatctggttgtttgtaaggattgtgcaccgagcttgcgtaaatgcccaatctgccgatccacaatcaaaggcaccgtgcgcacattcctgagt

SEQ ID NO: 32340 - DNA, 1812 bp, synthetic construct
  misc_feature 1..1812: note = Description of Artificial Sequence: Synthetic coding sequence
  source 1..1812: mol_type = other DNA
atgaacatcgtggaaaactcaatcttcctctccaacctcatgaaaagcgctaacaccttcgaactgaagtacgacctttcctgcgaactgtacagaatgtcgacttactccactttccccgcaggtgtcccagtctccgaacgctcgttggcccgcgccgggttctattacacgggcgtaaacgacaaggtgaagtgtttttgttgcggactgatgttggacaactggaagcggggtgacagccctactgaaaaacataaaaagttgtacccatcctgccggttcgtgcagtccctgaactcagtgaataacctggaagctacctcacagccgaccttcccgtcgtcagtcacgaattccactcactcactgctcccgggaactgagaattcgggatacttccgcggatcatactccaatagccctagcaacccggtgaactcacgggcaaaccaggatttctccgccctgatgaggagctcctaccactgcgccatgaacaacgaaaatgccaggctgctcactttccagacctggcccttgacttttctgtcccctaccgatctggcgaaggctgggttttactacatcggaccaggagatcgcgtggcctgcttcgcgtgtgggggaaagctgagcaactgggagccgaaggacaatgccatgagcgagcatctgaggcatttcccgaagtgtccttttatcgagaatcaactgcaagatacgtcacgttacactgtgtcgaacctctcgatgcaaacgcatgctgcccgctttaagacgttcttcaattggccgtcatcggtcctcgtgaatccagagcagcttgcatcggctggattctattacgtcggtaattcggatgacgtcaagtgtttctgctgcgatggtggactgaggtgctgggaatctggagacgatccatgggtgcagcatgcaaagtggttcccaagatgcgagtacctgatcagaattaaaggacaggaattcattcgccaagtgcaggcctcgtaccctcatcttttggaacagctgctctccacttccgactcgcccggagacgaaaacgcagaaagctcgatcatccactttgaaccgggagaagaccactccgaagatgcgattatgatgaacactccagttatcaatgcagcggtggaaatgggattcagccgttccttggtcaaacagaccgtgcaaagaaaaatactggccactggagaaaattaccggctggtgaatgacctcgtgctggatctgctgaacgcagaagatgaaatacgcgaagaagagagagaacgcgctaccgaagaaaaagagagcaacgatctgcttctgatccggaagaataggatggctctcttccaacatcttacctgcgtgatcccaattctggactccttgctgaccgccgggatcatcaatgagcaagagcacgatgtgatcaaacagaagactcagacttcgctgcaggcccgcgagctgattgacaccattctcgtgaagggaaatatcgccgctaccgtcttccgcaactccctgcaggaggccgaagctgtgttgtatgaacacctgtttgttcagcaagacattaagtacattccgaccgaggacgtgtcagacctgccggtcgaggagcagctgcgcagactgcaagaggagagaacttgcaaggtgtgtatggataaagaggtgtctattgtgttcatcccgtgcggacacctcgtcgtgtgcaaggactgcgcaccgtcactccgtaaatgccctatctgtagatccactatcaagggtaccgtccggactttcctttcc

SEQ ID NO: 32341 - DNA, 1812 bp, synthetic construct
  misc_feature 1..1812: note = Description of Artificial Sequence: Synthetic coding sequence
  source 1..1812: mol_type = other DNA
atgaacattgtcgaaaactcgatcttccttagcaaccttatgaagtcggcaaacacttttgaacttaagtacgacctttcgtgtgaactctacagaatgtcaacgtattcaacctttccggcaggtgttcctgtcagcgagcggtcgctggcccgtgcaggtttttactacactggtgttaacgataaagtgaagtgcttttgttgtgggcttatgcttgataattggaaaaggggagacagcccaacggaaaagcacaagaagctgtacccgtcgtgccgattcgtccagagcttgaattctgtgaataacctcgaggcaacttcccagccgaccttcccgagcagcgtcactaactccacgcactcacttctccctggtactgagaattcaggatatttcagaggatcatactcaaactcgccctctaatcccgtgaactcaagagccaaccaagatttctccgccttgatgagatcctcataccattgcgccatgaataacgaaaacgcccgcctgcttacttttcaaacctggcctctgacctttctgtcgcccaccgaccttgcaaaagccggattctattacatcggaccaggagatagagtggcatgcttcgcttgtgggggaaaattgtcgaactgggagccaaaggataacgctatgagcgagcatcttcgtcattttcctaagtgtccctttatcgagaatcaactgcaagacacttcccggtacaccgtgtccaacctctccatgcagacccacgcggcccgtttcaagacgtttttcaattggcctagctccgtgctcgtgaaccccgaacaacttgcatcggcaggattttactacgtgggaaattcagacgacgtgaaatgtttctgttgtgacggcggcttgcgctgttgggaatcaggcgacgatccttgggtgcaacatgcaaagtggtttcctagatgtgaataccttataagaattaagggacaagagtttatccggcaggtgcaagcctcttaccctcacctcttggaacaactccttagcacctctgatagccctggcgatgaaaatgcggagtccagcattatacatttcgaacctggtgaggaccactcggaagatgccattatgatgaacactcccgtgattaacgccgcagtggaaatgggtttttcacggtcgcttgtgaaacagaccgtgcagcgaaagatactcgcaacgggagaaaactacagacttgtgaatgaccttgtgcttgacctgctgaatgcagaagatgagatccgtgaagaagagcgcgagagagcaactgaagagaaggaatctaacgatcttcttcttattcgcaagaataggatggcgctgtttcagcatctgacctgtgtcattcctatccttgattcgctgctgaccgcggggatcattaatgagcaagaacatgatgtgatcaaacagaaaactcagacctcccttcaagctagggagctgattgataccattctggtgaagggtaacattgcagcaaccgtgtttagaaactcgttgcaagaagcagaagcagtcctttacgagcatctttttgtgcagcaggatatcaagtatatccccactgaggatgtgagcgacctgccagtggaagagcagctcaggaggctccaagaggaaagaacttgcaaagtctgtatggacaaggaagtgtcgatcgtgttcatcccttgcggccaccttgtggtgtgcaaggattgtgcaccctctctgcggaaatgccctatctgtcggtccactattaagggtactgtgcgaacttttctctcc

SEQ ID NO: 32342 - DNA, 1812 bp, synthetic construct
  misc_feature 1..1812: note = Description of Artificial Sequence: Synthetic coding sequence
  source 1..1812: mol_type = other DNA
atgaatatcgtcgagaattcgatctttcttagcaacctcatgaagtccgccaacaccttcgaactgaagtacgatttgtcgtgtgagctgtaccgcatgtctacttactcgacctttcctgcgggagtgccagtctcagagcggtcccttgcacgggcaggtttttactacaccggtgtcaatgataaggtcaagtgtttctgctgcggactgatgctcgataactggaagaggggagatagcccaaccgaaaagcacaagaagctctatccgagttgcagattcgtccagtcccttaactccgtgaataacctggaggccacctcgcagccgaccttcccgagttccgtgaccaactctacccattcactgctcccgggcaccgagaactcaggttatttccggggcagttacagcaactcaccaagcaacccggtgaattctcgggccaatcaagacttttcggctctcatgcgctcgtcgtatcactgtgctatgaacaacgaaaatgcccgcctgctgacctttcagacctggcctctgacttttctctcccccacggaccttgctaaggctggcttctactacatcggcccgggagatcgcgtggcctgttttgcatgtgggggaaagctctcgaactgggagccgaaggataatgcgatgtcggagcacttgcggcactttcctaagtgtccgttcatcgagaaccagctccaagacacctcaagatacaccgtgagcaatctgtccatgcagactcatgcagcaaggtttaagacctttttcaattggccctccagcgtgctggtgaaccctgagcaactggccagcgcaggattctactacgtgggaaatagcgacgacgtgaaatgcttctgttgcgacggaggattgcgctgttgggagtcaggagacgacccatgggtgcaacacgctaagtggttcccccggtgcgagtacctgatcagaatcaagggccaggaattcatccggcaagtgcaagcctcctacccacatctgcttgagcagctgctgtcaacttcggattctcccggggacgagaatgccgaatcgtcaatcatccactttgaaccgggagaagatcattcggaagatgcaatcatgatgaacactccagtgattaacgccgctgtggagatgggtttcagccgctcgcttgttaaacagactgtgcaaagaaagatactggctacgggcgagaactaccgcttggtgaacgatcttgtgctggacctgctgaacgccgaggacgaaatcagagaggaagaacgcgaacgggccactgaagaaaaggaatccaacgacttgttgctcatccggaaaaacaggatggcgctgttccagcaccttacctgtgtgataccgattctcgactcgttgctcaccgccggcatcatcaatgaacaggaacacgacgtgatcaaacaaaagacccaaacctcgcttcaggcgcgggagctgatcgacactatcctggtgaaggggaatatcgccgccaccgtttttcggaactcactgcaggaagctgaggcggtgctgtacgaacacctcttcgtccagcaggacattaagtacatccctactgaagatgtgtccgatctcccggtggaagaacagctcagacggttgcaagaggagcgtacttgcaaagtgtgtatggataaagaagtctcgatcgtgttcatcccatgcggacatcttgtcgtgtgcaaggattgcgcgccgtctctgcggaaatgcccgatttgccgcagcaccatcaagggtactgtccgcacgttcctgagc

SEQ ID NO: 32343 - DNA, 1812 bp, synthetic construct
  misc_feature 1..1812: note = Description of Artificial Sequence: Synthetic coding sequence
  source 1..1812: mol_type = other DNA
atgaacatcgtggagaacagcatctttttgagcaatctgatgaagagcgctaacactttcgaattgaaatacgacctctcgtgcgagctgtaccggatgtcgacttactccacctttccggcaggagtgcccgtcagcgagcgctctctggcacgcgcaggtttctattacaccggagtgaatgacaaagtgaagtgcttctgttgtggactgatgctcgacaattggaagcgcggagattcacctaccgagaagcacaagaagttgtatcctagctgtcggttcgtccagtcactgaatagcgtgaacaacctggaagcgactagccagccgaccttcccctcttccgtaaccaactcaacccactcgctgctgccgggcactgaaaactcagggtatttccggggatcctactccaattcgccttcgaacccggtcaactctcgggcaaaccaagatttctccgccttgatgcgcagctcgtaccactgcgctatgaacaacgaaaacgcgcgcctgcttacgttccaaacgtggccgctgacttttcttagcccgactgatctcgccaaagcgggtttctactacattggtcctggggaccgggtcgcttgcttcgcctgcggcggaaagctgagcaattgggaaccaaaggacaatgccatgtcagaacacctgcgccacttccctaaatgcccattcatcgagaaccagctccaggacacgtcgaggtacaccgtgtcgaatctttccatgcagactcatgctgcccggtttaagacttttttcaactggccatcatcggtgcttgtgaatccagaacagctcgcaagcgcgggattttactacgtcggaaatagcgacgatgttaagtgtttctgctgtgacggaggactgcggtgctgggaatcaggagatgatccctgggtccagcatgcaaagtggttcccaagatgcgagtacctgatccggattaagggacaggagttcatccgccaagtgcaagcgtcgtatccgcacctgctggaacaacttctctcgacctccgattccccgggtgacgagaacgcagaatcaagcatcatccattttgagcctggagaagatcatagcgaagatgcgatcatgatgaacactccagtgatcaatgctgcagttgaaatgggctttagcagatctctcgtcaagcagactgtgcagcgcaagattcttgctaccggggagaattatcgtctggtgaatgacctcgtcctcgatctgctgaacgcagaggacgagattagagaagaagagcgcgaacgggcaaccgaagaaaaagaatctaatgacctgctcctcattaggaagaacaggatggccctgtttcaacacctgacctgcgtgattccgattctcgactctctcctgaccgccgggattatcaatgagcaggaacacgacgtgatcaaacaaaagacccaaacttcacttcaagcgagagaactgatcgacactatcctcgtgaagggcaatatcgcagcgactgtctttagaaacagcctccaagaagccgaggcggtgctgtacgaacacctgttcgtgcagcaggatatcaaatacattcccactgaggatgtttccgatttgcccgtcgaagagcagctgcggcgccttcaagaggagcggacctgcaaggtgtgcatggacaaggaagtgtccattgtgttcatcccgtgcggccacctggtggtgtgcaaagattgtgcgccttccttgcgcaagtgcccgatctgccgttcgaccatcaagggaactgtgcgcacgttcctctcc

SEQ ID NO: 32344 - DNA, 1812 bp, synthetic construct
  misc_feature 1..1812: note = Description of Artificial Sequence: Synthetic coding sequence
  source 1..1812: mol_type = other DNA
atgaatatcgtcgagaacagcatctttctttccaacctcatgaagtccgcgaacaccttcgaacttaagtacgacttgtcgtgcgaactgtaccggatgtcaacttattccaccttcccagccggtgtgcccgtgtccgaacgaagcctcgcgcgtgccggattttactacactggagtgaacgacaaggtgaaatgcttctgctgcgggctgatgctggacaactggaagagaggcgattcgcccactgaaaaacacaagaaactgtatccatcgtgtaggttcgtacaatcactcaactcggtcaacaatctggaggccacctcacagccaactttcccgtcgtcggtgacgaactcaacgcattcactcctgccgggaaccgagaactcaggatactttcgcggatcctactccaactcaccgtcgaatcccgtcaactcgagagctaaccaagatttcagcgcgctcatgcgctcttcctaccactgcgcgatgaataatgagaacgccagactcctgacctttcagacttggcctctgacgtttctctcgccaactgacctggcgaaggccggtttctactacatcggcccgggtgaccgcgtggcctgcttcgcctgcggagggaagctctcaaattgggagccaaaggacaatgcaatgtcggagcatctgagacacttccccaagtgccccttcatcgaaaatcagctccaggacacctcgagatacactgtttcgaatctgtcgatgcagactcacgcagccaggttcaagacgttcttcaactggccgagctcagtcctcgtgaacccagagcaactcgcttccgctggattctactacgtgggaaactccgatgatgtgaagtgcttctgttgtgacggaggcctgaggtgctgggaatctggcgacgacccttgggtgcagcacgctaagtggttcccgcgatgcgagtaccttatccgaataaagggtcaggagtttattcgccaagtgcaggcgtcgtacccccacctcctcgagcagctgttgagcacctcagattcaccaggagacgaaaacgccgaatccagtatcatccacttcgaaccaggagaagatcatagcgaggacgccattatgatgaatactcccgtgatcaacgcagcagtggaaatgggattcagcaggtcactggtgaagcagaccgtgcagcgcaagattcttgcgaccggcgagaattacagactcgtgaacgatctggtgctcgatttgctcaatgcggaagatgaaatccgggaagaggagcgggagcgtgctaccgaagagaaagagtcgaacgacctgctgctcatccggaaaaaccgcatggcgctgttccagcaccttacctgcgtcattccgatcctggatagtctcctgacggcaggaatcatcaacgaacaggaacacgacgtgatcaagcagaaaactcaaacctcgctccaagctagagagctgatcgataccatcctcgtgaaaggaaatatcgcagcgacggtgttccgcaattcattgcaggaggccgaagcagtgttgtacgagcacctcttcgtgcaacaagatatcaagtacatacctactgaggacgtgtcggatctgccggttgaggagcaacttcggagactgcaagaagaacggacttgcaaggtctgcatggacaaggaagtgagcatcgttttcatcccctgcggacacctggtcgtttgtaaggactgtgccccgagcctccggaagtgtccaatctgccgctcaactatcaaaggaaccgtgaggactttccttagc

SEQ ID NO: 32345 - DNA, 1812 bp, synthetic construct
  misc_feature 1..1812: note = Description of Artificial Sequence: Synthetic coding sequence
  source 1..1812: mol_type = other DNA
atgaatattgtcgaaaattccatttttttgagcaatttaatgaagtctgcgaacaccttcgaactgaagtatgacctgagttgcgaattataccgtatgtcgacctacagcacgtttccggcgggcgtaccggtaagcgaacgttcactggcgcgggcaggtttttattataccggtgtgaatgataaagtaaagtgtttttgttgtggccttatgttagacaattggaagcggggggattcacctaccgaaaaacataaaaagctgtatccgtcctgtaggtttgtgcagagcttaaattcagtaaataatcttgaagccacatcacaaccaaccttcccatctagtgtaacaaatagtacacatagcctcttaccgggcacagaaaactcaggatactttcggggttcttattctaatagtccttcaaatccggtcaattccagggccaaccaggattttagtgccttaatgaggagctcctatcattgcgctatgaataatgaaaacgctcgcctccttacattccagacctggccgttaacttttttaagcccaacggacttagctaaagctggattctattatatcggacccggtgatagggttgcttgctttgcctgtgggggaaagttgagcaactgggaacctaaagataatgctatgtcggaacacttgcgtcactttccgaaatgcccttttattgagaatcaactccaagatacatctcgctatacggttagcaatctttccatgcagacgcacgctgcgcggtttaaaacgtttttcaactggccatcgtcagtgttagtcaatcccgagcagcttgcttctgctggcttttattatgtcgggaattcggatgatgtcaagtgtttttgttgcgatgggggcctgagatgctgggaatctggggatgatccgtgggttcagcatgcaaaatggtttccgcggtgtgaataccttatccggattaaaggccaggagttcatccgccaagttcaggcctcttatccgcacctgctcgaacagcttctgtcaacaagcgattctcctggcgatgaaaacgccgagtcatcaatcatacacttcgaacctggagaagatcattcggaagatgccataatgatgaatacaccggttataaatgctgcagtggagatgggatttagcaggtcattagtcaagcaaaccgtccaaaggaagatcttagccaccggagaaaattatagattagtcaatgatttagtactggatctgttgaatgcggaagacgagattcgagaagaagagcgtgaacgagcaacagaagaaaaagaaagcaacgatctactgcttattcgcaaaaaccgcatggccctgtttcagcatctgacatgcgtcatccctattctggattccctgctgacagcaggaattattaacgagcaagaacatgacgttataaaacaaaaaacacagacttctctgcaagcaagagaactgattgatactattcttgtaaaaggtaatattgcggcaacagtgtttcgaaattcattacaggaggccgaggcggtcttgtacgaacacctgttcgttcaacaggacataaaatatattccgacagaagacgtctcagacttaccggtcgaagaacagttgcgtagactccaagaagaaagaacgtgtaaagtttgcatggacaaagaggttagtatcgtatttatcccttgcggtcatttggtagtatgcaaagactgcgcaccatcgctgagaaaatgtcctatatgccgatcgacaatcaaagggaccgtgcgcactttcttgagc

SEQ ID NO: 32346 - DNA, 1812 bp, synthetic construct
  misc_feature 1..1812: note = Description of Artificial Sequence: Synthetic coding sequence
  source 1..1812: mol_type = other DNA
atgaacattgtcgaaaactcgatttttctctccaatctgatgaagtccgctaataccttcgagctgaaatacgatctgagttgtgagctttatagaatgtccacctactcgacctttccagcaggtgtgccagtgtccgagagatccctcgcacgcgctggattctactacaccggagtcaatgacaaggtgaagtgcttctgctgcggactgatgcttgacaactggaagcgaggtgattcccctactgagaagcataagaaactttaccctagctgtagattcgtgcaaagcctgaattcggtgaataacctggaagctacctcccaacctactttcccaagctcggtgaccaacagcacgcacagcctgctgccaggtactgaaaattcaggttactttagaggatcgtacagcaatagcccgtcgaatcctgtaaacagtcgggcaaaccaagatttttccgcacttatgcgctcaagctaccattgcgccatgaacaacgaaaatgcccgccttctgaccttccaaacctggccccttacctttctctcgccgacggatcttgcaaaggcaggattctattacatcggcccaggagacagagtcgcctgttttgcatgcggaggtaaactttcgaattgggagcctaaggataatgccatgagcgaacatctcaggcactttcctaagtgcccatttatcgaaaaccaacttcaggatacttccaggtacaccgtgtcgaacctcagcatgcaaacccacgcagcgaggttcaagaccttctttaactggcccagcagcgtcctggttaatccagaacaactggcatccgcaggtttttactatgtcggtaatagcgatgatgtgaaatgtttttgctgtgatggcggacttcgatgttgggaatctggggatgatccatgggtgcagcacgcaaaatggttcccccgctgtgaataccttataaggattaaggggcaggagttcattcggcaggtccaagcatcgtaccctcatttgctcgagcagctgctgtccacttccgattcgcccggcgacgaaaacgcagaatcctccatcatccatttcgaaccaggagaggatcattcggaagatgcaattatgatgaatacccctgtgataaacgcagcggtggaaatgggtttttcgaggtcccttgtgaaacaaactgtgcagcgcaagattcttgccaccggagaaaactacagactggtgaacgatctggtcctggatcttcttaatgcagaagatgaaatacgagaagaagagcgagaacgggcaactgaagaaaaggagtcaaatgatcttctgctgattcgcaagaatcgcatggcactgtttcaacatctcacgtgcgtcattcctatccttgatagcctgcttactgcaggaatcattaacgagcaagaacatgacgtgattaagcagaaaacccagacttcactccaggcgagggaactgattgacactatcctggtcaaaggaaacattgcggccactgtgttcaggaacagcctgcaagaggcagaagctgtgctctacgaacatctcttcgtgcaacaggacataaagtacatcccaactgaagatgtctccgatctgcccgtggaagagcagcttagacggctgcaagaagaaaggacctgtaaggtgtgtatggataaggaagtgtcgatcgtgttcatcccttgcgggcacctggttgtgtgtaaggattgtgcaccaagcctccggaagtgtccaatttgtcgaagcacgatcaaggggaccgtgagaacctttcttagc

SEQ ID NO: 32347 - DNA, 1812 bp, synthetic construct
  misc_feature 1..1812: note = Description of Artificial Sequence: Synthetic coding sequence
  source 1..1812: mol_type = other DNA
atgaacatagtggagaactctatctttttgtccaacctgatgaagtctgcgaacaccttcgaactcaaatacgatctctcatgtgaactctacaggatgtccacatactcaactttccccgccggcgtaccggtctccgagagatcactggcccgcgcaggattttactacacaggagtgaacgacaaagtcaagtgcttctgctgcggattgatgctggacaactggaagcgcggcgactctcccaccgaaaagcacaaaaaactctatccttcctgtcgcttcgttcagtccttgaactcagtgaataaccttgaggccacaagtcaacccaccttccccagcagcgtaactaactctacccatagcttgctgccaggtaccgaaaatagtggctattttagaggtagctacagtaattccccaagtaaccctgtgaacagcagggcaaaccaggacttcagcgcactgatgcgctccagctatcactgtgccatgaacaacgaaaacgccagattgctcactttccaaacctggcccctcacgtttctgtcaccgactgatctggccaaagccggtttttactatatcggcccaggcgatcgcgtggcgtgttttgcatgcggcggcaaattgtcaaattgggagcccaaggacaacgccatgagcgagcacctgaggcacttcccaaagtgtcccttcatagaaaatcaattgcaggacactagcaggtacactgtgagcaacttgtcaatgcagacacacgcggctcgcttcaagacttttttcaactggcccagttccgtcctcgtgaaccctgaacagttggccagcgctggtttctattatgttggaaactccgatgacgtgaaatgtttctgttgcgatggcggactgcgctgctgggaatccggagatgatccctgggtgcagcacgccaagtggttccccaggtgtgaatacctgatcaggattaagggccaggaatttatccgccaggtccaagcctcttacccccatcttctcgagcaactgctgagcacctcagattctccaggcgatgaaaatgctgaaagctccatcattcacttcgagcccggtgaggatcactctgaggacgccatcatgatgaacaccccagtgatcaacgcggccgtagagatgggctttagcaggtctcttgtcaagcaaacagtacaaaggaagattctggcgaccggcgaaaattatcgcctcgtgaacgatttggtcctggatctgttgaacgctgaggatgagattagagaagaagaacgcgaaagagccacagaagaaaaggagtctaatgacctgctgttgatccgcaagaacaggatggccctgtttcaacacctgacttgtgtgatcccaatccttgacagccttctcaccgcgggaatcataaacgaacaggaacatgatgtgatcaaacaaaagactcagaccagcttgcaggctagggaactgattgacacaatcctcgtgaagggaaatatcgctgcaacggtgtttagaaatagtctccaggaggcagaagcggtgctctatgagcatctgttcgttcaacaggatatcaaatacatccctacagaggatgtgagtgacttgccagtggaagagcaactgaggaggcttcaggaagagcgcacgtgcaaagtctgtatggacaaggaagtaagcatcgttttcatcccttgtggacacctcgttgtctgcaaagactgcgccccatcactcagaaaatgcccgatttgtcgcagcacaatcaagggcactgtgaggacgtttctgtca

SEQ ID NO: 32348 - DNA, 1812 bp, synthetic construct
  misc_feature 1..1812: note = Description of Artificial Sequence: Synthetic coding sequence
  source 1..1812: mol_type = other DNA
atgaacattgtagagaactcaatatttttatccaaccttatgaaatcagcgaatacttttgagctgaaatatgatctttcttgcgaattgtataggatgagcacttattccactttccctgccggtgttcctgtgtccgagcgcagcctggcaagggctggtttctattacaccggtgttaacgataaggtcaaatgtttttgttgtgggcttatgctcgataactggaaacgaggggatagccctacagaaaagcacaaaaaactttacccatcatgcaggttcgtgcagagtttgaacagtgttaataatttggaggctacttcacaacctacctttccaagttcggtaactaatagcactcattctctattaccaggaacagaaaatagcgggtattttaggggaagttacagtaattcaccgtccaacccagttaatagtagggctaatcaagatttttctgcgttgatgcgttcatcctaccattgtgctatgaataacgagaacgcaaggctcttgacgttccaaacttggcctctcacctttctctcacctacagatctggccaaggccggtttttattacattggcccaggagatcgcgttgcatgttttgcttgtggtggtaagctcagcaattgggaacccaaggataatgctatgagtgaacaccttaggcactttcctaagtgtccatttatagaaaatcaactgcaagatacttcccgttataccgtgtcaaatcttagtatgcagactcatgccgccaggttcaaaacttttttcaactggccatcttccgttctggttaatccggagcaacttgctagcgcaggattctactacgtagggaattccgatgacgtcaagtgcttttgctgcgatggaggtctcaggtgctgggaaagcggtgatgacccttgggttcaacatgcaaagtggttcccacggtgcgagtatttgatccggattaagggacaggagttcattcgacaagttcaagcttcgtatccgcatctactcgagcaacttttatcaaccagtgactccccgggggatgaaaatgctgagtcctcaattattcatttcgaacccggggaggatcacagcgaagatgccataatgatgaatacacccgttatcaatgctgctgtagaaatgggattctcgaggtctcttgttaagcaaactgtgcagaggaagatccttgctacaggagaaaactacagactcgttaatgatcttgttttagacctgttgaatgcagaagatgagataagagaagaagaacgagaacgtgctactgaggaaaaggaatccaatgacttgcttcttataagaaagaatcgaatggcactatttcaacacttgacctgtgttattcctatattggactctcttctcacggctggtatcatcaacgaacaagagcatgacgtgattaaacaaaagactcaaacctcccttcaagctagggagctcattgatacgatccttgtgaaggggaacattgcagctaccgtgtttcgaaattccttgcaagaggctgaggctgtcttgtacgagcatctcttcgtccaacaggacatcaagtatattcctactgaggatgtgtctgatcttcctgtggaagaacagctcaggcggttgcaggaagagagaacctgtaaggtttgtatggataaagaagttagcattgtattcataccatgcggtcatcttgttgtttgtaaggattgtgctccaagtcttaggaagtgtccaatttgtagatctacaatcaaaggcactgtcaggactttcctttcg

SEQ ID NO: 32349 - DNA, 1812 bp, synthetic construct
  misc_feature 1..1812: note = Description of Artificial Sequence: Synthetic coding sequence
  source 1..1812: mol_type = other DNA
atgaacattgtggaaaactcaatctttctctcgaatctgatgaaatcggcgaacaccttcgaactgaagtacgatctgtcctgcgagctctatcgcatgagcacctactcaacttttcctgccggggtgccggtgtctgaacggtccctcgcacgcgcaggattttactataccggagtgaacgacaaagtcaagtgcttttgttgtggtctgatgcttgataattggaaacggggcgattcgccaaccgaaaagcacaaaaagctctaccctagctgtagatttgtccagtcgctgaactcggtgaacaatttggaagcaacttcgcaacccactttcccatcgagcgtcaccaacagcacccattccttgctgccaggaactgagaattccggttactttcgtggcagctactcaaacagcccgtcaaatccagtgaattcaagggcaaatcaggactttagcgcccttatgagatcatcgtaccattgtgccatgaacaacgagaacgcacgccttctgacttttcagacctggcccttgaccttcctttcacctacggacctggcgaaggcaggtttttactacatagggccgggcgatagagtcgcatgctttgcatgtggagggaagctctcgaattgggaacctaaggataacgcaatgtcagaacatctgagacactttcccaagtgtccatttatcgagaaccaactgcaagatacctcgcggtacactgtgtcaaacctgagcatgcagactcatgcggcaagatttaagacctttttcaattggccttcgtctgtgctggtgaacccagagcagctggcctcagcaggcttttactacgtgggtaactcggacgacgtgaagtgtttctgttgtgatggaggccttcgatgttgggaatcaggtgacgacccatgggtgcaacatgctaagtggttccctagatgtgaatatcttataaggattaagggtcaagagtttatccgtcaagtccaggcatcatacccccatctgcttgagcaattgctgtcaacttcagattccccaggggatgaaaatgccgaatcatccataatacatttcgagcccggagaagatcactccgaagatgcgatcatgatgaacaccccagtgattaatgcggcagtcgaaatgggattttcgagatccctcgtgaagcagaccgtgcaaaggaagatcctggcaactggagagaattaccgcctggtgaatgaccttgtgctggaccttcttaacgcagaggatgaaattcgggaagaagaaagagaacgggcaactgaagaaaaggaaagcaacgaccttcttctcatccggaagaaccgtatggcactcttccagcatctgacttgtgtcattcccatcctcgattccctgctcaccgcaggaatcatcaatgaacaggaacatgacgttatcaaacaaaaaactcagactagcctgcaagcaagagagctgatagataccatccttgtcaagggaaatatcgccgcaactgtctttcggaactccctgcaagaagcagaagccgtgctttacgaacacctgttcgtgcaacaggacataaagtacattcctactgaggacgtctcagatctcccagtggaggaacaactcaggcgacttcaggaagaaagaacttgcaaggtgtgtatggataaagaagtctctattgtgtttataccttgtggtcatctcgtcgtgtgtaaagattgtgctccatccctgagaaaatgccccatttgcagatcaaccattaagggtaccgtgaggactttcctgtcg

SEQ ID NO: 32350 - DNA, 1812 bp, synthetic construct
  misc_feature 1..1812: note = Description of Artificial Sequence: Synthetic coding sequence
  source 1..1812: mol_type = other DNA
atgaatattgttgagaatagtatttttctatcaaatctcatgaagtctgcaaacacattcgagctgaagtatgacttgtcttgtgagctctacagaatgtcgacatacagcacgttcccagcaggcgtgcctgtgtccgaacgaagcctcgctcgggccggattttactatactggtgttaacgataaagtgaaatgtttctgttgtgggctgatgctagataattggaagcggggcgactctccaaccgagaagcacaaaaagctgtatcccagttgtcggtttgtccagtctttgaattctgtgaacaacctggaggcgacctcccagccaacattccctagttcagtcactaactcgacgcacagcctccttcctgggaccgagaactccggctacttcaggggctcatattctaatagtccctccaatcccgtcaacagcagagccaatcaggatttctctgctttaatgcgatcaagttaccactgcgcaatgaataacgagaatgcacgtctgctgacctttcagacctggccactcacgttcctttctccaaccgacctcgctaaagctgggttttactatataggacccggagaccgcgtcgcgtgctttgcttgtggcggtaaactatcaaattgggagcctaaggacaacgcaatgtccgaacacctcaggcacttccccaaatgtcccttcatcgagaaccagctgcaggacacctcaaggtatactgtgagcaacctaagcatgcaaacacatgcagcacggtttaagacattttttaactggccctcttcagttctcgtgaatcctgaacagcttgccagcgcggggttctattatgtggggaatagtgacgacgttaaatgcttctgctgtgatggcgggctgcggtgttgggagagtggagacgacccttgggtgcaacacgccaaatggttccctcgctgtgaatacctcataagaatcaaaggacaggagtttataaggcaggttcaggccagttatcctcacttattggaacagcttctgagtactagtgatagccctggtgacgagaacgccgaatcctcgatcatacattttgagccaggcgaggaccactcagaggacgctatcatgatgaacactccagtcataaatgcggcagtggaaatgggattctccaggtccctcgttaaacagacggtgcagcgcaaaattctggccactggggagaattacagactggtgaacgatttagttttggatttactgaacgctgaagacgaaatcagagaagaggaacgagagcgtgctacagaggagaaggaatctaacgacctgctgcttatcaggaaaaatcgaatggccctctttcagcatctcacctgtgtaattccaattctggacagtttgctcactgcagggatcatcaacgagcaggagcacgatgtcatcaaacaaaaaacccaaacctctctgcaggctcgggaactgatcgatacgatcctcgttaaaggtaacatcgccgccacggtctttagaaacagcttacaggaagcggaggctgtgctgtacgaacacttgtttgtacagcaggacattaagtacatcccaacagaggacgtgtccgatttgccggtagaagagcagttgcggcgccttcaggaggaacgtacatgcaaagtgtgtatggataaagaagtctccattgtattcatcccatgtggccatctggtggtgtgcaaagactgtgctcccagtctacggaagtgccctatttgtcggtcgaccatcaaagggacggtgcgcactttcctcagc

SEQ ID NO: 32351 - DNA, 1812 bp, synthetic construct
  misc_feature 1..1812: note = Description of Artificial Sequence: Synthetic coding sequence
  source 1..1812: mol_type = other DNA
atgaacatagtcgaaaattcgatattcctgtcaaacctgatgaagagcgctaatacatttgaattaaagtatgacctttcttgtgagctttacagaatgagcacatatagtacctttcctgcaggtgtccccgtatctgaacgcagcttagcgcgggcagggttctactacacaggggtgaacgataaagtgaagtgtttctgctgcggcctgatgctggataattggaaaagaggcgacagcccaacagaaaaacataagaaactttacccatcctgccgcttcgtgcaatctcttaattctgtaaataatctggaggcgacatcccaaccgacttttcccagctcagtcacaaattctacacactcactgttgccaggtaccgagaacagcggctatttccgtgggagctactcgaattctccatcgaatccggtaaacagccgggctaatcaggacttctccgccttgatgagaagcagctaccattgtgcgatgaacaatgagaatgctaggcttctcacctttcagacctggcccctgacttttttaagcccaaccgacctagctaaagcaggcttctactacatcggcccaggcgacagggtggcatgtttcgcgtgtggaggtaagctgtcaaactgggagcctaaagacaatgccatgagcgaacaccttaggcacttccccaagtgtccatttatcgaaaatcagttacaggatactagcaggtataccgtgagcaacctctcaatgcagacccacgccgcccgcttcaaaactttcttcaattggccttcctcagtattggtgaatccagaacaactcgccagtgccggattctactatgtgggaaattctgacgatgtgaagtgcttttgttgcgatggtggtctcagatgttgggagtcaggggatgatccatgggttcagcatgccaaatggttccctcgatgcgaatacctaatccgcattaaagggcaagaatttatccgccaggtgcaagcctcatatccacatcttctagagcagttactcagtacttctgacagccccggtgacgaaaatgccgaatcctcaatcatccactttgagcctggtgaggatcatagcgaagacgcaataatgatgaacaccccagtaataaacgcggcagtagaaatggggtttagtagatcattggtgaagcagacagtccaacgcaagatcctagctactggagagaactaccgtctcgtgaatgatttggtactagatctcctcaacgccgaggacgagattcgggaagaagagcgagagagggcaaccgaagaaaaggaatctaatgaccttcttttaatccgaaaaaatcgtatggccctctttcagcatctgacttgtgtaattcccattttagatagccttctgactgctggtattattaacgaacaggagcatgatgttattaagcagaaaacccagacttcccttcaagccagagaactaatcgatacgattctagtcaagggaaacatcgctgctacagttttcaggaatagcttgcaggaagccgaagccgtgctgtacgaacacttattcgtgcagcaagacatcaaatacatacctacggaagacgtttcagacctgccagtggaagagcaactgcggaggttgcaagaggagcggacctgtaaagtgtgcatggacaaggaagtatcaatcgtgtttatcccctgcggacatctggttgtctgtaaagactgcgccccatccttgaggaaatgcccaatctgcagaagcacaattaaaggtactgtgagaaccttcctgtct

SEQ ID NO: 32352 - DNA, 1812 bp, synthetic construct
  misc_feature 1..1812: note = Description of Artificial Sequence: Synthetic coding sequence
  source 1..1812: mol_type = other DNA
atgaatatcgtggaaaatagcatattcctgtcaaacttgatgaagagcgctaacactttcgagcttaaatatgatttgagctgcgagctgtaccggatgtccacatactctactttccccgctggggtaccagtgagcgaacggtccctcgcccgggccggattttactacactggggtgaatgacaaagttaaatgcttctgctgcggcttaatgctcgacaactggaaaagaggggatagtcccaccgaaaagcacaaaaaattatatccatcttgccgttttgtacagagtctcaattctgtgaacaatctcgaagccacaagccaacccactttccctagcagcgtgacaaattctactcactcgttactgccaggcacggaaaattccggctacttccgcggatcctattccaactcgccctctaacccggtgaacagccgtgcgaaccaagatttctctgctttgatgcgctcgagctatcattgcgcaatgaacaacgagaacgccaggctgctcaccttccagacgtggcccttgacctttctgagccctactgacctggctaaagccgggttctactatatcggacctggtgatcgggtcgcttgttttgcctgcggaggaaaactgagtaattgggaacccaaggacaatgccatgtctgaacacctacgccatttccccaaatgtcccttcatcgaaaaccagctgcaggataccagccgctacaccgtgtcgaatctgtctatgcagacccacgcggcacgttttaaaaccttttttaactggcccagctctgtgctggtcaatccggagcagctcgccagtgcgggtttctattacgttgggaattcagacgacgtgaagtgcttctgctgcgatggagggttaagatgttgggaatctggagacgatccttgggttcagcacgccaagtggtttccccggtgcgagtatctgattcgcatcaaggggcaggagttcatcaggcaggtgcaggcatcttacccccatctgcttgaacagctgctcagtacgtccgacagcccaggcgacgagaatgctgagtcaagcatcatacatttcgagccgggggaagaccactcagaggatgctattatgatgaacacccccgtaattaatgcagccgtggagatggggttttcccgcagcctggtcaaacaaacagtccagagaaagatacttgcgacaggagaaaactatcggctggtgaacgatctagtgttagatctactgaacgctgaggacgagatccgggaagaggaaagggagcgtgcgaccgaggaaaaagagtcaaacgacctcctcctgattcgcaaaaatcgaatggcgctgttccagcatctcacctgcgtaataccaattttagacagcctgctcactgctgggatcatcaacgagcaagagcatgatgttattaagcagaaaacccaaacgtcgctgcaggcccgggaactgatagataccatactggtgaagggaaatatagccgcaaccgtttttcgcaactccctccaagaagctgaagcagtcctctatgaacatttgtttgtgcagcaggacatcaagtatataccgaccgaggacgtttcagatctgccagtcgaggagcaactcagaaggctccaggaagagcgcacttgcaaggtgtgtatggacaaggaggtgtccatcgtgttcattccatgcggccaccttgtggtgtgtaaggactgcgccccttctcttaggaagtgtccaatttgtcgatccactataaagggtactgtgagaacatttctgtca

SEQ ID NO: 32353 - DNA, 1812 bp, synthetic construct
  misc_feature 1..1812: note = Description of Artificial Sequence: Synthetic coding sequence
  source 1..1812: mol_type = other DNA
atgaatatcgtcgaaaacagtattttcttaagcaatcttatgaaatccgctaacacattcgaacttaaatacgacctctcatgtgaactgtatagaatgtcgacatacagcacattcccagctggagtgcctgtgagcgagcgcagccttgccagagctgggttttactacaccggggtgaacgataaagttaagtgcttctgctgcggactgatgcttgacaactggaagcggggggacagtccaacagaaaagcacaaaaagctttacccgagctgcagatttgtgcagtcgttgaacagcgtgaacaaccttgaggcgacctctcaacctacatttccaagttctgttacaaacagcactcactcgttgctccctggaactgaaaactcaggctacttcagggggagctacagcaattcccctagcaaccctgtgaacagcagggcaaatcaggactttagcgctcttatgagaagctcctaccattgcgctatgaacaatgaaaatgcacgcctgctgacattccagacctggccactcacgtttctgagccccactgatctggccaaggccggattctactatatagggcctggggatagagttgcctgcttcgcttgcggaggaaaattaagcaactgggagcctaaagataacgctatgtccgaacacctgcgccactttcctaagtgtcctttcatagaaaaccagttacaagatacctcaagatatacagtgtccaacttgtcgatgcaaacacatgcagcccgcttcaaaaccttttttaattggccaagtagtgtccttgttaaccctgagcagctggccagtgctggcttctactatgtcggcaatagcgatgatgttaaatgcttttgttgcgatggcggcctgcgctgttgggaatctggcgatgacccatgggtgcagcatgccaaatggttcccgagatgtgagtatttaattagaatcaaaggccaggagtttatccgccaggtacaggcctcttacccacatctgcttgagcagttgctctcaacaagcgattctcccggagatgagaacgcagagtcttctatcattcattttgagcccggcgaggaccattccgaggacgccatcatgatgaacaccccggttatcaacgcagctgtggaaatgggcttcagccgcagcctggttaaacagaccgtgcagcgtaaaatcttggccacaggggagaattacagactggtgaatgatctcgtcttggacctgctgaatgccgaggatgaaatcagagaagaggaaagggagcgtgccaccgaggagaaggagagcaacgacctcctgctgatccggaagaacaggatggcactgtttcagcatttaacttgtgtgattcctatcctggattccttgctcaccgcagggataattaacgagcaagagcacgacgtgatcaagcaaaagacacaaacatcgctccaggccagagagttgatcgatacaattttggttaaaggaaatatagcagcaaccgtttttcggaatagtctccaggaagcagaggctgttctctatgagcatctttttgtccagcaggacatcaagtatattcccacggaagacgtgagcgatctgccggtggaagaacagctgaggagactgcaagaagaaagaacctgcaaggtttgtatggataaggaagtctcaatcgtatttataccttgcggccacctcgtcgtctgtaaggattgcgcaccctctctgaggaaatgtccaatctgcagaagcacaattaaaggtaccgttcggacttttctgtct

SEQ ID NO: 32354 - DNA, 900 bp, synthetic construct
  misc_feature 1..900: note = Description of Artificial Sequence: Synthetic coding sequence
  source 1..900: mol_type = other DNA
atggtggaaatcgatgccgcgtccgtgtacaccttgcctgccggcgccgattttctgatgtgctactctgtcgcagaaggatattactcccatcgggaaacagtcaatggctcttggtacattcaggatctctgtgagatgctgggcaagtacggatcatccttggaatttactgagctgctaacactggtaaataggaaagtctcccagcggcgggtcgacttttgcaaggatcccagcgccatcggcaagaaacaagttccctgcttcgcaagtatgttgactaaaaagctgcactttttcccgaaatcaaacttggagcatcaccatcatcatcatgtcgaaattgatggcggctccccgatgagtagtgcatccggacttcgtcggggacaccccgccggtggcgaagaaaatatgaccgagacagacgccttctataaacgcgagatgttcgatcccgctgagaaatataaaatggaccaccgccgtcgcggaatagctctgatttttaaccatgagagattcttctggcatttgaccctcccggaacggagggggacatgcgccgacagagacaacctaacacgcagattttcagacctcggctttgaagtcaagtgtttcaacgatctgaaagccgaggagttactcttaaagatccatgaggtgtctacagtctcccacgccgacgccgactgcttcgtttgcgtctttctttctcacggcgaaggaaatcacatctacgcttatgacgccaaaatcgaaattcagaccttaactggcttatttaagggtgacaaatgtcatagcctcgtgggaaaaccgaagatcttcatcatccaggcatgtcgggggaatcagcacgacgtcccggttattcctcttgatgtggtggac

SEQ ID NO: 32355 - DNA, 900 bp, synthetic construct
  misc_feature 1..900: note = Description of Artificial Sequence: Synthetic coding sequence
  source 1..900: mol_type = other DNA
atggtggagattgatgctgcgagcgtctacacgcttcccgcgggtgccgattttcttatgtgttactccgtggcagaaggatactacagccaccgcgagacagtgaacgggtcctggtacattcaagacctctgcgaaatgctgggaaagtacggatcttctttggaattcaccgagctgctgacattggttaaccggaaagtttcacaacggcgtgtggacttctgcaaggacccttccgctataggcaagaagcaagtcccgtgtttcgcttccatgttgaccaagaagctccatttcttccccaaaagcaacctcgagcaccaccaccaccatcatgtagagatagacggggggtccccaatgagcagcgccagtgggctgcggcggggacaccccgctgggggcgaggagaatatgactgagactgatgcattttataagcgggagatgtttgatccggccgagaaatacaagatggatcaccgacgcagagggatcgctctcatctttaatcacgagcgctttttttggcacttaactctccctgaaagacgaggtacttgcgctgacagagataatctgacccggagattttctgatttggggttcgaggtgaaatgtttcaacgacctcaaggccgaggagctgcttcttaaaatccacgaagttagcacagtcagtcacgccgatgctgattgctttgtctgtgtgtttcttagccacggggagggtaatcatatctatgcctacgatgccaagatcgaaatccagactctgaccggattattcaagggtgacaagtgtcactccttggttggcaagccaaagatcttcatcatccaggcctgccgcggtaatcagcatgatgtccctgtaatccctctcgacgtcgtggat

SEQ ID NO: 32356 - DNA, 900 bp, synthetic construct
  misc_feature 1..900: note = Description of Artificial Sequence: Synthetic coding sequence
  source 1..900: mol_type = other DNA
atggtggaaatagatgccgcatcagtgtacacactaccagctggagctgattttcttatgtgttattccgtggccgaaggatattactcacatagagaaacagtaaacggatcttggtacatacaggatctgtgtgaaatgttaggaaagtatgggtcatctctcgagttcactgagctccttactcttgtgaacaggaaagtatcccagagacgggttgacttttgtaaggatccaagtgccatcgggaaaaaacaggtcccttgttttgcatccatgctcacaaagaaactccatttctttccaaaaagtaatttagaacaccaccatcaccaccatgttgaaatcgatgggggatccccaatgtcctctgcgagtggattacgccgaggacatcccgctgggggggaagaaaatatgacagaaacagatgctttttataagcgggaaatgtttgatcccgctgaaaaatacaaaatggatcatagaagaagaggaatagctcttatcttcaaccatgagcggtttttctggcaccttactctacctgagcgaagaggaacttgcgccgatcgcgataacctcactcgcaggttctccgatttgggattcgaggtgaaatgtttcaacgatttgaaagccgaagaactgcttttgaaaattcatgaagtatccacagtaagtcacgcagacgctgattgctttgtgtgtgtcttcctgtcccatggagaagggaatcatatttatgcttacgacgcaaagatagagatccagactctcacaggactctttaagggggataaatgccacagtctggtgggaaaacccaagatattcattatccaagcctgtagaggaaatcagcacgatgtgcccgtgatccccctcgatgtggttgat

SEQ ID NO: 32357 - DNA, 900 bp, synthetic construct
  misc_feature 1..900: note = Description of Artificial Sequence: Synthetic coding sequence
  source 1..900: mol_type = other DNA
atggtggaaattgatgcagcatcagtctacaccctgcctgccggagcagacttccttatgtgttactcggtcgctgaaggttactacagccaccgtgagactgtcaacgggtcatggtacatccaagacctttgcgagatgctgggaaagtacgggtcctcactcgaatttacggaactccttacgctggtgaacagaaaagtgtcacagagacgcgtggatttttgtaaagaccccagcgccatcggtaagaaacaagtgccctgctttgcatcaatgcttaccaaaaagttgcacttcttccccaagtcgaacttggaacatcatcaccaccatcacgtggaaatagatgggggttcccctatgagcagcgcatcggggttgagacggggtcacccagcgggcggtgaggaaaacatgactgaaactgatgcgttctacaagcgcgaaatgttcgatccggcggagaagtataagatggatcatagaaggaggggaattgcactgatcttcaatcacgaaaggtttttctggcatcttactctgcccgaaagaagaggaacttgtgccgatcgagataatctcactcgccgattttcagacctgggttttgaggtgaagtgcttcaacgatctgaaggccgaagaacttcttctgaagatccacgaagtcagcaccgtctcccatgccgacgctgattgttttgtgtgtgtgtttctcagccatggagaggggaatcatatctacgcatacgacgcaaagattgaaatacagaccctcactggtcttttcaaaggtgataagtgtcattcgcttgtggggaaacctaaaatctttatcatacaagcgtgtcgtggcaaccagcatgatgtgcccgtgatccccctggatgtggtggac

SEQ ID NO: 32358 - DNA, 900 bp, synthetic construct
  misc_feature 1..900: note = Description of Artificial Sequence: Synthetic coding sequence
  source 1..900: mol_type = other DNA
atggtcgaaattgacgctgcctcagtttatactttgcctgccggggccgacttcctgatgtgttatagtgtggcagagggctactattcccaccgagagacggtcaatgggagttggtatatccaggacctgtgtgaaatgctgggcaagtacggctcctccttagaatttacagaactgttgacactcgtgaataggaaggtgtcccagcgaagggtcgatttttgcaaggacccgtctgccattgggaaaaagcaggtgccttgcttcgctagtatgcttaccaagaagctccatttcttcccaaaatccaacctggagcaccatcatcaccatcacgtcgaaattgatggcggcagcccaatgagcagtgccagtgggctgagaagaggccacccagccggaggggaggagaacatgactgagacggacgctttctacaagcgagaaatgtttgatccagcggagaagtataagatggaccataggcggagaggaatcgccctgatattcaatcatgaacggttcttctggcacctaacactgccagagcggagagggacatgcgcggacagggacaatttgacccgcaggttttctgatttaggcttcgaagttaagtgttttaatgacctgaaggccgaagagctgcttctgaagatacatgaggtgagcactgtgtctcatgctgacgcggactgtttcgtgtgtgtgttcctgtcacacggcgaggggaatcacatctatgcttacgatgcaaagatagaaattcaaacactgactggtcttttcaagggtgacaagtgtcactcactggtggggaaacccaaaatctttatcattcaggcgtgccgcgggaaccagcatgacgttcctgtgatcccgctggacgtcgtcgac

SEQ ID NO: 32359 - DNA, 900 bp, synthetic construct
  misc_feature 1..900: note = Description of Artificial Sequence: Synthetic coding sequence
  source 1..900: mol_type = other DNA
atggtggaaattgatgcagcatccgtgtacactttgccagctggtgcagactttcttatgtgttactcggtggcggagggttactactcgcaccgagaaaccgtcaatggctcgtggtacatccaagacctgtgtgagatgctgggcaaatacggttcatcacttgaatttaccgaactgctgacgctggtgaacagaaaggtgtcacagagaagagttgacttttgtaaagatccttcagcaattgggaagaagcaggtgccatgctttgcctccatgttgaccaagaagctgcatttctttcctaaaagcaatctcgaacaccaccaccaccatcatgtggaaatcgacggtgggtcaccaatgtcgtcggccagcggacttagacgcggacatcctgccgggggagaggaaaacatgacggagacggatgcattttacaagcgggaaatgtttgatccggccgagaagtataagatggatcatcggcgtcgtggaatcgccttgatattcaatcacgaacgcttcttctggcatctcactctgccggagcggcgggggacctgcgcggaccgtgataacttgactcgacggttttccgacctggggtttgaggtgaagtgcttcaacgatctgaaagcggaggaacttctgctcaagatccatgaagtgtctaccgtgtcccatgcagatgctgattgcttcgtgtgtgtgttcctctcacatggcgagggcaaccacatatacgcatacgacgcgaagattgaaattcaaactctcactggacttttcaagggagacaaatgtcactcgctggtcgggaagcctaagattttcatcattcaagcatgtcgcggcaaccagcatgacgtccccgtgatccctcttgacgtcgtggat

SEQ ID NO: 32360 - DNA, 900 bp, synthetic construct
  misc_feature 1..900: note = Description of Artificial Sequence: Synthetic coding sequence
  source 1..900: mol_type = other DNA
atggttgagattgatgccgctagtgtctacaccctcccagccggggcagatttcctcatgtgttactctgtcgccgaggggtattattctcaccgtgagactgtaaatgggagctggtacatccaagatttgtgcgagatgttggggaagtatggttcatctcttgagttcacagagctgctgactctcgtgaaccgaaaggtgtcccagcggcgtgtcgatttctgcaaagatccaagcgcaattggaaagaagcaagtaccatgcttcgcttctatgctgaccaaaaagttgcacttcttcccaaagagtaaccttgaacaccatcatcaccatcatgtggaaattgacgggggatccccaatgtctagtgcttctggcctgcgaagaggtcacccggcagggggagaagagaacatgaccgaaacagatgctttctacaagcgtgaaatgttcgaccctgccgaaaaatataagatggaccacaggcgtaggggcatagccttgatcttcaaccacgagcgttttttctggcaccttaccctccctgaacgtcgcggcacgtgcgcggaccgagacaatctcacccgccgcttttctgatctcggttttgaggtgaagtgctttaacgatctaaaggccgaggaattgcttttgaaaatacatgaagtatccacagtgtctcatgctgacgcggattgttttgtatgtgtctttttgtctcatggggaggggaaccatatttatgcatacgatgccaaaatcgaaatacagactctcacgggtctgtttaagggtgataagtgtcactcactcgtgggaaaacctaagatttttatcatacaagcttgtcgtgggaaccagcatgacgtgccagtgatcccgctagacgtcgtcgat

SEQ ID NO: 32361 - DNA, 900 bp, synthetic construct
  misc_feature 1..900: note = Description of Artificial Sequence: Synthetic coding sequence
  source 1..900: mol_type = other DNA
atggttgagattgacgctgcctccgtctacacgcttccagcaggcgctgacttcctcatgtgttactctgtagctgaaggatactatagccacagggaaacagtcaacggaagctggtacatccaggacctgtgcgaaatgcttgggaagtacggatcatccctggagttcactgagctgcttaccctggtgaaccggaaagtgagtcagcgcagggtggacttctgtaaggacccttctgctatagggaagaaacaggtgccttgtttcgctagcatgctgaccaaaaagttgcatttttttcctaaatcaaacctcgaacaccaccatcaccaccacgtcgagattgatggaggaagccctatgagttcagcatcgggcctgagacgtggtcaccccgccgggggcgaagaaaacatgacagagactgacgcattctacaagcgcgaaatgtttgaccctgcagaaaaatacaaaatggatcacaggcggaggggaatcgctctgatctttaaccacgagcgattcttctggcatttgacacttccggaacgcagaggtacatgtgctgatagagataacctcactcgtcgattctcagacctcggatttgaggtaaagtgtttcaacgatctgaaggctgaagaactgcttttaaagatccacgaggtgtcaaccgtcagccatgctgacgccgactgtttcgtgtgcgtgtttctgagtcatggagagggcaatcacatctacgcgtacgatgctaagattgaaatacagactttaaccggccttttcaagggcgataagtgccacagcctggtgggcaagccaaaaatctttatcattcaggcctgccggggcaaccagcacgatgtccctgtgatcccccttgatgttgtggat

SEQ ID NO: 32362 - DNA, 900 bp, synthetic construct
  misc_feature 1..900: note = Description of Artificial Sequence: Synthetic coding sequence
  source 1..900: mol_type = other DNA
atggtggagatcgacgccgcatcagtttatacactaccagctggagccgatttcctaatgtgttattccgtggcagaagggtactactcgcatagagagactgtaaatgggagttggtatatacaagatttatgtgaaatgctggggaagtacggatcctctctcgagttcactgaattactgacattagtcaacaggaaagtgtctcagcggagagttgacttctgtaaagatcctagtgcaattggaaaaaaacaggtcccttgctttgcttcgatgcttactaaaaaacttcatttcttccccaagtctaacctggaacatcaccatcaccaccatgtcgaaatcgatggggggtcccctatgtcttccgcttctggactgcgacgcgggcatcccgctggaggagaagaaaatatgacagaaacagatgctttctataaaagggaaatgttcgaccctgctgagaaatataaaatggatcacaggcggcgggggatcgccctaatctttaaccacgaacggttcttttggcacttaactctgccggagcgacggggaacttgtgccgatagagataatctcacgagaagattttcagatctcggattcgaagttaaatgcttcaacgatctgaaagctgaagaactactactgaagatccatgaggtgtcaacagtatctcacgccgatgctgattgctttgtatgtgtgtttctctcacacggagaagggaaccacatctacgcatatgatgccaaaatagaaatacagacattaacagggctctttaaaggagataaatgtcactccttagtagggaaacctaagatttttattatacaggcatgtcgggggaatcagcacgacgtgcctgtaatcccattagacgtggtagat

SEQ ID NO: 32363 - DNA, 900 bp, synthetic construct
  misc_feature 1..900: note = Description of Artificial Sequence: Synthetic coding sequence
  source 1..900: mol_type = other DNA
atggtcgagatcgatgcagcttccgtctacactctcccggctggcgccgatttccttatgtgctactctgtcgccgaaggctactattctcaccgcgagaccgtgaatggctcatggtacattcaggatctttgtgaaatgctgggcaaatacgggtcgtcactggaatttacggaactgttaactttggtgaacaggaaggtaagccagcgtcgggtcgacttttgcaaggacccaagcgccataggaaagaagcaggtcccatgttttgcctctatgctgacaaagaagctccatttttttcctaagtctaatctggaacatcaccatcaccaccacgtggagatcgacggggggagcccaatgagttcagcttcgggcttgaggcggggccaccccgctggcggcgaagagaacatgaccgaaaccgacgcattctacaaacgtgagatgtttgatccagctgaaaaatacaagatggaccacagaaggagaggtatcgctctgatcttcaatcacgaaaggttcttctggcacctgacgctgccagagagacgaggaacctgcgctgatcgggataaccttaccagacgcttctctgacttaggctttgaggtgaagtgtttcaatgaccttaaggccgaggaactgctgctcaagattcacgaggtttctaccgtctctcatgctgacgcagactgttttgtgtgcgtttttctttctcatggtgaaggaaatcacatctatgcctatgacgctaaaatcgagattcaaaccctgaccggcctcttcaagggtgacaagtgtcactccctggtcgggaaaccgaagatttttatcatccaggcctgccgggggaatcagcatgatgttcccgtgattccgctcgatgtcgtcgat

SEQ ID NO: 32364 - DNA, 900 bp, synthetic construct
  misc_feature 1..900: note = Description of Artificial Sequence: Synthetic coding sequence
  source 1..900: mol_type = other DNA
atggtagagatcgatgcagcatccgtgtacactctcccagcaggcgccgacttcctaatgtgctactccgtggccgagggctactattcacacagagagaccgtgaacgggtcgtggtatattcaggacttgtgcgagatgttaggtaaatacggttcctctctggagtttactgaactcctcactttggtgaaccgcaaggtcagtcagcgtagggtggacttttgtaaagatccctccgctataggcaagaaacaggtaccatgctttgcatcgatgctgaccaaaaaactccacttctttccaaagagcaatctggagcatcaccaccaccatcacgtggagattgacgggggcagtccaatgtcaagcgcgtcggggctccggaggggacacccagctggaggcgaggaaaatatgacagagaccgacgccttctacaaaagggaaatgtttgatcccgccgaaaagtacaagatggaccacaggcggaggggaatcgctcttatctttaatcacgaacgctttttctggcatctcactttgcctgagcgccggggaacttgtgccgatcgagataatctgaccaggcggtttagtgatctgggattcgaggtgaagtgcttcaatgatcttaaggctgaggagttgttgcttaaaatccatgaggtctcaacagtctcacacgctgatgctgattgtttcgtgtgcgtgttcttatcccatggggagggaaatcacatttacgcctatgacgccaaaattgagatccagacattaacgggccttttcaaaggtgataaatgtcattcccttgtaggaaaaccaaaaattttcattattcaggcttgtagaggcaatcagcacgatgtgcctgttatcccactcgatgtcgtcgat

SEQ ID NO: 32365 - DNA, 900 bp, synthetic construct
  misc_feature 1..900: note = Description of Artificial Sequence: Synthetic coding sequence
  source 1..900: mol_type = other DNA
atggttgaaatcgatgcggcgtcagtttacaccctgcccgccggagctgacttcctgatgtgctactctgtggccgaaggctattattctcatcgtgagaccgtgaatggctcctggtacatccaagatctgtgcgaaatgctgggaaagtatggaagctccctggaattcacggagctgctgactctggttaaccggaaagtgtctcaacgaagagtcgatttttgtaaagacccaagcgccatcggcaagaaacaggtgccgtgttttgctagcatgctgaccaaaaagttgcacttttttccgaaaagcaaccttgagcatcaccaccatcaccacgtggaaatcgatggtggtagcccgatgagctcggcctctggattgcgacgaggccatcctgccggtggggaggagaacatgactgagactgacgccttctacaaacgcgagatgttcgatccagccgagaagtacaaaatggatcatcgccgtaggggaatcgctctgattttcaaccacgagcgcttcttttggcacctgactctgcccgaacgacgaggtacttgcgccgaccgggataacctgactcgccgtttctctgacctaggctttgaggtcaagtgttttaatgacctgaaagcggaggaactgcttctgaagattcacgaggtgtcgacagtgtcgcatgctgacgcagattgtttcgtgtgcgtgttccttagccacggcgagggcaaccatatttacgcgtacgacgccaagatcgagatccagaccctgactggcctgttcaaaggtgataagtgtcattctcttgtggggaagccaaaaatttttatcatccaagcttgccgtggtaaccagcacgacgttccagtgattccactggatgttgtagat

SEQ ID NO: 32366 - DNA, 900 bp, synthetic construct
  misc_feature 1..900: note = Description of Artificial Sequence: Synthetic coding sequence
  source 1..900: mol_type = other DNA
atggtggaaattgacgcagcatcggtgtacaccctcccagcgggagccgacttcttgatgtgttacagcgtggccgaaggatactactcccatcgggagactgtgaatggaagctggtacatccaagacctttgcgagatgctgggaaaatacggtagcagcctcgagtttaccgaactgctcacccttgttaaccgcaaggtttcgcagcgaagggtggacttttgcaaggatccgtcggccattggaaagaagcaggtgccatgttttgctagcatgcttaccaagaagctgcactttttccctaagagcaatttggaacatcatcaccatcaccacgtcgaaatcgatggtggatcgcctatgtcctcggcatcgggtttgaggcggggacatcccgcaggaggtgaagagaacatgaccgaaactgacgcattttacaagagagaaatgttcgatccagccgaaaagtacaagatggaccaccgacgccggggtattgctttgattttcaaccatgaacggttcttctggcatcttactttgcccgaacgtagaggaacgtgcgccgacagagataatctgactcgtagattctcagacctgggattcgaggtgaagtgctttaacgatctgaaggctgaagaacttcttctcaagatacatgaagtctcaactgtgtcgcacgcggatgccgattgctttgtgtgtgtgtttcttagccatggagaagggaatcacatatatgcctacgatgcaaagattgaaattcaaactctgaccggactcttcaagggagataagtgtcattcccttgttgggaaacctaagattttcattattcaagcatgtcgtgggaaccagcatgacgtgcctgtgatcccactcgatgtggtcgac

SEQ ID NO: 32367 - DNA, 900 bp, synthetic construct
  misc_feature 1..900: note = Description of Artificial Sequence: Synthetic coding sequence
  source 1..900: mol_type = other DNA
atggtggagattgatgcagcctccgtctacactcttccagctggggcagactttctcatgtgttactccgtcgcagaaggctactactcgcatcgggaaaccgtgaacggatcctggtacattcaggatttgtgcgagatgctgggaaaatacggatcgtcgctcgagtttaccgagttgctgactctggtgaaccgcaaggtgtcgcagaggcgggtggacttttgtaaggatccctccgcaatcggaaagaagcaagtgccttgctttgcatcgatgcttactaagaagctccacttttttcctaagagcaacctcgagcatcaccaccatcatcatgtggaaatcgacggagggagccctatgtcctcggcctcgggactgcgtcgcggacatccagcgggaggagaggagaatatgaccgaaaccgacgcattctacaaacgagaaatgttcgatccagcagagaagtataagatggatcataggcggcggggcattgcactcatcttcaaccatgaacgtttcttttggcatcttactcttccagaacgacgcggtacctgtgccgatcgggacaacctgacccggagattctcggatctcggctttgaagtgaaatgcttcaatgacctcaaggcagaagagcttctccttaagattcatgaagtaagcactgtctcccacgccgatgcagactgttttgtctgcgtttttctttcccacggtgagggtaaccacatatatgcgtatgatgcaaagattgaaattcagaccctgaccgggctgttcaagggagataagtgccattctctggtgggtaagcccaagattttcattatccaagcatgccgcggaaaccaacacgacgtgcctgtgattcctctggatgtggtcgac

SEQ ID NO: 32368 - DNA, 900 bp, synthetic construct
  misc_feature 1..900: note = Description of Artificial Sequence: Synthetic coding sequence
  source 1..900: mol_type = other DNA
atggtggagatcgatgctgcatccgtgtataccctgccagcgggggccgactttctgatgtgctacagcgtcgccgagggttattacagtcaccgcgagaccgtgaacggcagttggtatatacaggatttatgcgagatgctcggcaagtacggttcaagtcttgagttcaccgagctactgacattggtgaaccggaaagtttctcagagaagggtggacttttgcaaagacccttccgctatcggtaaaaagcaggtgccatgttttgcctcgatgttaacaaagaagctgcacttctttcccaaaagtaatcttgagcaccaccatcaccaccacgtggagatcgacggaggatccccgatgtcctcggccagtggtttaaggcggggacacccggcagggggcgaggaaaatatgacagagacagacgcattttacaagcgagaaatgtttgatcctgcagagaaatacaaaatggatcatcgcaggcgcggtatcgccctgatttttaatcatgagcgatttttctggcatttaactctgccagagagacggggaacatgcgctgatcgcgacaatctaactcggcgattctcagaccttggcttcgaagtgaagtgcttcaacgatctcaaagccgaggagctgctgctaaagatccacgaggtgtcaaccgtcagccatgctgacgctgactgtttcgtttgcgtcttcctgagccatggcgaagggaaccacatttatgcatatgacgctaaaatcgaaatacaaacactaactggcttattcaaaggcgacaagtgtcacagcctcgttggtaagcctaaaattttcattatccaggcttgtcgggggaatcagcacgacgtgcctgtgattcccctcgatgttgtggat

SEQ ID NO: 32369 - DNA, 900 bp, synthetic construct
  misc_feature 1..900: note = Description of Artificial Sequence: Synthetic coding sequence
  source 1..900: mol_type = other DNA
atggtcgagatagacgcggcttcagtgtacacgttgccggcaggagctgatttcctcatgtgttacagcgttgcagaaggttactactcgcatcgcgaaaccgtgaatggaagctggtatatccaagatctttgcgagatgctcggaaagtacggcagctctttggaattcactgaattgctgaccctggtgaaccgcaaggtgagccagcgcagagtcgacttttgcaaggatccgtcggcgattggtaagaaacaggtgccctgctttgcgtcgatgttgactaaaaagctgcacttcttcccgaagtcgaatctggagcatcatcaccaccaccacgtcgaaatcgatggcggatctcctatgtcctccgcttccggtctgcgaaggggacacccggcaggaggggaggagaacatgaccgaaaccgatgcattttacaagagggaaatgttcgaccccgccgagaagtacaaaatggatcatcggcgcaggggcatcgcccttatcttcaaccatgagcggttcttttggcatcttacgctcccagaacggaggggaacctgtgcggatcgcgacaatctcaccaggaggttctcggacctgggattcgaagtaaagtgctttaacgatctgaaggctgaagagctgttgctgaagattcacgaagtctcgactgtgagccacgccgatgctgactgcttcgtctgcgtgttcctgagtcacggtgaaggcaaccacatctacgcctacgatgcgaagatcgaaattcaaactctcaccggacttttcaaaggggacaaatgtcactccctggtgggaaagccgaaaatcttcatcatccaagcgtgccgtggcaatcagcatgacgttccagtgatccctctcgacgtcgttgac

SEQ ID NO: 32370 - DNA, 900 bp, synthetic construct
  misc_feature 1..900: note = Description of Artificial Sequence: Synthetic coding sequence
  source 1..900: mol_type = other DNA
atggtcgagatagatgccgctagcgtgtacaccctgcccgccggggctgattttctgatgtgttactccgtggcagaaggatattactctcacagagagacggtcaatggaagctggtacattcaagatttatgtgagatgctaggaaagtatggctcgagtttagaattcacagagctgcttacattggtcaacaggaaggtgtctcaacggagagtagatttttgcaaggatccttcagcgattggtaagaaacaagtgccttgcttcgcatcaatgctgacaaagaaactgcacttcttccctaaaagcaacctcgagcaccaccatcaccatcatgtggaaatcgatggcggatccccgatgagttctgcaagcggtctcagaagaggccatccagccggtggagaggagaacatgactgaaaccgatgctttctacaagagggagatgtttgatcccgccgagaagtacaaaatggaccatcggagacgcggcatagctcttattttcaatcacgaaaggttcttttggcatcttaccttaccagagcgtcgtggcacctgcgcagatagagataacctgactcgccgcttctctgaccttggattcgaagtgaagtgcttcaacgatttgaaggcggaagagctgttgttgaagatccacgaagtctccaccgtgagccatgcagacgctgattgctttgtgtgcgtctttctgagtcacggtgaaggcaaccacatctatgcatacgatgccaaaatcgaaattcagaccctcaccggactctttaagggcgataagtgtcactccctcgtgggaaagccaaaaatctttatcattcaggcttgtagggggaaccagcatgacgtgcctgtaatcccactggatgtggtagat

SEQ ID NO: 32371 - DNA, 900 bp, synthetic construct
  misc_feature 1..900: note = Description of Artificial Sequence: Synthetic coding sequence
  source 1..900: mol_type = other DNA
atggtggaaatagatgcggcaagcgtgtataccctcccagccggagcagacttcctcatgtgttacagcgtcgctgagggctactactcgcaccgcgaaactgtgaacgggtcatggtatattcaagatctctgtgagatgctggggaagtacggctcctcacttgaatttaccgagctgctcacccttgtcaaccggaaagtgtcacaacgcagagtcgatttctgtaaggacccatcagcaattggaaagaagcaagtgccatgctttgcatcaatgcttaccaaaaaactccacttctttcctaaatccaacctggaacatcatcatcaccatcacgtcgaaattgatggaggtagccctatgtcgagcgcatccggacttcgaagaggtcacccggctggtggcgaagagaatatgactgaaactgatgcattttacaagagagagatgtttgatccagcagagaaatacaaaatggatcacagacggagaggaatcgcactgattttcaaccatgagcgtttcttttggcatttgacgctgcctgaaagacgggggacctgtgcagacagggacaacctgactcggaggttctcagaccttggatttgaggttaaatgttttaacgacctgaaggccgaagaactcctgcttaagattcatgaagtatccactgtgtcacatgcagatgcagactgttttgtgtgcgtgtttctcagccatggggaagggaatcacatttacgcttacgatgcaaagattgaaatccaaaccctgactggactgtttaagggggacaagtgtcattcccttgtgggaaaacccaagattttcattatacaagcatgcagaggaaaccaacacgacgtgcccgtcattccccttgatgtcgtcgac

SEQ ID NO: 32372 - DNA, 900 bp, synthetic construct
  misc_feature 1..900: note = Description of Artificial Sequence: Synthetic coding sequence
  source 1..900: mol_type = other DNA
atggttgaaattgatgcagcttccgtgtacactctgcctgcgggagcggattttctgatgtgctactcggtggctgaaggatattactcgcacagggaaaccgtgaatggttcgtggtacatccaggacttgtgcgagatgctcggcaagtacgggtcctcgctggagttcaccgaactgctgacgctcgtgaaccggaaggtgtcgcaaagaagagtcgatttctgtaaggacccgtccgccattgggaaaaagcaggtgccttgcttcgcttctatgcttaccaagaagctgcacttcttcccaaagagcaacctcgaacatcaccatcatcaccacgttgaaatcgacggaggcagcccaatgagtagcgcgtcagggcttcgccgcggacatccggctggaggcgaagagaatatgactgaaactgatgccttctacaaaagagagatgtttgacccagccgagaagtacaagatggatcacaggcgccggggaatcgcactgatctttaatcatgaacggttcttctggcatctgaccctcccggagcgccgcggtacttgtgcagaccgggacaaccttactcggcggttctccgatctgggattcgaggtgaaatgtttcaacgatctgaaggccgaagaactcctcctcaagattcacgaagtgtcaaccgtgtcccacgctgacgctgattgctttgtctgcgtgtttctgtcgcatggagaagggaaccatatctacgcctacgacgcgaagatcgagattcagaccctcaccggcctcttcaaaggagacaaatgccactccctggtgggcaagccgaagatcttcatcatccaggcgtgccgcggcaaccaacacgacgtgccagtgattccgttggacgtggtggac

SEQ ID NO: 32373 - DNA, 900 bp, synthetic construct
  misc_feature 1..900: note = Description of Artificial Sequence: Synthetic coding sequence
  source 1..900: mol_type = other DNA
atggtggaaattgatgcagcaagcgtgtacaccctgccagcgggagcagattttctcatgtgttactcagtcgcagagggttactattcgcacagggaaacggtgaacgggagctggtacattcaagatctttgtgaaatgctcgggaagtacggttcgtctcttgagtttactgaactgctcacccttgttaaccgtaaagtctcccagcgccgtgtggacttttgtaaagatccttcagcaattggtaaaaagcaggttccatgctttgcgtccatgctgaccaaaaaacttcactttttccctaagtcgaatcttgagcatcatcatcaccaccacgtggaaatcgacggaggttcgcccatgagctctgcatcgggtctgaggcggggacatccggcgggaggcgaggagaatatgactgagacggatgccttctataagagggaaatgttcgatcccgcggaaaagtacaagatggaccatcgacgcagaggcatcgcactgatattcaaccatgagaggtttttctggcaccttacgcttccagaaagaagaggaacctgtgcagatcgtgacaatctcaccagacggtttagcgatctgggatttgaggtgaagtgcttcaacgatttgaaggccgaagaactgctgctgaagattcatgaggttagcaccgtcagccacgccgacgcagattgctttgtgtgcgtgtttctctcccacggggaaggaaatcatatctacgcatacgatgccaagatagaaatccagacgcttactggtctgttcaaaggcgataaatgtcattccctggtgggcaagcctaagattttcataattcaagcctgtcgcggaaaccaacatgatgtgccagtgatccccttggacgtggtggat

SEQ ID NO: 32374 - DNA, 900 bp, synthetic construct
  misc_feature 1..900: note = Description of Artificial Sequence: Synthetic coding sequence
  source 1..900: mol_type = other DNA
atggtcgaaattgacgcggcctctgtctataccctgcccgccggggcggactttctcatgtgttactcggtggccgagggatactactctcatcgcgaaactgtgaacggaagctggtatatccaagatctctgcgagatgctgggcaagtatggatcctcgctcgagttcactgagctgctgacgctcgtgaacagaaaggtgtcccaaagacgggtggacttctgtaaggacccgtccgcgatcggtaagaaacaggtgccgtgcttcgcgtcgatgctgaccaagaagctgcactttttcccgaagtcgaatctggagcatcaccatcaccaccatgtcgaaatcgacggaggatccccgatgtccagcgcttcggggctgcgcaggggacacccggccggaggtgaggaaaacatgaccgagactgacgctttctataagagagaaatgttcgaccctgccgaaaagtacaagatggaccaccggcggagaggcattgcactcatcttcaaccatgaaagatttttctggcatctgaccctgccagagcggcgaggaacctgcgccgacagggacaacctcactcggcgcttctccgacctgggctttgaagttaaatgcttcaatgacctgaaggctgaggagttgctgctcaaaatccacgaagtgtccactgtttcccatgcggatgcggattgcttcgtctgcgtgttcctgtcccacggcgaaggaaatcacatctacgcgtacgatgccaaaattgagatccagactcttactggcttgttcaagggagataagtgccactcactcgtggggaagccaaagattttcatcattcaggcctgccggggaaaccagcacgacgtgccagttatcccgctggacgtggtggat

SEQ ID NO: 32375 - DNA, 900 bp, synthetic construct
  misc_feature 1..900: note = Description of Artificial Sequence: Synthetic coding sequence
  source 1..900: mol_type = other DNA
atggtcgaaattgacgctgcctcggtctacacccttcctgctggggcggatttccttatgtgctattccgtcgctgaaggttattactcacacagggagacagtaaatgggtcttggtacattcaggacctctgcgagatgctgggtaagtacgggtcgtccctcgagttcactgagctgctgactctcgttaacagaaaggtcagtcagagacgcgtcgacttttgtaaggaccctagtgctatcggaaaaaagcaggtgccgtgctttgcgtccatgctaactaaaaagctgcactttttcccgaagagtaacctcgagcaccatcaccatcatcatgtcgagatcgatggaggatcacccatgtcaagcgcatccggcctccgcagaggacaccctgccggcggcgaagaaaacatgaccgagaccgatgctttctataaaagagagatgtttgacccagcagagaaatataagatggaccacaggcgccgcgggatagcgctcatctttaaccacgaacggttcttctggcacctcactttgcccgaaaggcgcggcacctgtgccgatcgagacaatcttacgcgccgtttctccgacttgggcttcgaggtcaaatgcttcaacgacctaaaggctgaggagctactcctcaaaatccacgaagtatctaccgtttcccacgccgacgccgattgtttcgtgtgcgtcttcctcagccacggtgagggcaaccatatttacgcatatgatgcgaaaatagagattcaaactctgacaggcctgtttaaaggggacaagtgtcacagcttggtgggcaagccgaagatcttcattatccaggcttgccgggggaatcagcacgacgtgccggtcattccactcgacgtggtggac

SEQ ID NO: 32376 - DNA, 900 bp, synthetic construct
  misc_feature 1..900: note = Description of Artificial Sequence: Synthetic coding sequence
  source 1..900: mol_type = other DNA
atggtggaaatagatgctgcctcagtgtacacattgcccgctggtgcggactttcttatgtgctatagtgtagcggaaggttactacagtcatagagagactgtgaacggtagctggtacatccaggatctctgtgagatgctcggtaagtatggatcaagtctcgaattcaccgagctccttactctggttaaccgcaaagtcagccaacgcagggttgatttttgcaaggatccatccgctatcggtaaaaaacaggtgccttgcttcgcgtcaatgctgacaaagaagttgcacttcttccccaaatccaacttggagcaccaccaccatcaccatgtggagattgatggtggtagccccatgtcatccgcaagcggtttgaggcgcggtcacccagccggaggagaggagaacatgactgagaccgacgcattctataaaagggaaatgttcgatcccgctgagaaatacaagatggaccaccgccgccgcggaatagctctgatttttaatcacgagagattcttctggcacctgaccctgcctgaaagaaggggaacatgtgccgaccgcgacaacctgactcgcaggttctccgacttgggctttgaggtgaaatgcttcaatgatctcaaagccgaggaactgctcctgaagatccatgaagtatccacggtttcccacgccgacgctgattgcttcgtgtgcgtattcctgtctcacggtgagggaaatcatatttacgcgtacgacgcaaaaatcgagatccagacattgacaggactgttcaaaggcgacaagtgtcactccttggtgggcaagccaaagattttcattattcaggcatgtcgcggaaaccagcatgacgtgcccgtcattcccttggatgtggttgat

SEQ ID NO: 32377 - DNA, 900 bp, synthetic construct
  misc_feature 1..900: note = Description of Artificial Sequence: Synthetic coding sequence
  source 1..900: mol_type = other DNA
atggtagagatcgatgcagcttccgtctacacgctgccggcgggagccgactttctgatgtgctactcagtagcagaaggctactactcacatcgggagactgtgaacgggtcatggtacatccaggatctgtgtgaaatgctgggcaagtatggatcttcactggagttcacggagctgttgaccctggttaataggaaggtgtcgcaacgaagagtggacttctgcaaggacccatcggcgatcgggaaaaaacaggtgccatgcttcgcaagcatgctcaccaagaagctccatttcttcccaaagtcaaacttggaacaccaccatcaccaccacgttgaaatcgacggaggcagtccgatgtcgtccgcgtcgggactgcgcagaggccaccccgccggaggagaagaaaacatgactgagactgacgcattctacaagagagagatgttcgatccggctgagaaatacaaaatggaccatcggaggagaggcatcgcactgatattcaaccacgagcggttcttctggcatttgaccctcccggaacgcagaggaacttgcgccgatcgtgataatctgactcggcggtttagtgatcttggatttgaagtgaagtgctttaatgatctcaaagctgaggagctgcttcttaagatccatgaagtcagcaccgtgtcccatgccgatgccgactgctttgtgtgtgtgttcctttcgcacggcgaagggaaccatatctacgcctatgacgccaagatcgaaattcagaccctcaccggcctgttcaagggcgacaaatgtcactccctggtcgggaagcccaagattttcattatccaggcgtgccgcggtaaccaacacgacgtgcctgttatcccgctcgacgtcgtggac

SEQ ID NO: 32378 - DNA, 900 bp, synthetic construct
  misc_feature 1..900: note = Description of Artificial Sequence: Synthetic coding sequence
  source 1..900: mol_type = other DNA
atggtggaaatagatgccgcgtcagtgtacaccctgccagcgggcgcggattttctgatgtgctactccgtggctgaagggtactactcccacagagaaaccgtcaacggatcatggtacatccaggacctgtgcgagatgctgggaaagtacggatcatcactggaatttactgagcttcttaccctcgtgaatcggaaagtctcgcagcgcagagtggatttttgcaaggacccgtcagcgatcggaaagaagcaagttccctgcttcgcctcaatgctcactaaaaagctgcacttctttccaaagtcgaaccttgagcatcaccaccatcatcacgtggaaatcgacggtggatccccaatgtccagcgcaagcgggctccgccggggccaccccgccggcggcgaggaaaacatgacggaaactgacgccttttacaagcgcgaaatgttcgacccagcagaaaagtacaagatggaccataggcgccgcggtattgccctgattttcaaccacgaacggtttttctggcatctgaccctcccggagcgccgcggtacttgcgccgaccgcgataacctgacgcggcggttctccgatctgggatttgaggtgaagtgctttaacgacctcaaagccgaagaacttctgctcaaaatccacgaggtttccactgtgtcacacgcggacgccgattgcttcgtctgcgtgttcttgtcgcatggagaaggaaaccatatctacgcgtacgatgcgaaaattgaaattcagactctcactggactcttcaagggagataagtgtcattcgctcgtcggtaagccgaagatcttcatcatccaggcttgtcgcggcaaccaacatgacgtgccggtcatcccgttggacgtggtggat

SEQ ID NO: 32379 - DNA, 900 bp, synthetic construct
  misc_feature 1..900: note = Description of Artificial Sequence: Synthetic coding sequence
  source 1..900: mol_type = other DNA
atggtggagatcgatgcggcatcggtctacactctgcccgcaggcgcagatttccttatgtgctactcggtggccgagggatactactcccatagagaaactgtgaatggatcctggtacatacaagacctgtgtgagatgcttggcaagtacgggtcctcgcttgaattcaccgaacttctgaccctcgtgaacagaaaagtgtcacaacggagagtggacttttgtaaggatccctccgcgattggaaaaaagcaagtgccatgtttcgcatcaatgcttactaagaagctgcatttcttccctaaatcaaacttggaacatcatcaccatcaccacgtcgaaattgatggaggatcaccgatgtcgtcagctagcggtcttagacgcggtcatcccgccggtggggaggagaacatgactgaaactgacgcgttttacaagcgtgaaatgtttgatccagctgaaaagtacaagatggatcatagacgcagaggaattgccctgatattcaaccacgaacgctttttctggcacctgactttgcctgaacgccggggaacgtgcgcggatagagacaacttgaccagaaggttttcagacctcggatttgaggtgaagtgttttaacgatcttaaagcggaagaactcctgctgaaaattcatgaagtgagcaccgtgtcacatgctgatgcggattgcttcgtgtgtgttttcctgtcccacggcgaggggaaccatatctacgcatacgatgcgaaaattgaaatacaaaccctgaccggacttttcaagggcgataagtgtcattcgctggttggtaagcctaagatattcattatccaagcatgccggggtaatcagcacgatgtgcctgtgatcccccttgatgtcgtggac

SEQ ID NO: 32380 - DNA, 900 bp, synthetic construct
  misc_feature 1..900: note = Description of Artificial Sequence: Synthetic coding sequence
  source 1..900: mol_type = other DNA
atggtggaaatcgacgccgcctctgtatacacactgcccgctggagcagatttcctgatgtgctactccgttgccgaggggtattactctcatagagagaccgtcaatgggagttggtatattcaggacctatgtgaaatgttgggaaagtatgggtccagtcttgagttcactgagctgctcacgctcgtgaatcggaaggttagccaaaggagggtcgatttttgtaaagatccttccgccataggtaaaaaacaggttccatgcttcgcaagcatgctgacaaaaaagctgcattttttcccaaagtcaaatctggaacaccatcaccatcaccacgtcgaaatcgacgggggatctccaatgtcttctgcctccgggttgcgtaggggccacccagccggaggggaggagaacatgacagagactgatgcgttttacaagagagaaatgttcgatccagccgagaagtacaaaatggatcatcgtcgcagaggaatcgctttaatcttcaaccacgaacgctttttctggcacttaaccttgccagagaggcggggcacttgcgccgacagagacaacctgacgagaaggtttagcgacctggggtttgaggtgaagtgctttaacgacctcaaagccgaagagctcctgttaaaaattcacgaggtgtcaaccgtgagtcatgctgacgccgactgtttcgtttgtgtgtttctgtcccatggggagggaaatcacatatacgcatacgatgcaaaaatcgaaattcagaccttgactggactctttaaaggggacaagtgccacagtttggtgggaaagccaaaaatcttcatcattcaggcctgtaggggaaaccaacacgatgtgcctgtgatccccctggacgtggttgac

SEQ ID NO: 32381 - DNA, 900 bp, synthetic construct
  misc_feature 1..900: note = Description of Artificial Sequence: Synthetic coding sequence
  source 1..900: mol_type = other DNA
atggtcgagatagatgcggcctccgtttacaccctgcctgctggagctgatttcctaatgtgttattccgttgcagaaggctactacagtcacagagagactgttaacggttcatggtacattcaggacttatgcgagatgctcggcaagtacggatcgagcctagagttcaccgagctgctaactctggttaatcgcaaggtaagtcaaagacgtgtcgacttctgcaaagacccctctgccatcggcaagaagcaggtcccatgttttgcgtcaatgctcacaaaaaaactgcacttctttccgaaatcaaatctagagcatcaccaccaccatcacgtagaaatcgacggaggctctcccatgtccagcgcgagcggccttcggagggggcaccccgcaggtggcgaggagaacatgacggaaaccgatgcattttacaaaagggaaatgtttgatccggctgaaaaatacaagatggatcaccgccggcggggtattgccctcatctttaatcatgagcggttcttctggcatctgacccttccagagcgacgaggaacatgtgctgatcgggacaatcttacacgacgattcagcgacctcgggttcgaagtgaaatgtttcaatgacctgaaagccgaagagttgctgctcaagatccacgaagtctctacagtatcgcacgctgacgctgactgtttcgtgtgcgtgtttctcagtcacggggagggtaatcatatctatgcttacgacgccaagatcgagatccagactttaacggggctctttaagggggataaatgccactcgctcgtgggtaagcccaagatttttatcatccaagcttgcagaggcaaccagcatgacgttccagtcattcctctggacgtcgtggac

SEQ ID NO: 32382 - DNA, 900 bp, synthetic construct
  misc_feature 1..900: note = Description of Artificial Sequence: Synthetic coding sequence
  source 1..900: mol_type = other DNA
atggttgaaatagatgcggcgtcggtatatacgctaccggcgggtgcggattttttaatgtgttattcggttgcggaaggttattattcgcatcgagaaacggttaatggttcgtggtatatacaagatctatgtgaaatgctaggtaaatatggttcgtcgttagaatttacggaattattaacgttagttaatcgaaaagtatcgcaacgtcgtgttgatttttgtaaagatccgtcggcgataggtaaaaaacaagttccgtgttttgcgtcgatgctaacgaaaaaactacatttttttccgaaatcgaatttagaacatcatcatcatcatcatgttgaaatagatggtggttcgccgatgtcgtcggcgtcgggtttacgtcgtggtcatccggcgggtggtgaagaaaatatgacggaaacggatgcgttttataaacgtgaaatgtttgatccggcggaaaaatataaaatggatcatcgtcgtcgaggtatagcgttaatatttaatcatgaacgttttttttggcatttaacgctaccggaacgtcgtggtacgtgtgcggatcgagataatttaacgcgtcgtttttcggatttaggttttgaagtaaaatgttttaatgatttaaaagcggaagaactactactaaaaatacatgaagtatcgacggtatcgcatgcggatgcggattgttttgtatgtgtttttttatcgcatggtgaaggtaatcatatatatgcgtatgatgcgaaaatagaaatacaaacgctaacgggtttatttaaaggtgataaatgtcattcgttagttggtaaaccgaaaatatttataatacaagcgtgtcgaggtaatcaacatgatgtaccggtaataccgctagatgttgttgat

SEQ ID NO: 32383 - DNA, 900 bp, synthetic construct
  misc_feature 1..900: note = Description of Artificial Sequence: Synthetic coding sequence
  source 1..900: mol_type = other DNA
atggtggagattgatgcggccagcgtctacaccctccccgcaggcgccgattttctcatgtgctattctgttgccgagggatactatagccatcgcgagactgtgaatggcagttggtacatacaggacctttgtgagatgctgggaaaatatgggagctcattggaatttactgagctcctcactttggtaaatcgtaaagtgagccagagacgagtcgatttctgcaaagacccctctgctatcggaaagaagcaggtcccatgcttcgcatccatgctgacaaagaaattgcactttttccccaaaagcaacttagaacatcaccatcaccatcacgtggagattgacgggggctctccaatgagcagtgccagcgggcttcggcgaggacatcccgccggtggtgaggagaacatgaccgaaacagacgccttctataagcgcgaaatgtttgacccagccgaaaaatacaagatggatcacaggaggcgcggaatagcattgatttttaatcatgagagatttttctggcatctaaccctcccggagcggcgtggcacttgtgcggatagagacaacctaactaggcggttctcggacttgggctttgaagtgaaatgctttaatgacctgaaggccgaggaactcctgttgaaaatccatgaggtgtccacggtttctcatgcagacgcggactgtttcgtgtgcgtgttcctcagccacggggaggggaatcatatctacgcttatgatgcgaagatcgaaattcagacattgactggcttgttcaaaggtgacaaatgccactcactggtggggaaacccaaaatcttcattattcaggcctgtagggggaatcaacacgatgtgcccgtcataccgcttgacgttgtggac

SEQ ID NO: 32384 - DNA, 900 bp, synthetic construct
  misc_feature 1..900: note = Description of Artificial Sequence: Synthetic coding sequence
  source 1..900: mol_type = other DNA
atggtggagatcgatgccgcctccgtgtacacgttgccggcgggagcggacttcctgatgtgctattccgtggcggagggatattactcccatagagaaactgtgaacggatcgtggtacatccaggatctgtgcgagatgctcggaaagtacggcagctcactggagtttactgaacttctgacgttggttaaccgcaaggtgtcgcaacgcagagtggacttctgcaaagacccaagcgcgattggaaagaagcaagtgccttgttttgccagcatgctgaccaagaagctgcactttttcccaaaatcgaacctggaacatcatcaccaccatcatgtggagattgacggtggatccccgatgtcctccgcctcgggcctgcgccgcggacacccggccggaggcgaagagaatatgaccgaaactgacgccttctacaagcgagagatgttcgatccagcagaaaagtataagatggaccatcgccggcgcggcatcgccctcatcttcaaccacgagcgtttcttctggcatctcacgctgccggaaaggcgcggaacttgtgctgatcgcgacaacttgacgcggcgcttctcagacctgggctttgaggtcaaatgcttcaatgacctcaaggccgaagaactcctcctcaagatccacgaagtcagcaccgtctcccatgccgacgctgattgcttcgtctgcgtctttctgtcgcacggggaaggtaaccacatttacgcctacgatgctaagattgagatccagaccctgaccggactgtttaagggtgacaagtgccattccctcgttggaaagccgaaaatcttcattatccaggcatgcagagggaaccagcatgacgtgccggtcatcccgctggatgtggtggac

SEQ ID NO: 32385 - DNA, 900 bp, synthetic construct
  misc_feature 1..900: note = Description of Artificial Sequence: Synthetic coding sequence
  source 1..900: mol_type = other DNA
atggtggagattgatgctgcatccgtttacacactgcccgccggggccgattttctgatgtgttattcagtggctgaaggctattactcccaccgggagactgtgaacggatcttggtacatacaggacctttgcgaaatgctcgggaaatacgggtcatcccttgagttcactgagcttctgactctggtaaaccggaaagttagccaacgtcgtgtggatttctgcaaggacccgagcgcaattggcaagaaacaggtcccctgcttcgcatccatgctcaccaagaagctgcatttcttccccaaatctaatttagagcatcaccatcatcatcatgtggagattgacggtggatcgcccatgagtagcgcgagcgggctgaggcgaggacatcctgctggcggtgaggagaatatgacggagactgatgccttttataagcgcgagatgttcgaccccgcagagaaatataagatggatcacagaaggcggggtatcgcactgatttttaaccatgaacgctttttttggcacttaacattgcctgaacggcgcggcacctgcgcagatagagataatctgactaggagattctcagacttaggatttgaagttaagtgcttcaatgacctcaaagctgaggagctcctgctaaagattcatgaagtgagtactgtatctcatgccgatgcagattgcttcgtctgtgtcttcctgagccacggagagggtaatcatatatatgcatatgatgcaaagattgaaatccaaaccttgaccggcctgtttaagggcgacaaatgccattcactagtcggtaagcctaagatttttatcatccaagcttgccggggaaaccagcacgatgtgcccgtcattcccctagacgtggttgac

SEQ ID NO: 32386 - DNA, 900 bp, synthetic construct
  misc_feature 1..900: note = Description of Artificial Sequence: Synthetic coding sequence
  source 1..900: mol_type = other DNA
atggtggaaattgacgcagcttcggtgtacactctgcccgcaggtgcggattttctcatgtgttactccgtggccgaaggttactactcgcatagagaaactgtcaatggttcatggtacatacaggacctctgtgagatgctcggcaagtacggctcgtcgctggagtttacggaactcctgactctggtcaatagaaaagtcagccagcgccgggtggatttttgtaaggacccttcagctatcgggaaaaagcaagtgccatgctttgcatctatgctgacgaagaaacttcatttcttccccaagtctaacctggagcatcaccaccatcatcacgtggagattgatggtggttcccctatgtcgtctgcatcgggtcttaggcgtggtcatccagcaggtggggaagagaacatgaccgaaactgacgcattctacaagcgcgaaatgtttgacccggcggagaagtacaaaatggaccataggcggagaggtattgcactcatattcaatcacgaacgattcttttggcatcttactctgcctgaaagacgcggtacctgcgcagaccgcgataaccttacgcggcggttttcggatctgggatttgaagtgaagtgttttaacgacctcaaggcagaagagctgcttctcaagatccatgaggtcagcaccgtgtcacatgcagatgcagactgttttgtgtgcgtattcttgtcacacggagaagggaaccatatctacgcctatgatgccaagattgagattcagactcttaccggcttgttcaagggagacaaatgccacagcctggtcggtaagccaaagatcttcattatacaagcatgtcgcggcaaccaacacgatgttcctgtcatcccactggatgttgtggat

SEQ ID NO: 32387 - DNA, 900 bp, synthetic construct
  misc_feature 1..900: note = Description of Artificial Sequence: Synthetic coding sequence
  source 1..900: mol_type = other DNA
atggttgagatagatgctgccagcgtgtacacactgcctgctggcgcagattttctgatgtgttattcagtggcagaaggatactattcacacagagagactgtaaacgggtcctggtacatccaggatctgtgcgagatgctcggcaagtacggttcttcactggaattcactgagctcttgactttagtgaaccggaaggtgagccagcggcgggtcgacttctgtaaggacccctcagccataggaaaaaaacaggtgccatgttttgcgtcaatgctcacgaaaaaactccacttttttccaaagtctaacctcgagcatcaccaccaccaccatgtggagatcgacgggggatcccccatgtcttctgccagtggcctgcggcgcgggcacccagcaggtggcgaggaaaacatgaccgaaacagacgctttctacaagagggaaatgttcgaccctgcagaaaaatacaaaatggatcaccgccggaggggcatcgcgctcatcttcaaccacgagcgcttcttctggcacctcacactgcccgaaaggagaggcacttgcgccgacagagataacctgaccagaaggttcagcgacttggggtttgaagttaagtgcttcaatgacttaaaggctgaagaattgctactaaagatccacgaggtgagcaccgtgagccacgcagatgccgactgttttgtctgtgtctttctctctcacggagagggaaaccacatatacgcctacgacgcaaagattgagatccagaccttgacagggctgttcaagggagataaatgtcactccctggtggggaagccaaaaatatttatcatccaggcgtgtaggggcaatcagcatgacgtgccagtgatcccactagacgtggtggac

SEQ ID NO: 32388 - DNA, 900 bp, synthetic construct
  misc_feature 1..900: note = Description of Artificial Sequence: Synthetic coding sequence
  source 1..900: mol_type = other DNA
atggtggagattgatgcagcttcggtgtataccctcccggcgggggcagacttcctcatgtgctactcggtggctgaaggatactactctcatagggagactgtcaacggaagttggtacatccaggatctgtgcgagatgctgggaaaatacggcagctcactggagttcactgagctgctgaccctggtgaataggaaggtgagccagcggcgtgtggatttttgcaaggacccgtccgccataggaaaaaagcaggtgccttgcttcgcatctatgctgaccaagaaacttcacttttttccaaagtccaatctggaacatcatcatcatcaccacgtggagatcgatggcgggtcgccaatgtcctcggcctcgggactgcgcagagggcaccctgccggtggtgaagaaaacatgactgaaaccgacgctttctacaagagagaaatgttcgacccggccgaaaagtacaagatggaccacaggaggcgcgggatcgctttgatcttcaaccacgaacggttcttttggcatttgaccctgccggagcggagaggaacttgcgcggaccgcgataatcttactcgccgcttctcggatctcggatttgaagtgaaatgcttcaacgacttgaaggccgaagaactgttgctcaaaatccatgaggtgtctactgtctcgcacgccgacgcggattgcttcgtgtgtgtgttcctgtcccacggcgagggaaaccacatctacgcctacgatgcgaagatcgagattcaaacgctcacgggactctttaagggggacaagtgtcacagcctggtggggaagccaaagatcttcatcatccaggcttgtagaggtaatcagcacgacgtgcccgtgatccctctcgacgtggtggac

SEQ ID NO: 32389 - DNA, 900 bp, synthetic construct
  misc_feature 1..900: note = Description of Artificial Sequence: Synthetic coding sequence
  source 1..900: mol_type = other DNA
atggtcgagatagatgcggcaagtgtgtatacgcttccggccggggcagactttcttatgtgttactccgtcgccgaaggatactacagccatcgagaaactgtcaacggatcatggtacatccaagacctgtgtgagatgctgggtaaatacggctcctcccttgagtttaccgagctgctgacgctcgttaatagaaaagtcagccaaagacgcgtcgacttttgtaaagatccgtcggcaattggtaagaagcaggtgccctgctttgcatccatgcttaccaaaaaactccacttcttccccaagtccaacctggaacaccatcatcaccatcacgtcgaaattgatggagggagcccaatgtcgtcagcgtccggcctgcgccgcggacatccagcaggaggtgaggagaatatgaccgaaactgatgcattttacaaaagggaaatgtttgatccagcagagaagtacaagatggatcacaggagacggggaattgcattgattttcaaccacgaacggttcttttggcatctcacccttcctgaaaggcgtggtacgtgcgcagacagggacaatcttactcgccggttttcggatttgggatttgaggtgaagtgtttcaatgatctgaaggctgaggagctgttgctgaagatacatgaagtttcaaccgtgtcacatgcagacgcggactgtttcgtgtgcgtctttctttcgcatggagagggcaaccatatctatgcatacgatgcaaagatagaaattcagactcttactggtcttttcaagggtgataagtgccactccttggtaggtaagccaaagattttcatcatccaggcatgccgcgggaaccaacatgacgtccctgtgattccactggacgttgtcgac

SEQ ID NO: 32390 - DNA, 900 bp, synthetic construct
  misc_feature 1..900: note = Description of Artificial Sequence: Synthetic coding sequence
  source 1..900: mol_type = other DNA
atggtggagatcgatgccgctagcgtctacacgctgccagcaggtgcagattttctcatgtgttactcagtggccgaaggttactacagccatcgagagacagtaaatgggagttggtacattcaggacttgtgcgagatgcttggcaagtatgggtctagcctggaatttacggagctgctgacgctcgtcaatcgaaaagtctcccagaggagggttgatttttgtaaggaccccagtgcaatcggaaagaaacaggtcccctgcttcgcgagtatgctgacgaagaaattacactttttccccaagtctaaccttgaacaccatcaccaccatcatgttgagatcgacggcggatccccgatgtcgtccgccagcggcttgcgccgcggccacccagctggtggcgaggagaatatgactgaaactgacgcgttttacaagcgagaaatgtttgatcctgctgaaaagtacaagatggaccacaggagaaggggtatcgccctaatcttcaaccacgagcgattcttttggcacctgacgttgccagagcggcggggtacttgcgcggatcgggataatctgacaagaagattttcggatctgggattcgaggtgaagtgctttaacgacctcaaggctgaggagctgctgctgaaaatccatgaggtctcaaccgtgtcacacgccgatgctgattgtttcgtgtgtgtcttcctgtcccatggcgagggcaatcacatttatgcttacgacgccaaaattgaaattcagacacttaccggactgttcaaaggagacaaatgccatagcctcgtggggaagccaaaaattttcattatccaggcctgccgcggcaaccaacacgacgtccctgtcattcctctggacgtagtcgat

SEQ ID NO: 32391 - DNA, 900 bp, synthetic construct
  misc_feature 1..900: note = Description of Artificial Sequence: Synthetic coding sequence
  source 1..900: mol_type = other DNA
atggtcgagattgacgcggcatccgtctacacccttccagctggagctgatttcttgatgtgctactcggttgcggaagggtactactcccaccgcgagacggttaacgggtcctggtacatccaggatctgtgcgagatgctcggcaaatatggctcctcgctcgagttcaccgaactcctcactctcgttaatcggaaagtctcccaacgcagggtggacttctgcaaagatccctcagctatcgggaagaagcaggtcccatgcttcgcgtcaatgttgactaagaagctgcacttcttcccaaagtcgaacctcgaacatcatcatcaccatcatgtggaaatcgacggcgggtcaccgatgtcgtcggccagcggactcagacggggacacccggcgggaggagaagaaaacatgaccgagactgacgcattctacaagcgcgaaatgttcgatccggccgaaaagtacaagatggaccaccggcggagaggtatcgctctgatctttaatcatgagaggttcttctggcacctcacgctccctgagcggcgcgggacctgtgccgaccgcgataacctgacccggaggttttccgacctgggctttgaagtgaaatgcttcaatgacctgaaggccgaggagctcttgttgaagatccatgaggtgtcgactgtgtcccatgccgatgcagattgcttcgtctgcgtgttcctgtcacacggagaaggcaatcatatctatgcgtacgacgccaagatcgagattcagactctgaccggactgtttaagggagacaagtgccactcactggtcggaaagcccaagatcttcatcattcaggcgtgtagaggtaaccagcatgatgtgccggtgatcccgctggatgtggtcgac

SEQ ID NO: 32392 - DNA, 900 bp, synthetic construct
  misc_feature 1..900: note = Description of Artificial Sequence: Synthetic coding sequence
  source 1..900: mol_type = other DNA
atggtagaaatagatgccgcatcagtgtacactctgcccgcaggcgccgactttttgatgtgctactcagtagctgagggttactactcccatcgagaaacagttaatggcagttggtacattcaggacctctgtgagatgctgggaaagtacggttcctctctagaatttactgaattgctcacactggtgaatcgaaaggtgtcccagaggagggtggatttttgtaaggaccccagcgcaatcggcaagaaacaggttccatgtttcgctagcatgctgactaagaagttgcatttctttcccaagagtaacctagagcaccaccaccatcatcacgtagaaattgacggcggctctccaatgtcatccgccagtggactgcgacggggtcaccccgccggcggtgaagagaatatgacagagacagatgcgttttacaaaagagagatgtttgatcctgccgaaaaatataaaatggatcaccgccgtaggggtattgccctgatcttcaaccacgagagatttttttggcatctgacactcccagaacgacggggaacgtgtgccgatcgggacaacctaacccgaaggttcagcgacctgggctttgaagtgaaatgttttaacgacctgaaggccgaggagctactacttaagattcacgaagtgtctacagtatctcatgccgatgccgactgtttcgtgtgcgtatttcttagtcacggggagggaaatcacatctacgcatacgatgcaaaaattgagatccaaactctcactggactcttcaagggcgataagtgtcacagcctggtgggcaagcccaaaattttcatcattcaggcctgccgaggaaatcagcatgatgtgcctgtgattccactggacgtagtcgac

SEQ ID NO: 32393 - DNA, 900 bp, synthetic construct
  misc_feature 1..900: note = Description of Artificial Sequence: Synthetic coding sequence
  source 1..900: mol_type = other DNA
atggttgaaatcgatgcagcctccgtgtacactctgccggcgggcgcagactttctgatgtgctacagcgtggcggaaggatattactcccacagagaaactgtgaacggatcctggtacatccaagacctgtgcgaaatgcttggaaagtacggatcgtcgttggaattcactgagctgctgactctggtcaaccggaaggtgtcccaacggcgcgtggatttttgcaaggatccctcagctatcggaaagaaacaagtgccgtgcttcgccagcatgctgactaagaagctgcactttttcccgaagtccaacctcgagcaccaccaccatcaccacgtcgagatagatgggggctccccaatgagctcagcatcgggtctgagaaggggacatccagctggcggtgaagaaaacatgacggaaactgatgctttttacaagcgggagatgttcgatccggcggagaagtacaaaatggatcaccggaggcgagggatcgccctgatcttcaaccacgaacggttcttctggcatctcactttgccagagcgccgcggcacctgcgctgatcgcgataaccttactcggagattctccgaccttggattcgaggtgaaatgctttaacgacctgaaggccgaggaactgctgctcaaaatccacgaagtctctactgtctcccatgccgatgcggattgcttcgtgtgcgtctttctgtcacatggggagggaaaccatatctatgcatacgacgccaagattgaaattcaaaccctcactggactgttcaaaggcgacaagtgccattcactcgtgggaaagcctaaaatcttcattatccaggcctgtcggggtaaccagcacgacgtgccagtcatcccgctggatgtcgtggac

SEQ ID NO: 32394 - DNA, 900 bp, synthetic construct
  misc_feature 1..900: note = Description of Artificial Sequence: Synthetic coding sequence
  source 1..900: mol_type = other DNA
atggtcgaaatcgatgccgccagcgtgtacactcttccagctggcgcggactttctcatgtgctattccgtcgccgagggatactacagccacagggaaaccgtgaacggttcatggtacatccaggacttgtgcgaaatgttgggcaagtacggaagtagcctggaattcaccgagctcctcacgttggtgaaccgcaaagtgtcccagagaagagtcgacttctgcaaggacccgtcggcaatcgggaagaaacaagtgccctgtttcgcctcaatgctgaccaagaaactgcacttcttcccaaaatcaaacctggaacatcatcaccatcaccacgttgaaatcgacggtggctcaccaatgtcgtcggcttcgggacttcggcgcggtcacccggcaggaggcgaggaaaatatgactgaaactgatgcgttctacaagcgggagatgtttgatccggccgaaaaatacaagatggatcaccgacgccggggaatcgcactcatcttcaatcatgagaggttcttctggcacctcaccctgccggagcggcgtggaacctgtgccgacagagacaacctgacccgccgcttctccgacctggggtttgaggtgaagtgcttcaatgatctgaaggctgaggagctgctcctcaagatccacgaagtgtccactgtgtcgcacgcggacgcggactgtttcgtctgcgtctttctgagccacggagaaggaaaccatatctacgcctacgacgcaaagatcgaaattcagacgctgactggactgtttaaaggagataagtgccattccctggtcggcaagcctaagatcttcattatccaagcctgccgggggaaccagcatgatgtgccggtgattcctctcgatgtggtggac

SEQ ID NO: 32395 - DNA, 900 bp, synthetic construct
  misc_feature 1..900: note = Description of Artificial Sequence: Synthetic coding sequence
  source 1..900: mol_type = other DNA
atggtggagattgacgccgcctctgtgtatacattacctgctggtgccgacttcttgatgtgctactccgtggctgaggggtactactcccaccgagaaaccgtgaatggcagttggtacatccaagatctgtgcgagatgctgggcaaatacgggagtagccttgagtttaccgaactgctcactctggttaaccgaaaagtgtctcaacggcgtgtggatttttgtaaagacccgtctgcgatcggcaaaaaacaggtcccatgttttgccagcatgctcacaaagaagctacactttttcccaaagtctaatctggaacatcaccatcaccaccacgtcgagattgacggcggcagccccatgtcatcggcctccggactcaggaggggccacccagcaggcggggaagaaaacatgaccgaaactgatgcgttctataaacgcgagatgtttgaccccgctgaaaaatacaagatggatcatagacgaaggggcatcgcactgatctttaatcacgaaaggtttttctggcacctcaccctgcctgagagaagaggaacttgtgctgacagagacaatttaacccgtcgcttctctgatctcggctttgaagtcaaatgcttcaatgaccttaaggctgaagaactgttgctcaagattcacgaagtctcgacagttagtcacgcagacgcggattgctttgtctgcgtgtttctcagccacggagagggaaaccacatttatgcctatgatgccaagattgaaatccagacattaaccggactctttaagggtgacaagtgtcactccctcgtgggcaaaccaaaaatatttataattcaggcctgcaggggaaatcagcatgacgtgcctgtcattcctctcgacgtcgtcgat

SEQ ID NO: 32396 - DNA, 900 bp, synthetic construct
  misc_feature 1..900: note = Description of Artificial Sequence: Synthetic coding sequence
  source 1..900: mol_type = other DNA
atggtggagatcgacgcagcttccgtctataccctgcccgccggggcagatttcctgatgtgttacagtgtggcagagggctactattcccaccgggagaccgtcaatggcagctggtatattcaagatttgtgcgagatgctgggcaagtatgggtctagcctggaattcacagagctgttgaccctggtgaatcggaaggtgtcccagcgccgggtggatttctgcaaagaccctagcgctatcggaaagaaacaagtgccgtgcttcgcctctatgcttaccaagaagttgcacttcttccccaaatccaatctcgaacatcaccatcaccaccatgtggagatcgacgggggctcccctatgagttccgcaagcgggctcaggagaggacacccagcgggaggggaagagaatatgaccgagacagatgccttctacaagagagagatgtttgaccccgcagagaagtacaaaatggatcaccgcagaagggggatagccttgatattcaaccacgagcgcttcttttggcatctcactctgcccgagcgcaggggtacctgtgctgacagagacaacttgactcgcagattttcagacttgggctttgaggtgaagtgtttcaacgacttgaaggctgaggaacttcttctcaaaatccacgaggtgagtacagttagccacgcagatgctgactgtttcgtgtgtgtcttcctgtctcatggcgagggaaaccacatttatgcctatgatgcaaagatagagatacagacactcaccggcctgttcaagggtgataaatgccattcacttgtagggaagcctaagatttttattatccaggcttgccgggggaaccaacatgacgtgccggtgattccacttgacgtggttgac

SEQ ID NO: 32397 - DNA, 900 bp, synthetic construct
  misc_feature 1..900: note = Description of Artificial Sequence: Synthetic coding sequence
  source 1..900: mol_type = other DNA
atggtcgagattgatgcagccagtgtctacactctccccgccggagccgatttcctcatgtgttatagcgtcgcggagggctactattctcaccgggagacagtaaatgggtcatggtacatacaggacctctgtgaaatgctcggaaagtatggatctagcttggaattcaccgagctcctaacgctcgtgaatcgcaaggtctcacaaagaagggtcgacttctgtaaagacccctccgcgatcggtaaaaaacaggtgccatgcttcgcatctatgttgactaagaagttgcacttcttccccaagtccaatttagagcaccaccatcatcaccacgtcgagatagatggcggatcacctatgagttcggcctctgggctgcgaagaggacatcccgctggcggcgaggaaaatatgacggaaaccgacgccttctacaagagagaaatgtttgacccagctgagaaatataaaatggaccaccgtcgccgggggattgcactaatatttaaccatgagcgttttttctggcatttgaccctgccagagcggcggggtacatgcgcggaccgggacaacctaacgaggcggttctctgacctgggcttcgaggttaaatgtttcaacgacctgaaggccgaagaattgctgctcaagattcacgaggtcagtaccgtcagtcatgctgacgccgactgttttgtttgcgtcttcctgagccacggcgagggaaaccacatctacgcctacgatgccaaaatcgaaattcaaactctcacaggcttattcaagggtgataagtgccactcactagtggggaagccgaaaatttttattattcaggcctgtcgggggaatcagcacgacgtaccagttatcccgctggacgtcgtcgat

SEQ ID NO: 32398 - DNA, 900 bp, synthetic construct
  misc_feature 1..900: note = Description of Artificial Sequence: Synthetic coding sequence
  source 1..900: mol_type = other DNA
atggtcgaaatcgatgctgcaagtgtctacaccttgccagcaggtgcggatttcctgatgtgttactctgtcgcagagggatattacagtcaccgcgagaccgtgaacgggtcatggtatatccaggacctctgcgagatgctgggcaaatacggcagtagccttgagttcactgaactcctgacattggtgaacaggaaggttagccagaggcgagtggatttttgcaaggatccaagcgcaatcggcaagaagcaagttccgtgctttgcctcaatgctgaccaaaaaactgcattttttcccgaagtctaacctggaacatcatcaccaccatcacgtagagattgatggcggtagccctatgagctcagccagcggcctccgccgaggccatccagccggaggcgaggaaaatatgaccgagacagacgccttctacaaacgagaaatgttcgatcccgctgaaaagtataagatggatcacaggcgaagaggcatcgcccttatattcaatcatgaacggtttttctggcatctcaccctgccagagagaaggggtacatgcgcggatcgagacaacctgactcgcagattctcagaccttgggtttgaggttaagtgttttaacgacctgaaggctgaggagctcctgcttaagattcacgaggtctctaccgtttcccatgcagatgccgattgcttcgtttgtgtgttcttgtctcacggtgagggtaaccatatatacgcatacgatgctaagatcgaaatccaaactcttaccggtttgtttaagggagacaagtgtcactcactggttggcaagccaaaaatcttcataatccaggcatgccggggcaatcaacatgacgtgcctgtgatccctttggatgtggttgac

SEQ ID NO: 32399 - DNA, 900 bp, synthetic construct
  misc_feature 1..900: note = Description of Artificial Sequence: Synthetic coding sequence
  source 1..900: mol_type = other DNA
atggttgagatcgatgcggcctctgtgtacaccctgccggccggagcggacttcttgatgtgttacagcgtggcagaggggtactattcacatcgcgagaccgtcaatggctcctggtacattcaagatttgtgcgagatgctgggcaaatatggtagctccttggagttcaccgaactgttgacactagtaaacaggaaggtgtcgcagaggcgggttgacttttgcaaagacccatcagctatcggcaagaaacaggtcccatgttttgctagtatgctaacaaaaaagttacatttcttccccaaatcaaatctggagcaccaccatcaccatcacgttgagatcgatggagggagccctatgtcttccgctagtgggctacgtaggggccacccagccggcggagaggagaacatgacagaaaccgacgcattctacaagcgagagatgtttgacccggccgagaaatacaagatggaccaccgtaggcgaggcatcgcactgatcttcaatcacgaacggttcttctggcatttaacactccccgagagaaggggaacttgtgcagatagggataacctcacgcgacgttttagcgatctcgggttcgaagttaagtgttttaacgaccttaaggcagaggaactgttactcaaaattcatgaagtgtcaacagtgtcccacgccgacgccgattgcttcgtatgtgtctttctgagccatggagaggggaatcatatctatgcatatgatgccaagattgagattcagactcttacaggcctgtttaaaggcgataagtgtcacagcctcgtaggaaagcctaaaatattcataattcaggcttgccgagggaatcagcacgatgtccctgtgatcccactggacgtggtcgat

SEQ ID NO: 32400 - DNA, 900 bp, synthetic construct
  misc_feature 1..900: note = Description of Artificial Sequence: Synthetic coding sequence
  source 1..900: mol_type = other DNA
atggtcgagattgatgccgcatccgtgtacactctgccggccggagcagatttcttgatgtgctactccgtggcagaaggatactactcgcacagagaaaccgtcaatgggtcctggtacatccaagacctctgtgaaatgctcggaaagtacggctcctccctggagtttaccgagctccttaccctcgtgaatagaaaggtgtctcagcggcgcgtcgatttctgcaaagacccgtcggcaattggcaagaagcaggtgccgtgcttcgcctccatgctgaccaaaaaactccatttctttccaaaatcgaacttggagcatcatcaccaccatcacgtggagatcgacggaggatcgccgatgtcgtccgcttcgggccttagacgcggccacccagccggtggtgaggaaaacatgactgaaaccgacgccttttacaagagggaaatgttcgatccggccgaaaagtacaagatggatcaccgccggagaggaatcgcgctgatctttaaccacgaacggttcttctggcacctgaccctcccagaaaggcggggaacttgtgcggatcgcgacaacctgactcggagattctcagatctgggattcgaagtgaagtgcttcaacgacctgaaagccgaggagctcctgcttaagatccatgaggtgtcgaccgtgtcccatgccgacgccgactgcttcgtctgtgttttcctgtcgcatggtgagggaaatcacatttacgcctacgacgcaaagatcgagatccaaacgctgacgggacttttcaagggagataagtgtcactccctcgtgggaaaaccgaagattttcatcattcaggcctgccggggaaaccagcacgacgtgccggtgatcccgctcgacgtggtcgac

SEQ ID NO: 32401 - DNA, 900 bp, synthetic construct
  misc_feature 1..900: note = Description of Artificial Sequence: Synthetic coding sequence
  source 1..900: mol_type = other DNA
atggtagagatagatgcagcgtccgtatacacactaccagctggggcagatttccttatgtgctacagcgtagcagaagggtattattctcatcgtgagacagtcaacggaagttggtatatccaggatttatgtgaaatgttggggaagtatggaagttcactggaattcaccgaacttctaaccttggttaatcgaaaagtttctcagcgacgagttgacttctgcaaagatccttcggctattggtaaaaaacaagttccatgctttgcgagtatgctcactaaaaaactccacttttttcccaagagtaatctcgaacaccatcatcatcatcacgtggaaattgatggcggaagcccaatgtcatccgcatcaggcttgcgaagaggacatcctgcgggaggggaggaaaacatgaccgagacggatgctttttacaaaagagaaatgttcgacccagcagagaaatacaagatggaccataggagacgtggaattgccttgatttttaaccatgaaagatttttctggcatctaacgttgccagaacgtcgaggaacttgtgctgatcgcgacaacctaacacgacggttctccgatttgggattcgaagtaaaatgctttaacgatttaaaggcggaagaactgctcttgaagattcatgaggtatctacagtgtcacatgctgacgctgactgctttgtttgcgttttcttatcacatggggaaggaaaccacatctatgcatatgatgccaaaatcgagatccagacccttactggcctgttcaaaggcgacaaatgtcattctctggttggaaagccaaaaatctttattattcaggcctgcaggggaaaccaacacgatgtacctgtaattccacttgacgtggtcgat

SEQ ID NO: 32402 - DNA, 900 bp, synthetic construct
  misc_feature 1..900: note = Description of Artificial Sequence: Synthetic coding sequence
  source 1..900: mol_type = other DNA
atggtggagatagatgcagcatcagtctacactctgcccgccggcgcagacttcctgatgtgctactccgtcgcagagggctattactctcaccgtgaaactgtgaatgggtcgtggtacatccaggacctgtgtgaaatgttgggaaagtacgggagctcccttgaattcactgaactgctgacgcttgtgaatagaaaggtgtcccaacggcgagtggatttttgtaaggatccttcagctattggaaaaaagcaggtgccatgtttcgcatccatgctcaccaagaagttgcacttttttcccaagtcgaaccttgaacaccaccatcatcatcatgtggagattgatggtggaagcccaatgagtagtgcctcaggtctgcgccgtggtcaccccgcaggaggagaagagaacatgactgagacggacgccttctataagcgtgaaatgtttgacccagcagaaaagtacaaaatggatcacaggagaagaggaattgcactcatattcaaccatgaacgtttcttttggcacctcaccctgcccgaaagacggggcacttgtgctgatagggataacctgactcgtcggttttccgatcttggatttgaggtcaaatgctttaatgatcttaaagcggaagagctcctgctgaagattcatgaggtgtcgaccgtctcgcatgcagacgctgattgctttgtctgtgtttttctttctcacggtgaaggcaaccatatctacgcatacgacgccaaaatcgaaattcagacccttaccggattgttcaaaggagataaatgtcactcgctcgtcggaaagcctaagatcttcataatccaagcatgccgaggaaatcaacatgatgtgcctgtcattcctttggatgtcgtggat

SEQ ID NO: 32403 - DNA, 900 bp, synthetic construct
  misc_feature 1..900: note = Description of Artificial Sequence: Synthetic coding sequence
  source 1..900: mol_type = other DNA
atggtggagattgatgcagcatcagtctacacactacccgccggggccgattttctgatgtgttatagcgttgcagagggctattacagccaccgcgaaacagtaaacggatcctggtacattcaggatctgtgcgagatgctaggcaagtatggatcaagcctggagtttaccgagctgcttacactggtgaacaggaaagtgtctcagcgcagggtagatttttgcaaggatcctagcgctataggcaagaagcaggtgccttgcttcgcctccatgctgacaaaaaagctgcatttcttcccaaaaagcaacttagagcatcaccaccatcatcatgtagagatcgatggtgggtcacccatgagtagcgcaagcggactccgtagaggccatcccgctggaggcgaggagaatatgacagagaccgacgccttctacaagagagaaatgttcgaccctgcggaaaaatataaaatggatcatcgacggcgaggaatcgcgctaattttcaaccatgagaggttcttttggcacctaaccctgcctgaaagaaggggaacctgtgccgatcgcgacaacttaacccgcaggttttcagacctgggcttcgaagtgaagtgtttcaacgaccttaaggcggaggagctcctcctgaagatccatgaggtctctacagtttcacacgccgatgcagattgtttcgtgtgtgtatttttgtctcacggagaggggaaccacatctacgcttatgatgccaagatcgagatccagacattaacagggctgttcaagggggacaagtgtcactcacttgtgggcaagcccaaaatcttcatcatacaggcctgtcgcggcaaccagcacgacgtgcctgttatccccctagatgtggtcgat

SEQ ID NO: 32404 - DNA, 900 bp, synthetic construct
  misc_feature 1..900: note = Description of Artificial Sequence: Synthetic coding sequence
  source 1..900: mol_type = other DNA
atggttgaaattgacgccgcgtccgtatatacgctcccggcaggagctgactttttaatgtgctactctgttgcagaaggctattattcccatcgggagacagtcaatggatcgtggtacatacaggatttgtgtgaaatgcttggaaaatacggaagctccttggagtttacagagcttctgaccctcgtgaaccgcaaagtctcccaaagaagagtagacttctgcaaagaccctagcgctattggaaaaaaacaagtaccgtgctttgcatccatgctgacaaagaaactgcattttttcccgaagtctaacctggaacatcaccaccatcatcatgtagaaattgatggtggatcgcctatgagctcagcgagcgggctgcggcgcggccaccccgcaggtggggaggaaaatatgaccgaaaccgatgcattttacaaacgcgaaatgtttgacccagcagagaaatataaaatggatcacagacgtagaggaatagcactgatttttaaccacgaaagatttttctggcatttgacacttcctgagcggagaggcacctgcgctgatcgtgataacttgacacggaggtttagtgatcttggttttgaggtaaaatgttttaatgatcttaaagccgaggagcttcttcttaaaattcatgaagtttctacggtgagccatgcggacgctgactgctttgtctgtgtttttctgtcacatggtgaaggcaatcatatctatgcgtatgacgcaaagattgaaattcaaaccctaacaggactgttcaagggcgacaaatgtcactcccttgtgggtaaacctaagatctttatcattcaggcttgtcgcggaaaccaacatgatgtgcccgttattcctcttgatgtcgtcgat

SEQ ID NO: 32405 - DNA, 900 bp, synthetic construct
  misc_feature 1..900: note = Description of Artificial Sequence: Synthetic coding sequence
  source 1..900: mol_type = other DNA
atggtggagattgatgcagcatctgtgtacactctgccggccggtgccgactttcttatgtgctattcagtggccgagggttactactcccatagggagacggtgaatggcagctggtacatccaagacctttgtgaaatgcttggcaagtatggcagctcactggagttcactgagctgttgactctggtgaacagaaaggtgtcacagagacgcgtagacttctgcaaagatccttctgcaataggaaaaaagcaagtgccgtgctttgcaagcatgctgacgaagaaacttcacttctttcctaagtccaatctcgaacatcaccaccaccatcatgtggagatcgacggaggatcaccaatgtcgtcggcatcgggcttgcggagagggcacccggcaggaggtgaagagaacatgaccgagactgacgcattttacaagagagaaatgtttgatcccgcggagaagtacaaaatggaccaccgccgcagaggaattgcgctgattttcaaccatgagcgttttttctggcatctcaccctcccagagcgacggggaacttgtgccgatcgagacaacctcaccagacggttcagtgatctcggatttgaggtcaaatgtttcaacgatctgaaagcagaagaacttcttcttaagattcacgaagtgtccaccgtgagccatgccgacgccgattgctttgtgtgtgtgttcctgtcacatggtgaaggtaatcatatctacgcatacgatgcaaagatagaaatccaaactctgactggactgtttaaaggagataagtgtcattcgctcgtgggaaagccaaagatcttcattatccaggcgtgtcgtggaaaccaacacgatgtgcctgtgattccactcgatgtggtggat

SEQ ID NO: 32406 - DNA, 900 bp, synthetic construct
  misc_feature 1..900: note = Description of Artificial Sequence: Synthetic coding sequence
  source 1..900: mol_type = other DNA
atggtcgagattgatgccgctagcgtctataccctgcccgctggcgccgattttctgatgtgttactctgtagccgaagggtactatagccaccgggaaaccgtgaacggaagctggtacatccaagatctatgcgagatgttgggcaagtatggttcctcgctagaattcactgaactgctgacattggtaaatcgcaaggtatcccagcgacgcgtcgatttttgcaaagacccttcggcaattggaaaaaagcaagtgccttgcttcgcatcaatgctgacaaagaaactccacttttttcccaaatcaaacctcgaacaccaccaccatcatcacgtggaaatcgacgggggatcgccaatgagttcagcatcaggactgcggcgcggccaccctgcggggggcgaggagaacatgaccgaaaccgatgccttttacaaacgtgagatgtttgacccagctgaaaagtacaaaatggaccatcgtagacgaggaatcgctctgatcttcaatcacgaacgatttttttggcacctgacactgcccgagcgaagaggtacgtgcgccgaccgtgacaacctcacccggcgtttctctgatcttggcttcgaggttaaatgtttcaacgaccttaaggctgaggagctcctcttgaagatacacgaagtctccactgttagtcatgccgacgctgattgttttgtatgcgtgtttctttcacacggtgaaggcaaccacatatacgcctacgatgccaaaatagagatccagaccctgacaggcttattcaagggcgataagtgccacagtctggtcggaaagccaaaaattttcatcatccaagcctgccgaggcaatcagcacgacgtgcctgtcatcccccttgatgttgtcgac

SEQ ID NO: 32407 - DNA, 900 bp, synthetic construct
  misc_feature 1..900: note = Description of Artificial Sequence: Synthetic coding sequence
  source 1..900: mol_type = other DNA
atggtggaaatcgatgccgcctcagtgtacaccctgccggcgggagccgactttctgatgtgctacagcgtcgcggagggatactactcacacagggaaactgtcaacgggtcctggtacatccaggacctgtgcgagatgctgggcaagtacggatcctctctggagttcacggagctgctgaccctcgtgaatagaaaggtttcgcaacggcgggttgacttttgcaaggacccatccgccatcggaaaaaagcaggtaccctgttttgcgagcatgctgactaaaaagctgcatttcttccccaagtcgaacctcgagcatcaccatcaccaccacgtggaaattgacggaggatcgccgatgtcgtcagcgtccgggcttcggaggggccacccagctggtggtgaggaaaacatgaccgagactgacgcgttctacaagcgggagatgttcgacccagccgagaaatacaagatggaccacagacggagaggaatagcgctcatcttcaatcatgagcgctttttctggcatctgactctgcctgagcgcagaggtacctgcgcggatcgcgataacctgactaggagattcagcgatcttggattcgaggtgaagtgtttcaatgatctgaaggccgaagagctgttgcttaagatccacgaagtctcgaccgtgagtcatgccgacgcagattgcttcgtctgcgtctttctgagccacggggaaggcaaccacatctatgcatacgacgcgaagattgagatccaaactttgaccgggctgtttaaaggagataaatgtcactccctggtgggaaagcctaagatcttcatcatacaagcctgccgcggaaaccagcatgacgtgccggtgatcccgctggatgtcgtggac

SEQ ID NO: 32408 - DNA, 900 bp, synthetic construct
  misc_feature 1..900: note = Description of Artificial Sequence: Synthetic coding sequence
  source 1..900: mol_type = other DNA
atggtcgaaatcgatgcagcgtctgtttacacgctcccagcaggggcggattttctgatgtgctacagcgttgccgaagggtactacagccaccgggaaactgttaatgggtcttggtacatccaggatctctgtgaaatgttgggtaagtacggcagcagtctcgaattcacggagctcctcaccttagtgaacagaaaagtttctcagcggcgggtagacttctgcaaggacccctctgctatcggaaagaaacaggttccttgctttgccagcatgctcaccaagaagctccatttcttcccaaagtccaatttagagcaccatcatcaccatcacgtcgaaattgatggcggctcacccatgtcttccgctagcggactcagacggggacaccctgccggcggagaagaaaacatgaccgaaactgatgctttttacaagcgggaaatgtttgatccggctgagaaatataaaatggaccacagaagacgcggcattgctctgatttttaaccacgaacgcttcttctggcacctgaccttgcccgagcgacgcggcacttgcgctgacagggacaatctgacaaggcggttttccgatttgggcttcgaagtaaaatgcttcaatgatctgaaagcggaggaattactcctgaagatccacgaggtgtccacggttagtcacgccgacgcggattgtttcgtatgcgtcttcctgtcacatggcgaaggaaatcacatctatgcgtacgatgctaaaattgaaatccagacactcaccggactgttcaagggtgacaagtgtcactctctggtaggaaagcctaaaatctttattatccaggcatgcagaggcaaccagcacgacgttcctgtgattcccctcgacgtcgtcgac

SEQ ID NO: 32409 - DNA, 900 bp, synthetic construct
  misc_feature 1..900: note = Description of Artificial Sequence: Synthetic coding sequence
  source 1..900: mol_type = other DNA
atggtggagatagatgccgcttcagtgtacacgctgcctgctggtgcagatttcctcatgtgctactccgtggcggaaggctattacagccatcgcgagactgtgaacgggtcctggtacatacaagacctgtgtgaaatgctcgggaaatacggatcctccctcgaatttactgaacttcttaccctcgtgaatagaaaggtgtcacaaagacgcgtggacttttgtaaagatccatcggcaatcggaaagaagcaggtgccctgttttgcatccatgcttactaagaagctgcacttttttcctaagtccaatttggagcatcatcatcaccaccacgttgaaattgatggtggatctcctatgtccagcgcctcggggctgcgacggggtcatccagcaggtggggaagaaaacatgactgaaactgacgccttttacaagagggagatgttcgatccggcggaaaagtacaagatggatcataggcgacggggaattgcattgatattcaaccacgagaggtttttctggcatctcacccttcccgaaaggcgggggacctgtgcagatcgtgacaacctcacgcggaggttctcggatctgggtttcgaagtgaagtgtttcaacgatctgaaggccgaggagctgctgcttaagattcatgaggtgtccactgtctctcacgcagatgccgattgtttcgtgtgtgttttcctttcgcatggggagggaaatcatatctacgcttatgatgcgaagatagaaatccaaacccttaccggccttttcaagggggacaaatgtcactcactggtcggaaaacccaaaatcttcataatccaagcatgtcgtggaaaccagcatgatgtgccagtgatcccgctcgatgtcgtggac

SEQ ID NO: 32410 - DNA, 900 bp, synthetic construct
  misc_feature 1..900: note = Description of Artificial Sequence: Synthetic coding sequence
  source 1..900: mol_type = other DNA
atggtggagatcgacgccgcctccgtgtataccttgcctgcaggagcagacttcctcatgtgctactccgtagcagagggatattatagccatcgcgaaacagtcaacggcagctggtacatacaggatctctgcgaaatgcttgggaagtatggttcctcgctggagttcaccgagttgctcacactcgtgaacaggaaagtcagccagcgaagagtagacttctgcaaggacccatctgcaatcggaaaaaaacaggtgccatgctttgccagcatgcttaccaagaagctgcatttctttcccaagtccaacctagagcaccaccatcatcaccacgtagagattgacgggggctcgcccatgtcatctgcgagtggccttcgtcgtgggcacccagccggtggagaagagaatatgacagagacagatgctttctataagcgtgagatgttcgatcccgccgaaaagtacaaaatggaccacaggcggcgcgggatcgccctgattttcaatcatgaaaggttcttttggcacctaactctgcctgagcgcagaggaacctgtgcagaccgcgacaacctaacacgtcggttttccgacttaggtttcgaggtgaagtgttttaacgatctgaaagccgaagagcttcttctgaaaatccacgaagtgtcaaccgtctcccatgccgatgctgattgcttcgtctgtgtttttctcagccacggagaggggaatcacatctacgcctacgacgcaaaaatcgaaatccagacactaactggcctgtttaagggagataagtgtcattctttggtcggcaaacctaagatctttattatccaagcctgtcgcggtaaccagcacgacgtcccagttatcccgctggatgtggtggat

SEQ ID NO: 32411 - DNA, 900 bp, synthetic construct
  misc_feature 1..900: note = Description of Artificial Sequence: Synthetic coding sequence
  source 1..900: mol_type = other DNA
atggttgaaattgatgccgcttcagtctacacattacctgccggtgctgatttccttatgtgctattcggtcgctgaagggtactattcgcatagggagactgtcaatggatcttggtatatacaggatctgtgtgaaatgttgggcaaatacggtagtagtctggaattcactgagctcctaacacttgttaaccgtaaagtttcccaacgtagggtagacttctgtaaggatccaagcgcaataggcaaaaagcaggttccatgctttgcctcaatgctgactaaaaagttgcactttttccctaagtcgaaccttgaacatcatcatcatcatcatgttgagattgatggcgggtcacccatgtcttcggcttccggcttgcgtaggggccacccggccgggggcgaggagaatatgacggaaaccgatgccttctataagcgggaaatgttcgatcccgcagagaagtataaaatggatcatagacgtcggggtatagctcttattttcaatcatgaacggttcttttggcatctgactttacctgagcgaagaggaacctgtgctgaccgagataacttgaccaggagattctctgatctgggtttcgaagttaaatgttttaatgacctcaaggcagaagaactgctgcttaaaatacacgaagtatcaacagtaagccatgctgatgccgactgtttcgtttgtgtgttcctttctcacggagaaggaaatcacatttacgcttatgatgctaagattgagatacagacacttaccggtttgtttaaaggcgataaatgccacagtttggtcggtaagcctaagatatttatcatacaagcttgcaggggtaaccaacacgatgttccagttatcccactcgatgtggttgac

SEQ ID NO: 32412 - DNA, 900 bp, synthetic construct
  misc_feature 1..900: note = Description of Artificial Sequence: Synthetic coding sequence
  source 1..900: mol_type = other DNA
atggtggagattgacgcggcgtcagtgtacacgttgccagctggagccgatttccttatgtgctattcggtagcagagggctattattcgcatcgcgagaccgtgaacggcagctggtatattcaggatctgtgcgaaatgcttggcaagtacggcagctcacttgagtttacggaactgctgacacttgtgaaccggaaggtgtctcagcgacgggtagacttttgtaaagatccaagtgcaatcggcaagaagcaagttccctgcttcgcttcgatgctcacgaagaaactgcattttttccccaagtccaatctggagcatcaccatcaccatcatgtcgaaattgatggcggatccccaatgagctccgcctccggcctgagacgaggccaccccgcggggggcgaggaaaatatgacagagacggatgccttctacaagcgggagatgttcgatccggcagagaaatacaaaatggaccatcgtcggcgcggaatcgccctgatatttaatcacgagcgattcttttggcacttaaccttgcccgaaagaagaggaacttgcgccgatcgagacaacttgacccggcgcttcagcgatctgggtttcgaggttaaatgttttaacgatttaaaggctgaggagctgttgctaaagattcatgaggttagcactgtgtcgcacgcggatgccgactgcttcgtttgcgtgtttctctcacacggtgagggcaatcatatttacgcgtacgacgccaagatcgagatacagaccctgactggtctgtttaaaggggataaatgtcatagtctggtgggcaagccaaagatttttatcatccaggcgtgcagaggcaaccaacacgatgttccggtcattccactggacgtcgtggat

SEQ ID NO: 32413 - DNA, 900 bp, synthetic construct
  misc_feature 1..900: note = Description of Artificial Sequence: Synthetic coding sequence
  source 1..900: mol_type = other DNA
atggttgagatcgatgcagcgagcgtctacacgctgccagcgggagccgactttctgatgtgctactctgtggctgaaggttactactcacaccgtgaaacggtcaacggcagctggtacatccaagacctgtgtgaaatgcttggaaagtacggtagctctctggagtttacggaacttcttactctggtcaaccggaaggtgtcccaacgtagggtcgatttctgtaaggatccttcagcgattggaaagaaacaagtcccatgtttcgcatcgatgttgaccaagaagttgcacttttttcctaaatccaacctcgaacaccaccatcatcaccatgtggagatcgacgggggttctcccatgtcgagtgcatccggacttagacgcggacatcccgctggaggtgaagaaaacatgactgagactgatgccttttacaaaagagagatgtttgaccctgcggaaaagtacaagatggaccatagacgccgtggcatcgccctcatctttaatcatgagcggttcttttggcacctcactcttcctgagagacggggaacttgtgcagatagagataatctgactaggcgattttcggacctggggttcgaggtgaagtgctttaacgatctgaaagcagaagagctgctccttaagatacatgaagtatcaaccgtcagccatgcagacgcagattgttttgtttgtgtctttctctcgcatggagaaggaaatcatatctacgcatacgatgccaaaatagaaattcagaccctgactggtcttttcaagggcgacaagtgccattcgttggtcggaaaacccaagatattcatcattcaggcatgcagagggaatcagcacgatgtgcctgtcatacctcttgatgtggtggac

SEQ ID NO: 32414 - DNA, 900 bp, synthetic construct
  misc_feature 1..900: note = Description of Artificial Sequence: Synthetic coding sequence
  source 1..900: mol_type = other DNA
atggtggaaatcgacgctgctagcgtctacaccctgcccgctggcgccgattttcttatgtgttactctgtggctgagggctactacagccatcgggaaaccgtgaatgggtcatggtatatccaggacctctgcgagatgctgggcaaatacggctcttctctcgagtttactgaactcctgaccctggtgaaccggaaggtttcacagcgccgggtcgacttctgcaaggacccttccgccattggaaagaagcaggtgccgtgttttgcttctatgctgacaaagaagttgcatttcttcccaaaatccaacttggagcaccatcaccatcaccatgtggagatcgacggggggtctccaatgtcttccgccagtggactgcgtagggggcatccagcaggcggcgaggaaaacatgaccgagactgacgccttctataagcgagagatgttcgacccagccgagaagtacaagatggatcatcggcgaaggggcatcgctctgattttcaatcacgagcggttcttctggcatctcacactccctgaacgccgtgggacttgtgcagatagagataacctgactcgacgatttagcgatctggggtttgaagtgaaatgtttcaacgatctcaaggctgaagagctcctcctgaaaatccacgaggtctcgacagtgagccacgcagatgccgactgctttgtttgcgtttttctgtcccacggagagggcaatcacatttacgcttacgacgccaaaatcgaaatacagacactaactgggctctttaagggcgataagtgtcacagtctggtggggaagcctaagattttcattattcaggcctgcagaggtaaccaacatgacgtacctgtaattcccctggacgtggttgac

SEQ ID NO: 32415 - DNA, 900 bp, synthetic construct
  misc_feature 1..900: note = Description of Artificial Sequence: Synthetic coding sequence
  source 1..900: mol_type = other DNA
atggtggagatcgatgccgcgtcagtttataccctaccagccggcgccgactttctgatgtgttacagcgttgccgaaggatactactcacacagagagacggttaacggaagttggtatatccaagacctctgcgagatgctcggaaagtatggcagctccttggagtttaccgaactcctaactctagtgaatagaaaagtcagccagcgccgcgtggatttttgcaaggatccgtccgcaatcggcaagaaacaggtgccctgtttcgcatctatgctcaccaaaaagcttcacttcttcccgaaatcaaatcttgagcatcaccaccatcaccacgttgagatagatgggggcagtcccatgtcgtccgcaagcggattaaggcggggacatcctgcgggaggtgaggaaaacatgacagaaaccgacgccttctataaaagggagatgttcgaccctgcagaaaaatacaaaatggatcatagacggagagggatcgcgctgattttcaaccacgaaaggtttttttggcacctgacactgccagaacgtcgtggcacatgtgccgatcgggataatctgacccgcaggtttagtgatctgggctttgaggttaagtgtttcaacgatctaaaggccgaggagctgctactgaagatccacgaagtctcgactgttagtcacgccgacgcagattgtttcgtgtgtgttttcttgagccatggcgaggggaaccacatttatgcctatgatgcgaagattgaaattcagacgttgactggtctatttaagggcgataagtgtcacagcctcgtgggaaagcccaaaatcttcattatacaggcatgccgtgggaaccagcacgacgtgcctgtcatacctctggatgttgtggac

SEQ ID NO: 32416 - DNA, 900 bp, synthetic construct
  misc_feature 1..900: note = Description of Artificial Sequence: Synthetic coding sequence
  source 1..900: mol_type = other DNA
atggtggagatcgacgctgcgtccgtgtacactctgcccgcgggggcggattttctcatgtgctacagcgtcgcggaaggatactactcccaccgcgaaaccgttaatggctcatggtacatccaagatttgtgcgaaatgctcggcaagtacgggtcatccctggagtttaccgagttgttgactcttgtgaaccgcaaagtttcgcaaaggcgcgtcgacttttgcaaggatccttcggcgattggaaagaagcaggtcccgtgctttgcttcaatgctgaccaagaagctgcatttctttccgaagtccaatctcgagcatcaccaccaccaccatgtggaaatcgacgggggctccccgatgtcatcggctagcggactgcgccgtggtcacccagcggggggcgaggaaaacatgactgagactgatgccttttacaaaagagaaatgttcgacccagccgaaaagtacaagatggatcaccgccgccgcgggatcgccctgatcttcaaccacgaaagatttttctggcatcttaccctgcccgagcggcgcggcacctgcgcggacagagataatcttacgcgcagattctccgacctgggattcgaagtcaaatgtttcaacgatctcaaagccgaagaactccttctgaaaatccacgaggtgtcaaccgtctcgcatgccgacgcagattgtttcgtgtgcgtatttctgtcacatggagaaggaaatcacatctatgcctacgacgcgaagatcgaaatccagactttgacgggtctgttcaagggagataaatgtcattccctcgtcgggaagccgaagattttcattatccaggcttgccggggaaaccagcatgatgtccccgtgatccctctggatgtggtcgac

SEQ ID NO: 32417 - DNA, 900 bp, synthetic construct
  misc_feature 1..900: note = Description of Artificial Sequence: Synthetic coding sequence
  source 1..900: mol_type = other DNA
atggtggaaatcgatgctgcctccgtctacaccctgcctgcaggtgcagacttccttatgtgctactcggtggctgaaggatactactcacacagagaaactgtcaacggttcgtggtacatccaggatctttgtgagatgctgggaaagtacggatcgtcgctggagttcacggaattgctgactctggtgaataggaaagtcagccagaggagagtggatttttgcaaagacccaagcgccattggcaagaagcaggtcccgtgcttcgcatcaatgctgactaagaaactgcatttctttccaaagtccaacttggagcaccaccatcaccaccatgtggaaattgacgggggatctccgatgtcgagcgcgagcggtctgagaagaggacatccggcaggaggagaagagaatatgactgaaactgatgccttctataagcgcgaaatgttcgaccctgcggagaagtacaagatggaccatcgacgccgcggaattgcgctgatcttcaaccatgaaaggttcttttggcacctcaccctgccggaacggagaggcacttgtgccgaccgggataaccttacgagaagattctcagacctgggttttgaggtgaagtgcttcaacgacctgaaggccgaggagctgcttctgaagatccatgaagtgtcaaccgtctctcatgcagacgcggattgctttgtctgcgtgttcctctcgcacggagagggaaatcatatctacgcctatgatgcgaagatcgagatccagaccctgaccggcctcttcaagggcgacaagtgccactcactggtgggcaaaccgaagatcttcatcatccaagcgtgccgaggcaaccaacacgacgtgcctgtgatcccgttggacgtcgtcgac

SEQ ID NO: 32418 - DNA, 900 bp, synthetic construct
  misc_feature 1..900: note = Description of Artificial Sequence: Synthetic coding sequence
  source 1..900: mol_type = other DNA
atggtggaaattgacgcagcgtcagtgtatacgcttccagcaggggctgatttcctgatgtgttatagcgtcgcggaggggtactactcacatcgggaaaccgtgaacggttcttggtatattcaggatctgtgcgagatgctcggcaagtacgggagtagcctcgaattcaccgaactcctgactctcgtcaatagaaaggtgtctcagcggcgggtggacttctgtaaagatccttccgctatcggaaagaagcaggtcccgtgtttcgcaagcatgcttactaagaaattgcatttctttcccaagtctaaccttgaacatcaccatcatcatcatgtggaaatagatggaggatcccccatgagctcggcatcgggcctccgaagaggtcacccagctggcggtgaagaaaacatgacggaaaccgatgccttctataaacgggagatgtttgaccctgcagagaaatacaaaatggatcatagacgacgcggaatcgcactgattttcaatcacgagcgatttttctggcacctcaccctgccagagcggcgcggcacctgcgcggatagagataaccttacccgtaggttttcggacttgggatttgaagtgaagtgctttaatgacctgaaagcagaggaacttctgcttaagatccatgaagtctcgactgtgtcgcacgcagatgcggactgttttgtgtgtgtttttctgtcccatggggaaggtaaccacatctacgcctacgatgccaagattgagatccaaactctgactggtttgtttaaaggagacaagtgccattccctcgtgggtaagccgaagattttcatcatccaggcttgtcgtggaaaccagcacgatgtacctgtcatacctcttgacgtggtcgat

SEQ ID NO: 32419 - DNA, 900 bp, synthetic construct
  misc_feature 1..900: note = Description of Artificial Sequence: Synthetic coding sequence
  source 1..900: mol_type = other DNA
atggttgagatagatgctgcgtccgtatataccctgcctgcgggggctgattttctgatgtgctatagtgtggctgaaggatactacagccatagagagaccgttaacgggtcatggtatatccaagacttatgcgagatgctggggaaatacgggtcatctctagaatttacagagttgttgacacttgtgaatcggaaggtgtcccagcgacgagtggatttctgcaaggatccaagcgcaattggaaagaaacaggtaccttgttttgcttccatgctcacgaagaagcttcatttttttcctaagtcaaaccttgaacatcatcaccaccaccatgtggaaattgacggcgggtcacccatgagctcggcctccggactgaggagaggccatcctgccggcggcgaggagaacatgaccgagactgatgcattttacaagagagagatgttcgatcccgccgagaaatacaagatggaccatagacggcgaggaattgctctgattttcaatcacgaacggtttttctggcacctgaccttgcccgagcgccgagggacttgcgccgaccgcgataatctcacaagacggttctcggaccttggttttgaagtcaaatgttttaacgatcttaaggccgaggaactcctgctgaaaatccacgaggttagtactgtttcacatgcagacgcggattgtttcgtgtgtgtgttccttagccatggtgagggaaaccacatctatgcttacgacgcaaaaatagaaatccagactctgaccggtctatttaaaggtgataaatgtcatagcttggtcggcaaaccaaaaattttcataatccaggcctgtcggggtaaccagcacgacgtgcctgttataccactggatgtggtggat

SEQ ID NO: 32420 - DNA, 900 bp, synthetic construct
  misc_feature 1..900: note = Description of Artificial Sequence: Synthetic coding sequence
  source 1..900: mol_type = other DNA
atggttgagattgatgccgctagcgtgtatacactgcccgccggggccgattttctgatgtgttattcagttgctgaggggtactatagccatcgcgagaccgtcaatgggtcttggtacattcaggatctctgtgaaatgctgggtaagtacggctcatcactggagttcacagagctcctgaccttggtcaaccggaaagtcagtcaacgacgggtggacttctgtaaagaccctagcgcaatcggaaaaaagcaggttccttgcttcgcaagtatgctcactaagaagctccacttcttcccgaagagcaatctggagcaccaccaccatcaccatgtggagattgacggagggtcacccatgtcttcagccagtggtctcagaagaggacaccccgccggcggcgaggaaaacatgactgagaccgatgccttttacaagcgcgaaatgtttgacccggcagaaaaatacaaaatggaccaccggagaagaggaattgctcttatttttaatcatgaacggttcttctggcatctgaccttgccagagcgccggggtacgtgcgccgatcgggataatctgactcggcggttctctgacctaggattcgaggttaagtgcttcaacgacctgaaagcagaggagttgcttctgaagatccacgaagtgagcacggtgtcccacgctgatgccgattgctttgtgtgcgttttccttagtcacggagaagggaaccacatatatgcatacgacgcgaagatagagattcaaacactcactggcctgtttaagggggataagtgccactcactggttggcaaacctaaaatctttatcattcaggcttgtcgggggaatcagcacgacgttcccgtaatacccctggacgttgtggat

SEQ ID NO: 32421 - DNA, 900 bp, synthetic construct
  misc_feature 1..900: note = Description of Artificial Sequence: Synthetic coding sequence
  source 1..900: mol_type = other DNA
atggttgaaatcgatgcggcatccgtctacactttgcctgcgggagccgacttcctgatgtgttacagcgtggcagagggctactattcgcatcgggaaaccgtgaacggaagctggtacattcaggacctgtgtgagatgttgggcaagtacggttcaagcctcgaattcacggagcttctgactctggtgaaccggaaagtctcccaacgtagagttgacttttgtaaggacccatcggcgattggtaagaagcaggtgccttgttttgcgtccatgcttaccaagaagctgcacttttttcctaagagcaacctggagcatcaccatcaccatcatgtggaaatcgatggtggttcgcctatgtcgtccgcatccgggctcagaagaggacatcctgcagggggtgaagagaatatgaccgaaaccgacgcattttacaagcgtgagatgtttgatcctgccgaaaagtacaagatggatcatagacgcagggggattgctttgatattcaatcacgaaaggtttttctggcatcttaccctgccagaacgaagaggaacttgcgccgatcgcgacaacctgactagaagattttcggacctgggatttgaggtcaagtgctttaatgatttgaaagcggaggaacttctcctcaaaattcacgaagtctccacggtgtcacatgcggatgcagattgtttcgtctgtgtgttcctgtcgcatggtgaagggaaccacatttacgcctacgacgcgaagattgaaatccaaaccttgactggtcttttcaagggagataaatgccactcactggtgggtaaacctaaaatcttcataatccaagcatgtcgtggtaatcaacatgatgtgcctgtgatccctcttgacgttgtggac

SEQ ID NO: 32422 - DNA, 900 bp, synthetic construct
  misc_feature 1..900: note = Description of Artificial Sequence: Synthetic coding sequence
  source 1..900: mol_type = other DNA
atggtcgaaatcgacgccgcctccgtgtacactctgcccgctggtgctgattttctgatgtgttactcggtggcggagggatactacagccacagggaaaccgtgaacggctcttggtatatccaggatctgtgtgaaatgctgggaaagtacggctccagcctggagttcactgagctgcttaccctcgtgaaccggaaggtcagtcagcgccgcgttgacttctgcaaggacccttcagccatcggaaaaaagcaggtgccgtgcttcgcgtcaatgctcacgaaaaagctgcacttttttccgaagtccaatctggagcaccaccaccatcaccacgtggagattgacggaggcagccctatgtccagcgcgagcggattgcggagaggacatcctgcgggcggagaagagaacatgaccgaaaccgacgcgttctacaagagagaaatgttcgatccagctgagaaatacaagatggaccatcgtcgccggggaatcgcgctgatcttcaatcatgagcgcttcttctggcatctgactctgccagaaagacggggcacttgtgctgatagagacaacctcacccgccgcttttcggacctgggtttcgaggtcaaatgcttcaatgatctgaaagcggaagaacttctgcttaagatccacgaggtttccaccgtgtcccacgccgacgcggattgcttcgtgtgcgtgttcctgtcgcatggagagggcaaccacatttacgcctacgacgccaagatcgagatccaaacccttactgggctgtttaaaggcgacaagtgccacagcttggtcggaaagccgaagatcttcatcatccaggcgtgtcggggaaaccagcatgatgtgccagtgatcccgctcgatgtggtcgac

SEQ ID NO: 32423 - DNA, 900 bp, synthetic construct
  misc_feature 1..900: note = Description of Artificial Sequence: Synthetic coding sequence
  source 1..900: mol_type = other DNA
atggtggaaatcgacgcggcaagcgtgtacaccctgcccgcaggcgccgactttttgatgtgctactcggttgccgaaggatactattcccatagggaaactgtgaacggctcgtggtatattcaggatctgtgtgaaatgctcggtaagtacgggtcgtccttggaattcaccgaacttctgaccctggtgaaccgaaaggtgagccaacgtcgggtggatttttgtaaagacccgtccgcaattggtaagaagcaagtgccatgtttcgcctccatgctgaccaaaaaactccactttttccctaagagcaacctggagcatcaccatcaccaccacgtggaaattgacgggggttcaccaatgtcgtcagcgtcaggcctgaggagaggccatccagccggaggcgaagaaaacatgactgagactgatgcattttacaagcgagagatgttcgacccagcagagaagtacaagatggatcacaggcggcgtggtattgcactcattttcaaccatgaacgctttttctggcaccttactctgccagaaaggagagggacttgtgctgacagagacaacctgacgagacggtttagcgatctgggttttgaagtcaaatgctttaatgaccttaaggccgaagaacttcttcttaagatccacgaagtctcaaccgtgtctcatgccgacgcagattgttttgtctgtgtgtttctgtcgcacggggagggaaaccacatatacgcctacgatgccaagattgagattcagactcttaccgggctctttaagggagacaagtgtcattccctggtgggaaaaccaaagatcttcattatccaggcatgtaggggtaaccaacacgacgtgcccgtgattcctcttgacgtggtggat

SEQ ID NO: 32424 - DNA, 900 bp, synthetic construct
  misc_feature 1..900: note = Description of Artificial Sequence: Synthetic coding sequence
  source 1..900: mol_type = other DNA
atggtggagatcgatgcagcctcggtttacaccttgcctgccggcgctgacttcctgatgtgttactccgtggcagaaggctactactcacaccgagagaccgttaacggatcatggtacatccaggatttgtgtgagatgctgggcaaatacggatcaagtctcgaatttactgagcttctgacgctggtgaacagaaaggtctctcagaggcgtgtggatttctgcaaagatccatctgccatcgggaagaaacaggtgccatgtttcgcgtctatgcttactaagaaattgcatttcttccctaaatcaaatctggagcaccaccaccatcatcacgtagagattgatggcggcagccccatgtcaagcgccagtgggctccgtagaggccatcctgccggtggggaggaaaatatgaccgagaccgacgcgttttataagagggaaatgtttgacccagctgaaaaatacaagatggaccaccgtcgcagaggaattgccctgatcttcaatcacgagagattcttttggcacctcaccctgcctgagagacgcggaacctgtgccgatagagataatctgactcgtcggttctccgacctgggattcgaggtaaagtgttttaatgatctcaaggccgaggagctgttgctgaaaatacatgaggtgtccactgtttcacacgctgacgccgattgtttcgtgtgtgtgttcctctcccacggagaagggaaccacatctacgcctacgacgctaagattgagatccagaccctgactgggctgttcaagggggataaatgccacagtctcgtgggtaaacctaagatatttataatccaggcatgcaggggcaaccagcacgatgtccctgtcatccccctggacgtcgtggat

SEQ ID NO: 32425 - DNA, 900 bp, synthetic construct
  misc_feature 1..900: note = Description of Artificial Sequence: Synthetic coding sequence
  source 1..900: mol_type = other DNA
atggttgaaattgatgctgcatcagtttatacattgcccgccggagccgacttcctcatgtgttatagcgtggcagaaggctactatagccatcgcgaaactgtgaatggaagctggtatattcaagatctatgtgaaatgctcggaaagtacgggtctagtctcgagttcaccgagctgctgaccttggtgaacaggaaggttagccaacggagggtagacttctgtaaggaccctagtgcgatcggtaagaaacaggtgccatgcttcgcctcaatgctgactaaaaagctacacttctttcctaagagcaacctcgagcaccaccaccatcatcatgtggaaatcgatggtggctctccaatgtcctcagcttctggcctccgaaggggccaccctgcaggaggtgaggaaaatatgacggaaaccgatgcattctacaagcgcgaaatgttcgatcctgcggaaaagtataagatggaccacaggaggcggggtatagccctcatattcaaccacgagcggttcttctggcacttgacgctgcctgaaagacgtgggacgtgtgccgatagggacaatctgactaggcggtttagcgatctgggattcgaggtaaagtgtttcaacgatctgaaggccgaggagttgttactaaagatacatgaggtttcaacagtgtcccacgcagatgcggactgctttgtgtgcgttttcctgtcccatggcgaaggaaaccacatttatgcatatgatgctaaaattgagattcaaacattaacgggactgtttaaaggcgacaagtgccactccctggtgggaaagccaaagattttcatcattcaagcgtgcagggggaatcagcatgatgtgccggtaatacccttggatgttgtcgac

SEQ ID NO: 32426 - DNA, 900 bp, synthetic construct
  misc_feature 1..900: note = Description of Artificial Sequence: Synthetic coding sequence
  source 1..900: mol_type = other DNA
atggtggagatcgacgcggctagtgtgtacactctccctgcgggagccgactttctgatgtgctattccgtcgcagagggttactactcgcatcgagagaccgttaacggctcctggtacatccaagacttgtgtgagatgcttggtaagtacggcagcagtctcgagttcaccgagctcctgacccttgtaaaccgcaaagtgagtcaacggagagtggacttttgcaaggatccgagcgcaatcggcaaaaagcaggtcccatgcttcgccagtatgctgactaaaaagctgcatttcttcccaaagtccaacctggagcaccaccaccaccaccacgtcgaaatcgatggaggttcccccatgagctccgcttccggcctgcgccgaggtcacccggccggtggcgaggagaacatgactgagactgacgccttctacaaacgcgaaatgttcgatcccgccgagaaatataagatggatcaccgccgacgcggaatcgccctgatctttaaccacgaacgtttcttctggcacctgaccttgcctgagcgtcgggggacatgcgctgatcgggacaacttgacgcgccgcttcagcgacctcggcttcgaggtcaagtgcttcaacgacttgaaggccgaggagctcttgttaaagattcatgaagtgtctacggtatcccacgctgacgccgattgcttcgtctgcgtgtttctcagtcacggtgagggcaaccatatctacgcctacgatgcaaagattgagattcaaaccctcactggacttttcaaaggagataagtgccactcccttgttggcaagccaaagatcttcattattcaggcatgccgcggcaaccagcatgatgtgccggttatccctctcgacgtggtcgac

SEQ ID NO: 32427 - DNA, 900 bp, synthetic construct
  misc_feature 1..900: note = Description of Artificial Sequence: Synthetic coding sequence
  source 1..900: mol_type = other DNA
atggtggaaatcgatgcagcatcagtgtacaccctccctgcaggtgcagattttctcatgtgttacagcgtcgctgagggctactattcccatagagaaaccgtgaacggttcctggtacatccaagatctctgcgaaatgctggggaagtacggatcgtcactggaatttaccgagcttctgaccctcgttaataggaaagtcagccaacgtcgggtggacttttgtaaagacccttctgctattggtaaaaagcaggtgccgtgctttgcctcgatgcttaccaagaagctccacttttttcctaaatcgaacctggagcatcatcaccaccatcatgtggaaatagacggcggatcaccgatgtcgtctgcctcaggtctgcgcagaggtcatccagcgggcggcgaagaaaacatgaccgaaaccgatgcgttctacaaaagggaaatgtttgaccctgcagaaaagtacaagatggaccatcggagacgcggtattgcacttatctttaatcatgagagatttttctggcacctgaccctccctgaacgcaggggtacctgtgcggatagagataacctgactagaagattcagcgatcttggatttgaggtgaagtgtttcaacgaccttaaggctgaagaactgttgctgaagatccatgaagtgagcacggttagccatgcagacgctgattgttttgtgtgcgtgttcctgtcccacggcgagggaaaccatatctacgcatacgatgcaaaaatcgaaatccagactcttaccgggctcttcaaaggagacaagtgtcattccctggtgggaaagcctaagatcttcataatacaggcatgcagaggtaatcagcacgatgtccccgtgattcctctggacgtggtcgac

SEQ ID NO: 32428 - DNA, 900 bp, synthetic construct
  misc_feature 1..900: note = Description of Artificial Sequence: Synthetic coding sequence
  source 1..900: mol_type = other DNA
atggtagaaatcgacgcagcttcagtgtacacgttgcctgccggtgctgatttcctgatgtgctactcggtggcggagggatattactcacatagagaaaccgtcaatggatcttggtacatccaggacctctgcgaaatgctgggaaagtacggtagcagcctcgaatttaccgaactcctcacgttggttaaccgcaaagtgtcccaacggcgcgtggatttttgcaaagacccgtccgccatcggaaaaaagcaagtcccgtgcttcgcttccatgctgactaagaaactgcatttctttcccaagtctaatttggagcatcatcaccaccatcatgtcgaaatcgatgggggatcgccgatgtcgagcgcatcgggactccggcgcggtcacccggccgggggagaagagaatatgaccgaaaccgatgcattttacaagcgggaaatgttcgatcctgcggaaaagtacaagatggaccatcggcggaggggcatcgcactgatcttcaaccacgagagattcttctggcacctcactctgcctgaacgacggggaacttgcgccgaccgagacaacctcacccggaggttctccgatctgggtttcgaggtcaagtgtttcaatgacctcaaagcagaagagttgctgctgaaaatccacgaagtgtcaactgtgtcgcacgcggatgccgactgtttcgtgtgtgtgttcctctcacacggagaaggaaaccatatctacgcttacgacgcaaagatcgagatccagacgctgaccggactgtttaaaggagacaaatgccactcgttggtcggcaagccaaagattttcattatccaggcgtgccgaggcaatcagcatgacgtgccggtgatcccattggatgtggttgat

SEQ ID NO: 32429 - DNA, 900 bp, synthetic construct
  misc_feature 1..900: note = Description of Artificial Sequence: Synthetic coding sequence
  source 1..900: mol_type = other DNA
atggtagaaatcgacgcagcgtcggtttacactttgccagccggagctgacttcctgatgtgctactccgttgctgaaggttactactcacaccgggaaaccgtgaacggatcatggtacatccaggacctgtgtgagatgttgggaaagtacggatcgagcctcgagtttacggaactgttgaccctggtcaatagaaaagtctcgcaaaggcgcgtggacttctgcaaggatccttcggctattggaaagaagcaggtcccgtgcttcgcatccatgctgaccaagaagttgcatttctttcccaaatcaaatctggagcaccatcaccaccaccatgtggaaatcgacggtggatcccctatgagctccgcctccggactgcgccgcggccacccagcgggaggagaggaaaacatgaccgagactgacgcgttctacaaacgggaaatgttcgatccggcagagaagtataagatggaccataggcgccgaggaatcgcgttgattttcaatcatgagcggttcttttggcaccttaccttgccggaaaggcgcggtacttgcgcggatcgggacaacctgactagaagattctcagatctggggtttgaggtgaagtgtttcaacgacctgaaggccgaagaattgctgttgaaaatccacgaggtgtccaccgtgtcgcatgcggacgccgactgctttgtgtgcgtgttcttgtcccacggtgaagggaaccatatctacgcatatgacgccaagatcgagatccagactctcacgggactcttcaaaggagacaagtgtcatagcctggtcggtaaaccgaagatcttcattatccaggcttgccggggaaatcaacatgatgtcccggtgatcccactcgatgtggtggac

SEQ ID NO: 32430 - DNA, 900 bp, synthetic construct
  misc_feature 1..900: note = Description of Artificial Sequence: Synthetic coding sequence
  source 1..900: mol_type = other DNA
atggtggaaatagacgctgcctccgtttataccttgccagctggtgcagactttctgatgtgttattctgtggcagaaggctactactctcaccgggaaaccgtgaacgggtcttggtacattcaggacttatgcgaaatgttagggaaatacgggtcttcccttgaattcacagaactcttaacactggtcaacagaaaggtcagccagcgccgcgtggacttttgtaaggacccttccgctatagggaagaagcaggtgccttgttttgcatctatgctgacaaagaaactgcatttcttcccaaagagcaacctggagcaccatcatcatcaccatgttgaaattgacggcggcagccccatgagtagcgcatccggattaaggcggggccatccagccgggggagaagaaaatatgacagaaactgatgccttttataagcgggagatgtttgatcccgcagaaaaatataagatggatcaccgccgacggggcattgccctcatattcaatcatgaaaggtttttttggcatttaactctcccagaaagacgtggcacttgcgctgatcgggacaaccttacaaggcgattctccgacctgggcttcgaggtcaagtgctttaatgatctgaaagccgaggagctcctgctgaagattcacgaagtgtcaaccgtgagtcacgccgatgccgattgcttcgtgtgcgtttttctgtcacatggcgagggcaaccacatctatgcttacgatgccaaaatcgaaattcagactctgaccgggctgtttaagggggacaaatgtcactccctcgtgggcaagcccaagatcttcatcattcaggcctgtcgtgggaaccagcacgacgttcctgttatccctcttgacgtcgtggac

SEQ ID NO: 32431 - DNA, 900 bp, synthetic construct
  misc_feature 1..900: note = Description of Artificial Sequence: Synthetic coding sequence
  source 1..900: mol_type = other DNA
atggttgaaatcgacgccgcttccgtgtacactctcccggccggagctgacttcctgatgtgttactccgttgccgaagggtattactcccatcgcgaaactgtgaatggctcctggtatatccaagacctttgcgagatgctcggaaagtacggatcatctctggagttcactgaactgctgacgctcgtgaatcggaaggtgtcgcagcggcgagtcgatttctgcaaggatccgtccgcaattggcaaaaaacaggtcccctgttttgcgtctatgctgaccaagaaactccacttctttcccaaatccaatctggaacaccaccaccaccatcatgtggaaatagacggtggttcgccgatgtcgagcgcctcgggtcttagaaggggacacccagcgggcggagaggaaaacatgacggagactgacgccttttacaagcgggaaatgttcgacccagccgagaagtacaaaatggaccatcggagaagaggaatcgccctgatcttcaatcatgagcgctttttctggcacctcaccctgccagagcgccgcggcacctgcgcggatcgggataacctcacccgccgcttttccgacctgggattcgaagtgaagtgcttcaacgatctgaaagcagaagaattgctgctcaaaatccatgaggtgtcgaccgtttcgcacgcggacgctgattgctttgtctgcgtgttcctgagccacggggaggggaaccatatctacgcttatgatgccaagatcgagatccagactctgactggactgttcaagggggacaagtgccactcactggtgggcaagcctaagatcttcatcatccaggcatgccgcggaaaccaacacgatgtcccagtgatcccacttgatgtcgtggac

SEQ ID NO: 32432 - DNA, 900 bp, synthetic construct
  misc_feature 1..900: note = Description of Artificial Sequence: Synthetic coding sequence
  source 1..900: mol_type = other DNA
atggtcgagattgatgcagcatctgtgtacactttgccagccggggcagattttcttatgtgttactctgtggccgaaggctactactcccatagagaaaccgtaaacggctcctggtacatacaggacctctgtgaaatgctgggaaagtacggctcttcactggagtttaccgagctgctgacgctggttaatcggaaagtgtctcagaggcgggtcgacttctgcaaggaccctagcgcaatcggaaagaagcaggtcccttgcttcgcctccatgctgacgaagaaacttcatttcttcccgaagagtaacctcgagcatcatcaccatcatcacgtggagattgatggcgggagcccaatgtcctcagctagcggcctgaggcggggacaccccgctggtggagaggagaatatgacagaaaccgacgccttctataaaagagagatgtttgatcctgccgagaagtacaagatggaccaccggcgacgagggatcgccctcatttttaatcatgaacggttcttctggcatctgactttgccggaacggcgggggacctgtgctgatagagataatctgacccgccggttctctgacctgggttttgaggttaagtgctttaatgatctgaaagcagaggagctcctgctgaaaatccatgaggtcagtactgtgagccacgcggacgctgattgctttgtgtgcgtgttcttgagccacggagaaggcaaccacatctatgcgtacgacgcaaagatagaaatccagaccctgactggactgttcaagggcgacaagtgccatagcctggtgggaaaaccaaaaatttttatcatccaggcctgtagggggaaccagcacgatgtgccagtcattccccttgacgtggtagac

SEQ ID NO: 32433 - DNA, 900 bp, synthetic construct
  misc_feature 1..900: note = Description of Artificial Sequence: Synthetic coding sequence
  source 1..900: mol_type = other DNA
atggttgagattgacgccgctagtgtctacaccttgcctgctggggccgattttttgatgtgttacagcgttgccgaagggtactacagtcatcgggagacagtgaatgggtcctggtacatccaggatctctgcgagatgctcggaaaatatggatctagcctcgagtttaccgagctactgactctggtcaaccgtaaggtttctcaacgtcgagtcgatttctgcaaagacccttccgctatcggaaaaaagcaggtcccatgctttgcctccatgctcactaaaaagctgcacttcttccctaagtccaatttggaacaccatcatcatcatcatgttgagattgacggtggctctcctatgtccagtgcctcaggtttgagaagagggcaccctgctggcggcgaagaaaatatgaccgagactgatgcattctacaagcgggagatgtttgatcccgctgagaagtataagatggaccacagaaggcgaggcatcgccctgatatttaaccacgagcgcttcttctggcatcttaccctccccgagaggagagggacttgcgcagaccgggataacctgaccagaaggttttctgatctcggcttcgaagtaaaatgctttaatgatcttaaggcggaagaattactcttgaaaatccatgaggtgtcaaccgttagtcacgccgacgctgactgctttgtgtgtgtgttcttatcccacggcgaaggcaatcatatctatgcatacgacgcgaagatcgagatccagacattgacgggcctgttcaaaggtgacaagtgtcattccctcgttggcaaaccaaaaatcttcattattcaagcctgtagagggaaccaacatgatgtccccgtcattcctctggacgttgtggat

SEQ ID NO: 32434 - DNA, 900 bp, synthetic construct
  misc_feature 1..900: note = Description of Artificial Sequence: Synthetic coding sequence
  source 1..900: mol_type = other DNA
atggtggaaattgatgctgcatcagtttatacattaccagctggagcagatttcttaatgtgttattctgtggcagaaggttactattctcatagagaaaccgttaacggatcatggtatatacaagatttatgtgaaatgttaggaaaatatggatcttctcttgaatttactgaactccttacacttgtcaacagaaaagttagtcaaaggagagttgatttctgtaaagatccttcagctattggtaaaaagcaagttccatgtttcgcaagtatgttaactaaaaaattacattttttcccaaaaagtaatttagaacatcaccatcaccatcatgttgaaattgatggtggatcaccaatgtcatctgcaagtggacttagaagaggacatcctgcaggaggagaagaaaatatgacagaaacagacgcattttataaaagagaaatgtttgatccagctgaaaaatataagatggatcatagaagaagaggtattgcattaatttttaatcatgaaagatttttttggcatttaacattaccagaaaggagaggaacatgtgctgatagagataatttaactagaagattctcagatttaggatttgaagttaaatgttttaatgatttaaaagcagaggaattacttttaaaaattcatgaagtttcaacagtatcacatgcagatgcagattgtttcgtttgtgtttttttatcacatggagaaggaaatcatatatatgcatatgatgcaaagatagaaattcaaactttaactggtttatttaagggagacaaatgtcattctttggtaggtaaaccaaaaattttcattatacaggcttgtagaggaaatcaacatgatgttcctgtcattcctttagatgtagttgat

SEQ ID NO: 32435 - DNA, 900 bp, synthetic construct; identical to SEQ ID NO: 32408
  misc_feature 1..900: note = Description of Artificial Sequence: Synthetic coding sequence
  source 1..900: mol_type = other DNA

SEQ ID NO: 32436 - DNA, 900 bp, synthetic construct
  misc_feature 1..900: note = Description of Artificial Sequence: Synthetic coding sequence
  source 1..900: mol_type = other DNA
atggtggagatcgacgcggcgtcagtctacactctcccagcaggtgcggacttccttatgtgctactcagtcgctgagggctactattcgcatcgggaaaccgtgaacggatcgtggtacatccaagacctctgcgaaatgctcggaaagtacggcagctccctggaattcacggaactcctgactctcgttaaccgtaaggtcagccagcgccgggtggacttttgtaaagatccttcagcgatcggaaaaaagcaggtgccatgcttcgcatcgatgctgacgaagaagctgcatttcttcccgaaatcgaatctggagcaccaccatcaccatcacgttgagattgatggcgggtcaccgatgagctccgcctcggggctccggcgcggacacccagctggcggagaagagaatatgaccgagactgatgccttctataagcgcgaaatgttcgaccctgccgagaaatacaaaatggaccacaggagacgggggatcgcccttatctttaatcatgagcgcttcttctggcacctcaccttgcctgaacggcggggtacttgtgccgatcgcgataacctgactagacggttctccgacctcggatttgaagtgaagtgtttcaacgatctcaaggccgaagaactcctgctgaaaatccacgaagtctccaccgtgtcccacgccgacgcggactgcttcgtctgtgtgttcctgagccacggggagggaaaccacatttacgcttacgacgccaaaattgaaatccaaaccttgaccggcctctttaagggcgataagtgccactcactggttggaaagccgaagatctttatcatacaggcatgccgggggaaccagcatgatgttccagtgatcccgttggacgtggtcgac

SEQ ID NO: 32437 - DNA, 900 bp, synthetic construct
  misc_feature 1..900: note = Description of Artificial Sequence: Synthetic coding sequence
  source 1..900: mol_type = other DNA
atggtcgaaatcgacgctgcctccgtttacactttgcccgctggcgctgatttcctgatgtgttactcagtcgctgaaggatactattcacaccgtgaaactgttaacggtagttggtatattcaggacctttgcgagatgctgggcaagtatggttcaagcctggagttcactgaattgctgaccttggtgaaccgcaaggtatctcagcgtcgcgtagacttctgtaaggacccctccgcaatcggaaagaagcaagtgccctgttttgctagtatgctcacaaagaagctccatttctttcccaaatccaatctcgaacatcaccaccaccaccacgtagaaatcgatggaggatctcctatgtcctctgcctccggactcagacgcggtcacccagccggcggtgaagagaatatgactgaaaccgacgccttctacaagagagaaatgttcgacccagccgagaagtacaagatggatcatagaagacgcggcattgctttgatttttaaccacgagcgcttcttttggcaccttacactgcccgagcgcagaggaacttgcgctgacagggataacctcacaaggcgctttagtgacttgggttttgaggtcaagtgcttcaatgacctgaaggccgaggagctgctgttgaagatacacgaagtgtcaactgtctcacatgccgatgcagattgcttcgtgtgcgtctttttgtctcacggagaaggtaaccacatttacgcctacgacgctaaaatcgagattcaaactctcacaggtctctttaagggtgataagtgccattcactcgtgggaaagcctaagatcttcattatccaggcttgccgtggcaaccaacacgacgtccccgtgatccctcttgatgtcgtcgac

SEQ ID NO: 32438 - DNA, 900 bp, synthetic construct
  misc_feature 1..900: note = Description of Artificial Sequence: Synthetic coding sequence
  source 1..900: mol_type = other DNA
atggtggagatagacgccgcttccgtgtatactctccccgcaggagccgattttttgatgtgctatagtgtggctgaggggtattactctcaccgcgaaacggtgaatggatcctggtacattcaagatctctgtgagatgctgggaaagtatggctccagtcttgaattcacggaactcttgactttggtgaaccgcaaggtgagccagagaagggtagacttttgcaaggatccttccgcgatcggcaagaagcaggtaccttgcttcgctagcatgctaacaaagaagctgcacttctttcccaaatccaacctggaacatcaccaccatcaccatgtggagatcgacggcggcagccctatgtcgagcgcttccggcctaaggcgtggacatcccgcaggaggtgaggaaaatatgacggagaccgatgcattctataagcgagagatgtttgatccagcagaaaaatacaaaatggaccatagaaggagaggaattgccctcatcttcaatcatgaacgctttttttggcacctgaccctgcctgaacgaagagggacctgtgccgatcgggacaaccttactaggcgattttctgacctgggatttgaggttaaatgctttaacgacctaaaagcagaagaactcttgttaaaaatccatgaagtatctaccgtaagccatgctgacgcagactgttttgtgtgtgtcttcctctctcacggtgagggaaatcatatttacgcctatgatgccaagatagagatccaaacactgactggactatttaagggcgataaatgtcatagtctggtgggtaagcctaagatctttattatccaggcctgccgggggaatcaacatgacgtccctgtcattccgttggatgtcgttgat

SEQ ID NO: 32439 - DNA, 900 bp, synthetic construct
  misc_feature 1..900: note = Description of Artificial Sequence: Synthetic coding sequence
  source 1..900: mol_type = other DNA
atggttgagatagacgccgccagcgtatatactctgcccgctggcgccgatttcttgatgtgctactctgtggccgaaggatactatagccatcgagagactgtcaacggctcatggtacattcaggatttatgtgagatgctggggaaatacgggagcagcctggaatttaccgaactgctgactctggtgaaccgtaaggtgtcccagcgacgggtagatttctgcaaagatccctccgcgattggcaagaaacaagtgccatgctttgcatcgatgctcaccaagaagttgcatttctttcccaaatccaacttggaacatcaccaccaccatcatgtggaaattgatgggggttccccgatgtccagcgcttctggtctgcgacgaggccatcccgcagggggcgaagaaaatatgaccgagacagacgccttctacaaaagggaaatgtttgatcctgctgaaaagtataaaatggaccatcggcggcgaggaattgcgctaatttttaatcacgaacggtttttttggcacctgaccctccctgagagaagaggtacatgcgcagatcgcgataaccttacccgtcgctttagtgatttgggatttgaggtcaaatgctttaatgatttgaaagctgaggagctgcttctcaaaatccacgaggtgtccactgtgtcacacgctgatgcagattgttttgtctgcgtattcctcagtcacggcgaaggaaaccacatatatgcctatgacgcaaagatagaaattcagaccctgacgggtctgttcaaaggcgataagtgccactccctcgtaggcaagccaaagatatttattatccaggcatgcagaggcaaccagcacgacgtaccagtgatccctttagacgtggtggat

SEQ ID NO: 32440 - DNA, 900 bp, synthetic construct
  misc_feature 1..900: note = Description of Artificial Sequence: Synthetic coding sequence
  source 1..900: mol_type = other DNA
atggtggagatagacgccgcctccgtgtatactttacccgccggcgctgattttcttatgtgctattcggtcgccgaaggctattattctcaccgggaaacagtgaacggctcatggtacatccaggacctttgcgaaatgctcggcaagtacggcagctctttagagttcactgagctgctgacccttgtgaatcggaaggtttcacagcgtagagtagacttctgcaaagatccttctgctatagggaagaaacaggtaccatgcttcgcgtctatgttgaccaagaagctgcactttttccctaagtctaatctcgagcaccaccaccatcatcatgtagaaattgatggcggttctcccatgtcttcagcctcaggccttcgccgagggcacccagctggtggagaggaaaatatgacagaaactgatgccttctacaagcgtgagatgttcgacccagcagaaaagtataaaatggaccaccgacggcgaggtatcgcgttaatttttaatcacgagaggttcttttggcacctcacactccctgagaggcgcgggacctgcgcggaccgcgacaatctaactcggcgattctccgaccttggatttgaggttaaatgcttcaacgatttaaaagccgaggagcttctactcaaaatccacgaggtttctactgtttctcacgccgatgctgactgttttgtgtgtgtcttcctgagtcatggcgagggaaatcatatctacgcctacgatgccaagatcgagatccagactctaacgggcttgttcaagggggacaaatgccatagtcttgtgggcaagccgaagatcttcattatccaggcttgcagggggaaccagcacgacgtgccagtgattccgctggatgtggtcgac

SEQ ID NO: 32441 - DNA, 4098 bp, synthetic construct
  misc_feature 1..4098: note = Description of Artificial Sequence: Synthetic coding sequence
  source 1..4098: mol_type = other DNA
atgttgtcctttgtcgacactagaacgctgctcctgcttgctgtgaccctgtgcctggcaacttgccagagcctgcaagaagaaaccgtccggaagggaccggcaggggaccggggacctcgcggtgaacgagggcccccaggccctcccggcagagatggagaagatgggccaactggtccaccgggacctcctggaccgccaggaccgcctggcttgggaggaaacttcgccgcgcaatacgacggaaagggagtggggctcggccctggaccgatgggactgatgggaccgagaggcccccctggggctgcaggtgcgccgggtccccagggttttcagggacctgcgggagagcctggtgagccgggacagaccggacctgccggggctcgggggcctgccggaccgccagggaaggcgggtgaagatggacacccgggcaagccaggcaggcctggcgagcgcggagtggtgggaccgcaaggagctcgcggcttccccggaacgccaggactcccaggcttcaaaggtatccgggggcacaacggactggacggacttaagggtcaaccaggagcaccgggtgtgaaaggagagcctggcgcaccaggagagaacggcaccccaggacaaaccggcgcgagaggactgccaggcgaacgcggccgagtcggagcgcctggtcccgcgggagcaagagggtcggacggctcagtgggcccggtcgggccagcagggccgatcgggtcggccggaccacctggttttcccggggccccagggccgaagggagaaattggagcggttggcaacgcggggcccgctggacctgctggacctcggggagaggtgggtctgccgggcctcagcggcccagtgggaccccccggaaatccaggcgccaacggcctcaccggcgcaaagggcgctgccgggctgcctggagtggcgggggctccaggtctgccgggaccaaggggaatccccggaccggtcggcgccgcaggagctaccggagcccgcggactcgtgggcgaaccgggacctgctggttctaagggagaatcaggaaacaaaggagaaccaggatccgcaggtccgcaagggccgcctggtccctccggcgaagaaggaaaacgcggacctaatggagaagccgggtccgctggaccacccggtcctccgggactgaggggatcacctggatcgcgcggtctgccgggggccgacggacgcgcaggcgtgatgggcccgcctggttccagaggggcttccgggcctgcgggtgtgagaggaccgaatggagacgccggccggcctggggagccagggctgatgggacctaggggtttgcctggatcgccgggtaatatcggccccgccggtaaggagggcccggtgggattgcccggaatcgacggcaggccaggaccaatcggccctgccggagctcggggggagccaggaaatatcggattcccgggtccaaagggtcctacgggtgacccaggaaagaacggcgacaaggggcacgccggactggccggtgcgcgcggagcgcccggacctgacgggaataacggcgcacagggaccccctggtccacagggagtgcagggcggaaagggcgagcagggaccgccaggtcccccgggatttcagggactcccaggacccagcgggccggcaggggaggtcggcaagccgggggaacggggacttcatggagagttcggactgccaggtccagccggtccccggggtgagaggggaccaccgggcgagagcggcgcagccggacctaccgggccgattgggtcgcgcgggccgtccggccctccagggcccgacggaaacaaaggggagccgggggtggtcggtgcggtgggcactgccggtccgtcggggcccagtggtctgccaggagaacggggggctgcaggaatcccaggcggcaagggagaaaagggcgagccaggcttgcgaggcgagatcggaaacccgggtcgggacggcgccaggggtgcgcccggtgcagtgggagcacctgggccggcgggcgcgactggcgataggggggaggcaggcgcagccggccctgcgggcccagcggggccccgtggaagcccgggtgagagaggggaagttggaccggcaggccctaacggtttcgcgggtccggctggcgcagctggacaaccaggtgccaagggtgaacgcggagccaaagggccgaaaggcgaaaacggcgtggtagggccgaccggaccagtcggagcagctggaccagctgggccgaatggtccacctgggcccgccggaagccgtggagacgggggcccgccaggaatgaccggattccctggggcagccggacggactggtcctcccggcccttctggaatctcagggcccccggggccgccaggacccgcaggaaaggaaggcctccggggcccacggggggaccagggtccggtgggacgcaccggggaggtgggagcagtggggcctccggggttcgccggagaaaagggacccagcggcgaggcaggaactgccggacccccgggaacccctggaccgcagggactcttgggagcgccgggtatcctcggccttccggggagcaggggcgaacggggactcccgggtgtcgccggggcggtcggagaaccaggcccgctcgggatcgccggaccgcccggggcgaggggccctccgggcgccgtgggctcgcctggggtgaatggagcccctggagaggctggaagagacggaaacccaggcaacgatggcccgcccggtcgcgacggacaaccagggcataagggcgagcgcggttacccgggcaacatagggccggtcggagcggccggtgcccccggcccgcacggacccgttggtcctgccggaaaacatggaaatcgcggtgaaaccggaccgagcggacctgtggggccggcgggagccgtggggccacggggtccttcgggtcctcaggggatcagaggagacaaaggcgagcctggcgaaaaaggaccgcgggggctgccgggcttgaaaggacataacggactccagggactgccaggaatcgctggacatcacggcgaccaaggagccccaggaagcgtaggacctgcaggcccacgcgggcctgcagggccttcgggcccggctggcaaggatggacgcaccggtcatcccggcactgtcggcccggccggtattcggggaccccagggtcaccaagggccggcgggtccgcccggcccaccagggcctcctggcccacctggggtgtccggaggcggatacgatttcggatatgatggcgatttctacagagcagatcagcccagatccgctccctcacttaggccgaaggactacgaagtcgatgcgactctgaaatcgctcaacaatcaaatcgaaacgcttctcactcctgaaggatccagaaagaacccagcaagaacttgccgggacctgcgcctgtcgcacccggaatggtcctccggatactactggatcgatcctaatcaaggctgcactatggatgcgatcaaggtttactgtgatttctcgactggagaaacctgtatcagagcccagcccgagaacatcccggctaagaattggtacagatcatccaaagacaaaaagcacgtctggctcggagaaacgattaatgctggatcacagtttgagtataacgtggagggtgtcacctccaaggaaatggccactcagctcgcattcatgaggctgctcgccaactacgccagccagaatatcacctaccactgcaaaaactcgatcgcgtacatggatgaagaaactggaaatctgaagaaggccgtcattcttcagggcagcaacgacgtggagctggtggccgagggcaactcgaggtttacctacactgtgctggtcgatggatgttcaaaaaagactaacgaatggggaaagacgattatcgagtacaagaccaacaagccgtcgcggctgccgttcttggacatcgcaccgctggatattggaggggccgatcaggaattcttcgtggacatcgggccagtgtgcttcaag

SEQ ID NO: 32442 - DNA, 4098 bp, synthetic construct
  misc_feature 1..4098: note = Description of Artificial Sequence: Synthetic coding sequence
  source 1..4098: mol_type = other DNA
atgctgtccttcgtggacacgcgcaccctgctgctcctggctgtcaccctgtgcctggcaacttgccaatcgcttcaggaggaaactgtgcggaaaggaccggcgggggataggggtccacgcggagagcgcggaccgcctgggccgccgggacgcgatggagaggacggaccaaccggtccaccggggccaccaggacccccggggccgcctgggttgggaggcaacttcgctgcccaatacgacggaaagggcgtgggccttggccccggacccatgggccttatgggaccaaggggacctccaggagcggcaggggccccgggccctcaaggttttcaaggaccggcaggcgaacctggcgagccaggacagactggtcctgccggagcccgcggaccagccggaccgccgggtaaggcaggagaagatggacaccctggcaaaccaggacgcccgggcgagagaggagtggtgggaccacagggcgcccgcggtttccccggtaccccaggattgccggggttcaaaggaatccggggacataacggactggacggattgaaaggccaaccgggagcgcccggagtgaagggagagccaggcgcgccgggcgaaaatggtaccccgggtcagaccggcgcccgtggactgccgggggaacggggacgggtgggtgcacctggccctgccggggcgcggggctccgacggatccgtgggcccggtcggccccgcaggaccgatcggatcggctggaccgccaggatttcccggagcgccgggaccgaagggggaaattggagccgtcggtaatgccggcccagctggtccagctggtcctcgcggtgaggtgggcttgccaggcctgagcgggccagttggtccgccaggaaacccgggcgcaaatggactcactggcgctaagggagctgcggggcttccgggtgtggctggagcgccgggtctgcccggaccacgaggtatcccaggtccagttggagcggcgggagccaccggagcgagaggactcgtcggagaaccgggacctgccgggtcgaagggcgaatcggggaataaaggggagcccggctcggcgggtcctcaaggcccgccagggccatccggggaggaaggaaagcggggcccaaacggggaggccggcagcgcgggtccaccgggtccgcccggactcagaggatctcctggcagccggggcctgccgggagcagatggacgcgcaggagtgatgggtcccccggggagcaggggagcatcggggccagctggagtgcgcggaccgaatggagacgcgggacgcccaggggaacctggtttgatgggaccacgcggcctccccggctcgcccggtaatatcggcccagccggaaaggaaggacctgtgggtctgcctggaatcgacggccgaccggggcccatcggaccggccggagcgcgtggggaaccaggtaacattggtttccccggaccgaaaggacctactggcgatccgggaaagaatggcgacaagggacatgcggggctcgctggggcgcgcggggcccctggacctgacgggaataacggggcgcagggtccacctgggccacagggcgtccagggaggaaaaggcgaacagggcccgccgggacctccgggattccaggggctgccaggtccatccggaccggcgggtgaggtggggaagcctggcgagcgcggtttgcacggggaatttggtttgccgggccctgcaggcccgcgcggagaaaggggcccgccaggcgagagcggcgccgccgggccgactggcccaatcggatcgcgcggaccgagtggtccgcccggcccagatggaaataagggtgaacctggagtggtcggagccgtgggaaccgcgggaccgagcggaccgtcaggtctgcccggggagcggggagcagccggaatcccgggaggcaagggagagaaaggggagccgggcctgagaggggagatcggaaaccctggacgcgatggcgcccggggggctccgggagcagtgggggcccccggtccggcaggtgcgaccggagatcgtggagaggccggggccgcagggccggccggtcctgccggcccgaggggatcaccgggcgaaaggggtgaagtgggacctgcgggccctaacgggtttgccggtccagcgggcgcagccggccagccaggggccaagggagagcgcggtgcgaagggccctaaaggggaaaatggtgtcgttggcccgaccggccctgtcggagccgctggtccagcagggcctaacggtccccctggccccgccggaagccgcggtgatggagggccgcccggcatgaccggtttccctggcgctgccggacgtacgggcccgcccggtccatccggcatttccgggccccctgggccacccggtccggcgggcaaggagggcctgaggggccctagaggcgatcagggcccggttgggagaactggggaagttggcgcggtgggtccgccgggattcgccggagagaaggggccatcgggggaagcaggaaccgccggacccccgggtactccgggacctcaagggctgctcggcgccccgggcatcctgggactcccaggaagccgcggcgaacgaggcctgcctggtgttgcgggcgccgtcggagagcctgggccactgggaatcgctggaccgcccggggcacggggccctcctggagcagttggtagcccgggggtgaacggagccccaggagaagctggccgggacggaaaccccggaaacgacggacctcccggacgggatggccagcccggacacaagggcgagagggggtatcccggaaacatcggacctgtcggagcggctggagcacccggaccgcacggaccggtggggcccgcagggaaacacggcaatcgaggagaaaccggcccgtccggtccggtcggacccgccggcgcagtgggtccgagaggcccatccgggccgcagggtatccggggggacaaaggagaaccaggggaaaaggggccgagggggcttccagggctcaagggccacaatggcctgcaaggtctgccggggatcgccggccaccatggagatcaaggggctccgggttcagttggcccagcggggccacggggacccgcaggcccttccggcccggctggaaaagatggaagaactggccatccgggcacggtagggccggcgggcatccggggaccgcaggggcaccagggaccagcaggaccaccggggccccctggaccacctggacctcctggagtgtccggaggaggctacgactttggctacgacggagacttctatagagctgaccaacctagaagcgcgccgtccctgcgcccgaaagactacgaagtcgatgccaccctgaagtctctcaacaaccaaatcgagactctcctgaccccagagggctcacggaagaacccggcccggacctgccgcgacctccgcctgtcgcatccagagtggtcgtcgggatactactggatcgaccctaatcaagggtgtactatggacgcgataaaggtttactgtgatttcagcactggagaaacgtgtatcagggctcagccggaaaacatcccagccaaaaactggtacagatcctcgaaggataagaaacacgtgtggcttggagaaaccatcaacgctggctcgcagttcgaatacaatgtcgaaggggtgacttcaaaggagatggcaacccagctggcgttcatgagactgctcgccaactacgccagccagaacatcacctaccattgcaagaactcgatcgcatatatggacgaagagactggaaacctcaagaaggcagtcatcctccagggaagcaacgatgtcgaactcgtcgctgagggaaattcccgcttcacttacactgtcctcgtcgacgggtgctcaaagaaaacgaatgaatggggtaagaccataatcgagtacaagaccaacaagccgagccgactgcctttcctggacattgcccctctcgacatcggtggagcagaccaggaattctttgtggacattggacctgtgtgcttcaag

SEQ ID NO: 32443 - DNA, 4098 bp, synthetic construct
  misc_feature 1..4098: note = Description of Artificial Sequence: Synthetic coding sequence
  source 1..4098: mol_type = other DNA
atgttatcattcgtggatacccgtacccttctgctcctggccgtcactttgtgtctggctacgtgccagagtctgcaggaggagacagtcaggaaaggtccagccggggatagagggccccgaggcgaaagagggccccccggccccccagggagggacggggaggacggaccgactggcccccctggccccccaggccccccgggaccacctgggctgggaggaaattttgccgcacagtatgatggtaagggcgtgggactcggacccggacccatgggccttatgggccctagaggtccacctggagccgccggcgcgcctgggcctcagggattccagggcccagcgggtgagccaggtgagccagggcaaacaggacccgctggagctaggggccctgccggtcctcctgggaaggcaggcgaggacggccaccctggtaaacccgggagaccgggagagcgcggcgtggtgggaccccagggggccaggggctttcccggaaccccaggtttgcccggtttcaagggcattagggggcacaatggtttggatggtttaaaaggacagcccggagcacctggagtaaagggagagccaggtgcgcctggagaaaacgggactcctggacagactggcgcgaggggtctgcccggggagcgaggccgagtcggtgcccctggccctgccggggcccggggttctgatggtagcgtcggccctgttggacccgcgggcccaatcggatctgccggcccccctggtttccccggagcacctgggcctaagggcgaaataggagcagtggggaatgctggccctgcaggcccagccgggccacggggcgaggtgggtctgccggggttgtctggcccagttggcccgcccgggaatcccggcgctaatgggctaacaggggccaagggggctgctggactccctggcgtggcaggggcaccgggcctccccggtccccgggggatccccggccctgtcggagccgccggggctaccggagctagaggtctggtgggtgaacctggaccagccgggtctaagggcgagtccggaaataaaggagagcccggcagcgctggaccccaaggcccacccggaccgagcggggaggaggggaaacggggtccaaacggggaggcaggaagtgccggaccacccggaccccccggactccgagggagtcccgggagcaggggactgccaggcgctgacggacgcgccggggtgatgggtccccccgggtcccgcggcgcaagcggccccgccggtgtgcgggggcctaacggggacgctggtagacccggtgaacctgggttgatgggacctcgggggctcccaggatcccccggcaacataggccccgctgggaaagaggggcccgttggactcccaggaattgatggacgccctggacctatcgggccggccggggctagaggcgaacccgggaacattggctttccgggccccaagggcccaacaggggaccccggcaaaaatggggacaaaggccacgccggtcttgccggagcccgcggggccccagggccggatggcaacaacggggcgcaggggcccccaggacctcagggcgtgcaagggggaaagggtgaacagggcccccctggaccgccaggctttcaagggttgcccggcccctccggcccggcaggggaagtggggaaacctggagagaggggactccacggcgaattcggccttccagggccagcgggtccacggggcgagcggggtccacccggcgaatctggggccgccggtcccactggcccgatcggcagcaggggacctagtggccctcctggcccggacggcaacaagggcgaacctggggtagtaggggccgtggggactgccggcccctcggggcctagcggactccctggagaaagaggagctgctgggatcccaggcggcaaaggcgagaagggtgagccgggcctgcggggtgaaattggaaatcccggcagggacggagctcggggcgcccccggtgcagtaggtgctcccggaccagcaggggctacgggcgatagaggcgaggcaggggctgcaggccccgccggccctgccgggcctcggggaagtcctggagaacgcggcgaggtgggccccgccggccccaatggattcgcaggaccggccggtgccgccggtcagcccggcgccaagggcgaacggggagctaagggccccaagggcgaaaacggggtcgttggcccaacaggcccggtgggagccgctggccccgctggcccaaacgggcctcctggacccgcgggcagtagaggagacgggggaccaccaggaatgacggggtttcctggggcggcaggaaggaccgggccccccggaccatcaggcatttcggggccgcccgggcctccaggcccggccggtaaagaggggctgcggggaccgagaggggaccaggggcctgtggggcggactggagaagttggtgcggtcggaccccccggattcgcgggggagaagggccccagtggcgaggccgggaccgccggtccccctggaacacctggacctcagggactcttgggagcaccaggaatacttggactgcctgggagcaggggggagcgcggtttgccaggcgtcgcaggcgcagtgggtgagccaggtccccttggaattgccggaccccctggagctagaggccctcccggggccgtgggctctccgggagtgaatggggcccccggcgaggccgggcgcgatggaaaccctggcaatgatggccccccaggccgagacgggcagcccggtcataaaggagaaaggggctatcccgggaacataggccctgtgggggcagccggggcaccagggcctcacggccccgtggggcctgccggcaaacacggcaaccgcggcgaaacaggcccctccggcccagtgggccccgccggagctgttggtcctcgtggcccatccggcccccagggaataagaggggacaaaggtgagcccggcgaaaaaggcccaagaggccttccaggcctgaaaggtcataatggattgcagggactacctggtattgccggtcatcatggcgaccagggggcccccgggagtgtggggcccgctggcccgagaggccccgccggcccctctggccccgcaggcaaggatggaaggactgggcatcccggtacagtgggacccgcgggaatccgggggcctcagggccatcaaggaccagccggaccaccaggcccgcctggaccacctggaccacctggcgtttcagggggcggctatgacttcggttacgatggtgacttttatagggccgatcaaccccgctccgctccatcccttcggccgaaggattacgaggtcgatgccacgctgaagtctcttaataaccagattgagaccttgctgacaccagagggctctagaaaaaaccctgccagaacatgccgagaccttcgtctgagccaccccgagtggtcaagcggctattactggattgaccctaaccaaggctgtactatggacgccattaaagtatactgtgacttttctactggtgagacttgcattagggctcagcctgagaatatacctgcgaagaactggtaccggtccagtaaagacaagaaacacgtttggctcggtgagacgatcaacgcaggaagccaattcgaatacaatgtcgagggggtcacaagtaaagaaatggctactcagctcgcctttatgcggttactggctaattatgcttcacagaatattacatatcattgcaagaacagtatcgcctacatggatgaggagaccggcaaccttaaaaaagccgttatcctccaaggcagtaacgatgttgagcttgtagctgagggcaattcaagattcacctatacagtattggtggacgggtgcagcaagaagaccaatgagtgggggaagacaatcattgagtataagactaacaagccatctcgcttaccatttctggacatcgccccgctcgatattgggggggcggatcaggaattctttgtggatattggaccagtctgcttcaaa

SEQ ID NO: 32444 - DNA, 4098 bp, synthetic construct
  misc_feature 1..4098: note = Description of Artificial Sequence: Synthetic coding sequence
  source 1..4098: mol_type = other DNA
atgctgtcgtttgtggacacacgcacgttattgttactggcagtgacgctctgcctggccacctgccaaagtttgcaggaagagacggtgagaaaggggcccgccggagatcgcggcccccgaggcgagagaggaccgccaggccctccaggcagggacggggaggacggcccgacagggccacccggacctcctgggcctcccgggccaccagggctcggaggcaacttcgctgcccagtacgatggcaaaggcgtggggctgggtccaggccccatgggactgatggggccccggggcccgcctggcgcagccggcgctccaggtcctcagggatttcaaggcccagctggtgagcccggcgaaccaggacagactggacccgccggggcccgcggccccgctgggcccccaggcaaggctggtgaagatggtcatcccggcaaaccaggcaggccgggggagagaggggttgtggggcctcagggcgcccgcggttttcctggaacgcccgggttgcccgggttcaagggaatcagagggcacaatgggctcgatggtcttaagggccaacctggcgcgcctggagtaaaaggtgagcctggggccccaggcgagaatgggacaccaggtcaaacaggggccagagggcttcctggggaacggggaagagtcggtgctcccggtcctgccggagccagagggtctgatgggtccgtgggtccggtcggcccagcaggaccaataggcagcgctggccccccgggattccccggagcccctggccccaagggcgagatcggtgccgtgggcaacgccggtcctgccgggcccgctggtcccagaggtgaagtcggcttgccaggcctctccggtcctgtcggccctcctggcaacccgggcgccaacgggcttactggagctaagggcgcggccggattgcccggcgtggcaggggcgcctggccttcctgggcccagaggaatccctggtcctgtgggggccgcaggcgcaactggcgcaaggggattggtgggagagcccggacctgccggaagtaaaggggagagtggcaacaagggagagcctggatccgctgggccccagggaccgcccggcccgtccggcgaggaaggaaaacggggtcctaatggcgaagcaggttctgcaggccctccgggaccccctggcctgagaggttcacccggatctcgaggattacccggcgctgacggcagagctggggtgatgggccccccaggctctcgaggcgcatccggccccgctggggtcaggggcccaaatggagacgcgggcaggcctggggaaccggggctgatggggccccgcggcctgcccgggtctcctggcaacattggcccggctggtaaggagggcccagtaggattgcctgggatagacgggagacctggacccatcggccccgctggggctcgaggtgagcctggcaacatcgggttcccaggacctaagggccccactggggacccaggcaagaacggcgataagggccatgcgggattggccggagcgcgcggggcgccaggacccgacggtaacaacggcgctcaaggaccgccagggcctcaaggggtgcagggcgggaagggtgaacagggaccacctggtcccccaggtttccagggattaccaggaccatctggccccgcgggtgaagtggggaaaccgggggagcggggtttacatggcgaatttggccttcctggccccgccggacccagaggtgaaaggggcccgccaggagaaagcggggctgccggacccactggccccatcggttcccggggcccctccgggccccccggaccagacggtaacaaaggagagcctggtgtagtcggagcagttggcaccgccgggccgtccggccccagcgggctgcccggagagagaggagcagccggaattcctggaggtaagggagaaaagggggagccaggactgagaggcgaaatcggaaaccctggacgcgacggtgcccgaggtgcccccggggccgtgggagcacccggacctgcgggcgctactggcgatagaggagaggccggcgcagccgggccggccggtcctgccggtccaagaggctctccgggcgagaggggcgaagtgggacctgcgggtccaaacggctttgcagggccagcaggagctgctgggcagcctggagcaaaaggggagcgaggtgccaaagggcccaaaggcgagaacggtgtcgtcggcccaaccggtcccgtcggcgcggcggggccggcggggcctaatgggccacctggccccgccggttcaagaggagacggcggaccacctggcatgactggattccctggcgcagccggacgcaccggaccacccggaccatctggtattagtgggccccctggcccccctggccccgcgggcaaggagggtctccgtggaccacgaggtgaccagggccctgtgggcaggaccggggaggtaggcgccgtcgggccccctggatttgccggagaaaaaggcccttctggagaagctggaactgctggccctcctgggaccccaggtcctcaggggctgctgggggcccccgggatcctggggctccccggatcacgcggtgaaagggggttaccgggggtcgcaggagctgtgggggagccggggccgctgggcatcgccggaccaccgggcgcccgggggcctccgggcgcagtgggaagcccaggtgtgaatggggcaccaggagaagccggccgggacggcaaccccggaaatgatgggccccccggccgggacggccaacctggtcacaagggcgagaggggatatccaggaaatatcgggcccgtgggggctgccggagcacccggcccccacggccccgtgggccccgcggggaaacacggtaaccgaggcgagacggggccatcaggacccgtggggcctgcgggagctgttggtccccggggccccagtgggcctcaaggcatacgcggggacaagggcgaaccgggcgagaagggaccccgggggttacccggccttaagggacacaatggactccaaggcctacctgggattgcagggcatcacggagaccaaggtgctcccggcagcgttgggccagctggcccccggggtcctgctggacccagcggcccagccgggaaagatggacgaacaggtcaccccgggaccgtgggccccgcgggcatcagaggaccacagggacatcaagggccagccggaccgcctggccccccaggaccacccgggccacctggtgtgtcaggaggtggctatgactttggctacgatggggacttttatagagccgaccagcctagaagtgccccctcacttaggccaaaggactacgaggttgacgccactctaaagagtttgaacaatcagatcgaaaccctgctgacccctgaagggtcccgcaagaatcctgccagaacctgccgagacctaaggctaagtcacccggagtggtccagcggctattactggatcgacccaaaccagggctgcactatggacgccattaaagtgtactgtgacttcagtacaggcgaaacttgtattcgggcccagccagagaatatacctgcgaaaaattggtataggtcctccaaagataagaagcacgtctggctgggtgagacgattaacgccggatcgcaattcgagtataacgtcgagggcgtcacaagcaaagaaatggctacccagctggccttcatgcgccttcttgccaactacgcttctcagaacattacttaccattgtaaaaattcaattgcgtacatggatgaggagaccggaaaccttaagaaagccgtaatcctccagggttcgaatgacgtggagctggtggccgaggggaacagtcgtttcacgtacaccgtgctggtggatggctgttctaaaaaaaccaatgagtgggggaaaacgattattgaatacaagacgaataaaccgtccaggctccctttcctcgacatcgcgccactagacatagggggcgctgatcaggagttcttcgtggacataggtcccgtatgctttaaa

SEQ ID NO: 32445 - DNA, 4098 bp, synthetic construct
  misc_feature 1..4098: note = Description of Artificial Sequence: Synthetic coding sequence
  source 1..4098: mol_type = other DNA
atgctgtctttcgtcgacacacgcaccttgcttctcctggccgtaactctgtgtctggctacctgtcagtccctgcaggaggagaccgtgaggaagggccccgcaggtgataggggcccacgcggcgagaggggcccccccggtccacccggcagagacggtgaagatggtcccaccggccccccaggccctccaggccctcccggtccacctggactgggcggtaatttcgctgctcagtatgacggaaagggcgtaggtctcggtcctggccccatgggcctgatgggacccaggggccctcccggtgcagcaggtgcacccggacctcagggtttccagggtcccgctggtgagcccggtgagcccggccagacaggcccagcaggtgcacgcggtcccgctggccctccaggtaaggccggcgaggacggccatccaggtaaaccaggtcgtccaggcgagaggggtgtagtaggcccacagggtgctcgtggtttcccaggtacccccggactgcccggtttcaaaggcatcaggggccataatggcctcgacggcctcaaaggccaacctggagctcctggcgtgaagggtgaacctggcgcccccggtgagaacggcaccccaggccagaccggcgcccgcggattgcctggagaacgtggacgcgtcggtgcacccggacctgcaggagccaggggatccgacggctcagtgggcccagttggaccagccggccctatcggttccgctggaccccctggcttccccggtgctccaggccccaaaggagagataggcgccgtcggaaacgctggacctgctggacctgccggacctaggggtgaggttggcctgcccggcctttccggacctgtgggccctcctggcaaccctggcgccaacggtctgactggcgctaaaggcgctgccggtcttccaggtgtggcaggagctcctggactgcccggcccaaggggtatccccggtcctgttggtgctgcaggcgctaccggagcaagaggtctggtgggcgagcctggtcccgctggctctaaaggagagagcggcaacaaaggagaacccggctccgccggtccccagggacctccaggtccttcaggtgaagagggcaaacgtggacctaatggcgaggccggatccgccggccctcctggtccacctggattgaggggctcccccggcagcaggggactgccaggagctgatggacgtgctggcgtgatgggcccccctggcagtaggggcgcttccggtcccgctggcgtgcgcggaccaaacggcgatgctggtcgtccaggagagcctggtttgatgggccctcgcggcctgccaggtagccctggtaacatcggtccagccggaaaggaaggacctgtcggtttgccaggtattgacggccgtccaggtcctataggtcctgcaggtgcaagaggtgaacctggaaatatcggatttcctggcccaaagggtccaaccggcgatcctggaaagaatggcgataagggtcacgctggactggccggagcccgtggagcccccggacctgacggaaacaacggagcacagggaccacccggtccccaaggtgtacagggcggaaaaggtgaacaaggccctcctggacctcccggcttccagggcctgccaggtccatctggacctgccggcgaagtcggcaagcccggagaacgcggcttgcacggtgagtttggtctccccggccccgcaggacctaggggcgaacgtggaccccctggtgaaagcggcgctgctggccccaccggccccatcggatcccgtggaccatctggacctcccggaccagatggaaataagggcgaacccggagtcgtgggagcagtgggcaccgccggcccttccggacccagtggtttgcctggtgagaggggcgctgcaggtattcccggaggcaaaggcgagaagggtgagcctggcctgcgtggtgaaatcggtaatccaggcagagatggtgctcgcggcgctcctggagcagttggagcaccaggaccagctggagccacaggcgaccgcggtgaggccggtgctgccggccctgccggacctgccggtcctaggggttcccctggcgagagaggagaggtgggacctgctggacctaacggctttgccggcccagccggagcagccggacaacccggtgcaaagggcgaaaggggcgctaaaggacccaagggtgagaacggtgtggtcggccccactggcccagtcggagccgctggaccagctggtcctaatggtcctcctggacccgctggcagtcgcggcgacggcggtcctcctggcatgaccggtttccctggagcagccggtcgcacaggtccacctggaccctctggaataagcggccccccaggtcctcccggtcctgctggcaaagagggattgaggggccccagaggcgatcaaggtccagtcggtcgcacaggagaagtcggtgctgtaggacccccaggcttcgctggcgagaagggaccctcaggagaggcaggtactgctggaccacccggtacccccggcccccagggtctcttgggtgcccccggcattctgggtttgcccggttccaggggtgagcgtggtcttcccggagtggccggcgcagtaggtgagcctggcccccttggtatcgccggtcctcctggcgctcgcggtccaccaggagctgtgggctcacctggcgtcaacggtgccccaggcgaagccggcagagatggtaatcccggaaatgatggccctccaggtagagatggtcagcctggccataaaggagaacgtggttacccaggcaacatcggccctgtcggtgccgctggtgcccctggcccccacggtcccgtcggccctgccggcaaacacggaaaccgcggtgaaaccggtccatctggtccagtgggtccagctggtgcagttggtcctcgtggcccatccggccctcagggaatcaggggtgataaaggcgagcccggagaaaagggccccagaggtctccccggactcaagggtcataacggactgcaaggcctgcccggtatcgctggacaccacggtgatcaaggagctcccggctctgtaggccctgcaggaccaagaggtcctgctggccccagcggtcctgctggtaaggacggcagaaccggccaccctggaactgttggccccgccggaattagaggaccacagggccatcaaggaccagcaggcccccccggaccacccggcccacccggacctcccggcgtatctggcggtggctacgacttcggctacgatggcgacttctacagagcagatcagcctagatccgccccttcattgcgccctaaggactacgaggtggacgctactttgaaatccttgaacaaccaaatcgagacactgcttacacctgaaggttctcgcaagaacccagctcgtacctgtagggacctgaggctgtctcaccccgagtggagttccggatactattggatcgaccccaatcagggttgtaccatggatgccattaaggtgtactgcgatttttcaactggagaaacctgcataagggcccaacccgaaaatattcctgccaagaattggtaccgctcttcaaaggataaaaagcatgtgtggctcggcgaaactattaacgccggaagccagttcgagtacaatgttgagggcgttactagcaaggagatggctacccagcttgccttcatgaggctgctggccaattatgctagccagaacatcacctaccattgcaaaaacagcattgcttacatggacgaggagacaggcaatctgaagaaagccgttattctgcagggctctaatgacgtcgaattggtcgctgaaggtaacagcaggttcacttacacagttctggtcgacggctgctccaagaaaaccaacgagtggggtaagacaatcattgaatataaaaccaacaagccttccaggttgccttttctggatatcgcccctctggatatcggaggtgccgatcaagaattcttcgtggacattggacctgtctgttttaag

SEQ ID NO: 32446 - DNA, 4098 bp, synthetic construct
  misc_feature 1..4098: note = Description of Artificial Sequence: Synthetic coding sequence
  source 1..4098: mol_type = other DNA
atgctgtcttttgtcgacacacgtactcttctattactggctgtgacactgtgcctcgccacatgtcagagtctccaggaggaaaccgtgagaaaaggcccagccggggatcgagggccacgcggcgaaagggggccccccggccccccaggccgcgacggcgaggatggacctaccggccctcccggccctcccgggccacctggccctcctgggttgggagggaactttgcagcccaatatgatggaaaaggagttggcctaggcccagggccaatgggactgatggggccacgtgggccccccggggccgccggtgcacctggcccacagggctttcaagggcctgcaggggaacctggggaacctggtcagactggccctgctggggccagaggcccagccggcccaccaggtaaggccggcgaagatgggcacccaggcaagcccggtcgaccaggcgagagaggagtggtggggccccagggtgcacgcggctttcctggaactcctgggctgccaggattcaaaggcataaggggacataacggactggacggcctgaaagggcagccaggcgctcccggtgttaagggagagcctggcgctccaggtgagaatgggacacccggccagaccggagccagagggctacctggggaacgtggccgggtgggggcacctgggcctgctggcgctcgtggctcagacgggagtgtgggacccgtgggccccgcaggccctattggaagcgcagggccaccagggttcccaggcgcccctggcccaaagggcgaaattggggctgttggcaacgccggccctgcaggacctgctggccccaggggggaagttggcctgcccggcctgagcggacccgtggggccaccaggaaatcctggggctaatgggttaaccggcgccaagggtgctgctggcctgccaggcgttgctggagccccaggacttccaggccctcgcggaatacccggacctgttggcgcagcaggcgccactggagcccgcgggcttgttggggagccgggacccgcaggctcaaagggtgagtccggtaataagggcgagcccggctcagccggcccccagggacctccaggccccagtggcgaggagggaaagcgtgggcccaacggggaggccggtagcgccggccccccagggccccccggtctcagaggctccccaggtagccgaggactccccggcgctgacggcagggcaggcgttatgggaccccccggatccaggggggcaagcgggccggccggtgtcagaggtcccaatggcgacgctggtcggccaggcgagcctggattgatgggccctcgaggcctaccagggagtccaggcaatatcggccctgcaggcaaggaggggcctgtgggccttcctggcatagatggtagacccgggcctatcgggcctgcaggagctaggggggaacctggcaacataggatttccagggccaaagggacctaccggcgacccaggaaagaacggtgataagggacatgccggcctggccggggcacgcggagctccaggacctgatggcaacaacggcgcacagggccccccaggaccacaaggagtgcagggtggcaaaggggagcagggtccaccaggaccaccaggcttccaaggactgccaggaccctctggccccgctggcgaagtcggcaaacctggcgagcgggggctgcatggcgagttcggattaccagggcccgctggtccccgcggcgaacgcggacccccaggcgaatccggggcagctgggcccactggacctattggcagccggggtccttccggcccacctgggccagacggcaataagggcgaaccaggcgttgtgggggccgttgggaccgcagggccttccgggcctagtggactgcctggcgagagaggcgcagctggaattcctggtggcaagggagagaaaggtgaaccgggactgcgcggcgagatcggaaaccccggtcgcgacggcgccaggggagcccctggggctgttggcgctcctggccccgcaggcgcaaccggggatagaggagaggctggtgctgcaggccccgccggtccagcagggcctagaggttcacccggcgaaagaggtgaagtgggcccagccggtccaaacggctttgccggtcctgccggcgcagcaggccagccaggcgccaaaggcgagcgcggggccaaagggcctaagggcgaaaatggcgttgttgggccaacaggacctgtcggagccgccggtccagctggaccaaacggccctccaggacctgccggatcacggggcgatggtggtcctccaggtatgaccggctttcctggggctgccggaagaacaggcccacctggccctagtggcatctccgggcctcctgggccaccaggacctgccggcaaagaaggcctgagaggccctagaggagatcagggccccgtgggccggacaggcgaagtcggggccgttggaccccctggctttgcaggggagaagggtccctccggagaagctggaacagcaggcccacctgggactccaggcccccaaggtctgctgggggcccctggcattctcggacttcccggatcccgcggcgagcgggggctccccggggtcgccggggccgtgggcgaacctggccccctgggtattgccggtcctccaggagcccgtggacctcccggtgctgtgggctcacccggagtcaatggcgccccgggcgaagctggacgtgatggcaacccaggcaacgacggcccacccggtcgggacggccaaccaggccacaaaggcgagagaggctaccccgggaatattggaccagtgggggctgcaggcgcccctggaccacacggcccagtaggaccagccggcaaacatggcaataggggcgaaaccgggccctccgggccagtgggtcccgccggagcagtgggacctcgtggcccttccggaccacagggcatacggggcgataagggcgagccaggcgagaagggtcctagaggcctgcctggcctgaagggacacaacggccttcaggggcttccagggattgccgggcaccacggcgatcagggcgccccagggagcgtgggcccagccgggcctagagggcccgccggtcctagcggccctgctgggaaagatggaagaacaggccatccaggaacagtgggcccagcaggcatccgaggaccacagggccatcagggccctgcaggcccaccaggcccacccgggccacctgggccccccggcgtttccggcggtggctatgattttggctacgatggggacttttaccgcgccgatcaacccaggtccgccccctctctgcgtcctaaggactacgaggttgacgccactttaaagtccctcaataaccagattgaaacactgctcactccagagggttccagaaagaaccccgcccgcacatgccgcgatctccgtctgtcccatccagaatggtcctcaggctactactggattgatccaaatcagggctgcaccatggacgcaatcaaggtgtattgcgacttctctaccggcgaaacctgcatccgcgctcagcctgagaacattcctgcaaagaactggtaccgatctagcaaggataagaagcatgtttggctgggcgagacaataaacgccgggagccagtttgaatacaatgttgaaggggttacctcaaaggaaatggcaactcaactagcctttatgcgccttttagcaaattatgcatcacagaacatcacttaccattgcaagaattccatagcctatatggacgaagaaaccggaaatcttaagaaagcagtcatcctgcaaggcagtaacgacgttgagcttgttgctgaggggaactctcgttttacatatactgtactggtggacgggtgtagtaaaaaaaccaacgagtggggcaaaaccattatcgaatataagacaaacaaaccatcacgcctgccctttctggatattgcaccgctagacatcggcggcgcagatcaagagtttttcgtggatattgggccagtctgctttaag

SEQ ID NO: 32447 - DNA, 4098 bp, synthetic construct
  misc_feature 1..4098: note = Description of Artificial Sequence: Synthetic coding sequence
  source 1..4098: mol_type = other DNA
atgttgtcatttgtcgatacgcgcaccctgctcctgctagccgtgacactgtgtctggccacatgccagagcctgcaggaggaaacagtgaggaagggtccagccggtgacagaggccctcgaggagaacgaggtcctccaggaccgcccgggagagatggcgaggatggacccacaggtccacctggccctcccggtccacctgggccacccgggctgggaggtaacttcgctgcccaatacgacggaaaaggagtgggcttggggccgggtcccatgggactgatgggcccacgtgggccaccaggggctgccggcgcccccggacctcaaggattccagggaccagccggagaacctggagagccaggtcaaactggcccagccggagcgcgcggccccgctgggccgcccgggaaagcgggagaggatggacatccaggaaagccgggccgtccaggcgagcggggtgtggtggggccacagggggcgcgtggctttccggggacacctgggctcccggggttcaagggaatccgcggccacaacggccttgacgggctcaaaggacagcctggtgcacccggggtgaagggagagccaggtgctccaggagaaaacggcactccaggacaaacaggcgctagaggtctgccgggtgaacgagggcgcgttggggctcccggtcctgcaggtgctcgggggtcagacggttcagtcggacctgtgggccccgccgggcctattgggagcgctggcccgccaggattcccaggggctcctggccctaagggtgagattggggcggttggtaacgctggccccgctgggccagcgggccccagaggggaggttgggctgcccggattgagcggccccgttgggcccccagggaacccaggagcaaatgggttaacaggggcaaagggcgccgccgggttgcccggcgtagcgggtgcccctggacttcccggcccccggggaataccgggacccgtgggggctgctggcgcgacaggagcgcgcgggttagtaggtgaacctggtccggccgggtcaaaaggcgagtctggtaacaagggcgaaccaggctccgccggtccacagggaccaccgggacctagtggtgaggaggggaagagggggcccaacggagaggccggcagcgccggaccacccggaccgcctggcttaaggggctccccaggaagtagggggctcccaggcgctgatggtagggccggtgtcatgggcccaccgggtagtaggggcgcctccggccccgccggagtgaggggcccgaatggagatgcagggaggcccggggagcctggtttgatgggaccgcgggggctgccaggaagtccaggtaatatcgggcctgccggtaaagagggccccgtgggccttccaggaatcgacggaaggcccgggccaatcggaccggcgggggcaagaggagaacctggcaatataggtttccccggccccaagggccctacaggtgacccgggcaagaacggggacaaaggacatgctgggctcgccggtgctcgcggtgcccctggtcccgatggaaataatggagcacaggggccacctgggccgcagggcgtgcagggggggaaaggagaacaggggccccctggacctcctggatttcagggcctgccaggacccagcggacctgccggagaagttgggaagcctggagaaaggggactgcatggggaattcggtcttcctggtcctgccggccctcgcggagagaggggccccccaggcgagtccggggccgctgggcccaccggaccaatcggctcgcggggaccttctgggccccccggacctgatggaaacaagggggaacccggtgtggtaggcgcagtcggtaccgcagggccctccgggccaagtggactgccaggtgagcggggggcagctggaataccaggcggaaagggcgaaaagggtgagcctggtttgaggggcgaaattggaaacccaggtagagatggcgctaggggtgcgccaggcgcagtgggcgcacccgggccagccggtgccaccggggatcgcggcgaagccggcgctgcagggcccgctggacccgctggtcccagagggtcgcccggcgagaggggagaggttgggccagcggggcctaatggcttcgctggaccagccggagcagcaggccagccaggcgctaagggcgagcggggcgcaaaaggccccaaaggagagaacggggtagtggggcccacgggccccgtgggggctgcgggaccggctggacccaatggaccccccgggcccgctggatctcgcggagacggaggacctcctggaatgactggcttccctggcgctgccggacgcactgggccccctgggccttcagggatctctggtccgcccgggccgcctggcccagccggaaaggaaggcttgcgcggcccccgtggggaccagggccctgtgggacggaccggggaagttggcgccgttgggcctccaggttttgcgggcgagaagggccctagcggggaggccggtacagccggcccccccggtaccccaggacctcagggtctactgggtgctccaggcatccttggccttcctggaagcagaggcgagagaggcctgccaggagtggcaggtgcagtgggggaacctggccctcttgggattgcaggaccccccggagcccggggccctccaggggcagtcgggtcccctggggttaacggggcccctggggaggctgggagggatggtaacccgggaaacgatgggccacccggccgagatgggcagcctggccacaagggagagcgaggataccccggcaatatcgggccggtgggggccgcgggggcccctggtcctcatggccccgtgggcccagcagggaagcatgggaaccggggggagaccggtccctcaggaccagtgggacctgcgggcgctgtgggaccccgagggccctcaggccctcaggggattcggggcgataaaggtgagcccggagagaagggcccaagaggacttccagggctcaaaggacacaatggactccaggggctacccggaatcgctggtcaccacggagaccaaggcgctcctggatccgtcgggcccgccggcccccgcgggcccgctggcccaagtggacccgcagggaaagacggacgcactggacaccccggtactgttgggccggccggaatacgaggacctcagggccatcaggggcccgccgggccaccaggtccccctgggcctcctgggcccccaggggtgtctggcgggggctacgacttcggttatgacggcgacttttaccgggccgaccaacccaggtctgctccctccctcagacccaaggactatgaggttgacgcgaccctgaagagtctcaataaccaaatcgagaccctgctcacacctgaaggcagtcggaaaaaccctgctcggacttgccgcgatctaaggctctctcaccctgagtggagtagcggctactactggattgatcccaaccagggatgcaccatggatgctataaaggtttattgtgatttctctactggagaaacctgcattcgagcccagcccgagaacatcccagcaaaaaactggtatcggagtagcaaggacaagaagcacgtgtggctgggggagaccattaacgccggctctcagtttgagtataacgtggaaggggtaaccagtaaggaaatggctactcagctggccttcatgcggttgctcgccaattacgcttcccagaatattacgtaccattgcaagaatagtattgcgtacatggatgaggagacggggaatctaaagaaggctgtcatactccaaggttccaacgatgtggagctcgttgccgagggaaatagccgtttcacgtacacggtcctcgtcgatggatgttctaaaaaaacaaatgaatggggcaagacaataattgaatacaagacgaataagccctccaggctgcccttcttggatatcgccccgctcgatatagggggcgctgatcaggaatttttcgtggatatcggccccgtgtgcttcaaa

SEQ ID NO: 32448 - DNA, 4098 bp, synthetic construct
  misc_feature 1..4098: note = Description of Artificial Sequence: Synthetic coding sequence
  source 1..4098: mol_type = other DNA
atgctctcattcgtggacacgaggactctcctcctccttgccgtcaccctgtgtctggctacctgccagtctctgcaggaagaaaccgtgcgcaagggtccggcgggtgatcgcgggccgagaggcgagcgtgggccgccgggcccgcctgggcgcgatggggaggacggacccaccggcccacctggcccaccaggacccccgggtccacccggacttggcggaaacttcgccgctcaatacgacggcaaaggtgtgggattgggaccgggtccgatggggttgatgggcccacgcgggccacctggcgccgctggtgcaccgggacctcaggggttccagggccccgctggggaaccgggagaaccaggacagaccggacctgcaggcgcgcgcgggccagcggggcctccaggcaaagctggagaggacggtcaccccggtaagccgggcagaccgggtgaaaggggagtggtcggacctcagggtgcgcgaggattccccgggactccaggcctccctgggttcaagggaatcagaggacacaatggactcgacggactgaagggccagccgggagcaccgggagtcaagggagaaccgggggcgcctggggagaatggaaccccaggccaaactggagcgagagggctgccgggggaacgcggacgcgtgggggcccccgggcctgccggcgcccggggaagcgatggtagcgtggggcccgtgggcccagcaggccctatcggctcggcggggccgccggggttccctggcgccccgggtcctaaaggagaaattggggcagtcgggaacgcggggcccgccggtccagcagggccgcggggagaggtggggctccctggtctgtcaggccccgtcggaccccccgggaacccgggcgccaatggcctgactggcgccaaaggagccgccggcctgccaggggtggcgggtgccccgggtctgcctggaccgcggggaattccgggtccagtgggagcagctggagcaaccggagcaagaggcctggttggcgaaccggggccggcaggatctaagggagaatcaggaaataagggtgaaccaggatccgccggtccccaaggaccgcctggtccctccggagaggagggaaagcgcgggccgaacggcgaagcggggtcggctggaccgccaggcccaccggggctgagaggctcgcctggctcgcggggactccctggcgcagatggtcgggctggagtgatggggccgccagggtcgcgcggcgcgtcaggaccagcaggagtgcggggacctaatggagatgcgggtcggccaggagaacctggactgatgggaccgagaggtttgccggggagtcctggaaacatcggacccgctggtaaagaaggtcctgtgggacttccgggaatcgatggccgcccgggaccgataggtcctgcgggagccagaggcgagcccggcaacatcggattcccgggccctaaaggaccaactggcgacccgggaaaaaacggagacaagggacacgcaggactcgctggggcacggggagctccgggacctgacggcaacaacggggcgcaaggtccccccggcccacagggtgtccagggcggaaaaggcgaacaaggcccgccaggtcctccgggcttccaaggactgccagggccgtccggaccagccggggaagtcggtaagcctggagagaggggactccacggggaatttggacttccaggaccggcgggtccgcgaggcgaacgtgggccaccaggtgagagcggagccgccggtccgactggcccgatcggatccaggggaccatccggaccgccggggcctgacggaaacaagggggagccaggcgtggttggcgcggtcgggacggcgggcccgtcgggacctagcgggctgccgggagagcggggggccgcgggaatccctggaggaaaaggagagaagggcgagcctggcttgcggggggaaatcggaaacccgggcagggatggtgcccggggggcccctggtgcggtcggtgcacctggtccagccggagccaccggggatagaggagaggctggggccgctggcccagcgggcccagccggtccaagaggatcacccggggaacgcggtgaagtcggaccagcaggcccgaacggattcgcaggaccggcaggagcagccggacaaccgggggctaagggagagagaggtgccaagggaccgaagggagaaaatggcgtagtgggaccaactggtccagtgggcgccgcgggaccagccggacctaacgggcctcctggtccggccggatcccgcggcgatggaggtccgcccggaatgactggattcccaggagctgcaggcagaactgggccccccggcccgtcgggtatctccgggccgcccggtcctccgggtccagctggtaaggaaggattgaggggaccgcgcggcgatcaaggaccagtgggacgcaccggggaggtgggcgccgttgggccaccgggctttgcaggcgagaaaggcccatctggcgaggccggtactgcaggaccgccgggcactccgggcccacaaggactgttgggggcgccgggaattctgggtctgccaggcagcagaggggaacgcggcctgcccggcgtggccggagcggtgggtgagccaggacctctcggaatagccgggcctccgggggctcgggggccgcccggagccgtcggctccccgggagtgaacggagcacctggagaggcaggacgcgacggcaatccagggaatgatggcccgccagggcgtgacggtcaacctggtcataagggcgaacgggggtaccctgggaacatcggcccggtaggcgccgcaggagccccgggaccgcacgggccggtaggacctgccggcaagcatggtaaccggggggaaaccggcccgtcaggacctgttggaccagccggcgccgtgggccctcgcggtccttcgggaccacaaggtattcgcggcgacaagggggaaccgggcgagaagggtcccagaggactgccgggactcaaggggcacaacggcctgcaggggcttccgggtatcgcaggacaccatggagatcagggtgcccctggctcggtcggtcccgctggaccaagagggcctgccggaccgtctgggcccgccggaaaagacggacggaccgggcatcctggaactgtgggacctgctggcattcgcgggccgcaggggcatcaaggcccggcagggccgccaggtcccccgggaccaccgggaccgcccggtgtctccggcggtggatacgacttcgggtacgacggcgacttttatcgcgccgaccagccgcgcagcgctccttcacttcggccaaaggattacgaggtcgacgctaccctgaagtcgctcaataaccaaatcgaaactttgctgaccccggagggcagcagaaagaatcctgccaggacttgcagggatctccgattgtcgcacccggaatggtccagcggatactactggatcgacccgaatcagggatgcaccatggacgccatcaaggtgtactgcgacttttcgaccggagaaacgtgcatcagagcgcagccggagaacatccccgcgaagaactggtaccggtccagcaaggacaagaagcacgtctggctgggagaaaccatcaatgcggggtcacagtttgaatacaacgtggagggcgtgacttccaaggagatggcgactcagctggcgttcatgcgcctgctcgctaactacgcctcacagaacatcacctaccattgtaagaatagcatcgcgtatatggatgaagaaactggaaatctgaaaaaggccgtgatccttcagggatcgaatgatgtggaactggtggcggagggaaattcccggttcacctacacggtgctggtggacggatgctcaaagaaaaccaacgagtggggaaaaaccatcattgagtacaaaactaacaagccgtcccggctgccgtttctggacatcgcgccactggacattggcggcgccgatcaggaattcttcgttgacatcggccctgtgtgtttcaaa

SEQ ID NO: 32449 - DNA, 4098 bp, synthetic construct
  misc_feature 1..4098: note = Description of Artificial Sequence: Synthetic coding sequence
  source 1..4098: mol_type = other DNA
atgctatcgtttgttgatacgcgaacgttattactattagcggtaacgctatgtctagcgacgtgtcaatcgttacaagaagaaacggtacgaaaaggtccggcgggtgatcgaggtccgcgtggtgaacgaggtccgccgggtccgccgggtcgtgatggtgaagatggtccgacgggtccgccgggtccgccgggtccgccgggtccgccgggtttaggtggtaattttgcggcgcaatatgatggtaaaggtgttggtctaggtccgggtccgatgggtctaatgggtccgcgtggtccgccgggtgcggcgggtgcgccgggtccgcaaggttttcaaggtccggcgggtgaaccgggtgaaccgggtcaaacgggtccggcgggtgcgcgtggtccggcgggtccgccgggtaaagcgggtgaagatggtcatccgggtaaaccgggtcgtccgggtgaacgaggtgtagtaggtccgcaaggtgcgcgaggttttccgggtacgccgggtctaccgggttttaaaggtatacgtggtcataatggtctagatggtctaaaaggtcaaccgggtgcgccgggtgttaaaggtgaaccgggtgcgccgggtgaaaatggtacgccgggtcaaacgggtgcgcgtggtctaccgggtgaacgtggtcgtgtaggtgcgccgggtccggcgggtgcgcgtggttcggatggttcggtaggtccggtaggtccggcgggtccgataggttcggcgggtccgccgggttttccgggtgcgccgggtccgaaaggtgaaataggtgcggtaggtaatgcgggtccggcgggtccggcgggtccgcgaggtgaagttggtttaccgggtttatcgggtccggttggtccgccgggtaatccgggtgcgaatggtttaacgggtgcgaaaggtgcggcgggtttaccgggtgttgcgggtgcgccgggtctaccgggtccgcgtggtataccgggtccggtaggtgcggcgggtgcgacgggtgcgcgaggtttagtaggtgaaccgggtccggcgggttcgaaaggtgaatcgggtaataaaggtgaaccgggttcggcgggtccgcaaggtccgccgggtccgtcgggtgaagaaggtaaacgaggtccgaatggtgaagcgggttcggcgggtccgccgggtccgccgggtttacgtggttcgccgggttcgcgtggtttaccgggtgcggatggtcgtgcgggtgtaatgggtccgccgggttcgcgaggtgcgtcgggtccggcgggtgtacgtggtccgaatggtgatgcgggtcgtccgggtgaaccgggtctaatgggtccgcgtggtttaccgggttcgccgggtaatataggtccggcgggtaaagaaggtccggtaggtttaccgggtatagatggtcgtccgggtccgataggtccggcgggtgcgcgtggtgaaccgggtaatataggttttccgggtccgaaaggtccgacgggtgatccgggtaaaaatggtgataaaggtcatgcgggtttagcgggtgcgcgtggtgcgccgggtccggatggtaataatggtgcgcaaggtccgccgggtccgcaaggtgttcaaggtggtaaaggtgaacaaggtccgccgggtccgccgggttttcaaggtttaccgggtccgtcgggtccggcgggtgaagtaggtaaaccgggtgaacgaggtctacatggtgaatttggtctaccgggtccggcgggtccgcgtggtgaacgtggtccgccgggtgaatcgggtgcggcgggtccgacgggtccgataggttcgcgtggtccgtcgggtccgccgggtccggatggtaataaaggtgaaccgggtgtagtaggtgcggtaggtacggcgggtccgtcgggtccgtcgggtctaccgggtgaacgtggtgcggcgggtataccgggtggtaaaggtgaaaaaggtgaaccgggtttacgtggtgaaataggtaatccgggtcgtgatggtgcgcgtggtgcgccgggtgcggtaggtgcgccgggtccggcgggtgcgacgggtgatcgaggtgaagcgggtgcggcgggtccggcgggtccggcgggtccgcgaggttcgccgggtgaacgtggtgaagtaggtccggcgggtccgaatggttttgcgggtccggcgggtgcggcgggtcaaccgggtgcgaaaggtgaacgaggtgcgaaaggtccgaaaggtgaaaatggtgtagttggtccgacgggtccggtaggtgcggcgggtccggcgggtccgaatggtccgccgggtccggcgggttcgcgtggtgatggtggtccgccgggtatgacgggttttccgggtgcggcgggtcgtacgggtccgccgggtccgtcgggtatatcgggtccgccgggtccgccgggtccggcgggtaaagaaggtctacgaggtccgcgtggtgatcaaggtccggtaggtcgtacgggtgaagttggtgcggtaggtccgccgggttttgcgggtgaaaaaggtccgtcgggtgaagcgggtacggcgggtccgccgggtacgccgggtccgcaaggtctattaggtgcgccgggtatattaggtttaccgggttcgcgaggtgaacgtggtctaccgggtgttgcgggtgcggttggtgaaccgggtccgttaggtatagcgggtccgccgggtgcgcgaggtccgccgggtgcggttggttcgccgggtgtaaatggtgcgccgggtgaagcgggtcgtgatggtaatccgggtaatgatggtccgccgggtcgagatggtcaaccgggtcataaaggtgaacgaggttatccgggtaatataggtccggttggtgcggcgggtgcgccgggtccgcatggtccggtaggtccggcgggtaaacatggtaatcgtggtgaaacgggtccgtcgggtccggttggtccggcgggtgcggtaggtccgcgtggtccgtcgggtccgcaaggtatacgtggtgataaaggtgaaccgggtgaaaaaggtccgcgaggtctaccgggtttaaaaggtcataatggtctacaaggtctaccgggtatagcgggtcatcatggtgatcaaggtgcgccgggttcggtaggtccggcgggtccgcgaggtccggcgggtccgtcgggtccggcgggtaaagatggtcgtacgggtcatccgggtacggttggtccggcgggtatacgtggtccgcaaggtcatcaaggtccggcgggtccgccgggtccgccgggtccgccgggtccgccgggtgtatcgggtggtggttatgattttggttatgatggtgatttttatcgtgcggatcaaccgcgatcggcgccgtcgttacgaccgaaagattatgaagttgatgcgacgctaaaatcgctaaataatcaaatagaaacgttactaacgccggaaggttcgcgaaaaaatccggcgcgtacgtgtcgtgatttacgactatcgcatccggaatggtcgtcgggttattattggatagatccgaatcaaggttgtacgatggatgcgataaaagtatattgtgatttttcgacgggtgaaacgtgtatacgtgcgcaaccggaaaatataccggcgaaaaattggtatcgatcgtcgaaagataaaaaacatgtatggttaggtgaaacgataaatgcgggttcgcaatttgaatataatgttgaaggtgtaacgtcgaaagaaatggcgacgcaattagcgtttatgcgtctactagcgaattatgcgtcgcaaaatataacgtatcattgtaaaaattcgatagcgtatatggatgaagaaacgggtaatttaaaaaaagcggtaatactacaaggttcgaatgatgtagaactagtagcggaaggtaattcgcgttttacgtatacggtattagtagatggttgttcgaaaaaaacgaatgaatggggtaaaacgataatagaatataaaacgaataaaccgtcgcgtttaccgtttctagatatagcgccgctagatataggtggtgcggatcaagaattttttgttgatataggtccggtatgttttaaa

SEQ ID NO: 32450 - DNA, 4098 bp, synthetic construct
  misc_feature 1..4098: note = Description of Artificial Sequence: Synthetic coding sequence
  source 1..4098: mol_type = other DNA
atgctctccttcgtggacacccggacgttgctgctgctggccgtcaccctctgtcttgccacctgccaatccctgcaagaggaaactgtacgcaagggcccggctggggatcggggaccgcgcggagagcgtggacctcctggtccgcccggccgagatggtgaggacggaccgaccgggccacccggcccaccagggccaccgggaccaccgggactgggaggaaacttcgccgcacagtacgacgggaagggagtgggactgggcccggggccgatggggttgatgggaccacggggaccgccaggagcggcgggggccccaggaccacagggattccaaggacctgctggcgaacccggggaaccaggacagaccggccctgctggcgcccgcggacccgctggaccgcctggcaaagctggcgaagatggacatccaggaaagccaggacgaccgggcgaaaggggcgtcgttggaccccagggggctcgcggtttcccgggaaccccgggcctgcccggattcaaaggaatcagaggccataatgggctcgacgggctcaagggacagcccggtgctcccggggtcaagggagaaccaggggcacccggtgagaacggaactcctggccagaccggagctagaggattgcccggtgagcggggacgggtcggtgcgccggggcctgcaggggcgcgcgggtcagacggcagcgtggggcctgtcggaccggctggtccgatcggctcggcaggtccgcctggcttcccgggtgctccgggtccgaagggcgaaatcggtgccgtcggaaacgccgggcctgccggtcccgctggacctaggggggaggtcggattgccagggctgtcagggccagtgggtccaccagggaatccgggtgccaacggcttgaccggggcgaagggtgccgccggccttcctggggtggccggggcccctggactcccggggcccaggggtatcccaggaccggtgggggcagcgggcgctaccggagcgcgcggcctcgtgggagagccggggccggctggatccaaaggcgaatcgggcaataagggtgaaccaggttccgccggaccgcaaggtccaccgggaccgtcaggcgaagagggaaaacgcggacccaacggcgaagcaggtagcgctggcccaccggggccgccgggtttgcgggggagtcccgggtcgagaggacttccgggagcggacggtcgcgccggagtcatgggcccgccgggatcgcgtggcgcatcgggtcctgctggtgtgcggggcccgaatggagacgcaggccgcccgggggagccgggactgatggggccgcggggactgcccggttcacctggaaacatcggcccagccggtaaagagggtcccgtgggccttccaggaatcgacgggaggcccggaccaattggaccggcaggggcccgcggagaaccaggcaatatcggcttccctggccctaagggacctacgggcgatccaggcaagaacggtgacaagggtcacgccggactggcgggtgcaagaggggctccaggccccgatggcaacaacggagcccagggacctccgggtccacagggagtacaaggtggaaagggcgaacaaggaccaccagggcccccaggatttcaggggctcccaggtccatcaggcccggccggcgaagttgggaagccaggagagcgcgggcttcacggagaattcggactcccgggaccggccggcccgagaggagaacggggtccacctggcgagagcggcgcagcaggaccgacgggacccatcggaagccggggaccgtccggccctccgggaccggacggtaataagggagaaccgggagtggtgggtgcggttggcacggccggtccgtccggcccgtcgggactgccaggggaaagaggagcggccggaatcccgggagggaagggtgagaagggagagcctggacttaggggagaaatcggaaacccggggcgcgacggcgcacgcggggctcctggcgcagttggcgcacctgggccagccggagccactggagatagaggggaagccggagcggccgggccggcaggacctgcgggcccacgcggctcgccgggtgagcggggcgaagtgggccctgcaggtcctaatggcttcgcaggacccgcgggagctgctggtcagccgggcgcaaagggagaacggggcgcgaaaggtccaaagggggaaaacggtgtggtgggtcctactggcccggtgggagccgcggggcccgcgggacctaacggaccgccggggccagccgggtctaggggagatggaggaccgcctgggatgactgggttccccggcgccgccgggagaactgggccgccggggccgtcaggcatctctggcccgcctggtcctccgggacccgctggcaaagaaggactgcgaggtccgcggggagatcagggccctgtcggacgcaccggagaggtgggagcagtggggccacctggtttcgcgggagagaagggaccatcgggagaagcggggaccgccggacctccgggcacgccgggcccacagggccttctgggggcgccgggaatccttgggttgccgggttcccgcggggagaggggcctcccgggagtcgcaggagccgtgggtgagccaggccccctgggcatcgccggaccacccggagcaaggggccccccgggagcggtgggatcgccgggagtgaacggagcgcccggggaagctggacgggacggtaacccgggaaatgacggcccacccggacgcgacggacaaccgggccataaaggtgagcggggttacccgggcaacatcgggccagtcggggctgccggtgcccctgggcctcacggaccagtcggacccgcgggtaagcacgggaatcgtggtgagactggaccgtcagggccggtgggtccggcgggcgctgtcggtccaagaggaccatcagggccacaaggtattagaggagacaaaggcgaaccaggtgaaaagggaccacgcggactgcccggactcaagggtcataacggtctgcaagggctgcctggaattgcgggtcaccatggagatcagggagcgcctggaagcgtcggccccgctggccccaggggaccagcggggccttcgggcccagccggaaaagacggacgcactggccatccggggactgttggaccagctggtatccggggaccgcagggtcaccaaggtcccgccggcccgcctgggccaccaggacctccgggacctccaggtgtcagcggcggaggatacgactttggctacgacggagatttctaccgggcagaccagccgagatccgcaccgtccctcagaccaaaggactatgaggtcgacgcgactctgaagtccctcaacaatcaaatcgaaacgctgctgacccccgagggatcaagaaagaatcctgcgcggacttgtagagatctgcggctgtcccacccggagtggagcagcggatactactggattgacccgaaccagggatgcaccatggacgctattaaggtgtactgtgatttctcaaccggcgaaacctgcattcgcgcccaacccgagaatattccggcaaagaactggtaccgctcctcgaaggacaagaagcacgtttggctcggcgaaaccatcaacgccggtagccagtttgaatacaacgttgaaggcgttacctccaaagagatggccactcagctcgcgtttatgcgcctgcttgccaactacgcctcacagaacatcacctaccactgcaaaaacagcatagcctatatggatgaggaaactggcaatctcaagaaggccgtgatcctgcagggatcgaatgatgtcgaactcgtggccgaaggcaatagccggtttacctacactgttctggtggacggatgctcgaaaaagactaatgagtgggggaaaactatcatcgagtacaagaccaacaaacctagccggctgcctttcctcgatatcgcccccctcgatatcggaggagcggatcaggagttctttgtggacatcggacctgtgtgcttcaag

SEQ ID NO: 32451 - DNA, 4098 bp, synthetic construct
  misc_feature 1..4098: note = Description of Artificial Sequence: Synthetic coding sequence
  source 1..4098: mol_type = other DNA
atgctgtcctttgtggatacgagaaccctcctgcttctcgcagtgaccctgtgtcttgcaacctgccaatcactgcaggaagagactgtgaggaagggtcccgccggcgataggggacccaggggagaaagagggcccccgggcccacctggtcgtgatggtgaagatgggcctacgggtcctccgggccctcccgggccccctggacccccagggctgggagggaatttcgcagcacagtacgacggcaagggtgttggcctgggaccaggacctatgggtcttatgggacctagaggcccacccggtgcagcaggagcgcctggaccccaaggttttcaagggcccgcaggagagcctggggagcccggacagaccggcccagcaggagcccgagggccagcgggaccaccggggaaggcaggcgaagatggccatcctgggaagcctggacggcctggcgagaggggcgttgtaggacctcagggagcacgtgggtttcccggaactcctggactcccaggattcaaaggaatccgcgggcacaacggactggatggtctgaaaggacagcctggagcacccggtgtgaagggagagccaggagctcccggtgagaacggtactccggggcaaaccggcgcacgtggtctgccaggtgaacgcggtcgcgtgggtgctccggggccagcaggagcgagaggctcagacggttccgtagggccggtcgggcctgctggaccaattggctcggccggtcctcccggtttccccggtgcaccaggaccaaagggtgaaattggggcagtgggcaacgcaggaccggcaggaccagccgggccgcgtggagaagtggggcttccaggcctgtcggggccggtgggccctccaggaaaccccggagccaatggccttacgggagcgaagggagcagctggactccccggggtagccggggcacctggacttcccggacctcggggcatccccggacccgtgggtgccgcaggagcaacgggtgctaggggtcttgtcggtgaacccggaccagcaggatcgaagggcgaatccggaaacaagggagaacctggaagcgctgggccgcagggacctcctgggccttcaggagaagaaggtaagcgaggaccgaacggagaagcagggtcggcaggtccccccgggccaccgggactcagaggatcgccagggtcgcgcgggcttccaggtgcagatgggcgggcaggagtgatgggtccacccggctcacgcggggcgtccggtcctgcgggagtgcgcggaccaaacggtgatgcaggtcgtcccggcgagccgggcttgatgggcccacggggtctgcctggatcaccgggcaacattggtccagcgggaaaggaaggacctgttggcctgcctggaatcgatggccggccgggtccaatcggtccggcgggagcgcgaggcgaacctggtaacattggttttcctggtccaaaaggaccaaccggcgatcctggaaagaatggcgacaagggtcatgcaggattggcaggtgccagaggagcccctggccctgatggcaataacggtgcccaagggcctcctggtcctcaaggagtgcagggtggcaagggcgaacaaggtccaccgggacctcccggatttcagggactccccggaccaagcggcccagcgggcgaggtcggaaaacctggtgaaagaggtttgcatggagaatttggccttcctggcccagctggcccgagaggtgaaaggggccctcctggtgaatcgggagcggcagggccaaccggtcctataggctccaggggacccagcggacctccaggcccggacggaaataagggggaaccaggagtggtgggggcagtggggactgccggccctagcggtccatccggcctgccaggtgagcgaggagcagcaggaatccctgggggtaagggagaaaaaggagaaccaggtctgcggggagagatcggcaatccgggaagagacggcgcccgcggagctcctggggccgtgggcgcaccaggacccgcaggggcaaccggagatagaggagaagcaggcgccgcgggccctgccggtccggctggtccacgggggtcacccggtgaacggggagaggtcggcccggcaggacccaatgggttcgccgggccggcaggggcagccgggcagccgggagccaagggtgagcgaggtgccaaaggtcctaaaggagaaaatggtgtggtgggtcccactggcccagtgggtgcagctggacccgcgggaccaaacggccctccgggtccggcagggtcgaggggagatggcggacctcctggtatgaccggattcccaggtgcagccggtagaactgggccaccggggcctagcggcatttcagggcctccgggtcctcccggaccagctggtaaagagggactgaggggtcctaggggagatcagggccctgtgggacggaccggggaagtcggtgcggtgggtcctccagggtttgcaggagaaaagggcccatcgggtgaggcgggtacggcaggtccgccaggtacccccggcccacagggcctgctcggcgcacctggtatcctcggtctgccgggctcccgaggagaaagaggcttgcctggagtggcaggtgcagtgggtgaacctggtccactcggaatcgctggcccacctggggccagagggcctcccggggcagtcggaagtccaggcgtgaatggagcaccgggggaagcagggcgcgacggtaaccctggaaacgatggaccccctggccgcgatggccaaccagggcataagggagagcgtggatacccgggaaacataggcccagtcggggctgccggggcgccaggtcctcatggccccgtcggaccagcgggcaaacatggaaacagaggggaaactggtcctagcgggccggtgggacccgccggagcagtggggccaagagggccaagcggccctcaaggcattaggggagataaaggtgagcccggtgaaaaaggccctaggggactccctggtctgaaggggcacaacgggttgcaagggttgccgggcatagcaggccatcacggagatcagggagcacccgggtcggtgggtccagctgggcccagaggacctgcagggccttccgggccagccggaaaggatggaagaactggtcatccaggcaccgtcgggcctgccgggattagaggtccgcaaggccatcaagggccagcagggccaccaggcccgcccgggccgcccggaccacctggtgtcagcggagggggatacgatttcggttacgacggcgacttctaccgggctgatcaacccagatcagctccttccctgcgcccgaaggactacgaagtggacgcaacgctcaagagcctgaacaatcaaatcgagactttgctgaccccagaaggatcgcgcaagaatcccgcccgcacttgtcgggatctgcggctttcgcacccagagtggtcctccggctactactggattgatcctaaccagggatgtaccatggacgcgatcaaggtgtactgtgatttttccactggagagacttgtattcgcgcacagcccgaaaacatccctgcaaagaattggtaccgatcctctaaggacaagaaacatgtttggctcggcgaaactataaacgcgggttcccaattcgagtataatgtggagggtgtgacttcgaaggagatggccacccagcttgcgtttatgagacttctcgcaaactacgccagccagaacataacctaccattgcaaaaactcaatcgcgtacatggacgaggaaaccggaaacctcaagaaagcggtgattctccaaggatcgaacgatgtggaactggtggcagagggcaattcgcggtttacctatactgtccttgtcgatggatgcagcaaaaagactaacgaatggggaaagactattatcgagtacaagaccaataagccaagcagacttccatttcttgatattgcacctctggatattggcggggccgaccaagaattctttgtggatattgggcctgtgtgctttaaa

SEQ ID NO: 32452 - DNA, 4098 bp, synthetic construct
  misc_feature 1..4098: note = Description of Artificial Sequence: Synthetic coding sequence
  source 1..4098: mol_type = other DNA
atgctgtcgtttgtcgataccaggacgctgctgctgctcgcggtcactctgtgtctcgccacctgtcaatcactgcaggaggagactgtgcgcaaagggcctgccggagatcgggggcctagaggcgaacgcggaccaccaggtccccctggacgtgatggggaggacggcccgaccggaccacccggacctccgggaccacccggccctcccggactcggcggaaactttgcagctcagtacgatggaaaaggagtcggtcttgggcctggtcctatggggttgatgggccctcgtggtcccccgggggcagcgggggcgcctggtccacaaggattccaaggtccagcaggtgagccaggagagcctggccagaccggtcctgccggagcaaggggtccagctggaccacccggtaaggccggagaagatggacacccaggaaagccagggcgacctggtgaaaggggcgtggtcgggccccaaggggcaaggggttttcctggaactccggggctgcctggctttaagggaatcaggggtcataacggtcttgatggacttaagggacagcctggcgctcccggagttaaaggagaacctggtgcccctggtgaaaatggaacccccggtcagaccggtgcacgcggactccccggagaacggggccgtgtgggtgcccccggtccagctggtgctcgtggttcagatggttccgtgggaccagtgggacccgcgggacctatcggatcggcagggcctccgggatttcctggagcgccgggacccaagggtgaaataggagcggtgggaaatgcgggaccagccggaccagcgggaccaaggggggaggtcggcctgcctggactgtccggtccagtcggcccacctggtaaccctggagcaaatggtcttactggagcaaaaggcgcagcaggacttcctggtgtggcaggtgcacctggccttcctgggcccagaggaattcctggtccggtgggtgcagcaggagctacgggagcacgtgggttggtcggggagccaggaccagcgggaagcaaaggagagtccgggaacaagggtgaaccaggtagcgcgggacctcaaggacctcctggtccctctggtgaagagggtaagagaggcccaaatggagaagctgggtccgcgggcccgcccggtccacctggactcagaggaagcccgggttccagggggctgccgggggcagatgggcgggcaggagtcatgggaccaccaggctcaagaggggcatccgggccagccggagtgcgaggaccaaacggggatgcgggtcggccgggtgagcctggacttatgggaccgagaggtctgcctggttcgccagggaacattgggccagcgggtaaggaaggacctgttggactgccaggaattgacggacgaccagggcctatcggtccggcaggagcacggggggagccgggaaacattggatttccggggccaaaagggcctactggtgatcccggaaagaacggcgataagggtcatgcaggactggcaggtgcaaggggagcaccaggacccgatggaaacaatggagcacagggaccccccgggccacaaggcgtgcaagggggcaagggtgaacaaggtcctcctggacctcccgggtttcaaggactgcccggaccatcgggaccagccggcgaagtgggcaaacccggagaacgggggttgcatggcgaattcggtctgccaggtcctgctggtcctagaggggagcgtgggccacccggcgaatcaggggccgcagggccaactggacctatagggagcagggggccttccggtccaccaggaccggatggaaacaagggagagccgggcgttgtgggtgcggtgggcaccgcgggacctagcgggccttcgggactgccaggtgaacgaggggcagcgggtatcccaggcgggaagggggaaaaaggtgagccaggtcttaggggtgagatcggtaatccgggacgcgatggtgcaagaggtgcccccggggccgtgggggcccctgggcctgccggtgccacgggcgacagaggcgaggcaggtgccgccggtccagcaggccctgctggccccaggggatcccccggtgaaagaggtgaggttggtcctgccgggccaaatggatttgccggcccagcaggagctgcaggacagcctggagccaagggggaacgcggagccaagggaccgaagggtgaaaatggcgtggtcggacctaccggaccagtgggtgcagctggtcccgccggaccaaatggtccacctgggcccgcgggtagcagaggtgatggaggaccacccgggatgaccggattccccggtgctgcaggccgtacgggtcctcctggtccatcgggaatctcaggtccgccaggccctccgggcccagcaggaaaagagggtctgagaggaccccgaggagatcaggggcctgtcgggcggactggagaggtcggagcagtgggtccaccaggttttgccggagaaaagggaccctcgggggaagcaggaacggcaggtcctcccggcacgcctggacctcaagggcttctgggcgcacctggcattttgggactccctggatcccgaggtgaacgaggactccctggggtggcgggagcagtgggcgagcccggacctctcgggatagcagggccccccggtgcaagaggcccgccaggtgcagttggttcgccgggagttaacggtgcaccaggggaagccggccgcgacggtaaccccggaaacgatgggccccctggacgcgatggacaacctgggcacaagggcgaacgtggttaccctggcaacattggacctgtcggggccgcaggcgcacccgggccgcacggaccagtcgggcctgctgggaagcatggtaaccggggagaaaccggtccatcaggacccgtgggtcctgctggggcggtgggccctcggggaccgtcaggccctcaaggcatccgcggggataagggagaaccaggagaaaagggacctcggggacttccggggcttaaaggacataacgggctgcagggtctgcccggcattgcagggcaccacggtgatcagggggcgccgggaagcgtgggccctgctggccccagaggaccggccggtccatcaggacctgccggaaaggacggaaggaccggtcatcctggaactgtgggtcccgccggtatccggggacctcaaggacatcagggcccggcaggcccacccggacctcctggaccgccaggcccaccaggagtgtcgggtggaggctacgacttcggatacgatggagacttttaccgcgcagatcaacctcgcagcgccccgagcttgcgacctaaggactacgaagtggatgctaccctcaaatcgctgaataatcagattgaaaccttgctcactcccgaaggttcccgcaagaatccggcaagaacttgtagagatctcaggctttcccacccagaatggtcgtctggctactattggattgacccgaaccagggctgtactatggacgcaatcaaagtgtactgtgacttctcaactggggaaacctgcattcgagcccaaccagagaacattcccgcgaaaaactggtacaggagctccaaagacaaaaagcatgtttggcttggggagactattaacgcaggcagccaatttgagtacaatgtcgaaggggtgacgtcaaaagagatggcaacccagctcgcctttatgcggcttctggctaattacgcatcgcaaaacattacctaccattgcaagaattccattgcatatatggacgaggaaactggaaaccttaagaaagctgttatactgcagggatcgaacgacgtcgagcttgtggcagaaggtaactcgagatttacctacactgtgctcgtggacggatgttcgaaaaagactaacgaatggggaaagactattatcgaatacaagaccaacaagccgagccggttgccttttctcgacattgcccctctggacatcggcggtgcagatcaagaattcttcgtggatatcggacctgtgtgcttcaag

SEQ ID NO: 32453 - DNA, 4098 bp, synthetic construct
  misc_feature 1..4098: note = Description of Artificial Sequence: Synthetic coding sequence
  source 1..4098: mol_type = other DNA
atgctgagttttgttgatacaagaaccctgcttctgctcgctgtcaccctgtgcctggcaacttgccaaagcctgcaggaggaaaccgtgcgaaagggaccagccggagatcggggaccccgcggcgaaagaggcccaccagggccgcccgggagggacggggaggatggtccgacagggccaccaggaccccccggcccccccggaccccctggcctgggtggcaattttgctgctcaatatgatggcaagggagtgggtctgggcccaggtcccatggggctgatgggaccaagaggcccgcctggagctgccggggctccaggcccgcagggattccagggcccggcgggagagcccggggaacccggtcaaaccggaccagccggggcccgcggtcccgcagggccccctggaaaagcgggagaagacggacaccctggaaagcccgggcgccccggagaacgcggggtagttggcccgcagggggcccggggttttcctggaacccctggactgccagggtttaaggggatccggggccataatgggctggacggcctcaaaggccagccgggggcccccggtgtgaagggcgaaccaggagcacctggggaaaacggaacccctgggcagacgggagcacggggcctccccggagagcgcggccgcgtgggagctccaggtccagctggcgcacgcggctctgatgggtctgtgggccctgtgggcccagctggcccaatcggatctgccgggcctcccggcttcccaggtgcacccggccctaagggcgaaatcggcgccgtgggaaacgccggtcctgcgggtccagcagggcccagaggcgaggtgggcctgccgggattgtccggaccagttggtcccccgggtaacccaggagcaaatggactgaccggcgccaagggggcagccggactgccgggagtagctggggcaccaggcctgccaggaccaagaggtatccccggaccagttggcgctgccggcgcaactggggcaagaggactggtgggcgagcccggaccagccggcagcaagggtgagtctggaaacaagggagaacctgggtcagctggtccgcagggcccccccgggccatccggagaagaagggaagcggggacctaacggagaggccggctctgccgggcctcctggacctcccgggctgcgcgggtcccctggttccagggggttgcctggggctgatgggagggccggagtgatgggcccccccggtagcaggggggcttcaggccccgccggcgtgaggggaccgaacggagacgccggaagacctggtgagcccggtctgatggggccccgcgggctccctgggtcccccggaaacatcggtccagcggggaaagagggcccagtggggcttccaggtatagatgggcgacctgggcccattggtcccgctggcgctagaggtgagccaggcaatataggatttcctggtccgaaaggtccgacaggcgatcccgggaaaaacggtgataaaggccacgcaggcctcgctggcgcacggggcgcacccggccctgatggtaacaatggcgcacagggaccccccgggccacagggtgtgcaaggtgggaaaggagagcagggtcccccaggaccccccggttttcaggggctgccagggccttcaggcccagctggcgaggtggggaagccaggagagagaggtctccatggtgaattcgggctgcccggccctgcaggccctagaggagagagaggcccaccaggcgagtctggagcagcaggtcccaccggaccaatcggctctcgcggaccctccggcccaccaggacccgatggtaacaaaggcgagccaggcgtcgtaggcgctgtggggactgccggtcccagcggccctagtggtctcccgggagaaaggggcgcggccggcatacctgggggcaaaggggaaaagggagagcccggcctccggggggagatcggaaacccaggtcgggacggcgcacgcggtgccccaggcgcagttggggcaccagggccggcgggcgctaccggcgacagaggtgaagcaggcgctgccgggccagccggtcccgcgggccctaggggcagtcctggtgaacgaggggaagttggccctgcgggaccaaacgggttcgccgggcccgctggagccgccggacagcccggggccaaaggcgagcgcggagctaagggccctaagggagaaaacggagtggtaggacccaccggcccggtaggcgcagcgggaccggccggccctaacggccctccaggaccggctggcagccggggggatggaggccccccaggaatgactgggttccccggggctgccgggcgcaccggacccccaggccctagtgggataagtggtccaccaggaccacctggtcccgccgggaaggagggactccgaggcccgcggggcgaccaggggcccgtaggacggacaggcgaggtcggagctgtcgggccaccaggtttcgctggagagaaaggccccagtggcgaggcaggtacagcaggccctcccggcacacctggcccccagggactgctgggtgctcccggaatcttgggtcttcctggctctcggggcgagcggggactgccgggggttgcaggcgcagtcggggaacccggcccactgggcattgcagggcctcccggcgcccgcggacccccgggggccgtcggaagtcctggagtgaacggtgcccccggagaggccgggcgggatggcaatccgggcaacgacggcccacccggccgggacggccagcctggccataaaggcgagcgcggctatcctgggaacattggtcctgtgggagcagccggcgcgcccgggccacacgggccagtgggccccgccggcaagcacggcaaccgcggagaaaccggcccctccggtccagtgggacctgccggggctgttggtccaaggggaccatctgggccacaggggatccgcggggacaagggagagcctggcgaaaaaggtccacgcgggttgcctggcctgaaaggacataacggtctgcaggggctgcccgggatcgctggccatcacggagaccagggcgctccggggtcagttgggccagccgggcccagagggccagcaggccccagtgggcctgccgggaaggacggacggaccggtcatcctgggaccgtgggcccagccgggatcagaggtccacagggacaccagggccccgcaggacccccaggacctccaggccctcctgggccccccggagtttccggagggggatatgacttcggctacgacggggatttttatagggcagaccagccgcggagcgccccatcactccgccctaaagattacgaggttgacgcaacactgaagtcactcaataaccagatcgagaccctgctgactccggaaggttcccggaagaatccagccaggacttgcagagaccttcgactgagccaccctgaatggagtagcggatattactggatagaccctaatcagggctgtactatggacgccattaaagtttattgtgatttttccacgggcgagacttgcatacgcgcccagcccgaaaacatcccagccaagaattggtaccggtcttccaaagacaaaaaacatgtctggctgggggagaccatcaacgctggctcccagtttgagtacaatgtcgagggggtcacgtccaaggagatggctactcagctcgcatttatgaggctgctggcaaactacgcatcacagaacatcacatatcactgtaagaactccattgcatacatggatgaggagaccgggaacctgaagaaggcagttattctgcaaggctccaatgacgttgagttggtggccgagggtaactcaaggttcacatacaccgtcctcgttgatggatgtagcaagaaaaccaatgagtggggcaaaaccatcatcgaatacaaaacaaacaaacctagtcggctgccgtttcttgacatcgccccgctggacatcggaggagcggatcaggaattcttcgtagatattgggcctgtgtgtttcaaa

SEQ ID NO: 32454 - DNA, 4098 bp, synthetic construct
  misc_feature 1..4098: note = Description of Artificial Sequence: Synthetic coding sequence
  source 1..4098: mol_type = other DNA
atgttgtcttttgtcgatacgaggacactcctattactcgccgtaaccctgtgtctggctacttgtcaatcactgcaagaggaaaccgtacgcaagggcccagccggcgatcgcggcccgcgtggtgaaagaggaccacctggacctcctggacgcgacggagaggacgggcctactggccccccagggcctccgggtcctcccggccctccagggcttggcggcaactttgccgctcagtacgacggcaaaggtgtgggcctcggtcccggccccatgggcttgatgggccccaggggcccccctggtgccgctggggcccctggaccacagggcttccaggggcccgccggcgaacccggtgagcccggccagactggcccagctggcgctcgggggccagcaggacctccagggaaggcaggagaggacggccaccctggaaagcccgggcggcctggcgagcgcggggtcgttggtccccaaggagccaggggcttccctggcactcctggcctgccaggattcaaaggaatccgtggacacaacggattggatggattaaaagggcagcccggggcccccggggtcaagggtgagccaggcgctcctggggaaaatggcacacccgggcagacgggcgcacgcgggctaccaggcgaacgcgggcgggtgggagctccaggcccggccggtgcgagaggttccgatggctccgtaggcccagttggccccgctgggcctattgggtctgccggtccgcctggtttcccaggagctcctggaccaaaaggcgagatcggagctgtggggaacgctggacctgccgggcctgccggtccgagaggagaggtgggacttccaggcttatccgggcccgtgggacctccgggcaatcccggggcaaacggacttacaggcgcgaagggagctgctgggctgccaggtgtggccggagctcctggcctgccagggccacgcgggatacccggcccagttggcgccgccggcgccactggggctcgaggcctggtcggcgaaccggggccagccggctcaaaaggtgagagcggcaataagggagaaccaggcagtgccggccctcagggcccccctggcccctctggcgaggagggtaagcgcgggcctaatggagaagcagggagtgcaggtcctcctggtccccccggtcttcgtggtagccccggtagcaggggccttccaggcgcagatggccgcgcaggcgtcatgggtcctccagggtcccgaggagcctccggtcccgcaggtgtgcgaggacctaatggggacgctggtcggcccggagagcctggactgatgggcccccggggcctgcctggctctcctggtaatattgggcccgccggcaaggaggggccggtgggcctcccaggcatagatgggcgccccggccctataggtcccgctggggcccgcggagagccggggaatatcggtttccccgggcccaagggacctacgggggatcccggaaagaacggggacaagggacacgccggcttagcaggagccaggggagcgccagggcccgacggaaacaacggtgcccaaggccctccgggtccccagggtgtgcagggcgggaagggagagcagggacctcccggcccgcctggtttccagggtttaccagggccaagcggcccagcgggagaagtaggcaaacccggagaaagaggcttgcacggggagttcggactccccggcccagccggaccacgaggtgaacgcggccccccgggcgaatcaggggcagctggacctactggcccaatcggaagtaggggtcccagtggaccaccaggtcccgacggaaacaagggtgagcccggagtggttggcgccgtaggcacggccggtccctcagggccctctggccttcccggcgagcggggagcagcgggcatcccaggaggaaaaggcgagaagggcgaacctggcctccggggcgaaataggtaatcccggtcgtgacggagcaaggggcgctccaggggccgtaggggccccaggacctgctggggccactggcgataggggagaggccggggccgcaggaccagcaggtccagccggccctcggggaagccctggtgaacggggggaagtgggacctgctgggcccaatggatttgccggcccggctggagccgcagggcagcctggagcgaaaggagaacgtggggcaaagggcccgaagggcgagaacggcgtagttgggcctaccggccctgtcggtgccgcgggacctgcgggtcccaatgggcccccaggtcccgcggggtcccggggggacggcggtcctccagggatgacaggtttccctggtgctgccggaagaaccggcccacccggaccgtcggggatatcaggaccccctggcccccccgggccggctggaaaggaaggtctgcgcggcccacgtggtgatcagggaccagttgggagaaccggtgaggtcggggccgtgggaccgcctggatttgccggagaaaaggggccgtctggcgaggccgggaccgccggccctccgggcacgcccggaccccaagggttgctgggcgctccgggaatccttgggctgccgggttctagaggcgagagggggctgccaggcgtggcgggagctgtgggtgaacctgggcctttggggatcgcgggaccccccggtgccaggggtccacccggtgccgttgggtcacctggcgtcaatggagctcccggagaagcgggccgcgatggaaatccaggcaatgacggccctcccggccgcgacggccagcctggacacaagggtgaacgcgggtacccaggcaatataggaccagtcggcgccgccggcgcaccaggcccccatggcccagtcgggccagccggcaagcacgggaaccggggcgaaaccggccccagcggaccagtcggaccagctggggcagttggacctcgcgggccatctggaccccaaggtatcagaggggataagggggaaccaggtgagaagggtccgcgaggcctgcccgggctgaaggggcacaacgggctacagggacttcccggtatagctggacatcacggcgaccagggtgcacccggctccgtcggacctgccggccctcgcggacccgcaggaccctccggccctgctggaaaagatggccgaacaggccatcctgggacggtgggcccagcaggaattcggggccctcagggtcatcagggccctgcaggccctcccggtcctcccggccctcccggtccgccaggggtttccggaggcggctatgactttgggtacgatggggatttctacagggccgaccagccccgatccgcacccagcctgcgacctaaggattatgaagtggacgcaacgctaaagtctcttaacaaccagatcgaaaccctcctcacgcccgaggggagtcgtaaaaatcccgcgagaacttgccgggatctaagactgtcgcacccagaatggtcctctggctactactggatcgacccgaaccagggctgtacaatggatgctatcaaggtgtattgcgactttagtaccggagaaacatgcatccgggcccaaccagaaaacattccagcaaagaactggtacagaagtagtaaggataagaagcacgtgtggttgggggagactattaatgctggtagccagtttgagtacaacgtcgagggagtcacctccaaggagatggccacgcaattggcattcatgcggctcctggctaactatgcgagccagaatatcacttaccactgtaaaaactcaattgcttatatggacgaagagaccgggaacctgaagaaggcagtgatccttcagggttctaacgacgtagagctggtggcggagggaaacagccggttcacctacactgtgcttgtggatgggtgttccaaaaaaaccaatgagtggggaaagaccattatcgagtacaagacaaacaagccttccagactgccatttttagatatagcacccctcgacataggcggggccgatcaggaattcttcgtggatattgggccggtctgcttcaaa

SEQ ID NO: 32455 - DNA, 4098 bp, synthetic construct
  misc_feature 1..4098: note = Description of Artificial Sequence: Synthetic coding sequence
  source 1..4098: mol_type = other DNA
atgctttcgtttgtcgatacccgcactctgcttctccttgcggtgacgctttgccttgcgacctgtcagtcccttcaagaagagactgtgagaaagggacccgctggagatcgaggaccgcggggtgaacggggtcctcctggacctcctggacgagacggagaagatggaccgacggggccaccgggacctccaggaccgccggggccacctggacttggaggcaatttcgcagcacagtacgatggtaagggtgtgggtctgggacctggtcctatgggactcatgggtccacgcgggcctcctggtgcagcaggcgccccgggcccacagggtttccaaggccctgccggtgagcctggtgaacctggtcagactgggccggccggtgcacggggcccggcaggaccgccaggaaaagcaggagaggacggacaccctggtaagccaggaaggcccggcgaacgtggggtcgtcggacctcaaggtgcccgggggtttccaggaactccaggactgcccggatttaagggcatccgaggtcataacggactggatggacttaaggggcagcccggtgcccctggagtgaagggcgaacctggtgcgcctggtgaaaacggaaccccgggacaaaccggtgcaagaggactgcctggcgagcgggggcgggtgggggcacccggtccggccggggcccgaggttcggatggttccgtgggccctgtgggacctgcgggcccaattggaagcgcaggcccaccaggctttcctggcgcacctggaccaaagggagagattggtgcggtcggaaatgcagggcccgcaggacccgctgggcctaggggcgaagtcgggctccccggcctgtccgggcctgtgggccccccaggtaacccgggggcaaacggactcaccggcgcaaagggagccgccggtttgccaggtgtggcgggtgctccaggcctgcccggacctagagggattcctgggccagtgggcgccgcaggtgcaactggggcaagaggactcgtgggagaacctggtccagcgggatcaaagggtgagagcggcaataaaggcgaacctggctccgcagggccccagggtccgccaggcccttctggggaagagggtaaaaggggacctaatggcgaggcaggctcagccgggcctcccggcccgcccgggctccgaggatccccgggatcccgaggactgccaggagcggatggtcgagcaggagtcatgggccccccgggctcccgaggtgcaagtggtccagcaggcgtcagaggtcctaatggcgatgccggacgcccaggcgagcctggattgatggggccaagggggcttccaggatcgcctggcaatatcggaccagctggtaaggaggggccggtggggctccccggaattgatgggcggcccggtccaatcggcccggcaggtgcacgtggagaaccaggcaatattggatttcctggtcctaaaggtcctacgggtgaccccgggaagaacggggataagggacacgctggactcgcgggtgcgaggggagcacctgggccagatggcaataacggtgcccaaggaccgcctggtccccagggagtgcaagggggaaagggggaacaaggaccccccggccctccggggttccagggacttccaggtccttcgggtcccgctggcgaggtcggaaaaccaggagaaagggggcttcatggggagtttgggcttccggggcctgctggcccacggggtgagcgtggcccacccggcgaaagcggcgcagcagggccaaccggacccatcggttcgaggggcccaagcggaccaccaggacctgacggaaacaaaggtgaacctggggtggtcggcgcagtggggaccgcgggtccttcaggcccgtcaggacttccaggggagcgcggggctgccggcattcccgggggcaagggagagaagggggaacctggactgaggggcgaaattggaaaccccggacgggatggtgcgagaggggcaccaggtgcagtcggtgcacccggacccgccggtgctaccggtgatcggggtgaagctggagcagcagggccggcagggccagcaggtcctcgcgggtcccctggcgagaggggagaagtgggtcccgcaggtcctaacggctttgcaggcccagcaggcgctgcaggacaaccaggtgcaaaaggagaaagaggagcaaagggtcctaagggtgaaaacggcgtggtgggtcctaccggacctgtgggggcagcaggtcctgccggtcctaacggtccgcctgggccagctggttcacgaggagacggggggccacccggcatgaccggattccccggagccgcaggccgtactggaccccctggaccgtcaggcattagcggcccgcctggtccaccaggccccgcaggaaaagaggggcttagaggtccacgcggcgatcaagggcctgtagggcgcaccggcgaagtgggtgccgtgggccctccagggttcgcgggggaaaaaggcccatccggagaggccggtaccgcagggccgcctggaactcctgggcctcagggtcttttgggagccccaggtatactggggttgccaggatctcgcggagaaagaggcttgccaggcgtggcaggagcggtaggggaaccaggaccactcggaattgcaggtccgccgggggccagagggccaccaggagcagtgggctccccaggtgtgaacggagcgcccggagaagctgggagggacggtaaccccggtaacgatggacctccgggcagagacggtcagccaggtcacaaaggagagagaggatacccaggaaacataggaccagtcggtgcagcgggggctccaggaccacatggccccgtggggccagcagggaagcatggaaacagaggggaaaccgggccaagcggccctgtcggtccagccggtgcagtcggacctcgtggtccctcggggccacaaggaatcagaggtgataagggggagcctggagaaaaaggacctagaggtctgcctggtttgaaagggcataacgggcttcaaggcctgccaggaatcgcgggtcatcatggtgaccaaggtgctcccgggtcggtcggcccggccggcccgcgtgggcccgccggaccttcaggtcccgccgggaaggatggccgtactggtcaccctggtactgtcggaccagcgggcatccggggtccgcaaggacatcagggtccggcagggccgccgggtccccctgggcctcccggaccacctggtgtcagcggtggcgggtacgacttcggatacgatggagatttctatcgggcggatcaacctagatcggccccttcgctgaggcctaaggattacgaagtggacgcaacccttaaaagcctcaacaatcaaattgaaacccttcttactcctgagggaagcagaaagaaccccgccagaacgtgccgggatcttcggctgtcacaccctgaatggtcaagcggttactactggattgatcccaatcagggttgtactatggacgccattaaggtctactgtgattttagcaccggcgaaacttgtattcgcgcccagcctgaaaacatcccagcaaagaattggtaccgttcgtcgaaggacaagaaacacgtttggcttggagaaacgatcaacgcaggttcgcaatttgagtacaatgttgagggagtgaccagcaaagagatggccacccagcttgcatttatgagacttctcgcaaactacgcctcgcagaatatcacttaccattgtaagaattcgatagcttatatggatgaagaaactgggaacctcaaaaaggcagtgattttgcagggttcgaacgatgtggaactggtggcagaaggaaattcccgattcacttacactgttctcgtggatggttgctccaaaaagaccaacgaatggggaaaaaccataatagagtacaagacgaacaagccatcccggcttccgtttctggacatcgcaccactggatatcggtggagcggaccaagagttctttgtggacattgggcctgtgtgttttaag

SEQ ID NO: 32456 - DNA, 4098 bp, synthetic construct
  misc_feature 1..4098: note = Description of Artificial Sequence: Synthetic coding sequence
  source 1..4098: mol_type = other DNA
atgctatccttcgtcgacacacgcacacttctgttgctggccgtcaccctgtgcctggctacatgtcagagcttgcaggaggagacagttcggaaggggcctgctggagatagagggccacggggggagaggggacctcctgggccacccggccgggatggggaggacggccctaccggccctcctgggcctcccggacccccaggtccacccgggcttggaggcaactttgcagcccagtacgacggcaagggggtgggtctgggccctggccccatgggcctcatgggcccaaggggccctcccggcgctgcaggcgcgcccggaccgcaaggttttcagggcccagctggggagcccggagagcccgggcaaaccggccccgccggagctcgaggcccagccggtcctcctggtaaggccggcgaggacggtcaccccggcaaacctggccgtcccggcgagcggggcgtcgtgggccctcagggtgctcggggattcccggggactccaggtcttcctggttttaagggaatccgcggacataatggcctcgacggtctgaagggccaacccggcgctccgggagtaaagggagaacccggggctcccggagaaaatggaacccccggtcaaactggcgctagaggcctccctggcgagagaggaagagtaggggcccctggaccagctggagctcggggctctgatggctcagtaggacctgtcgggcccgcaggtccgatcggctccgccggtccaccgggatttcctggggccccaggcccgaaaggagagattggcgccgtggggaatgctggccctgctggacccgccggaccacgcggggaagtggggctgccaggcctgtctggccccgtcggaccccctggtaaccccggggccaatggtctcacgggcgcgaagggagctgcaggtctgcccggggtggctggcgcccctgggcttcctggaccacgcgggataccaggacccgttggtgccgctggtgcaacaggagccagaggactcgtgggagaaccaggcccagccggatctaagggggagagtggcaataaaggcgagcctggcagcgcgggaccacagggcccacccggacctagcggagaagaagggaagcggggccccaatggagaggccggaagcgcaggtccaccagggcctcccggcctgcggggctcaccagggtcccgcggactaccaggggccgatggtagagctggggtaatggggcctcctggctctagaggagcttccgggccggctggagtccgcggtcctaatggagatgctggaaggcctggcgagccaggcctcatgggtccacgcgggctgcctggctctccaggtaacattggccctgccggaaaagaagggccggtagggctgcccggtatagatggtcgtcctggaccaattggtccggcaggagctagaggggagccgggtaatatcggtttccctggtcccaaagggcctactggcgatcctggtaagaatggagacaagggccacgcaggtctggcaggagccaggggagcccctgggcctgacggaaataacggtgcccagggcccccccggcccccaaggagtgcagggaggcaagggtgagcaggggcccccggggccacccgggtttcagggactgcccgggccatcagggcccgcgggtgaggtgggtaaacccggcgaacgcggcctacacggggaatttggcttacctggtcccgctggaccacggggcgagaggggaccccctggggaaagcggcgccgcaggacccactggaccaataggaagccggggccccagtggccctcccgggccagatgggaacaagggagagccaggcgtcgtgggcgcggtcgggacagccggcccgtcgggacctagcgggctgcctggcgaacgaggagcggccggcatccctggggggaaaggagagaaaggggagccaggcctgcgcggggaaattggtaatccaggccgagacggagctcggggggcccctggtgctgtcggagcgcccggtcccgcaggagctactggcgaccgaggcgaagccggggcggcaggaccggccggccccgccggaccacggggtagccctggtgaaagaggcgaagtaggtcctgcaggaccaaacggcttcgcaggaccagccggtgcagccgggcagcccggggccaagggggagcgcggcgcaaaaggaccaaaaggagaaaacggtgtagtaggaccaacaggcccagtcggcgcggcgggccccgccgggcccaacggccctcctgggcccgccggaagccgtggagatggcggcccacctggaatgaccggcttccctggagcggccgggagaaccggaccacctggtccatcaggaattagcggtcctccgggtccgccgggcccggcaggcaaggaaggcctgagaggtccaagaggtgaccaggggcctgtgggaaggacgggggaagttggcgcagtgggtccacctggttttgctggagagaaggggccctctggcgaagcagggaccgcaggtccgcccggaacacccggcccgcaaggtctgctgggggctcctggcattttagggctacccgggtcgcgtggtgaaagggggttaccgggggtcgccggcgcggtgggcgagcccggccctctgggaatagcaggaccgccgggagctcggggcccacccggcgctgtggggtctccgggggtcaacggtgcacctggcgaggcagggcgggacggcaaccctggcaacgatggtcctcccggccgagatggacagcccgggcacaaaggcgagagaggctaccccggaaacatcggcccagttggtgcggccggcgcccccggtcctcacgggcccgtaggcccagccgggaagcacgggaaccgcggagagactggcccctctgggcctgtgggccccgccggggctgtcggtcctcgtggccctagtggtcctcagggaatcaggggtgacaagggggaacctggcgagaagggtccacgtgggcttccgggactcaagggccataacgggctccaggggctaccaggaattgccggacaccacggagatcagggagcgcccggctcggtggggccagccggtccaagaggaccggcaggacccagcgggcctgcaggcaaggacgggcgaaccgggcatccggggaccgtgggaccggcggggatccgaggaccacagggacatcaagggccggccggccccccaggacctcccggacccccaggccctccaggcgtgtccgggggcggctatgattttggttacgacggtgacttttatagagctgatcagcctagaagcgccccatcgttaaggccaaaggattacgaagtagacgcaactctaaaaagcctgaacaaccagatcgagacactactgactcccgaaggcagccgtaagaacccagcccgcacgtgccgggatctgagactgtcacatcccgaatggtcatccgggtattactggattgatcctaatcaaggctgcactatggacgctattaaagtctattgcgacttcagcaccggagagacttgtattagggctcagcccgagaacatccctgccaaaaactggtatcgctcttctaaggataagaagcatgtttggctgggcgaaaccatcaacgccggttcccagttcgaatataacgtggaaggggtgacatccaaggagatggcaactcagttggccttcatgagacttctggctaattatgcaagccagaacatcacctatcactgcaaaaactccattgcatacatggacgaggagactggcaatttaaagaaagctgtaatcctgcagggaagcaacgacgttgagttggtggcagaaggcaactctcgctttacatacacagtcctggttgacgggtgttcaaagaaaacaaatgaatggggaaagacaattatagaatataaaaccaacaaaccttctagattgcccttcctggatatcgcacccctggatattggcggggccgaccaggagtttttcgtggatatcgggcctgtgtgcttcaaa

SEQ ID NO: 32457 - DNA, 4098 bp, synthetic construct
  misc_feature 1..4098: note = Description of Artificial Sequence: Synthetic coding sequence
  source 1..4098: mol_type = other DNA
atgctgtcattcgtggacacgcgtaccctcctgctgctggcggtgaccctgtgtctcgccacctgccaatccctccaggaggaaactgtcaggaaaggtccagcgggggacagaggaccacgcggcgaacgaggtcctcctggcccgccgggtcgcgacggagaggatggtccgactggcccaccaggacccccaggtccaccgggtccgccaggactcggaggtaattttgcagctcagtacgatggtaagggggtgggactcggcccgggtccgatgggactgatggggccccgaggcccaccaggcgctgccggtgccccgggtccgcaagggtttcaagggccagctggagagccaggtgaaccgggacaaaccggtccagccggcgcgcgaggccctgccgggccaccaggaaaagctggagaagacgggcatccgggaaagcctggccgcccaggggagcgcggagtcgtaggtccccagggagctcgcggttttccgggaaccccgggcctgccggggttcaagggcattcgaggtcacaacggactggacggtctgaagggacagccaggggctccgggagtcaagggagaacctggggcccccggggaaaacggaacccctggccaaactggcgcccgcggcttgcctggggaaaggggtagagtgggggcaccgggaccagccggtgcccgtggaagtgatgggtcggtgggtcccgtgggacccgccggaccgatcggttccgctggtccacccgggttccccggagcgcctggccccaagggggagatcggagctgtcggaaatgccggcccagcgggaccagcaggtccgcggggcgaggtggggctgccaggtctgtccggccctgtgggtccgccgggaaacccaggagctaacggcctgacgggggccaagggggctgcgggcctgcccggcgtcgcaggagcgcctggactgccgggtccgcggggaatccctggacctgtgggcgccgccggagccaccggagcccggggactcgtcggcgagccagggccggcagggtccaagggggaatcaggaaacaaaggagaaccgggctcagccggacctcaaggccctcccgggccttccggcgaagaggggaaacgcggccccaacggcgaggccggtagtgccggaccgcctggtcccccgggactccgcggatcaccgggaagccgggggttgccaggagccgatggacgcgccggagtaatgggccctccaggatcgagaggagcgtcaggacccgccggtgtgcgcggtcccaacggtgatgccggaagaccgggcgaacctgggctcatggggccacgtggactgccaggaagccctggaaacatcggcccagcaggtaaggaggggccggtcgggcttccgggcatcgacggacgtcctggaccgattggaccggccggcgctcgtggcgagccgggaaatatcggtttccctggacctaaaggaccgactggggaccctggaaagaatggcgacaagggacatgctggcctggccggtgcacgcggagcgccgggtccagatggtaacaatggagcccagggacctccgggaccgcaaggagttcaggggggcaagggtgagcagggaccaccagggccgcctggattccaaggactgccgggaccatccggtccggcaggagaagtcggcaagcccggagagcgaggactgcacggcgaattcggattgcctggaccagccggcccgagaggcgagagaggccctccaggcgaatcgggcgcggcagggccgactgggcctatcggatctcgcggaccaagcggcccacctggaccggacggaaataaaggagaacccggggtcgtaggcgccgtgggaacggccggccctagcggtccttcaggcttgccgggtgaacgcggagctgcgggcattcccggaggaaaaggagaaaaaggagaaccaggcctgcgcggggaaatcggaaacccagggcgcgatggagcgcgcggagcgccaggggctgtgggcgcgcctggaccggcgggggccacgggcgatagaggagaggctggagcagccggtccagcagggcccgctggcccgcgaggctcgccaggcgagaggggagaagtgggcccggctgggccgaacggcttcgcaggacctgcgggtgcagcgggacagccgggagccaagggcgagcggggcgccaagggacctaagggtgaaaatggtgtggtggggcctaccggacccgtcggcgctgcaggccctgctgggccaaacggaccgccgggaccggcaggcagccgcggtgacggagggcctccagggatgactggatttccgggggcagcaggaagaactggacctccgggcccgtccgggatctcgggaccccccggacccccgggcccggcgggtaaggaaggactgcgcggaccacggggtgaccagggaccagtgggcaggaccggggaagtgggggcagtgggccccccgggattcgctggagaaaaaggcccgagcggagaagctggaaccgccggaccgcccggaactccgggcccgcagggactgttgggagcgccgggaatcctgggcctccctggctcgagaggagagagagggctccccggggtggccggcgccgttggagagcctgggccgctcggaatcgcaggaccgccaggggctcgcggtcctcccggagcggtgggatccccaggagtgaacggggcgccgggagaagcgggccgggatggaaatccgggtaacgatggaccgccaggacgcgacggtcagccaggccataagggcgagagagggtacccgggaaacatcggaccggtgggcgccgcgggggctccggggccgcacggcccggtggggccggccggaaagcacggaaaccggggagaaactggaccgtcgggcccagtggggccggcaggcgccgtcggcccaagggggccctcgggacctcagggcattcggggggataagggcgagcctggagaaaagggaccgcgggggttgccgggacttaagggccataacggacttcaaggactccccggcatcgcgggacatcacggtgaccaaggggcacctggatcggtgggtccggccgggccccgcggccccgcagggccgtccggaccggcaggaaaggacggacgtaccggccaccctggcaccgtgggaccggcgggaatccggggaccgcagggacaccaaggtcccgccggacccccagggcccccaggaccgcccgggccacctggcgtcagcggcggaggatacgacttcggttacgacggcgacttttaccgggcggaccaaccaaggtcggcaccgtcgctccgcccaaaggattacgaagttgacgccactctgaagtcactcaacaaccagatcgaaacccttctcaccccagagggctctcggaagaatcctgcccggacttgtagggatctgcggttgagccatccagaatggtcgagcgggtactactggattgatcctaatcagggttgcactatggacgccatcaaagtctactgcgatttctccacgggcgagacttgcatccgggcccagcccgagaatatcccagcaaagaactggtaccgctcatcgaaagacaagaaacacgtgtggcttggtgaaactatcaatgccggctcccagttcgagtataacgtggaaggcgtcacctcaaaggagatggccacccagctcgcgttcatgcggttgctggctaactacgcatcgcagaacataacctaccactgcaagaactccattgcgtacatggacgaagaaaccgggaatctgaagaaagctgttatcctgcagggatccaatgacgtggagcttgtcgcggagggaaatagccggttcacctatactgtcctggtggatggatgctctaagaagactaatgagtggggcaaaaccattatcgagtacaaaactaacaaaccctcgcggctgccgtttctggacatcgcgcccctcgacatcggaggagccgaccaggagttcttcgtggatatcggtccggtttgtttcaag

SEQ ID NO: 32458 - DNA, 4098 bp, synthetic construct
  misc_feature 1..4098: note = Description of Artificial Sequence: Synthetic coding sequence
  source 1..4098: mol_type = other DNA
atgctgtcctttgttgatactaggacgctgttgctactcgcagtaaccctatgtctggccacttgtcaatcattacaggaggagacagtgcgcaaggggcctgccggagatcggggtccccggggtgaacgcgggccaccgggtccaccagggagagatggagaggatggcccaacaggtcctcccggtccccctggtccccccggaccccccgggctgggcggcaattttgctgctcaatacgacgggaagggtgtcggccttggccctgggcctatgggactcatgggcccccgcggccccccgggcgccgcaggagcccccgggccccaggggtttcagggtcctgccggagaaccaggagaaccagggcaaaccggacccgcaggagctaggggtccagcaggcccccccggcaaggccggcgaggacggccaccctggcaaacccgggcgacccggcgagagaggagtcgttggccctcaaggggcccgtggattcccagggacaccaggcctacccggcttcaaggggatcaggggacataatgggttggatggcctgaaaggccagcccggagcccctggtgtcaaaggggaacccggagcaccaggagaaaatggtacacccggccagacgggcgcacgcggcctgcctggcgagaggggccgggtgggagcccccgggcccgctggggctcgcgggtccgacggctctgtgggcccggtagggccagcaggacccatcgggtccgctggaccccccggcttcccaggggctccgggccctaagggagagatcggtgccgtgggaaacgctggccccgccggcccggccggtccccggggtgaagttgggcttcccgggctttcaggaccagtgggaccgccaggaaacccgggagcaaatggccttacaggtgccaagggcgcagctgggcttcccggagtggccggcgcgccggggctgccagggcctcgtggcatccccggtcctgttggggccgcgggcgcgactggggcccgcggtcttgtgggggagccaggtccggcgggttccaagggggagagcggtaataagggagagccaggaagtgctggcccacagggccctcccggcccctcgggagaagaaggaaagaggggcccaaatggagaagccggtagcgctggcccacctggccccccagggctgaggggaagccccggtagccggggtctccctggtgctgatggacgcgcgggagtcatgggtcccccagggagcagaggggcctccggaccagcaggcgtcaggggacccaacggggatgcgggacgaccaggtgagcctgggctgatggggccaaggggcctgccaggatctccaggcaacatcggcccggcaggcaaggaaggccccgtgggcctgcctgggattgacggacggcccggacctatcggtcccgctggtgcgaggggcgaaccaggcaacatcggctttcccgggcctaagggaccaactggggaccctgggaaaaacggggataaggggcacgcaggcctcgcaggggctcggggagcccccggaccagacgggaacaacggagctcagggccccccaggaccgcaaggcgtgcaaggcggaaagggcgaacaaggcccaccagggcctccgggcttccaaggcctgcccggaccaagtggacctgctggagaggttgggaaacccggcgaaagggggctacacggagaatttgggctgcctgggccggcggggccccggggcgaaagaggaccccccggtgagtctggggccgcaggtcccaccggtccaatcggctccaggggaccatctggtccaccaggcccagatgggaacaaaggagagccaggagttgtgggcgccgtgggcacagcaggtcctagcggtccaagcggcctccctggcgagcggggggcggcgggcattcccggagggaaaggggagaagggtgaacctgggctgcgtggcgaaatagggaatcctggccgtgacggagcaagaggtgcacctggagccgtgggtgctccggggcctgcgggcgccacaggtgacaggggcgaggccggggccgccggccccgcgggccccgccggcccaagaggatcacccggtgaaagaggggaggtgggccccgctggtccaaatggctttgccggacctgctggggcagctggccagccaggcgccaagggtgagcgaggtgctaagggacctaaaggggagaacggtgtagtaggccccacaggccccgtgggggcggcaggaccagcgggtcccaacggcccaccaggccccgccgggtccaggggcgacggtggccctcccggaatgacaggatttccgggggctgctggtcgaacgggcccaccggggcccagcggcataagcggaccaccagggcctcccggcccagcaggcaaggagggactacgtgggccccgcggagaccagggccccgtgggccggacgggcgaagtcggtgccgttggcccccccggattcgctggtgagaagggcccttctggggaggcaggcaccgcgggcccacctggcacaccaggcccacagggcctgctaggcgcgccaggtatcctcggcctccctggatcacggggagagagaggactgcccggtgtggccggggcagtgggggaacctggtcctctcggcatcgcagggccgcctggcgcccggggccctcccggtgccgtgggcagccccggagtgaacggtgctcctggtgaagctgggcgagacgggaatcccggcaacgacggtccccctggcagggatggtcagcccgggcataagggcgaacgcggatatcctggcaatatcggccctgtgggtgctgcaggcgccccgggaccccacgggccagtgggaccagcggggaaacacggaaatcgtggcgagacaggtcccagtggcccagtaggacccgcaggggctgtgggcccccgaggacctagcggtcctcagggaattagaggggataaaggggagcccggggagaaggggccccgcgggctgccaggtctgaaaggacacaatgggctgcagggccttcccggaatagccggacatcatggggatcagggtgcaccagggagcgtgggtccggcgggaccacggggccccgcagggccctcaggacccgctgggaaggacgggaggacaggtcatcccgggacggtgggacctgccggaataagaggccctcagggccatcaggggccagcagggcccccggggcccccaggccccccaggacctccaggcgtctcagggggggggtacgattttggttacgatggggatttttaccgggctgaccagcccaggtctgcgccgagccttcgaccaaaggactacgaggtggacgctactcttaagtctttaaacaatcagattgagaccctgctgacaccagaaggctcgcgcaaaaatcctgctagaacctgtcgcgacctgcggctcagccacccagagtggagctccggttactattggatagaccctaaccagggttgtaccatggacgctattaaggtctattgtgattttagcacgggcgaaacatgcataagagcgcagcctgaaaacattcccgctaagaattggtacagatccagtaaggataaaaagcacgtgtggttgggcgaaacgattaacgccggtagccagttcgagtataacgtcgaaggtgtaaccagcaaggagatggctacgcagctggcgtttatgaggctgctggctaactatgccagtcaaaatattacttaccattgcaagaattctattgcctacatggatgaggagacagggaatctcaaaaaagcagttattcttcagggctccaatgacgttgagcttgtcgccgagggcaatagccgatttacctacaccgtactggtagacgggtgttccaagaaaactaatgagtggggcaagactatcattgaatataaaactaataagcccagccgactgccattcttagatatcgcccccctggacatcgggggcgctgatcaggagttctttgttgacatcggacccgtgtgttttaag

SEQ ID NO: 32459 - DNA, 4098 bp, synthetic construct
  misc_feature 1..4098: note = Description of Artificial Sequence: Synthetic coding sequence
  source 1..4098: mol_type = other DNA
atgctatcgtttgtggatacccgtactcttcttctcttagctgtgaccctgtgcctcgctacatgccagtcgctccaggaggagacggtaaggaagggcccagcaggggatcggggtccgcgaggggagcgaggtcctcccggccctcctggcagggacggcgaggatgggcccacaggtccaccaggacctcctggtccccctgggccccctggcctcggtggaaacttcgcagcacagtacgatggaaaaggggtgggcctaggtcccggccccatgggcttgatggggcctcgaggcccacctggcgctgcgggcgcacccggtccccagggattccaggggccggccggagagccaggcgagccaggccagacggggccggcaggcgcaaggggcccagcgggtccaccagggaaagctggtgaagacggccacccaggaaagcctggcaggccaggggagcgtggcgttgtgggcccacagggggccaggggtttcccgggcactccagggctacccggatttaagggtattcgtggccataatggcctcgacggcttaaagggtcagcctggagcccctggcgtgaagggcgagcccggggcccccggcgagaatggaaccccaggccagacgggagcccgtggcctgcctggagaacggggacgcgtcggggcacctggtccggccggtgcccgcggaagtgatggtagtgtcggtccggtaggccccgccggccctatcggctccgctggcccccccggcttcccaggcgccccaggacccaagggagagatcggtgccgtgggaaatgccggaccagctgggccagcagggccaagaggagaggtgggtttaccaggcctaagtggtcctgtcggacctcccggcaaccctggggctaatggccttacaggagcaaagggagctgctggcttgcccggtgtagccggcgcacccggactgcccgggcccaggggcatccccggcccagtgggcgctgcaggtgcgacaggagctcggggtctggtgggagagcccgggcctgcaggttcaaaaggtgagagtggcaataagggggagccgggctctgccggtcctcaggggccacccggaccaagcggagaggagggaaaacgtggccctaacggcgaggcgggctcagccggacctcccgggcctccagggcttcggggttcacccggcagccggggcttgcctggcgctgatggccgggcgggggtgatgggaccacctggaagtagaggggccagtggtcccgcaggcgtgagagggcccaatggggacgcgggcaggccgggtgagcctggtttgatgggcccaagaggattgcccggatccccagggaacatcggacccgccggcaaggaaggcccagtgggcctccccggcatcgatggtaggccaggccccatcgggcccgccggcgcacgcggagagccgggcaatattggttttccagggcctaagggcccgacaggtgaccctggaaagaacggtgataagggtcacgcaggattggccggtgctcgaggtgcaccgggccccgatggcaataatggagctcagggcccccctggcccacagggtgttcagggaggcaaaggggaacaaggccctcctggcccacccggattccaaggcttgcccgggcccagcggacccgccggcgaagtggggaaaccaggcgagcgaggactccatggagagtttggattgcctggccccgcggggcccaggggcgaaagaggcccaccaggcgagagtggcgcagccgggcctactgggcccattggatctcgagggccctccggtcctcccggccctgacgggaacaagggggaacctggggttgtcggagcagtgggtaccgcaggcccttcaggtccatcagggttgccgggcgaaaggggtgctgccggcatcccgggagggaagggagagaagggtgagcccggcctgagaggagagataggtaatcccggtcgagatggagccagaggtgctcctggtgccgtaggggcacctggaccggcaggggctacgggcgaccgcggggaggcaggggccgctggccccgctggaccagccggcccaaggggcagcccaggggagagaggagaagtaggtcctgcgggaccgaatggcttcgccggacccgctggagccgctggtcaacccggcgctaaaggggagaggggggccaagggaccaaagggagaaaacggggtggttggtccaactggccctgttggagccgccgggcccgcagggcccaacggtccacctggcccagccggtagtagaggagacgggggccctcctggcatgacagggttccccggtgcagcggggagaactggtcccccaggacctagtgggatcagcggacccccagggcctccagggccggctgggaaggaaggattgagggggcctagaggtgatcaggggccggtgggacggacgggcgaggtaggcgcagtgggaccgccagggtttgctggcgaaaaaggacccagcggagaggccggtacagcagggccaccgggcacacctgggccccagggcctgctgggcgctcctggaatcctcggactgccaggcagtagaggtgaacgcggacttcccggcgttgccggagctgtcggggaaccaggcccgctgggtattgctggccctccaggagcgcgcggcccccctggcgctgtgggatccccaggagtgaatggggctcctggggaagctgggcgtgatggtaatcctggtaatgatggcccccccggtagggacggacaacctggccacaagggcgagcgcggttacccgggcaatatcgggcccgtgggggccgccggggcgcccggtcctcacggcccggtgggacctgcaggcaaacatggcaaccgcggtgagaccgggccctcaggccccgtaggaccagcaggtgctgtgggaccaagaggtccaagtggacctcagggaatcaggggagacaaaggtgagccaggcgagaagggtcctagggggctcccaggactgaagggtcataacgggctgcagggtttgccagggattgctggacaccacggcgaccagggagcgcctggttctgtgggacccgctggcccccgcggtcccgcgggaccatctggaccagccggtaaagatggtcgtactggtcatccaggcactgtaggcccggccggaatcagagggccccaaggccaccaaggtccagcaggacccccgggcccacctgggccaccaggaccacccggggtgagcggaggtggatatgatttcgggtacgacggggatttttatagggctgaccagccccgcagcgccccttccctgagacctaaggactatgaggtcgacgcgacactgaaatcgctcaacaatcagattgaaaccttgttaactccagaaggctcacggaagaaccccgccagaacctgtagggaccttagacttagtcatccggaatggtccagcggatattactggatagatcccaatcagggctgtactatggacgcaataaaggtgtattgcgatttttcaacaggagagacttgcattcgagcgcagccggagaacattcctgcaaaaaactggtaccgttccagcaaggacaagaaacacgtgtggttgggcgaaactattaacgccggttcccagttcgagtacaatgtggagggagtgacatcaaaagagatggccactcagttggcttttatgcggctgctggctaattatgcgtctcagaacatcacctaccattgcaaaaacagcatagcctatatggacgaggagaccggtaatctgaagaaagccgtaatcctccaaggtagtaatgatgtggagctcgtcgctgagggcaacagtcggttcacttatactgtcctggtggacgggtgcagtaagaagacgaacgaatgggggaagactatcattgaatataagaccaacaagccctcgaggttgcccttcctggatattgcccctctggatataggcggagccgatcaggaattcttcgtcgacatagggccagtgtgcttcaag

SEQ ID NO: 32460 - DNA, 4098 bp, synthetic construct
  misc_feature 1..4098: note = Description of Artificial Sequence: Synthetic coding sequence
  source 1..4098: mol_type = other DNA
atgctgtccttcgtagatacccggacattattgctcctcgctgtcactctttgtttggctacttgtcagtccttacaagaagagaccgtgcggaaaggcccggctggtgacagaggcccacggggagaacgcggccccccaggcccaccgggccgggacggtgaagacggtcccaccgggccaccgggccctccagggccaccgggccctcccggcttagggggtaacttcgctgcccagtatgacggcaaaggtgtgggtctcgggccggggccaatgggtttgatggggcccaggggccctcccggagctgcgggggcccctggtcctcaggggttccagggaccagcaggtgagccgggggaaccaggccaaacgggccctgccggcgctcggggcccagccgggccgcccggcaaggctggcgaagatggccaccctggcaagcccggaaggcccggcgaacggggcgtggttggacctcagggggcccgagggttcccaggcactcccggactgccaggctttaaagggattcgcggtcacaatgggttggatgggctaaaaggacagcctggggccccaggcgtcaagggggagcccggggcccccggagaaaacgggacacctgggcaaacaggtgcccgcggtctacctggcgaacggggccgtgtcggtgctccgggcccagccggggctcgtggcagtgatggctctgttgggccagtgggtcctgcagggcccatcggatctgcgggtcctccaggattcccaggagctccaggacctaaaggggaaattggagcagttggcaatgccggcccggcgggacctgcgggaccccgcggggaggtgggcctccctggcctcagtggaccagtcgggccccctggtaatcccggcgctaacgggttaacgggggctaaaggagctgcaggtttacctggcgtggccggagcaccaggcttgcccgggcctcggggaattcccggccccgtgggggctgccggagcaacaggggccagggggttagttggggaacctggacctgccgggagcaagggcgagtcgggaaataagggggagccgggaagcgccgggccgcaaggacctcctgggcccagcggtgaggaaggaaaacgggggccaaatggagaagcaggttcggctggccctccaggcccacctggactgaggggctctccaggcagtagggggctccccggcgctgatggtagagcgggcgttatgggccccccagggtcacggggggcttccggccccgcgggcgtcaggggtccaaatggcgatgccgggcgccctggagaacccggcctaatgggcccccgcggcctgcccggctcgccaggaaacatcggaccagctggcaaggaggggcccgtgggcctcccaggaatcgacggaagaccaggtccaattggtcccgccggggcccggggagaaccagggaacatcggatttccagggcctaagggcccaacgggcgaccccggcaaaaatggcgacaaagggcacgccggcctggcaggagcaagaggcgctcccgggccggatggcaacaatggcgctcaggggcccccgggaccccagggagttcaagggggaaagggggaacaggggccaccaggtccccctggctttcaaggccttccgggaccttcaggtcctgctggtgaagtagggaagccgggcgaacggggccttcacggagagttcggtctccccgggcccgcaggtccccgaggggagaggggcccccccggcgagagcggcgccgcaggccccactgggcctatcgggtcccgaggaccttccgggccaccgggaccagatggaaataagggagagccaggagtggttggcgctgtgggaacagcaggaccatcaggaccgagcggcctgcctggggaaagaggtgcagcagggatccctggtggcaaaggagagaagggggagcccggcctgcgcggagaaatcggtaatcccgggcgggatggggctaggggcgccccaggggctgtgggagcccctgggccagccggcgctacgggggacagaggcgaagcaggggctgcaggaccagcaggacccgctgggcctcggggaagcccgggggaaagaggagaggttggccccgcgggccctaatggctttgccggcccggcaggggctgccgggcagcctggcgctaagggcgagagaggtgccaagggcccaaaaggcgagaacggcgtcgtgggacctacaggccctgttggagcagcaggtccggcaggacccaacggtcccccggggcctgcagggtctaggggggatggaggtcccccaggtatgaccggcttcccaggcgctgcaggccgaaccggccctcctggtccatcaggcatatccggtccccctggtcctcctggcccagccggaaaggaagggctccggggcccgagaggagaccagggcccggttgggagaacaggcgaagttggggccgtggggcccccaggatttgccggcgaaaaaggaccttcaggggaagccggcacagcagggccacctggaactcccggtcctcaggggctgctcggagccccagggattctgggtctgcccggtagtaggggagaaagaggattgccaggcgtggctggtgccgtgggcgagcctggacctctgggcatagccgggccgcccggagccagagggccaccgggagcagttggctctcccggcgtgaacggagctcccggggaagccgggagggatgggaaccctggaaatgacggtcctcccggcagagacggccagcctggacataagggcgagcgcgggtaccccgggaatatcggacccgtgggagcagcaggggctcctggaccacacggaccggtgggcccggccggtaagcatggcaacagaggagaaacgggccctagcggccctgtcggacccgccggagcagtgggaccacgaggaccctccggcccacaaggaatacggggtgacaagggtgaaccaggagaaaaaggtcctagaggcctgcctggccttaaaggtcacaatgggctacagggactgccgggcatcgccgggcatcacggcgatcaaggcgcccctggcagcgttgggccagctggaccacggggaccggccggaccctcggggcctgccggcaaggatggcaggacaggccaccctggtacggtgggtcctgcaggtattagggggccccaggggcatcaggggccagcggggcctcccggcccgcctggtcctcccgggcccccgggcgtttctggcggaggctatgatttcggttacgacggcgacttctaccgtgccgatcaacccaggagtgcaccgtccctgcgccccaaggattatgaggtcgacgccacactgaaatcccttaacaaccagatcgagacgctcctcactcccgaggggtctaggaagaatcccgccagaacctgccgtgatctgcggctgtcacatccagagtggtccagcggatactactggatcgatcctaaccagggatgcaccatggacgcaattaaagtatactgtgacttctccacaggagagacctgcattagagcgcagccggaaaatatacctgccaagaattggtaccgttctagcaaagacaaaaaacatgtatggctgggagaaaccattaatgccggctctcaatttgagtacaacgtcgaaggcgtgacatcaaaggagatggccacccaacttgccttcatgcgactgttggcaaattacgcctctcagaacattacgtaccactgtaaaaactctatcgcatacatggatgaagagacaggcaacctgaagaaagcagtgatccttcagggaagcaatgacgtggagctggtggcggagggaaattctcgcttcacttacaccgtgctggttgatggatgttctaagaagacgaacgagtggggaaagactattattgaatataagaccaataagccatcacggctcccctttctagacattgccccccttgatattggcggcgcggatcaggagttcttcgtggatataggaccagtctgttttaag

SEQ ID NO: 32461 - DNA, 4098 bp, synthetic construct
  misc_feature 1..4098: note = Description of Artificial Sequence: Synthetic coding sequence
  source 1..4098: mol_type = other DNA
atgctgtcattcgttgacacgcgcacactgctgctgctggccgtgacgttgtgtctagccacctgccagagcctgcaagaggaaacggttcgtaagggcccagcgggtgaccgtgggccacggggggagcggggcccaccgggtcctccaggtcgagatggtgaggatggtccgaccggtccgccggggcctcctggtccaccgggaccgccagggctcggtggaaattttgcagcgcagtacgatgggaaaggcgtgggcttgggacctgggcctatgggcctgatgggtccacggggcccaccaggtgccgcgggcgcgcctgggcctcaaggctttcaggggccagcgggcgaaccgggtgaacctgggcagaccggtccagcaggcgcacgtggcccagcgggcccaccaggtaaagcaggtgaggacggccacccaggcaagccaggccggcctggagaacgcggcgttgtcggcccgcaaggtgcaagaggcttcccaggcacgcccggtctgccaggctttaaaggcatccgcggtcacaacgggctggacggcctcaagggccaaccgggcgcgccgggtgttaagggagagccaggtgcacctggcgaaaatggtaccccaggtcaaaccggtgcccgcggattgcctggcgaacggggtcgcgtgggggccccgggtccggcgggagctcgcggcagcgacggtagcgtcggcccagtggggccagccggcccgataggctcagcaggccccccgggtttcccaggtgcccccggccccaagggcgagataggggccgtgggcaatgcaggcccagcaggtcccgcaggcccacgcggcgaggtcggcctacctggtctaagcggtccagtgggcccacccggtaatccaggcgctaatggtttgaccggcgcaaagggcgctgccggcctgcctggcgtagcaggcgcacctggcttgccgggcccgaggggtatccctggccctgtcggtgcagcaggcgccaccggcgcgcgtggcctggtgggggagccaggtccggccggcagcaagggggagagcggcaacaagggtgagccaggtagcgcgggtccccaagggccgccgggcccgagcggtgaagaaggcaagcgaggtccgaacggcgaagcgggcagcgcagggcctccggggcccccaggattgcgcgggagcccgggatcgcgcggcctgcctggtgcggatggtcgcgctggggttatgggtccgccaggtagccgcggcgccagcggccctgctggcgtgcgcggtcctaatggtgacgcaggacgcccaggagagccgggcctgatgggcccgcgcggcctgccgggttcaccaggcaatattggaccagctggcaaagagggaccggtaggtctgccgggcatcgatggccgtccaggtccgattggtcctgctggtgctcgtggtgaaccaggcaatatcggttttccaggcccaaagggccctacgggcgacccgggtaaaaatggcgataaaggccatgctggcctggctggcgcccgtggcgccccaggaccggacggtaataatggggctcagggtccacctggcccgcagggtgtccaaggtggtaagggcgagcagggtccgccaggcccaccgggcttccagggcctgcccggtccgagtggcccagctggagaagttggaaagccaggtgaacggggtttgcatggagaattcggccttccgggacctgcggggccgcgcggtgaacgcggccctcctggagaatcgggcgcggcaggcccaaccggtccaatcgggtctcgaggcccatcagggcctccaggccctgacggcaataaaggtgagccgggggttgtgggcgccgtcggcacagcgggtccgagcggtccgagcggcctcccaggcgagcgaggcgcagcgggtatcccaggcggcaagggcgagaaaggcgaaccaggtctgcggggcgagatcggtaaccctggccgcgatggtgcgcgcggtgcgccaggcgccgtgggcgctccgggtccggcaggcgcgacgggagaccgcggcgaggcaggtgctgcggggccggctggtccagccggtccacgcggctcccccggtgagcgcggtgaggtggggccggccggtcctaacggtttcgcgggacccgcgggtgcagctggacaacctggagcaaagggcgagcgcggcgctaagggaccaaagggcgagaatggtgtcgtgggtccgacgggccctgttggggccgcggggccggccggcccaaacggcccccctggtccggcagggagcaggggcgacgggggccctcctggtatgaccggtttccctggagcggcgggtcgcactggcccgccgggtccttccggcatctctggtccgcctgggcctcctggccctgccggtaaagagggcctgcgcggtccgcggggcgatcaaggacctgtgggcaggacaggagaggtgggagccgtaggcccgccggggtttgctggcgaaaaaggtccatctggagaagcaggtaccgccggtccaccgggcactcctgggcctcagggtctgctgggtgcacctggcattttgggtttgccgggatctcgtggggagcgtggtctgccaggagttgctggggctgtgggtgagccaggcccgttgggcatcgcagggcctcctggagcaaggggcccccctggtgcggtggggtcccctggcgtgaatggtgcaccaggtgaagcaggacgcgatggcaatcctgggaatgacggcccgccggggcgtgatggacaaccgggtcacaagggggagcgaggctacccgggtaatatcggtccagtcggtgcggcgggtgcaccggggccgcatggtccagttggtcctgcgggcaaacatggaaaccgcggcgaaaccggtccgagcggcccggtcggtcctgcgggagcggtcggcccacgtggccctagcgggccacagggcattcgtggtgacaagggcgaaccaggggaaaagggcccgcgcggactgccagggctgaagggccataatggcctacagggtttgcctggcattgcagggcatcacggggaccaaggtgctccgggtagcgtgggcccggccgggcctcgcggcccagccggccctagcgggcctgcaggtaaagatggccgtaccggacatccaggaacagtgggccctgctggtatcagaggcccacagggccatcaaggacctgccggccctccgggtcctccgggcccaccagggccgccaggtgtgtctggaggaggctacgacttcgggtacgacggcgatttttaccgcgctgaccagccccggtctgcacccagcttgcgccctaaagactacgaagtagacgcaaccctgaaaagcctgaacaatcagattgagacgctgctcaccccggaaggtagccgtaagaatccagctaggacctgccgcgatctgaggctgtcgcaccctgagtggagcagcgggtattactggattgatccgaaccaaggctgtacgatggatgctattaaggtttattgcgacttcagtaccggcgagacttgcattagagcccaaccggaaaacataccagccaaaaactggtatcgtagcagcaaggataagaagcatgtgtggctgggcgagactatcaacgcaggcagccaattcgagtataacgtcgagggcgtgacgagcaaggagatggccacacagctggcatttatgcgtctgttggccaattatgcgtctcaaaacattacctatcactgtaaaaattccatcgcatatatggatgaggaaacggggaacctgaaaaaagcggtgatactgcaaggctccaatgacgtcgagctggtggcagagggtaatagccgttttacttacacggtgctggtggatggctgcagcaagaagaccaacgagtggggtaagaccatcatcgagtataaaacgaataagcctagcagactgccatttctggatatcgcccccctggacatcggcggcgccgaccaagaattttttgtggacatcggcccagtctgctttaaa

SEQ ID NO: 32462 - DNA, 4098 bp, synthetic construct
  misc_feature 1..4098: note = Description of Artificial Sequence: Synthetic coding sequence
  source 1..4098: mol_type = other DNA
atgctgagtttcgtggatactagaacacttctattgctggcagtcactctgtgtctagctacgtgccagagtctgcaggaagaaacggtgcggaagggaccagccggagatagaggacccaggggggagagaggacccccaggcccccccgggcgggatggcgaagacggccccaccgggccgcccggccctcccggaccgcccggccctcccgggctcggcggtaactttgcagcacagtatgacggaaaaggagtagggttgggacccggccctatgggacttatgggcccacgagggccaccgggcgctgccggcgcccccgggccccagggatttcagggcccggcgggagagccaggtgaacctggccagactggacctgcgggggcccgcggcccagccggtccaccaggaaaggccggcgaggacggacacccgggaaaacctggaagacccggggagagaggcgtcgtggggcctcagggcgcaaggggcttcccaggtacgcctggtctgccaggctttaaagggatccgagggcacaacgggcttgatggcctgaaaggccagccgggggcccctggcgtcaagggggagccgggggctcccggagaaaacgggacaccgggtcaaacaggcgctcgggggctgccaggcgaacgcggccgtgtcggcgcacccggacccgctggagctcggggctccgacggaagtgtggggcccgtggggcctgccgggcccatcggatcagcaggaccaccagggttcccaggcgcccccggcccgaaaggagagattggcgccgtggggaatgctggtcctgctggaccagccggaccgcggggcgaagtgggactgccaggccttagtgggcccgtcggcccgcccggcaacccaggagccaatggtttaactggcgccaagggcgcagccggtttgcccggggtcgcaggagccccaggcttgccgggtccccgcggcataccaggcccagttggtgctgcaggagcgaccggtgccagaggactcgttggggagccagggccagccggcagcaagggagaaagcggaaataagggggagccgggtagcgcagggcctcagggcccccctggaccctctggcgaggaaggcaagcgcggacctaacggagaggccggctctgctggaccaccaggacccccaggactgaggggaagccctggatctcgcggtctgcccggggctgatgggagagccggcgtgatgggccccccgggctcgcgaggtgcatctggaccagctggggttcgcggacctaatggagacgctgggcgccccggagagccaggattgatgggaccaagagggcttccaggctcacccggaaatattgggcctgcaggcaaggaaggcccagtggggctccccgggattgatggtcggcctggtcctatcggcccagcaggggcgaggggggagcctggcaatatcggttttccgggacccaagggtccaactggcgatcccgggaagaacggggataagggtcatgctggacttgcgggagcccgaggcgcaccaggaccagatgggaacaacggggcgcaagggccccctggcccacaaggggtccaaggcggcaagggcgaacagggtccccccggtccgccagggtttcagggtttgcccggcccaagcggccctgctggcgaagtaggaaaacctggtgagcgcggtctgcacggcgagtttggtctccccggacccgctgggccccgaggtgagcgtggaccgcccggggagagcggcgcagcagggccaaccggtcccataggcagccggggcccgtctgggcccccaggacccgatggtaacaagggagaaccaggagttgtgggcgcagtaggcacagccggtccctccggcccgagtggactccctggcgagcgcggggccgccggaatcccgggaggtaagggggagaagggcgaaccggggctgcgaggggaaattggtaatcccggcagggatggcgcccgcggtgcaccaggcgccgtgggcgcacccgggcctgccggagcaaccggggaccggggggaggccggcgctgctggcccagccggtcctgccggtccgcgaggcagcccaggggagagaggtgaggtaggccccgctgggccaaatggtttcgccggtccagcgggcgctgcaggccagccaggcgccaaaggggagagaggcgcaaagggtccaaaaggtgaaaatggagtcgtcggcccaaccggccccgtgggagccgcaggtcccgcagggcctaacggaccaccaggcccagccggttctagaggggatggtggcccccccggtatgacaggctttccgggcgcagctggaagaaccggtccccccggcccgagtggcatctccgggcccccaggcccaccggggcctgccggcaaggaaggcttaaggggcccccgcggagatcaaggccctgtcggccgtactggcgaggtgggagcggtaggcccaccaggttttgccggtgagaagggacctagtggagaggccggaacagcgggcccccctgggacaccaggcccacaagggctccttggagcgcccggaatactcggtctgcctggtagccgcggagaaagaggcctccctggcgtagccggtgccgtgggcgagcctggaccgctgggcatcgctgggcctcccggggcgagagggccacccggggctgtcgggtctcctggggttaacggtgcaccaggggaggctggccgggatggaaacccagggaacgatggccccccaggacgtgatggacaacctgggcacaagggcgaaaggggctaccccggcaatatcgggcccgtaggagcggccggagcgcccggtccacatggacccgtaggcccagccggcaaacacggtaaccggggggaaaccggaccttccggccccgtaggacctgcgggggctgtcggccctcggggcccgagtgggccacaggggatcagaggagacaaaggagagcccggagaaaaagggccccgcggcctcccgggtttgaaaggacacaacggcctccaggggctgcctgggatagctggtcaccacggagatcagggagctcctggcagtgtaggcccagcaggcccaagaggtcccgccggcccgtctggccccgcaggcaaagatggacgcacagggcatcctggcaccgtcggtcctgccggaatcagaggcccccaggggcatcaggggcccgctggacccccggggcctccaggccccccaggtccacccggggtgtccgggggtggatatgacttcggatacgacggagatttttatcgggccgatcagccgcgctcggctcccagcctgcggcctaaggactatgaagtcgacgccacactcaaaagtttgaataatcagatcgagacactgctcacccccgagggaagtcggaagaaccctgcccgcacatgtagagatctgagactgtcacatccagaatggagctcgggttactattggatcgacccaaaccaaggctgtacaatggacgctattaaggtgtattgcgatttctcaactggggagacgtgtatacgagctcagcctgaaaacatcccagccaagaactggtatcggagcagtaaggataagaaacatgtgtggttgggagaaactattaatgccgggtcacagttcgaatataatgtggagggcgttacgtccaaggagatggcaactcagttagccttcatgcgactcctcgctaactatgccagtcagaatattacctaccactgcaagaattctatcgcgtacatggatgaagaaaccggcaacctcaagaaggccgtgattctccaaggctccaatgatgttgagctggtcgccgaaggcaactcccggtttacatacaccgttctggttgacggatgttctaaaaaaacaaacgaatgggggaagacaatcatcgaatataagactaataaaccatctcggctgccgtttttggacattgcccctctagatataggtggggcagatcaggaattctttgtggatataggccctgtgtgtttcaag

SEQ ID NO: 32463 - DNA, 4098 bp, synthetic construct
  misc_feature 1..4098: note = Description of Artificial Sequence: Synthetic coding sequence
  source 1..4098: mol_type = other DNA
atgctctcgtttgtcgataccagaacccttctgcttttggcagtgactctttgtctggcaacctgccaatcacttcaggaggaaaccgtcagaaaaggcccagcgggggatagggggccgaggggagaaagaggtccccctgggccgccaggtagggatggggaagatgggcctactggaccgccagggcccccaggccctccgggccctcctggactcggcggtaacttcgctgcccagtatgatggcaagggcgtgggcctgggtcccgggcctatgggtcttatggggcctagaggcccacccggagcagccggtgcgccgggcccacaaggctttcaaggtcctgccggcgagcccggggagcctggacagacgggacctgccggagcgagaggaccagcaggcccacctgggaaggccggagaagatggccatcctggtaagccagggcgacccggcgaacggggcgtggtgggtccacaaggagccagaggttttcctggcactcccggtctgccgggatttaaggggatacgaggtcataatggactcgatggtttgaaaggacaaccaggagcccctggcgtgaagggtgagcctggtgccccaggcgagaacggtactccggggcaaactggagctagggggcttcctggggaacgtggtagggtgggggcaccgggtccagcaggtgcacgtggaagcgatggaagcgttggacccgtggggcctgcgggcccgatcggtagtgcaggtccccccggattccctggggcacccggtcctaaaggggaaattggggcggtggggaatgccggtccggctggccccgccggaccgcgaggggaagtgggtctgcctggactttcgggccctgtagggcctccggggaacccaggtgccaacggactgacgggagcgaagggcgcagcgggactccccggagtggccggagctccagggctgcctggtcctagaggaattcctggtccggtgggtgccgccggcgcaaccggagcgaggggactggtgggagaacccggtcccgcaggctcgaaaggagaatccggaaacaagggtgaacctggaagcgcgggaccacagggaccgccaggtccttctggagaagagggcaagagaggtcccaatggagaagcagggtccgcgggcccccctggcccacctggacttcgcggatcgccaggttctcgcggccttcctggtgcagatggacgtgcaggagtgatgggaccgcccgggtcccgcggagcatctggacctgctggggttagggggccaaacggagatgcaggtaggcccggtgaacctggtctgatggggccacggggtctgcccggcagcccaggcaacatcggcccggcaggtaaagaaggcccggttggtctgccaggtatagatggacgccctggtcccataggacccgccggagctagaggggagccaggcaacataggattccctggtccaaagggacctaccggtgacccagggaagaatggtgataagggtcatgcaggcctggcgggtgcgagaggtgcacctgggcctgacggaaataacggcgcacaaggaccccccggcccacaaggagtgcaagggggaaaaggtgaacaagggccacccggacccccaggatttcagggactgcctggcccgtcgggaccagcaggagaggtgggaaaaccaggggagcggggtttgcatggagagtttggacttcctgggcctgccggtccaagaggcgaacgaggtccgcctggagagagcggagccgcaggtcctaccggacctattggttcgcgtggcccaagcggaccccctggtccagacggaaataagggcgaacctggggtcgtcggagctgtgggtaccgcgggtccatcggggccatcgggacttccaggtgagcgcggagcagctggaattcctggaggaaaaggcgagaaaggagaacctggattgagaggagaaattgggaatcctggtagggacggagcaaggggagcgcccggtgcagtgggtgcgccaggtcctgcaggagcgactggcgacagaggggaagcaggcgcggcgggtcccgccggcccggcggggcctcggggtagccccggcgaaagaggggaggtcggaccagcgggccccaacggttttgcggggccagcaggtgccgcaggtcaacctggagccaaaggagagcgaggggcgaaaggacccaagggcgaaaacggagtcgtcggacctaccggaccagtgggggcagcgggccctgcgggacccaatggaccaccggggcctgctgggtcaagaggggacggaggcccaccagggatgaccggatttcctggagcagcaggccggaccggtccacctggaccatcgggaattagcggtcctcccggaccacccggaccggccggaaaggaaggactgcgggggccccggggagatcaaggtcccgtggggagaactggtgaagtgggagcagtggggccgcccggattcgcaggtgaaaagggccccagcggtgaagccggtaccgccggtcctccgggcactcctggtccccaaggactgcttggcgcaccggggattcttgggctgcccggttccagaggtgaaagaggcttgcctggagtggccggtgcggtcggtgagccaggaccactcggcatcgcaggtccacctggtgcaagggggcctccaggggcagtaggatccccgggtgtgaacggtgcccctggagaagccggaagagacggaaatcctgggaacgatggacctccaggtcgggatggacaacctggacataagggagaacgcggatacccaggaaacattggaccggtgggggcggcaggagccccaggtccacatggacctgtgggccccgctggtaagcatggaaaccggggagaaaccggaccatcgggtccagttggtccggcaggagcagtgggacctcgcggcccttccggtccacagggtattcggggtgataagggagagccgggagagaaggggccgcgagggcttccagggctgaagggccacaatggacttcaaggtctgcccggtatagccggacaccacggtgaccaaggcgcaccgggttcagtgggccctgcaggaccgagaggccctgcaggtccatccggccctgctgggaaagatggaagaactggacacccaggaaccgtcggtcctgccggaatcagaggcccccagggacaccaagggccggctggtccacccggcccacccgggcctcctgggcccccaggggtgtccggtggcggatacgattttggttacgatggcgatttctaccgtgctgatcagccaaggtcggccccgagcctgcgtcctaaggattatgaagtggacgcaactctgaagtcgctcaacaatcaaattgaaactcttttgaccccagaaggatcacggaagaacccagcacgcacgtgtcgcgatctccgactcagccatccggagtggtcatcgggttactactggattgatcctaaccagggatgtactatggatgcaataaaggtctattgtgatttcagcaccggcgaaacttgcatccgggctcagcccgagaatatcccagcgaagaattggtacaggtcctccaaggacaaaaagcacgtctggcttggtgaaaccatcaacgcgggttcccaattcgagtacaacgtggagggcgttacttcaaaagagatggccacccaactggcattcatgcgcctgctggcaaattacgcgagccaaaacatcacttaccattgcaaaaactcgatcgcatacatggacgaagaaaccggaaaccttaagaaagcagtgatcctgcaaggttcgaacgacgtggaactcgtcgcagagggtaattcccgatttacctacactgtgcttgtggatggatgctcaaagaaaactaacgaatggggaaaaaccataattgaatacaagaccaataagccatcaagacttccctttctggatatcgcacctcttgatatcggtggagcagatcaagagttttttgtggatattggaccagtgtgcttcaag

SEQ ID NO: 32464 - DNA, 4098 bp, synthetic construct
  misc_feature 1..4098: note = Description of Artificial Sequence: Synthetic coding sequence
  source 1..4098: mol_type = other DNA
atgttatcatttgtagatacaagaactttattacttttagctgttactttatgtcttgcaacatgtcaatcattacaagaagaaacagtgcgaaaagggcctgctggtgatagaggacctagaggagagagaggacctccaggaccaccaggaagggacggagaagatggacctactggtccacctggaccaccaggaccaccaggtcctccaggattaggaggtaatttcgcagctcaatatgatggaaaaggagttggactaggacctggaccaatgggacttatggggccaagaggaccacctggagcagctggagctccaggaccacaaggatttcaaggtccagctggagagccaggagaaccaggacaaactggaccagctggggctagaggtccagctggtccaccaggtaaagcaggagaagatggtcatccaggtaaaccaggaagacctggagagagaggagttgttggaccacaaggtgctagaggatttccaggaacaccaggattaccaggattcaaaggtattagaggacataatggattagatggattaaaaggtcaaccaggagcaccaggagttaaaggagaacctggagcaccaggtgaaaatggaactccaggtcaaacaggagctagaggattgccaggagaaagaggaagagtaggagctccaggaccagcaggtgccagaggatctgatggatcagttggaccagttggtccagcaggaccaataggatcagcaggaccaccaggatttccaggtgctccaggtccaaaaggagaaattggagctgttggtaatgcagggccagctggaccagctggaccaagaggagaagttggactaccagggttatcaggaccagttggacctccaggaaatccaggagcaaatggattaactggtgcaaaaggagctgctggtcttccaggagtagcaggagctccaggattgcctggacctagaggaataccaggaccagttggtgcagctggagctacaggagcaagaggacttgttggtgaaccaggaccagctggatccaagggggaatcaggtaataagggagaaccaggatcagcaggaccacaaggaccaccaggtccttcaggagaagaagggaaacgaggaccaaatggagaggctggatcagcaggaccaccaggtccaccaggattaagaggttctccaggaagccgaggattaccaggagctgatggaagagcaggagttatgggtccacctggaagtagaggagcatcaggaccagctggtgttagaggtccaaatggtgatgcaggaagaccaggtgaaccagggttaatgggaccaagaggattacctggatcacctggaaatattggaccagcaggaaaggaaggacctgttggattgccaggaatagacggacgtccaggacctattggtccagctggtgctagaggtgaacctggaaacattggatttccaggaccaaaaggaccaactggagatccaggaaagaatggagataaaggacatgctggattagctggagcaagaggagctccaggaccagatggaaataacggagcacaaggaccaccaggaccacaaggagtacaaggaggaaagggtgaacaaggtcctcctggtccaccaggatttcaaggattaccaggaccatcaggtccagccggagaagtgggtaaacctggagaaagaggattacatggtgaattcggattaccaggaccagctggtccacgtggagaaagaggaccaccaggagagtctggagcagccggaccaacaggaccaattggatcccgtggtccatcaggaccaccaggaccagatggaaataaaggagaaccaggagttgttggagcagttggaactgctggaccatcaggaccaagtggtttaccaggagaaagaggagctgctggaattcctggtggaaaaggagaaaagggagaaccaggtttgcgtggagaaataggaaatccaggaagagatggtgctagaggagctccaggagctgtaggagctcctggacctgcaggtgcaacaggagatcgaggagaagctggagctgctggaccagctggaccagcaggtccaagaggatcacctggggaaagaggagaagttggacctgcaggacctaatggatttgctggacctgctggagctgcaggacaaccaggagctaaaggtgaaagaggagcaaaaggtccaaaaggtgaaaatggagttgttgggccaacaggtccagttggggctgctggaccagcaggtccaaacggtcctcctggaccagctggatcaagaggagatggaggtccaccaggaatgactggttttccaggtgctgctggaagaactgggcctccaggtccatctggtatttctggaccaccaggaccaccaggaccagcaggaaaagaaggacttagaggaccaagaggagatcaaggaccagtcggaagaactggtgaagttggagcagtaggtccaccaggattcgctggagaaaaaggaccatcaggagaagccggaacagccggaccaccaggaacaccaggaccacaaggacttttgggagcaccaggaattttaggattaccaggttcaagaggagaaagaggtcttccaggagttgcaggtgcagttggagaaccaggtccattgggaatagcaggtccaccaggagcaagaggaccacctggggcagttggaagtcctggagttaatggagcaccaggtgaagctggtcgtgatggaaatcctggtaatgatggaccacctggaagagatggacaaccaggacataagggagaaagaggatatccaggtaatattggtccagttggagctgcaggagcaccaggtccacatggaccagttggtccagcaggaaaacatggaaacaggggagaaaccggaccaagtggaccagttggaccagctggagctgtaggaccaagaggaccatctggaccacaaggtattagaggagataagggagaaccaggagaaaagggaccaagaggattaccagggttaaaaggacataatggtttacaaggattaccaggaattgctggacatcatggtgatcaaggagcaccaggatcagttggaccagctggaccaagaggtccagctggaccttcaggtccagctggaaaagacggtcgaactggacatccaggaacagttggacctgcaggtataagaggaccacaaggacatcaaggaccagctggacctccaggacctccaggaccaccaggaccaccaggggttagtggagggggatatgattttggatatgatggagatttttatagggctgatcaaccaagatcagcaccaagtttaagaccaaaagattatgaagttgatgctacattaaagtcacttaataatcaaattgaaactttattgactccagaaggtagtagaaaaaatccagcaagaacctgtagagacttaagactttctcatccagaatggtcatcaggatattattggatcgatccaaatcaaggatgtacaatggatgctattaaggtttattgtgatttttctactggagaaacttgtattagagcacaaccagaaaatattccagctaagaactggtatcgatcaagtaaagataaaaaacatgtctggttgggagaaactattaatgcaggatcacaattcgaatataatgttgaaggagttacttcaaaagaaatggcaacacaacttgctttcatgagacttcttgctaattacgcatctcaaaatattacatatcattgtaaaaattcaattgcttatatggatgaagaaactggaaatttaaaaaaagctgtaattttacaaggatcaaatgatgttgaattagttgctgaaggaaattccagattcacatatacagtacttgtggatggttgtagtaaaaaaactaacgaatggggtaaaacaattattgaatataaaactaataaaccttctagacttccttttttagatattgcaccattagatattggaggagctgatcaagaattttttgtagatataggacctgtttgttttaaa

SEQ ID NO: 32465 - DNA, 4098 bp, synthetic construct
  misc_feature 1..4098: note = Description of Artificial Sequence: Synthetic coding sequence
  source 1..4098: mol_type = other DNA
atgctctcgttcgtagacacaaggacgttattgctacttgcagtaacgttgtgtcttgcaacgtgtcaaagccttcaggaggagaccgtccggaagggtcccgcaggggatcgggggccacgtggggagaggggtccacctgggccccctggccgagacggtgaggatggtccaactgggcctcctggtccacctggtcctcccggtccgcccgggcttggaggaaactttgccgctcagtatgacgggaaaggagtcgggctaggcccggggcctatgggcctcatgggtccgcgcggcccgcctggcgccgctggagcacccggacctcaaggctttcagggacccgctggagagcctggcgagccaggacaaacaggtcccgccggcgcgcgtgggccagctgggcctcctggtaaggcgggagaggacggtcacccgggaaagccaggacgtccgggtgagcgtggcgttgtcggtcctcagggggcgcgtggttttccagggactccgggactacccggatttaagggtattaggggtcataacggtctggacggcctgaagggccaaccaggcgctcccggggtcaagggagagcccggagcaccgggggaaaatggaaccccaggtcagaccggagcacgtggattgcccggtgagagaggacgcgtcggagcacctggaccggccggcgcccgtggatctgatggctcagtgggtcctgtcggtcccgcaggaccgatcggatcggcgggtcctcctggattccctggtgctcctggtccgaagggcgagatcggggccgtcgggaacgctggacctgctgggcctgctgggccacgcggcgaggtggggctccctggcctatcagggcctgttggtcctccaggtaacccgggagccaatggtctcactggtgccaagggcgcggccggactacccggcgttgccggagcacctggtttgccgggtcctcgtggaatcccaggcccagtcggagccgccggcgccacgggtgctcgtggactcgttggggagcccggacctgcaggttcgaagggagagagtggaaacaagggagagcctggttcagcaggaccgcagggccctcccggccccagtggtgaagagggaaagcgcggcccaaatggcgaggccggatcggctggtccacccggacccccaggactgcggggtagcccaggctcacgcggcctgccgggtgcggatggaagagctggggtcatggggcccccaggctcacgaggggctagtggtcctgctggagtgcgcggacctaacggcgatgctggccggcccggcgaaccaggtctgatgggaccccgtggactgcctggctctccgggaaatatcggcccggccggaaaagaaggcccggtcgggttgccgggtatcgacgggcggccaggcccaattggtcccgccggagcacgtggcgagcccggaaacatcggattccccggccccaagggccccacaggtgaccccggcaagaatggtgacaaaggacacgcaggtctcgcaggtgcaaggggtgcaccaggccctgatggcaacaacggagcccaaggcccccccggaccccaaggagttcaaggtggcaagggtgagcagggtccgcccggaccccccggttttcagggactgcccggaccgtcaggccctgccggtgaggtgggaaagccgggagagcgcggattacatggagagtttggcctgcccggccctgccgggcctcgcggcgagcgcgggcccccaggggagagtggcgctgccgggcccacaggacctatcggatcgcggggtccctctggccctccgggacctgatggtaacaaaggggagcccggcgtggtcggtgctgtgggaactgcaggacctagtgggcctagtggactccccggtgagagaggtgcggcaggtatcccggggggaaagggcgaaaagggagagccgggcctccgcggcgagattgggaatcctgggagagatggagcacgaggagcaccgggcgcggtgggtgctcctggccccgccggggcaacgggcgacagaggcgaggcgggcgcggccgggcctgccgggccagctggcccccggggttcgccaggcgagaggggtgaggtgggccccgcgggaccgaacggtttcgcaggtcctgcgggtgccgccggacaaccaggtgccaaaggggagcgaggcgccaagggcccaaaaggggaaaatggtgtggtagggccaactggccccgtgggagcggcggggcccgccggacctaacggcccccccggaccggccggaagtcgaggcgatggtgggccccctggcatgaccggcttcccaggggcggcgggccgcacgggaccgcccggaccctctggtatctcaggaccaccagggccgcccggccccgcaggcaaggagggcttaagaggcccaagaggggatcaggggcctgtcgggcgcactggtgaggtcggagctgttggtccacctggtttcgctggagagaaggggccgagcggggaggccgggaccgccggaccccctgggaccccaggcccccagggcttgttaggagcgccgggaatcctgggtttgcccggcagccggggcgagcgtggcctcccgggtgtggctggtgctgtgggcgagccagggcctctcgggatcgccggtcccccgggcgctcggggccctccaggagcggtcggttccccgggggtgaatggcgcacctggcgaggcaggccgggacggcaacccaggaaacgacggacccccaggtcgcgatggtcagccaggtcacaagggagaacggggatacccaggaaatataggtcctgtcggagcggcgggggcgcctgggccacacggacctgtcggacctgctggaaagcacggcaaccgaggcgaaacaggcccctctggcccagttggtccagcaggtgccgttggaccgagggggccttccggccctcagggtatccggggtgacaagggagaacccggagaaaaagggccacgtggattgccgggtttaaagggtcacaacggcctacagggcctaccaggaattgccggacaccatggggaccagggcgctccgggttctgttgggcctgcaggcccccgagggccagcgggaccctccggccctgctggcaaagatgggcggactggtcatcccggaacagttggtcctgccggaattcgcggtccccaaggacaccagggtccggcaggaccccctggccctcccggccccccggggcctcccggcgtctccgggggaggttatgatttcgggtacgacggcgacttctatcgtgcagaccaacctcggagcgccccatcccttcgaccgaaggactacgaagtcgatgctacacttaagtccctcaacaaccagatcgagactctattgaccccagagggctcccggaagaatcctgcccgaacttgccgtgacctccgattgagtcatccggaatggtccagtggttattattggatcgatcctaatcagggttgtactatggatgccatcaaggtgtactgcgatttttcgacgggcgaaacttgcattagggcgcagcctgaaaacatacccgcaaagaactggtatcgatcgtctaaagacaagaaacatgtctggctaggcgaaacaatcaacgctggctcgcaattcgagtataacgtcgaaggcgtcacgtcaaaagaaatggccactcaactggcttttatgcggctgctcgcaaactacgcgtcccagaacattacttatcattgtaaaaattccattgcatatatggatgaggaaactggtaatctaaagaaggccgtgatcttgcagggcagcaacgatgttgagctcgttgccgagggtaatagtaggtttacttacacagttctcgtcgatggttgttctaagaagaccaatgaatgggggaagacaattatcgagtataagactaacaagcccagccgcctaccgttcctcgatatcgcccctttggacattggaggggctgaccaagaatttttcgtggatatcggtccagtatgcttcaag

SEQ ID NO: 32466 - DNA, 4098 bp, synthetic construct
  misc_feature 1..4098: note = Description of Artificial Sequence: Synthetic coding sequence
  source 1..4098: mol_type = other DNA
atgctgtcgttcgttgatacccggactctgttgctgctcgcggtgaccctgtgcctcgccacttgtcaatccctgcaagaagaaactgtgcgcaagggtccagcgggagatagagggccacgcggggagcgggggcctccaggtccacccggaagagacggggaagatggaccaaccggccccccaggtccaccgggtcctcccggcccaccaggactgggaggaaatttcgcagcccagtacgacgggaagggagtgggacttggaccggggccaatgggcctcatgggcccacggggcccgccaggagccgcaggagcgcctggtcctcaaggtttccagggcccggctggagagccgggtgagccgggacaaaccggaccggcgggcgcccgtggtccagcaggacccccggggaaggccggcgaggatgggcacccaggtaagcccggacgcccgggtgaacggggcgtagtcgggccacaaggtgcccggggatttccaggcaccccggggctgccgggcttcaagggcatccgaggacacaacggtttggacggactgaagggccagccaggagccccaggagtgaagggtgaacctggcgcgcctggggaaaacggtactccaggccaaaccggcgccagagggttgccgggcgagcgtggacgcgtcggcgctccgggcccggccggcgcgcgtggatcggacgggtcagtcgggccggtaggacccgccggaccgataggaagcgccggaccccccggattcccgggagccccgggcccaaagggcgagatcggcgccgtgggaaatgctggacccgcgggacccgctggacctcgcggggaggtgggcctccctggcctttcaggtccagttggacctccaggaaacccgggagcgaatggccttactggggcgaaaggtgcggctgggctcccgggggtggccggtgcccctggccttccaggcccaagaggcatccccggaccagtgggagcggccggagcaactggcgcacgaggactcgttggagaacccggcccggccgggtcgaaaggggaatctgggaacaagggtgaaccgggatccgcgggtccgcaaggccccccggggccttccggagaggagggaaaacggggaccgaacggcgaggcgggtagcgccggccctccgggaccaccaggactcagaggttccccgggtagccggggactgcccggcgcggacggaagagccggagtgatggggccgccagggtcaagaggggccagcggcccagcaggagtgcgcggaccaaacggagacgcagggcgcccaggagaaccaggcctgatgggaccacggggtctgccgggatcaccgggaaacatcggtcctgcgggcaaggagggaccggtgggcctgccaggcatcgacggcagacctggtccgatcgggcctgctggggcccgcggcgaaccggggaatatcggttttccaggaccgaaaggtccaacgggggatcccggaaaaaacggggacaaggggcatgcgggactcgcaggagcccggggtgcaccgggcccggacgggaataacggggctcagggaccgcccggaccgcagggagtgcagggaggaaagggcgagcagggacctccgggtccacctggattccagggacttcctgggccttcaggcccagccggtgaagtcggtaagccaggagagcggggcctccatggcgagttcggattgccgggtcctgccgggccgaggggcgagcggggccccccgggagagagtggtgctgccggcccaaccgggccgatcggctcgcgtggtccctcaggacccccagggccagacggcaataaaggagaacccggtgttgtcggcgcagtgggtaccgccggaccgtcgggtcctagcgggcttcctggggagcggggcgcagcgggcattccaggcggaaagggagagaagggcgagcctggactgcgcggggaaatcgggaacccgggacgcgacggagcccgcggagctccgggggccgtgggagcaccaggccctgcaggagcaactggagatcggggcgaggcaggcgccgcggggccggccggtcctgctggcccccgcggttcgcccggcgaaagaggtgaagtggggccggcaggtcccaacggattcgccggtcccgctggtgcggcaggtcagcctggtgccaaaggagaacgcggtgcgaagggaccgaagggagagaacggtgtggtgggaccgacggggccggtgggcgccgctggaccagccggacccaatggaccaccagggccagccggatcgcgaggagacggaggaccacctggcatgactggttttccgggtgcagcgggacggactggaccacctggaccgtcagggatcagcggaccaccgggcccgcctggcccagcagggaaggaaggcctccggggacctcggggcgaccaaggacctgtgggcagaaccggagaagtcggagcggtcggcccgcccgggttcgctggagaaaagggcccgtcaggtgaggccggcacggcaggtcctccgggtaccccggggcctcaaggcctcctgggagcaccgggcatcctgggcttgccgggatcgcgcggcgagcgcgggctgcctggagttgcgggagccgtcggagaaccaggtcctctgggaatcgccgggccccctggcgccagaggtccccctggggctgtgggatcgccgggtgtcaatggagctccaggcgaagcgggacgcgatggaaatccgggcaatgatgggccgccgggaagggacggccagccgggccataagggcgagaggggatatcctggaaacattggaccggtgggggcggcaggggcaccaggaccacatggacctgtgggacctgctggcaagcatggaaaccggggtgagacgggaccttccggcccagtgggccccgcaggtgcggtgggacctcgagggccttcgggcccacagggaattaggggcgataaaggggagcctggcgagaaaggcccgcgcggactcccggggctgaagggacacaatggactgcaaggcctccctggaatcgctggccaccatggagatcaaggagcgccaggatccgtcggtccagccggcccgcgggggcccgcaggcccatcaggtcccgcaggaaaagacggccgcactggccacccggggacggtcggaccggcaggcatcagagggccgcagggacaccagggacctgcgggacccccaggtcccccgggaccgccgggaccccctggagtgagcggaggcggatacgactttggatacgacggtgatttctatagggcagatcagccacgcagcgctccgagcctgaggccgaaggactacgaagtcgatgcgactttgaaatccctgaataaccagatcgagactctgctgactccagaagggtcgagaaagaacccagccaggacctgcagagatctcaggctgtctcacccggagtggtcgtcgggctactactggatcgatcccaaccagggatgcaccatggacgcgatcaaggtgtactgcgatttctccaccggcgaaacctgtatccgagcacagcccgaaaacatcccggcaaaaaactggtaccgcagcagcaaggacaagaaacacgtgtggctcggagaaaccattaacgcaggctcccagttcgaatacaatgtcgagggcgtcacctccaaggaaatggctacccagctggcgtttatgcggcttctcgccaactacgcctcgcagaacatcacttaccactgcaaaaacagcattgcttacatggacgaagaaaccggaaatttgaaaaaggccgtgatcctccaagggagcaatgacgtggaactggtggcggaaggcaacagtcgtttcacttacaccgtgctggtggatgggtgctccaagaaaaccaacgagtggggaaagactattatcgaatacaagactaacaaaccatcccggctcccgtttctggacatcgctcccctggacatcggaggcgccgaccaggaattcttcgtcgacatcgggccagtgtgtttcaag

SEQ ID NO: 32467 - DNA, 4098 bp, synthetic construct
  misc_feature 1..4098: note = Description of Artificial Sequence: Synthetic coding sequence
  source 1..4098: mol_type = other DNA
atgctcagcttcgtggacacgcgaaccctgctgctcctggcggtgactctgtgtctggcgacctgccagtccttgcaggaagaaaccgtgcggaagggccctgctggagatcgcggaccgcgcggagaaagagggccaccaggaccgccaggcagggacggagaagatggaccaacgggccctcctgggccaccaggcccacctgggcctccgggattggggggaaacttcgccgctcagtacgatggaaagggggtcggtttgggacccggtccgatgggcttgatggggccgcggggaccaccgggcgccgcaggtgcaccgggccctcaagggttccagggaccagccggggagcctggcgaacctggacagactggtccagccggtgcgaggggacctgcggggcccccaggcaaggcgggagaggacggacatccaggcaagccgggcagaccaggtgaacggggtgtggtggggccgcagggtgccaggggctttccggggaccccaggccttccgggattcaagggaattcgggggcacaatggtctggacggactgaaaggtcagccgggtgccccgggagttaagggggagccgggtgcgcctggggaaaatggcactcccggacagactggagcccgtggcctgcccggcgaacggggcagagtgggggctccgggcccggcgggtgcacgcgggagcgacggatctgtgggaccggtgggccctgcgggtcctatcgggtcagccggaccacctggatttccgggggcgccaggaccaaagggggaaatcggcgcagtcggcaacgccgggccagccggaccagctggcccacgtggcgaagtaggcctcccgggtctttcaggcccagtgggaccgcctggcaacccgggagctaatggtctgaccggagccaaaggcgctgcagggctgccaggggtggccggagcgccgggactgccgggaccccgcggcattccaggcccggtcggagcggccggagccactggtgcacggggactggtgggcgagccaggcccggcggggtcgaagggggaaagcggcaacaaaggagagccgggaagcgcaggccctcagggtcctcctggaccctccggggaagagggcaaacgcggaccaaacggagaagccggatccgctggaccacccggccctcccgggctgcgggggtcaccaggaagccgagggttgccgggtgctgatggtcgggccggagtgatggggcctcctggttctcggggagcttcaggaccagctggagtgcgcgggccgaacggcgacgcaggccggccaggagagcccggcctcatgggacctcggggtctgcctgggtcgccgggcaacatcgggccggcaggaaaggagggaccagtcgggctccctgggatcgatggacgccctggaccaatcggacccgccggggcccggggagagccaggcaacatcggtttcccgggccctaaagggccaaccggcgatccgggaaagaatggagacaagggccacgcaggactggcgggggcgcggggagcacccggtcctgatggaaacaacggcgcccagggcccacccggaccgcaaggagtgcaaggcggaaagggagagcaagggccgccggggccgcccgggtttcaggggctccctggaccctctggaccggccggcgaggtcggtaaaccgggcgagcgcggccttcacggagaatttgggctgccgggtccggccggccctcgcggagagcggggccccccaggagagtcgggagctgcaggcccgactggacctatcggatcgagaggaccatccggtccgccaggacctgatggaaataagggcgaaccaggagtggttggggctgtgggtactgcaggaccttcgggaccgagcggtctgccaggagagcggggtgcagcagggatcccaggggggaagggagaaaagggagaaccgggactcagaggagagattggaaacccggggagggacggtgccagaggagcgcccggtgctgtcggagctccgggccctgcaggggccactggtgacagaggggaagctggagcggcaggacccgctggcccggctggaccgagaggaagcccaggggaacggggtgaagtgggaccggcgggacctaatggtttcgctggtcccgctggggcggccggccagcccggcgccaaaggagaacgcggagccaagggacctaaaggcgagaatggcgtcgtcggccccaccgggccagtgggagccgcaggacctgccggaccgaacggacctccgggtcctgctggatcgcgcggcgatggcggacccccgggcatgaccggttttccgggagcagcgggtagaactgggccccccggtccgtccggcatctccggaccgcctggaccaccaggtccggcaggcaaggagggactgcgcggaccgagaggtgatcaaggacccgtgggccggactggggaagtcggagctgtgggtccgccaggcttcgccggagaaaagggtccgtccggtgaggccggaactgctggtccaccagggaccccgggcccacaagggctgcttggagcaccaggaatcctcggattgccgggatcgcgcggggagcggggcctcccgggcgtagcgggagccgttggcgaaccgggaccactgggaatcgctggtccgccgggcgcgcgtggcccacctggtgccgtgggttccccgggcgttaacggggcaccgggagaggcgggccgcgacggaaaccccggaaatgacgggccgcccggaagagacggccaacctggacataaaggtgagagaggctacccgggaaacatcggtcccgtgggtgccgctggtgccccgggccctcacggccccgtgggaccggctggaaagcacggaaataggggtgaaaccggcccatcaggccccgtgggccccgctggcgcggtcggtcctcgcgggccttctggcccgcaagggatccgcggagacaaaggcgagccgggcgaaaagggaccgcgtggcctgccgggacttaagggacacaacggactgcaaggcctgcccggtatcgcgggtcaccatggcgaccagggcgcaccgggaagcgtgggacccgccggtccacgcggcccggcgggcccctcggggcctgccggcaaagacggaagaaccggtcacccaggaacggtcggccctgctggtatacgcggcccccagggacatcagggccctgccggccctccggggccccctggcccgcccggtcccccgggagtgtcgggcgggggatatgattttgggtacgacggcgacttctaccgcgccgatcaaccgcggagcgccccgtcgctgcgcccgaaggactacgaggtcgacgcgacccttaagtcgctgaataatcagattgaaactctcctcacccccgaagggtcaaggaagaaccccgcccgcacctgcagggatctgcggttgtcccatccagaatggagttcaggttactactggatcgacccgaatcaagggtgcactatggatgcgattaaggtctactgtgacttctcgacgggtgaaacctgtatcagagcgcagcccgagaatatccctgcgaagaactggtataggtccagcaaggacaaaaaacatgtgtggctgggggaaactatcaacgccggatcacaattcgaatacaacgtggaaggagtcacgtcgaaggagatggcgactcagctggctttcatgcgactgctcgcaaactacgcttcgcagaacataacctaccactgcaagaacagcatcgcatacatggatgaagaaaccggaaatctcaaaaaggcagtcatcctgcagggctcgaacgatgttgagctcgtggccgagggaaactcacgattcacttacactgtgttggtggacggatgctccaagaaaaccaatgaatggggaaagactatcattgaatacaaaaccaacaagccgtcgagactcccgttccttgacatcgctcccctggacatcggcggagcggaccaggaattcttcgtggatatcggaccggtgtgcttcaag

SEQ ID NO: 32468 - DNA, 4098 bp, synthetic construct
  misc_feature 1..4098: note = Description of Artificial Sequence: Synthetic coding sequence
  source 1..4098: mol_type = other DNA
atgctttctttcgtggatactcggactctgctgcttcttgccgtaactctatgcctagctacatgtcagtcccttcaggaagaaacagtgaggaaaggacctgctggggatcgcgggccacggggagaacgagggccccccgggccccctgggagagatggggaagatgggcctacaggaccgcccgggccccctggaccacccggacccccaggactcggggggaattttgctgcccagtacgatgggaaaggggtcggactcggacccggaccaatggggttaatgggaccgcgaggacctccaggagctgctggagcaccaggacctcaggggttccaggggcctgcgggagaacctggagaacccgggcaaactgggcccgctggagctcgcggacctgcgggacctcccgggaaggccggagaagacggacatccaggaaaacctgggcggcctggggaacggggggtcgtcggaccacagggggccagaggattccccgggacaccagggctccctggattcaaaggaattcgcggacataatgggcttgatgggctaaaaggacaacccggagctcccggagtcaaaggagaacctggagctccaggagaaaatgggactccaggacagactggggctaggggattaccaggagaacgaggaagagtcggggcccccgggcctgctggggctagagggtccgatgggtcggtcggacctgtagggcccgcagggcccatagggtctgccgggccacccggattccctggagccccagggccaaaaggagaaatcggggcagtgggaaacgctggacccgccggaccagccggacctcgaggggaagtaggattaccaggattgtctggacctgtcgggccccctgggaatccaggagctaacggattaactggggcaaaaggggccgcagggctccctggggtcgcaggagcccctgggcttcccggacccagaggaatccctggaccagtgggagcagccggagctacaggggcacggggactcgttggggaacctggacctgctggatcaaaaggggaatccgggaataaaggggaacccgggagtgctggacctcagggacctcctgggccctccggagaagagggaaagagaggacccaacggagaagcagggtcagccggaccacccgggcctccaggacttagaggatcccctggatctagaggacttcctggagctgatgggcgagccggagttatgggaccacctggatcccgaggggcttctggacctgcaggggtgcgcgggcccaacggagatgccggacgtccaggagagcccggactcatgggacccagagggcttccaggatcccctgggaacatcgggcctgctgggaaggaagggccagttggactcccaggaattgatgggagacccgggcccatcgggcctgccggagcccgaggggaacccgggaatataggatttccaggacccaaaggacccactggggatcctgggaaaaatggagataaaggacatgctgggctcgccggggccaggggggcacctgggcccgatggaaataacggggctcaggggcctcccggaccccagggggttcaaggggggaaaggggagcagggaccccctgggcctccaggattccaggggctcccagggcctagtggacccgccggagaagtcgggaaacctggagaaagagggctccatggagaatttgggctgcccggacctgccggacctagaggagaacgaggacctcccggggaatctggagcagccggaccaactggacctatcgggtctaggggaccttcagggcctccagggccagatgggaacaaaggagaacccggggtagtgggagccgtggggactgcaggaccatccgggccttcagggctgccaggagaacggggggcagccgggatacctgggggaaaaggagaaaaaggagaaccagggttacgcggagagatcgggaaccctgggagggatggagctaggggggcccccggggctgtcggggcccctggacccgccggggcaacaggggataggggagaagccggagctgccgggcccgcaggacctgcgggaccaaggggaagtcccggagagcgcggggaagttggacctgcgggacctaatggatttgctgggcctgctggggcagccggacagcctggagctaaaggggaacgaggagcgaaagggccaaaaggggagaacggagttgtggggcctactggacctgtgggggccgccgggccagctgggccaaatggaccccccggacccgccggaagtcggggagacggaggacccccagggatgacagggttccccggagctgccggacgcactgggcctccagggccttctgggataagtgggcccccaggaccccccgggcccgctggaaaagaaggactgagaggacctagaggggatcaaggacctgtgggacgaacaggagaagtaggggccgtcgggccaccagggttcgccggggagaaggggccctcaggagaggccggaactgccgggccacctgggactcctggaccacaggggttactgggagcgccagggatactcggattgccaggatcacgaggagaacggggattacccggagtcgccggagctgtgggagagccagggcccctcggaatagccggaccccctggagcaagaggacctccaggggccgtgggatcaccaggagttaatggagctcctggggaagctgggagggatggaaatccaggaaacgatggaccacccgggagagatggacagcccggacacaaaggagagagggggtaccccggaaatataggacctgtgggagccgccggagcacccgggccccatgggcctgttgggcctgcagggaaacacgggaatcggggggagacagggccctctggaccagttgggccagctggggcagtggggccccggggaccttcaggacctcagggaatccggggagataaaggggaacccggagaaaaggggcccagagggttacctgggctcaaagggcataatgggctgcaggggttaccaggaatcgctgggcaccacggagaccagggagcccctggaagtgtaggaccagccgggcccaggggacctgctgggccatctggaccagcagggaaagatgggcgcacaggacatcctgggacagtcgggcccgccgggatacgggggccacaggggcatcagggacccgcaggacctccagggccccccggacctcccggaccccctggagtgagtggaggaggatatgatttcggatacgatggagatttttatcgggccgatcagcctcggagtgcaccctctcttaggcccaaagattacgaagtggatgcaacactcaaatcgttaaataaccagatagaaactcttctgacacctgaagggagtcggaagaatcctgctagaacatgcagggatttgaggttgtcccatccagaatggagttccgggtattactggattgatcccaaccagggatgcacaatggatgctataaaggtttattgcgatttttctactggagagacatgtattcgagcccagcccgaaaacatccccgcaaaaaactggtaccggtcatcaaaggataaaaaacacgtttggctaggagaaacaatcaacgccgggtctcagtttgaatataatgtagaaggagtcactagtaaagaaatggcaactcaactcgcgttcatgcgcttgcttgctaactatgcatcccagaacataacataccattgtaaaaattctatcgcttatatggatgaagagacagggaacttgaaaaaagctgtaatactacaggggagtaatgatgtcgaattagttgcggaaggaaattcaagatttacatatacagtgctagtggacgggtgtagtaagaaaacaaacgaatgggggaaaacaattattgagtataagacaaataaaccctcacgcctaccttttcttgatatagcccctcttgatatcggaggggccgatcaggagtttttcgttgatatcgggcccgtgtgcttcaaa

SEQ ID NO: 32469 - DNA, 4098 bp, synthetic construct
  misc_feature 1..4098: note = Description of Artificial Sequence: Synthetic coding sequence
  source 1..4098: mol_type = other DNA
atgttgagtttcgtcgacacgaggacactgctactcttggccgtgactctatgcctggctacatgccagtctcttcaggaggagacggtcaggaagggaccagcaggcgaccggggaccccggggcgaacggggtcctccaggacctcccggccgtgatggtgaagatggaccaactgggccccccgggcccccaggtcctccaggcccccccggcctaggaggcaacttcgcagctcagtatgatggaaagggggttggcctgggccccgggcctatgggacttatgggacccaggggaccaccaggagctgccggcgcccccggccctcaaggcttccaaggtcctgccggagagcctggggaacctggccagactggccccgctggagctcgcggacccgcagggcctcccggcaaagcaggcgaggacgggcacccaggcaaacccggaaggccaggtgaaaggggagtcgtgggaccgcaaggggcccgaggattccccggtacgcccggactgccaggattcaaaggcattagggggcacaacgggctggacggcctgaagggccagccaggagcacccggggtcaaaggtgagcccggggcgcccggagagaatgggacccctgggcagacgggggcccggggcctccccggtgagcgcgggcgggtcggggcccccggcccagccggtgcccggggctctgatggaagcgtcggccccgtcggaccggccggtcccattggctctgctgggcctcccggattccctggtgctcctggacctaagggcgagatcggagccgtcgggaacgccggcccagctggacctgcaggacctagaggggaagtgggcttgccagggctgagcgggcctgtgggtccaccggggaaccctggcgcaaacggattaaccggcgctaaaggcgccgccggtctccctggcgtcgctggtgcacctggactcccagggcccagggggatacccggaccggtgggggccgcaggcgctaccggagcccgcggtcttgtaggggaacctggcccagccggcagtaaaggcgaatcgggcaataagggcgagcccgggtcagccggaccccaggggccccccggtccatccggggaggaagggaaacgtggaccgaatggtgaggccgggtccgcagggccccccgggccccccggtctccgcggcagccctgggtctcgtggcctgccaggcgcagatggacgagcaggtgtgatgggccctccgggctcgagaggggctagtggacctgcaggtgttcgcggcccgaatggcgatgccggccggcccggtgaaccgggactgatgggcccaaggggtcttcctggctccccggggaacatcggcccagcgggcaaggagggaccggtgggtctcccaggaatagacggcagacctggccccatcggtccagctggagcgcgcggcgaacccggtaatattgggtttcccgggcccaaagggccgactggcgatcctgggaagaatggtgataaaggacatgctgggctcgcaggggcccgaggggccccgggcccggacgggaacaatggggcacagggaccgccgggcccacagggcgtgcagggggggaaaggagagcagggaccacctggcccacctggttttcaggggcttccagggccttctggccctgctggagaggtggggaaaccaggcgaacgggggcttcacggtgaatttggtctacccggcccagctggcccccgcggcgagaggggtccaccaggcgagagcggagcagctggaccgactggcccaattggttccagaggccccagcggccccccaggacccgacggaaacaaaggcgaacctggagttgtaggcgccgtggggaccgccgggcctagcggcccttctggacttcccggtgaaaggggggccgcaggcataccaggtgggaagggggaaaaaggagaaccaggactccgtggcgagattgggaaccctggccgggacggagcccgaggagccccaggtgctgtgggtgcacccggtccagccggcgccactggtgacagaggggaagccggcgccgccggccctgccggaccagcaggccctagaggcagcccgggcgagaggggagaggttggcccggccgggccaaatggattcgccggccccgcaggcgccgctgggcagcctggtgcgaagggtgagcggggagccaaaggtcctaagggggagaacggcgtggttggccctaccggcccggtgggggctgctgggcccgccggacccaacggaccccccggccctgctggctcacgaggggacggcgggcccccaggcatgaccggtttcccaggcgcggcaggtcgaaccgggccaccaggcccttctggtattagtggtccgccggggccaccaggcccagcaggcaaagaaggactgcggggtcccaggggggaccagggccctgtggggaggaccggcgaggtgggagccgtgggcccaccaggctttgctggcgagaaaggtccatcaggagaggctggaaccgcgggacctcccggtacccctggcccccaaggcctgttgggggcgcccggcattctggggctgcccggatctcggggggagagggggctgcccggggtcgctggagcagtcggtgaaccaggacctttgggaatagcgggaccgcctggggccagaggtcccccgggggctgtgggctcacctggcgttaacggagcacccggtgaggccggtagagatgggaacccgggtaacgatgggccacctgggagagacggtcagccaggccacaaaggcgaacgagggtatccagggaacataggaccggttggcgcggccggggcccccgggcctcacggtcccgtgggcccagcagggaagcatggcaatcgtggggagacaggaccgtctggcccagttgggcccgcgggagccgtaggacctaggggtccaagtgggccccagggcattagaggcgataaaggggaaccgggcgaaaaaggaccgcggggacttccaggcttaaagggccacaacgggttacaaggactcccagggatcgccggccaccacggcgatcagggggctcctggttccgttggtccggctggtcccaggggcccggccggcccttccgggcctgctggcaaggatggcagaaccggccatcccggcacagtcgggccggctggaattagaggaccccagggtcatcagggccctgctggcccgcccgggccaccagggcctccaggaccgcctggagtttccggcggtggatacgatttcggttacgatggggatttctaccgagccgaccagcctagaagtgctccctctctgagacccaaagattatgaggtggacgcaaccctgaaatcccttaataaccagattgagactctgctaactcctgaggggtcgcggaagaatccggctcggacttgtagagacctcagactctctcaccctgagtggtcttccggatattactggattgacccaaaccaggggtgtaccatggatgctattaaggtttactgcgacttctcaacgggtgagacttgcatcagggcccagccagaaaacatcccagccaaaaactggtatcgatcgtcgaaggataaaaagcatgtgtggctgggggagactatcaacgcggggtcccagttcgaatataacgtcgagggagttacgtctaaagaaatggccactcaacttgcgttcatgcgtctcctggctaactatgcgtcgcagaatattacctaccactgcaagaactccattgcttatatggacgaggaaacaggcaacctcaaaaaagccgtgatattgcagggtagcaatgacgtagagttggtcgccgaaggaaacagccggttcacttataccgtgctggtggacgggtgctccaagaaaactaatgaatggggcaaaacaatcatagaatacaaaaccaacaagcccagccggctaccatttcttgacatcgctcctttggatatagggggcgctgaccaggagttctttgttgatattggcccggtgtgcttcaag

SEQ ID NO: 32470 - DNA, 4098 bp, synthetic construct
  misc_feature 1..4098: note = Description of Artificial Sequence: Synthetic coding sequence
  source 1..4098: mol_type = other DNA
atgttgagtttcgttgatactagaactcttctactattggccgtgacactctgtctggccacctgccaatccttgcaagaagaaaccgtgcggaagggcccagcaggagatagagggcccaggggcgagaggggcccaccaggccctccgggacgtgacggtgaagatggacctacggggcctccagggccgcctggcccccccggaccaccaggcctgggcggcaatttcgctgctcaatacgatggaaagggggtcggactgggccctggcccaatgggcctgatgggccctcgcggacctcccggggccgccggcgccccgggaccacagggttttcagggaccagcaggcgagccaggtgaaccgggtcagacgggaccagccggcgcgcgcggccctgcaggtcctcctggtaaggcaggtgaggacggccacccaggcaaacccgggcgtcccggcgagcgaggggtggtgggacctcagggcgcacggggattccccgggacacccgggctccccggttttaaagggatccggggccacaatggcctggacggtctgaaagggcaacccggggctcctggggttaaaggagagcccggagcaccaggagaaaacgggactccaggccaaacaggggccagagggctcccaggagagaggggccgcgtgggtgccccaggacccgccggagctaggggttccgacggcagcgtaggccctgttggtcctgctgggcctattggatccgccggacctcccggcttccccggcgccccgggaccaaagggggagatcggggctgtcggtaacgctgggcccgccgggccagctggccctagaggggaggttgggctgcccgggctgagcggacccgtggggccccctggcaatccaggggcaaacggactgaccggcgctaagggcgctgccgggctgccaggcgttgctggcgctcctggcctccctggccctagaggcattcctggacccgtcggggccgcgggcgctaccggggcacgtggtctcgtcggcgagccaggcccagccggttcaaaaggcgaaagcggcaacaaaggcgaacctggttcggccggcccacaaggcccacccggtccaagcggagaagaagggaaaaggggccccaatggtgaggcgggatcggccggtcctcccggaccccctggactgcgcggcagccccggaagtcgcggactccccggcgccgacggccgagccggagtgatgggacctcccggttcccggggggcttctggcccagcgggcgtgcgtggaccgaatggcgacgccggcaggcccggggagccgggccttatggggccaagaggcctaccaggcagtccagggaatataggaccggctggcaaagaagggccagtgggccttcctgggatcgacggacggcccgggcctatcggccctgccggtgcacgcggggagccaggaaatattggatttccgggccccaaaggcccaacgggagaccccggaaaaaacggtgacaaaggtcacgccggcttggctggagctcgcggggctcccggaccagacggtaataatggtgcccaggggcctccaggaccacagggcgtacaaggaggcaagggtgagcagggacccccgggccctccaggctttcagggactcccaggtccctcgggtccggccggggaggtggggaagccgggtgaacgagggcttcacggagagtttggattaccaggcccagccggtccgcggggagagcgcgggcctcccggagagagtggggctgcagggcccaccggacccattggatccaggggccccagcggacctccagggccagacggcaataaaggagaacctggtgtagtcggggctgtgggaacagccggacctagcgggcctagtggactaccaggggagcgaggcgccgctggcatacccgggggcaaaggggagaaaggcgagccaggcctgcgtggggaaatcggcaaccccggcagggacggcgcccggggagcccctggtgcagtgggggcacccggtccagccggtgccacgggggatagaggcgaagcgggagccgctggcccagccgggcctgctggaccgaggggctcaccaggcgagcgaggcgaggttggcccagccgggccgaacggattcgctggacccgctggtgcagctggccagcctggcgcaaagggcgagcgaggtgccaaggggcctaagggtgagaatggcgttgtggggcccactggcccagtgggcgcagccgggccggccggacctaacggacctcctggccctgctggttcaaggggcgatggcggtccccctggcatgaccggatttccaggagctgctgggaggaccggcccaccaggcccctccggaatctcaggcccaccaggccccccgggtccggctggcaaggagggactgcgtggccctagaggagaccagggacctgtcggacggaccggcgaggtgggtgccgtaggtccccccgggtttgccggagagaaaggcccaagtggagaggcgggaacagccggaccaccagggacacctggccctcaaggtctgcttggcgcaccaggaattctcgggctgcctggatctcgaggcgagcggggtttgcctggagtggccggcgcagttggggaacccggccccttgggtattgctgggcctccgggcgctcgggggcctcccggggccgtaggcagtcctggggttaatggcgcccctggggaggctggacgggacgggaatccaggaaatgacggcccccccggccgggatggccagccagggcacaagggagaaaggggttaccctggaaatatcggaccggtgggtgccgctggagcccctgggccccacggacctgttggcccagccggcaaacacgggaacagaggagagaccggacccagcggccccgtgggtcctgccggcgcagtgggcccacgaggcccatcaggaccccagggtatacggggtgacaagggcgagccaggcgagaaaggcccccgagggttaccaggccttaagggccacaatggcctgcaaggacttccggggattgctgggcaccacggcgatcagggtgcgcctgggagcgttggaccagcaggaccccgtggccctgcaggccccagcggtcccgcaggaaaagacggaagaaccgggcaccccggaaccgtaggccccgcgggaatccgcggaccgcagggacaccaggggccagctggaccacctggccccccaggtcctcccggtcctcccggtgtgtccggtggcgggtacgatttcggctacgatggcgacttctatagagcagatcagccgcggtcagctcctagtctccgccccaaagactacgaggtggacgcgaccttgaaaagtctcaacaaccaaattgaaacattgctgacaccagagggctcccgcaagaaccctgctcgaacctgccgggatctgaggctgagccatccagagtggagctctggatattactggattgatcccaaccaggggtgtactatggatgctatcaaggtttactgtgatttctctacgggagaaacctgtatcagagcccagccagaaaacatccccgcaaagaattggtatcggagcagcaaagataaaaagcacgtgtggctcggagagaccattaatgccgggtctcagttcgaatacaatgtagagggcgtgacaagcaaggaaatggcgactcaactggcttttatgagactgctcgctaactatgccagccagaacattacttaccattgtaagaactcaattgcatacatggatgaagaaactgggaacctgaagaaagccgtgatcctgcagggttcgaatgatgtggaattggtggcagagggcaattcccgattcacatataccgtacttgtggacggctgttcaaagaaaaccaacgaatgggggaagaccatcattgagtataagacaaacaagccttctcgcttgccttttctggatattgcacctctggacatcggaggagctgaccaggaattcttcgtggacattggtccggtgtgcttcaaa

SEQ ID NO: 32471 - DNA, 4098 bp, synthetic construct
  misc_feature 1..4098: note = Description of Artificial Sequence: Synthetic coding sequence
  source 1..4098: mol_type = other DNA
atgttgtcctttgttgacactcgcaccctgctgctgttggcagttaccctctgcctggcgacgtgccagtcgctccaggaagaaaccgtgcgcaagggaccagctggagacagaggtccgcgcggagagagagggccgcccggcccgcccggcagagatggagaggacggccctaccggaccaccagggccgccgggtcctccgggtccaccgggacttggtggaaacttcgctgcacagtacgacgggaagggggtgggcctcggaccgggacctatgggactcatgggcccacggggaccgccgggggccgcaggcgctcctgggccgcaaggtttccaaggaccagcgggtgagcctggtgagccgggccagaccggaccggcaggagcccggggccctgctggacccccggggaaagcgggtgaagatgggcatccaggcaaaccggggcgcccgggggagagaggcgtggtggggccgcagggtgcccgcggcttccctggaactcccggacttcccgggttcaagggaattcgcggtcataatgggctggatggactcaagggacagcctggagcaccaggagtgaaaggcgagcctggagccccgggcgaaaacggcaccccaggacaaaccggcgcgcgcgggctgccgggtgagcgcggacgcgtgggagccccgggccccgcgggcgcgagggggagcgatggctcagttggacctgttgggccagctggaccaattgggtcagcgggtcccccgggctttcctggggccccagggccaaaaggagaaattggtgccgtgggcaacgcaggccctgccggaccggccggacctcgcggggaggtgggacttcctggactctcgggcccagtgggacctcctggcaacccgggagccaacggtctgactggcgcaaagggcgccgcaggcctgccgggagtcgcaggagcccccggactgcccggacctcggggaatccccgggcccgtcggagccgctggagccaccggagcacggggactggtgggagaaccgggccccgctgggagcaagggcgaatccggcaacaaaggggaaccgggatcggcgggccctcaagggccgccgggaccgtccggtgaggagggtaagcggggaccgaacggggaagccgggtccgccggaccgcctggaccccccggtctgcgggggtcccctggctcacgcggactgcctggcgctgacggccgggcaggtgtcatggggccgccgggttcccggggggcttcgggaccagccggtgtgcgcgggccgaacggagatgccggacgcccaggtgaacccggcctgatgggtcctaggggactgccaggctccccgggaaacattgggccagcgggaaaggaaggaccagtgggactccctggcattgatgggcggcctggcccgatcggaccggcgggagctcgcggggagccgggcaatatcggattcccgggaccgaagggaccgactggagatcccggaaaaaacggtgataagggtcacgcaggcctggccggagcgcgcggagctcctggcccagatggaaacaatggagcgcagggaccacctggacctcaaggagtgcaaggaggaaagggagaacagggcccgccgggaccccctggcttccaaggcttgccaggaccaagcggacctgccggcgaggtcggcaagcccggcgaacggggattgcacggagaatttggtctgcccggcccagctggaccgagaggcgaacgggggccgcccggagagagcggtgcggccggaccaaccggaccgattggaagccggggtccatccggtcctccgggtcccgatgggaataagggagagccgggggtggtgggagccgtgggaaccgctggaccttcgggtccatcaggacttcccggcgaacggggcgccgccggcatccctggcgggaagggagaaaagggtgaaccggggctcagaggcgaaatcggtaacccgggaagagacggtgccagaggagccccgggagcagtgggagccccgggcccagcgggtgcgacgggagatcgcggtgaagcgggagccgctggaccagcggggccagcaggcccgagaggatcaccgggggagcgaggggaagtgggcccagccggcccaaatgggttcgccggcccagcgggtgcggctggacagcccggagcaaaaggggaaagaggcgccaaaggacctaagggtgaaaacggagtcgtgggaccaactgggcctgtcggtgccgccgggccggcgggcccaaatggaccgcctggcccggccgggagccgcggtgacggtggaccgccgggtatgaccggttttccgggagcagccggcagaaccggaccaccgggaccgagcggcatttcgggtcctcctggaccaccgggtccggcaggcaaggaaggacttcggggcccacggggcgaccaaggccccgtggggcggaccggcgaagtgggagccgtgggcccacccggatttgcgggagaaaagggaccgtccggagaagcagggactgcgggaccaccgggaaccccggggccccagggattgcttggagctcccggaatcctgggactgcctggatcacgaggagaaagagggctccctggcgtggcgggcgcagtcggagagccaggtccgctgggaattgctgggccgccgggagcgcggggccctccgggagccgtgggctcgccaggagtcaacggagcaccgggagaagcaggacgggatggcaatccaggtaacgacggaccccctggacgcgacggccagccaggccacaagggagaaagaggataccccggaaatatcggaccggtgggcgccgccggcgcaccgggaccgcatggaccggtcggtccagcaggaaagcatgggaataggggagaaactggaccgtcggggccggtgggcccggctggagcggtgggaccaagaggaccgtcgggcccgcaaggaatcaggggagataagggagagccaggagagaaaggtccgcggggactgccaggactgaagggacataatgggcttcaaggtttgccaggaatcgcaggccaccacggtgatcagggagcaccaggatccgtgggaccagccggaccacgcggaccggctgggcccagcgggcccgcgggtaaggatggacggactgggcatcctggaaccgtcggaccggcaggtatccgcggaccgcaaggacaccagggtccggcgggacctccgggaccgccgggaccaccaggaccaccaggagtcagcggaggcggatacgattttggctacgatggagacttttaccgggccgaccagccacggtccgccccgtcgctgcgcccgaaagactacgaggtggacgccactttgaagtcactgaataatcagatcgaaaccctcctcaccccggaggggtcgcgcaagaacccggcccgtacttgccgggacctgagactgtcccatccggaatggtcgtccggctactactggatcgacccgaaccaggggtgtactatggatgctatcaaagtgtactgcgacttctcgaccggtgagacttgcattagggcccaaccggagaacatcccagccaagaactggtacagatcgtcaaaggataagaaacacgtgtggttgggtgagactatcaacgccggatcgcagttcgagtacaacgtcgaaggagtgacctctaaagagatggctacgcaactcgccttcatgcggctgctggctaactacgcctctcagaacatcacttatcattgcaaaaactcgatcgcctacatggacgaggagacgggcaacctcaagaaagcggtcatcttgcaaggatcgaatgatgtggagttggtcgcggagggaaattcgcggttcacctataccgttctggtggatggatgcagcaagaaaactaacgaatggggtaagactattatcgaatacaaaactaacaagccgagccggttgcctttcctggacatcgcgcctctggacatcggaggggcggatcaggagttcttcgtggatattggcccggtgtgctttaag

SEQ ID NO: 32472 - DNA, 4098 bp, synthetic construct
  misc_feature 1..4098: note = Description of Artificial Sequence: Synthetic coding sequence
  source 1..4098: mol_type = other DNA
atgctgagctttgtggatacccgaaccctgcttcttcttgccgtcaccctgtgccttgccacctgtcaatccctgcaagaggagactgtgcgcaagggacccgccggcgatcgcggcccgcgaggagagcggggcccaccaggtcctccgggtcgagatggggaagatggaccaactggtccacccggtcctcctgggccacctggaccaccaggtttgggaggcaacttcgcggcccaatacgatggaaagggtgtgggtcttggacctggccctatgggccttatgggaccccgtgggcccccaggcgccgctggagcaccagggcctcaaggcttccaaggccccgccggagaaccgggcgaaccaggccaaactggtcccgccggtgcccgaggtcctgccggaccccctggcaaggcaggggaagatggccatccaggaaagccaggacgccctggggaaaggggggtcgtcggcccccaaggagcacgcggctttcctggtaccccaggccttccaggatttaagggaatcagaggacacaatggacttgacgggctcaagggacaaccaggtgcaccaggtgtgaagggagaacccggggcgccaggagagaacggaactcccggacagactggagctcgggggctgccaggtgagcgaggaagagtgggggctcctggccctgccggtgcgagaggctccgatggatcagtgggtcctgttggtccggcaggtccgataggctcggcaggcccacccgggtttccaggcgcgcccggtcctaagggagaaattggtgcggtgggcaatgcaggaccagcgggccctgccggacctaggggagaagtggggctgcctggcctttccgggcctgtcggtccaccaggaaaccctggagcgaacggacttaccggcgcaaaaggagccgcaggccttcccggcgtggccggcgcacctggcctgcctggccctcgcgggattcctggaccagtgggggccgcaggtgcgaccggagcacgggggctggtcggtgaaccaggaccagccggtagcaagggggaaagtgggaacaaaggagagcccggttcggcgggaccacaaggacctcctggcccctcaggtgaagaaggaaagagggggcctaatggagaggcaggctcggcgggaccccctggtccgcctgggctccgggggagccctgggagcagaggcctgcccggagcagacggaagggcaggagttatgggtccaccgggatcgcggggagcctcggggcctgcaggggtgagaggacctaatggggatgccggtcgtcctggtgaacctggtcttatgggtccccgaggcctgcctggatctccgggtaatatcggcccggcaggtaaagaaggtcccgtgggacttcctgggatagatgggcgcccggggcccattggcccagcgggtgctagaggcgagcccggaaacattggattcccagggccaaaaggaccaactggagatcctggtaagaacggggacaagggtcacgcaggtctggcgggtgcccggggtgcccccggcccggacggcaataacggggcacaaggtccacctggaccccaaggtgtgcaaggaggaaagggtgaacagggaccaccaggaccacccggttttcaaggcctccctgggccttcaggtccagcaggagaggtgggtaaacctggggagcgcggactccatggtgaatttggtctgccagggccagcaggaccgcggggagaaagagggccccctggggagtccggcgcagctggaccaacgggtcctattggaagcagaggtccatcaggtccccccgggcccgacggcaataaaggagaaccgggagtggtcggcgctgtgggaactgctgggccatcaggcccttccggattgcctggtgagaggggtgccgcaggtatcccaggaggcaaaggtgaaaagggcgaacctggactccgcggggaaattggcaaccccggacgggacggagcacgcggagcacctggtgcagtgggggcgccgggtccggcgggggccactggcgaccgaggtgaagcaggggcagcagggcccgccggtcccgcgggtccacgaggctcgcctggtgagcgcggagaagttggaccggctggaccgaacggtttcgctggcccggcaggggcagccggtcagcccggtgcaaaaggtgaacgtggcgcgaagggaccaaagggagagaatggcgtcgtgggacctaccggaccggtgggagcagcaggaccggccggcccaaacggacctcctggaccggcaggcagccgtggagacggaggccctcctgggatgacgggttttcccggggcggcaggaagaaccggacctccaggaccatcaggaatatcagggccacccgggccccccggccctgccggcaaggagggtctgcggggacctcggggagatcagggccctgtggggcggactggggaagttggcgcagtagggccaccggggtttgcgggagaaaagggaccatccggagaagccggaaccgcgggtccgcctggaacgcctggacctcagggcttgctgggggcacctggaattcttgggcttcccggttcgagaggagagagagggctcccgggagtggcaggagctgtgggtgaaccgggacctctcggaattgccggtcctccaggcgcacgcgggcctcctggcgcagtcggttcacctggagtgaacggcgcccccggtgaggctggtcgggatggcaacccgggtaacgacggcccacctggaagagacggacagcccggacataagggcgagagaggataccctgggaatatcggaccagtcggagccgcaggtgcaccggggcctcatggacctgtcggccctgcgggcaagcatggaaatagaggtgaaaccgggccatctggcccagtggggccagcaggtgctgtgggtcccaggggcccatccggtccacaaggcattcgaggcgacaaaggcgagccgggtgaaaagggtcctcgtggattgccgggattgaaaggccacaacgggctccagggactccccggaatcgcaggacaccatggggatcaaggtgccccagggtcggtgggaccagcagggcccaggggtccagcgggcccatcggggcccgcaggaaaagatgggaggaccggtcatcctggcactgttggacctgcaggtatccgaggtccacaaggtcaccaggggccagctggacctcccggaccaccaggcccacctggtcccccgggagtaagcggaggggggtacgactttggttacgatggcgacttctaccgcgcggaccaaccccgctccgcgccaagcctgcgccctaaggattacgaggtcgatgcaaccctgaagtcgctgaataaccaaatcgaaacgctgctgactccggaaggttcgagaaagaaccctgcacgtacttgtagagatctcaggctgtcccacccggaatggtcctcgggctactattggattgatcccaaccagggctgcactatggacgcaataaaggtgtactgtgatttttcgaccggtgaaacttgtatccgtgcacagcctgaaaacatacctgctaagaactggtacagatcctccaaggataagaaacatgtatggctgggtgaaaccatcaacgcagggagccagtttgaatacaacgtggaaggtgtcacctccaaagaaatggccactcagctcgctttcatgagacttctggcgaattacgcatcgcagaatatcacctaccattgtaagaactcgatcgcatacatggatgaagaaaccggtaaccttaagaaggcagtgattctccagggaagcaatgatgttgaacttgtcgcagaaggaaattcaagattcacgtacacggtccttgtcgacggatgtagtaaaaagaccaacgagtggggtaagaccattattgagtataagactaacaagccgagcagactcccattcctggacatcgcacctttggatattggaggtgccgatcaggagttctttgtcgatattggacctgtgtgctttaaa

SEQ ID NO: 32473 - DNA, 4098 bp, synthetic construct
  misc_feature 1..4098: note = Description of Artificial Sequence: Synthetic coding sequence
  source 1..4098: mol_type = other DNA
atgctatcctttgttgatacaaggacattgctgctccttgcggtgaccttatgcctggctacatgtcagtcacttcaagaagaaaccgtcagaaagggacccgcaggggatcggggacctcgcggagaaagaggcccccccggcccccctggacgtgatggggaggatggtcccaccggcccccctggtccccctggcccaccaggccctcccggattgggtggcaacttcgcagcgcaatacgacggaaagggggtgggcctcggccccggtcccatggggctcatgggccctcgggggccacctggggccgccggagctcccggaccccagggctttcagggccccgccggggaaccaggagaacccgggcaaacgggtcccgcaggggccagggggccagccggaccgccaggtaaggccggcgaggatggccatcccggtaagcccggccggccaggggaacggggagtcgtcggaccacagggtgctaggggctttccagggacccccggtctgcctggctttaagggtatccggggccataatggcctggacggtctaaagggacagccaggagcacctggggtgaagggcgagccgggagctccaggggaaaacgggactcccgggcagacgggagctcgaggcctcccaggcgaacgcggtagagtaggcgcccccgggccagcaggagcgagaggctccgacggatccgtgggcccagttgggccggctggaccaatagggtccgccggcccgcctggttttccgggggcaccaggtcctaaaggagagatcggagcggtcggcaatgccgggcccgcaggcccggcagggccgaggggggaagtgggtttacctggcttgtctggaccagtgggccctcccggaaatcctggtgctaatgggctgacaggcgctaaaggagccgctggtctgcccggcgtcgcgggagcccccggacttcctggccccagaggtattccgggacccgtgggtgcagcaggcgccacaggggctagggggttagtcggagagccgggcccggccggatctaagggtgaaagtggtaacaaaggcgaacctggaagcgcaggcccacagggcccccccgggcctagcggggaggagggaaagcggggcccgaatggagaggctgggtcagccggccccccaggccccccagggttgaggggatcccccggtagccggggactccctggcgctgacggccgagctggggtgatggggcctcctggttctcgcggcgcctcggggcctgcaggcgtaaggggccctaacggagatgctggtcggcctggcgagccgggcttgatgggacctagaggtctccctggctctcccgggaacatcggcccagccgggaaagaaggtcccgttggtttgcccggaattgatggcaggcccgggccgatcggtccagcaggcgccagaggcgagcctggaaacatcggcttccctggtcctaagggccccacgggtgacccgggaaaaaacggggacaagggacacgctggactcgctggcgccagaggagcgcctgggccagacggcaacaatggcgcccaaggacctcctggccctcaaggggtgcagggtggaaaaggcgagcagggcccacccgggccacccggattccagggcctgcccggcccttccggcccggctggagaggtagggaaacccggcgagcgcggactgcatggagaatttgggcttccagggcccgccgggcctcgcggtgagcggggcccccccggggaatccggtgctgcggggcctactggaccaattgggagtcgtggcccttccggacctccaggacctgatggaaataagggcgagccgggggtagtcggcgccgtaggcaccgctggtccttccggcccttctggacttcctggcgagagaggtgccgccggcatacccgggggaaaaggagagaaaggggaacccggtctgaggggggagataggtaaccctggtagggacggggcgcgaggcgcccccggagctgtcggagcgcctggaccagccggtgccacgggcgatcggggggaggccggcgccgccggccctgctggaccagccggtccacgtggaagccctggtgagagaggagaggtgggccccgccgggcccaatggttttgccgggcctgctggcgccgcaggccaaccaggagccaagggcgagaggggcgctaaggggcccaagggggagaacggagtcgtagggcctaccgggcctgtcggagccgctggtccggctggacccaacggtcctccaggcccagcgggcagccggggggacggagggcctccaggaatgactggattccccggggccgccgggcggacaggaccgcccggtccttcagggatttccggccccccggggcccccggggcctgccggtaaggaagggctgagggggccccggggtgaccaagggccagtgggccgcacaggtgaggttggcgcagtggggcccccgggattcgccggtgagaaaggaccctcaggagaagctggcactgccgggcctcccgggaccccaggaccacaaggccttctcggagctcccggcatcctcggcctacctggatctcgcggcgagcgagggctccccggtgtggccggagctgttggcgagccgggcccactgggcatcgctggaccacccggcgcccgggggccaccaggggcggtcggaagccccggggtgaatggggcccctggcgaggcaggccgggatgggaaccctggcaacgacggaccgcccggccgggatggccagcccggtcacaaaggcgaaagagggtatcctggcaatatcggccccgtgggtgcagccggcgcccctggcccacatggtcctgtgggtcccgccggcaagcacggaaatagaggggagaccggcccatcaggaccagtggggcccgctggggcagtcgggcctagggggcctagcggtccacaggggattcggggggataagggtgagcccggtgaaaaaggtccacgagggctccctggcctaaagggccataatggcctccagggactccccggcatcgccggtcaccacggcgaccagggggcgcccggttctgtgggcccagctggccctcgcggccccgccggcccctcaggccccgcaggtaaggacgggcgcacaggacacccgggtaccgtagggcccgccggcatcagaggccctcaggggcaccagggtcccgccggacctcctggaccccccggtccaccggggccccccggagttagtggaggaggatacgactttggttatgatggcgacttttacagagcggatcaaccgaggtccgctcctagtttgcgacctaaggactatgaagttgacgcaactttgaaatcgctgaataatcagatagagactctgcttaccccagaagggagccgtaaaaaccccgcacggacttgtcgtgacttgagactctcccacccggaatggagttctgggtattattggattgacccgaaccagggctgcactatggacgctatcaaagtgtactgtgacttttcaaccggcgaaacatgtattagagctcagccggagaacatccctgccaagaattggtataggtcatcaaaggataagaagcatgtgtggttaggcgaaaccatcaacgctggctcccagttcgaatataacgttgagggcgtgacttccaaggagatggcaactcagctggccttcatgagattactggccaactatgcaagtcagaatatcacctatcactgtaagaacagcattgcttacatggatgaagagaccgggaatctgaaaaaggctgttatcctccaaggctctaatgacgtcgaactggtcgcagaaggcaacagccgatttacctataccgtacttgtggatggttgctctaaaaaaactaacgaatgggggaaaactatcatcgagtacaagaccaataagccatctagactgcctttccttgacatcgcaccgctggacatcggcggtgccgatcaggagttcttcgtggacatcggaccagtgtgttttaaa

SEQ ID NO: 32474 - DNA, 4098 bp, synthetic construct
  misc_feature 1..4098: note = Description of Artificial Sequence: Synthetic coding sequence
  source 1..4098: mol_type = other DNA
atgctttcattcgtcgatacccggaccttgcttcttcttgcagtgaccctgtgtcttgcgacctgccagtcactccaagaggaaaccgtgcggaagggtccagcaggtgatcggggccccagaggtgaacggggtcctccaggacctcccggccgtgacggtgaggacggtcccacgggcccacctggcccacctggacccccgggtcctcccggactgggaggtaactttgcagcccagtatgatggaaaaggagtcggtttgggacccggtcctatggggcttatgggccctagaggcccacctggggcagcaggagcccccggacctcagggattccaggggccagcgggcgagccaggtgaaccaggacaaaccggacctgctggagccagaggacccgcaggtccccccggcaaagccggggaggacggccaccctggcaagcccggtagaccaggagaaagaggtgtcgtcggtccccaaggagcacgtgggtttccagggaccccaggacttcctgggttcaagggtattagaggccacaacggacttgatggtctgaagggacagcccggcgcacccggagtcaaaggggaacctggcgccccaggtgaaaatggtactccgggccagactggtgcacggggtttgcctggcgaacgcggacgcgtgggagcgccaggtcctgcaggcgcaagaggtagcgacggtagcgtgggacctgtcgggccggctggccccatcggttccgcaggccctcccggctttcctggagcacctggaccaaaaggagaaattggcgccgtgggtaacgcgggtccagcggggcccgcaggacctagaggggaagtcggccttcctggcctctcaggaccagtaggtcccccgggaaatcctggtgcaaacgggctgaccggagccaaaggggcagcgggactccctggtgtggccggtgcacccggactgcctggccctagaggaattccagggccggtcggtgcggcaggagccaccggtgcccgcgggctcgtgggtgaaccggggcctgctggttcgaagggcgaatcaggtaataagggagagccaggttcggcaggcccccagggccccccaggaccaagcggggaggaggggaagaggggcccgaacggtgaagccggatccgcaggaccaccaggtcctccaggccttagaggctccccaggtagccggggcctcccgggtgcagatggccgcgcgggtgtcatgggaccccctggatcgcgtggtgcatccggtccggcaggcgttaggggtccaaacggagatgcaggccgaccaggcgagcctggcctcatgggcccccgagggctgcccggtagcccgggcaatatcggccccgcggggaaagaaggtccagtgggcctccccggtatcgatggtcggccagggcccattggccctgcaggagccaggggcgaacccggtaacattggcttccctggtccaaagggacctaccggggaccccgggaagaacggcgataagggacatgccggactggctggggccagaggggcccccgggcccgacggtaacaacggtgcacaggggccaccggggccacagggagtgcaaggtgggaaaggtgagcaaggtccaccggggcccccaggcttccagggcctgccagggccgagcggacctgcaggtgaagtcgggaaacctggagagcgcggccttcatggagaatttggtctgcctggacccgccgggccccgcggtgaacgggggccgcctggggagtccggagcagccgggcctacgggaccgatagggtcgcggggtccatccggacccccgggaccggacggaaataagggtgaaccaggggtggtcggcgccgttggtactgcaggaccttcgggacccagcgggctgccgggcgaaagaggcgccgccggcatcccaggtggtaagggagaaaagggcgaaccaggacttcgaggggagatagggaaccccggcagggatggggcaagaggcgctcctggtgcagtgggtgccccagggccggccggggcaaccggggaccgcggagaagcgggtgctgcaggaccagcagggccagcggggcctcgaggatcaccaggagagcgtggtgaggtaggtccggctggaccaaacgggtttgcagggcctgccggtgccgcgggacaaccaggtgcaaagggggaacgcggcgcaaagggtccaaaaggggagaatggagtggtgggccctactggaccagtcggcgcagctggcccagcgggcccgaatggccccccaggcccggctggctcccgtggggatggagggccccctggaatgactgggtttcctggtgccgcaggtcgaaccggtcctccgggtccttccggtatttcaggaccgccgggccctcctgggcctgctggaaaagagggacttaggggtcccaggggtgaccagggcccggtcgggagaactggagaagtcggagcagtgggccctccgggatttgcaggtgaaaagggaccttcaggggaggccggaacggcagggcccccaggtacccctggccctcaaggcttgctgggagcacctggtattcttggactgcctggatcacgcggtgagagagggcttcctggggtggcaggagcagtgggggagcccggccctctcggaatcgccggcccaccaggagcaagaggacctccgggggcagttggctcgccgggagtgaatggagctcctggagaagcagggagagatggaaaccctggaaacgacggtcctcctggtcgggacggtcagcctggacacaagggggaacgaggttaccctgggaacattggcccagtgggggcagcgggggcgccaggcccacatggacccgtgggccctgcaggcaagcacggaaacagaggcgagactgggccatcggggcccgtcgggccagctggggccgtggggccccgggggccttccggaccgcaaggcattaggggggataagggagaacctggtgagaaaggaccgcgtggcctgccgggtcttaaaggtcataacggacttcaaggcctgccaggcattgcaggacatcatggcgatcaaggagccccgggcagcgtggggcctgccggccctcggggtcctgctggcccaagcgggccagccggtaaggatggacgtactggtcatcctggcactgtgggtccggcaggaatacgtggaccacaaggacaccagggaccggcgggacctcccggtccccctggacctcctggacctccaggggtgtccgggggaggatacgattttggatacgatggtgatttctacagagcggatcagcctagatccgcaccatcgttgcgacctaaggattacgaagttgatgctacgctcaagtcgctgaacaatcaaatcgaaactctcctgacccctgagggttccagaaagaatcctgcacgcacttgtagggacctgaggttgtcccatccggaatggagcagcggatactactggatcgaccctaaccaaggctgcaccatggatgcaattaaggtgtactgcgacttcagtactggagaaacttgtatccgggcacaaccagaaaacattccggcaaagaactggtatagatcgtcgaaggataagaagcatgtgtggctgggtgaaaccattaatgcgggatcgcaatttgaatacaacgtggaaggagtcacctcaaaagaaatggctacccagcttgcatttatgcgacttctggcgaactacgcatctcaaaacatcacttaccactgtaagaattcgatcgcttacatggatgaagaaactggtaatctgaaaaaggcagtgattcttcaaggctcgaacgatgtggaattggtggctgaaggaaactcgaggttcacctacactgtgctggtggatggatgtagtaagaaaacgaatgaatggggtaagactattatcgagtacaaaaccaataagccatcccgcctgccctttctcgacatcgcacctctcgacataggtggagcagatcaagagttctttgtggatattggacctgtgtgctttaag

SEQ ID NO: 32475 - DNA, 4098 bp, synthetic construct
  misc_feature 1..4098: note = Description of Artificial Sequence: Synthetic coding sequence
  source 1..4098: mol_type = other DNA
atgctgtcctttgtagacacccgcaccctgctcctgctggccgtcacgctctgcttggctacgtgccagagtctccaggaggagacagtgagaaaaggccccgcgggggatcgcggtccccgtggagaacgcggaccccctggaccgcccggacgcgacggcgaggatggtccgacaggtccgcccggtccgccgggcccgccaggtccgccgggcctgggcggcaacttcgcggcccagtatgacggaaagggcgtgggactggggccgggaccaatgggactcatgggccctcggggcccaccaggtgctgctggtgccccaggcccccagggatttcaaggaccagcgggagaacccggggagccaggccaaacgggtccagctggagccaggggtcctgctggcccccccggtaaggcaggggaagacggtcatccaggcaagcccggcagaccaggggagcggggcgtggtcggaccgcaaggtgcgagaggtttcccaggcacccccggcttgccaggatttaagggaattcgaggccataatggtctggacggcctcaagggtcagccgggggcgccgggggtgaagggcgagcctggtgcaccgggagaaaatggaaccccgggccagaccggagcgcgcggcttacctggtgagcgcgggcgtgtcggtgcccccggaccggccggcgccagggggagcgacgggagtgttgggccagtaggacccgcaggaccaattggttcagcggggccgcccggctttccgggagccccgggtccgaagggagaaataggagcagtgggcaacgctggaccggccgggccggcgggcccgcgtggcgaggtaggtctgccgggactcagcggaccagtcggcccacccggcaaccccggcgctaacggcttaacgggcgcaaagggcgcggccggtcttcctggcgtggccggagctcccggcctgcccggaccgcgtggcattccaggtcccgtcggcgcagccggcgcaacgggagcccgcggcctggtcggagaaccgggcccagcgggctccaagggcgagtccggtaacaagggcgagcccggctcggcaggcccacagggtcccccaggcccctccggtgaggaaggcaaacgtggaccaaacggcgaggctggatccgccggacccccaggcccgcccggactacgtggctccccgggcagcaggggactacccggtgccgacggacgcgcaggcgttatgggcccaccgggcagcaggggagcctcgggtcccgccggagtacgcggtcctaatggagacgctggacgacccggcgagccgggcctcatgggcccacggggtttaccggggtcgcctggtaatatcggcccggctggaaaggaaggccccgtgggtttgcccggtattgacggacgaccggggcccattgggccggccggagcgcgaggagaaccaggaaatatcggttttccgggtccgaagggccccaccggtgatcccgggaagaatggcgacaagggccatgccggcctcgccggagcacgcggagctcctggcccagatggtaacaatggcgcccagggcccgcccggcccacagggtgttcagggtggcaagggagagcagggcccccctggaccgccgggcttccagggattgccaggtcccagtggacccgcgggcgaagttggcaagcccggcgaacgcggcctgcacggcgaatttggactcccagggccagcaggcccacggggcgaacgcggtccgccaggcgagtccggtgcagccggccccacgggccccattggttcgcgcggaccctcgggtcctccaggccccgacggcaacaagggcgagccaggcgtggtcggcgccgtcggtacagctgggcccagcggaccatccggcctgccaggagagcgcggagcggccggcatcccgggtggcaagggagagaagggtgagcccggcctccgcggtgagataggcaatcccggacgagatggcgcacgtggagcaccgggtgccgtcggtgcccccggcccggctggcgcaaccggtgacaggggtgaagctggcgccgccggccccgccggtccagcaggtccacgcggttccccgggcgagcgaggcgaggtaggtcccgctggcccaaatggcttcgcaggtcccgccggcgccgccggacaacccggggctaagggcgaacgcggcgcgaaaggtccgaagggagaaaacggtgtcgtgggaccaacaggccccgtcggtgctgcaggccccgccgggcccaacggtccgccaggccccgcaggatcccgcggtgatggcggccccccgggtatgaccggctttccgggagcggccgggcgcacagggcccccaggtccatcgggcatctctggaccaccgggccctccgggacccgcaggaaaggagggccttcgcggcccccgcggagaccagggtccggtaggccgcaccggcgaggtgggagctgtgggccctcccggatttgccggagagaaggggcccagtggcgaagcaggtacggcaggtccccctggcacgccaggaccgcagggcctactgggcgccccaggcattctaggcctgcccggctccaggggagagagaggcctgccaggagtggcgggcgccgtgggcgaacccggccccctgggaatagctggaccgccaggcgcacggggacctccaggtgcagtggggagtccaggagtgaacggagccccaggtgaggccggtcgtgatggcaatccgggaaacgatggacctcctggtcgagatggtcaaccaggccacaagggtgagcgaggctaccccggaaatataggcccagtgggcgccgccggcgcgccgggaccccatggtccagtggggccggccggcaagcacgggaacaggggcgaaaccggacccagtggacccgttggtccggcgggcgcggtaggccctcgaggaccatcgggcccacaaggaatccgaggtgacaagggcgagcctggagagaagggccctcgaggattgccgggtctgaagggccataacggacttcagggactgcccggaatcgcgggtcaccatggtgaccaaggcgcccctggaagtgtgggccccgccggaccccgcggacccgccggcccttctggacctgctggaaaggatggacgcacaggccacccaggcacagttggtccagccggcatccggggaccgcaaggacaccaaggccccgcaggcccaccaggacctccaggacccccgggaccacctggtgtgagcggcgggggctacgatttcggctacgacggcgatttttaccgagcagaccagccccgctcagctcctagtctccggccgaaggactacgaggtagacgctaccctgaagagcctaaacaaccaaattgagactcttttaacaccagagggaagtcgcaagaaccccgcaagaacatgtagagatttgcgcttgtcgcacccggagtggtcgagtggctattactggattgatcccaatcagggctgcactatggatgccattaaggtgtattgcgacttttccacgggagagacctgcatacgtgctcagcccgagaacatacctgcgaaaaattggtatcgttccagcaaggataaaaaacacgtatggcttggagagaccatcaatgctggcagccagttcgagtataacgtcgagggcgtgacgagcaaggagatggcgacccagctggccttcatgcggctgctggccaattacgcctcccaaaacattacctaccattgcaagaattctatagcgtatatggacgaggaaacaggaaatctaaaaaaagccgttatactgcagggctctaacgacgttgagttggtggctgaaggaaattccaggtttacatacactgtcctggtcgacggttgctccaagaagaccaacgagtggggcaaaacgattatcgagtataagactaataagcccagtcgtctgccgtttctcgacatcgctccgctggatatcggcggcgccgatcaggagttcttcgtggacattggcccggtgtgtttcaaa

SEQ ID NO: 32476 - DNA, 4098 bp, synthetic construct
  misc_feature 1..4098: note = Description of Artificial Sequence: Synthetic coding sequence
  source 1..4098: mol_type = other DNA
atgctctccttcgtcgatacccggactctgctgttgcttgcggtgaccctctgcctcgccacctgccagagtctacaggaggagacggtaagaaaaggccctgctggcgaccgcggacccagaggcgagcgcgggcccccggggccacccggccgggacggagaagacggcccgacggggccaccgggaccccccggccctccggggccaccaggactgggcggcaactttgctgctcagtacgacggcaaaggcgtcggcttgggacccggccctatggggctcatgggcccacgcggtccgcctggcgccgccggagcccccggcccgcagggcttccagggaccggctggagaacctggggaacccggtcaaacaggccctgcaggcgctagaggaccggcagggcccccagggaaggcaggggaagatggtcatcccggaaagcccgggaggccaggagagagaggcgtggtgggtccccagggagcccgtggattccctggcacgcccggacttccgggatttaaagggataagggggcataacgggctggacgggttgaaggggcagccgggagctcctggagtgaaaggcgaaccaggcgcccccggcgaaaacggaactcccgggcagaccggagcccggggcctcccgggcgagaggggccgtgtgggcgcccccgggcctgccggcgcccgtgggtcggacgggtcagtaggccccgtcgggccagctggaccaattggtagtgcagggccccctgggttcccaggtgctcccgggcccaaaggggagattggagccgtgggcaatgccgggccggcaggtccagcggggccaaggggcgaggtgggcctgcccgggctgagtggacccgtgggtccccccggcaacccgggggcaaacggactaacgggggcgaagggcgcggctggtttgccaggagtagcgggtgctcctggtcttcccggccccaggggcatccccgggccagtgggcgccgctggcgccactggagctcggggcttagtgggagagcccggacctgcaggaagtaagggagaaagcggcaataaaggcgagcccggcagtgccggcccccaggggccaccaggaccctcaggcgaggaaggtaagagaggtcctaacggtgaagccgggtccgcaggacctcccggtcccccaggtctacgtgggagtcctgggtctagaggcctccccggtgcagacggcagagccggagtgatgggccctcccgggagtcgcggtgccagcgggccagccggtgtccggggccccaatggcgacgcaggccggcccggcgagcctgggttgatgggacccagaggacttcctggtagccccgggaatattgggcctgctgggaaagagggccccgtgggtctacctgggatagacggcagaccggggccgattggacccgccggggcccgcggcgagcccggaaatatcgggtttccaggaccaaaaggaccgactggcgacccaggaaaaaacggcgataagggacatgcgggtttggcaggagcgaggggagcccccggccccgacgggaataacggggcacagggaccgcctggaccgcagggcgtgcaaggcggcaagggggaacaaggacccccaggcccacccggtttccaagggctaccaggaccttccggacccgctggtgaggtcggtaagccgggggagcgcgggctgcatggcgagtttggcctccccggccccgcaggcccaaggggagaacgggggccacctggggagtccggcgctgccggtcctaccggtccaatcgggagccgcggccccagcggccctccagggcccgatggcaataagggggaaccaggagtggtcggtgccgtgggcaccgccggcccaagtggtccatcaggcctacccggagagcggggtgcagccggaatccctggtggtaaaggggaaaagggggagcctggcctccgtggtgagatcggcaaccccgggcgcgacggcgcaaggggcgcacctggggccgttggcgcacctggccctgccggggctaccggcgaccggggggaagccggcgccgctgggcccgcaggccccgccggcccacgcggttcccccggcgaaaggggggaagttggacctgccggccccaacgggttcgcaggccccgctggagccgccggtcagcctggagctaagggggaaaggggtgcaaagggtccgaagggcgagaatggtgttgtgggacccaccggaccagttggcgccgctgggccagccggcccaaacggcccccccggccctgcaggcagcagaggcgatggggggcctccgggaatgactggtttcccaggcgccgccggtcgaaccgggcctcctggaccgagtggcattagtggcccccctgggcccccaggacccgccggaaaggagggtctcagaggccccaggggtgaccagggaccagtgggcagaaccggtgaagtaggagctgtgggaccacctggcttcgccggcgagaaaggcccatccggagaggcgggcacagccggcccgccaggaacccccgggcctcaggggctgttaggggcacctggaattctgggcttgcctgggtcaaggggggagagaggtctccctggggtcgcgggggccgtgggagagcctggcccattagggatcgcaggccctcccggggcacgtggaccaccaggggcggtaggctcccccggtgtcaacggggctcctggcgaggccggccgggacgggaacccgggcaacgacggaccacccgggagggatggacagccagggcataaaggtgagcggggctatcccggtaacattggacccgttggggcagctggggcccctggaccccacgggcccgtgggtcccgcgggcaaacacgggaatcgtggagagaccggtccttctggtcccgtagggcctgccggggctgtaggtccaagaggacccagtggtccccaaggcattagaggcgataagggagagcccggagaaaagggacctcgtggcctaccagggttaaagggccacaacggcttgcaagggctgcccggcatagcagggcatcacggggaccaaggcgccccaggcagcgtgggcccagccggtccgcggggcccggctggtccttccggtcctgcaggaaaagacggccggactggccatccaggaactgtcggaccggctggaataagagggcctcaggggcatcaaggcccggcgggcccccctggaccaccaggaccgccaggccctccaggggtttctggtggggggtatgatttcggttatgacggggacttctacagggcagaccaacctagaagtgccccttcgctgcggcccaaggattatgaagtggatgccacactcaagagtctcaacaatcagattgagacattgcttactccagaggggtccagaaaaaatcctgcccggacctgcagagacctccgtctttcccaccccgaatggtcgagtggttactactggatcgatccgaatcagggctgcaccatggatgcaatcaaagtctactgtgatttctcaactggagagacatgtatcagggcccagcccgagaatattcccgctaaaaattggtatcggagtagtaaagataagaagcatgtctggctgggtgagaccattaacgcggggtcccagtttgaatataatgtagagggggtaacaagtaaggagatggccacacagcttgccttcatgcgactactagccaactatgccagccagaacattacctatcattgtaagaatagcattgcctacatggatgaggagactggcaacctgaaaaaggctgttatcttgcaggggtccaacgatgtggagctagtcgccgagggcaactcgaggttcacctatactgtgctggtggacggttgtagcaaaaaaacaaacgaatgggggaaaactataattgaatataagactaataagccctctagattgccttttctggacatagcccccctcgatatcggtggcgcagatcaagagttttttgttgatattggcccagtgtgctttaaa

SEQ ID NO: 32477 - DNA, 4098 bp, synthetic construct
  misc_feature 1..4098: note = Description of Artificial Sequence: Synthetic coding sequence
  source 1..4098: mol_type = other DNA
atgctttccttcgtggatactagaacactgcttctgctggctgtgacactttgcttggcaacctgccaatcactgcaagaagaaaccgtgaggaagggccctgctggagatcgcggccctcggggggagaggggacccccgggaccaccgggccgggacggagaggacgggcctacaggtcctcctggcccccccgggccacctggccccccgggtctgggcggaaatttcgctgcacagtacgacggcaaaggcgtggggcttgggcctgggccgatgggcctgatgggccctagggggccacccggggccgccggagcgccaggaccacagggattccagggccccgcaggtgagccaggcgagcccggccagaccggccctgccggagcacgtggtcccgccggtccgcccggtaaagccggtgaggatggacaccctgggaagccaggccggcctggcgaaaggggggtggtcggaccccagggcgccaggggcttccccgggacccctggcctaccaggcttcaaggggatccgagggcataacggcctggacgggctgaagggacagcctggtgccccgggcgtgaagggtgagcccggcgcccccggggagaatggcacaccgggtcaaaccggagcacgcggcttgccaggagagcgtggacgcgtgggcgcacctggccccgctggggcgagaggaagtgatggcagtgtgggacctgtgggaccagccggtccgatcggcagcgcagggccgcctggcttccctggagctccaggtccgaaaggtgagatcggtgctgtgggcaatgcagggcctgcggggcctgcggggcctcggggggaggtgggcctcccggggcttagcggccccgtggggcctcccggcaacccaggggccaacggcctgaccggggcaaagggcgctgccggcttgcctggcgtggctggggccccaggcctcccaggaccgaggggcatcccgggacctgtgggggcggcaggcgcgacgggtgcccgcggtctggtgggcgagccggggcccgctggatccaagggagagtcaggtaataagggagagccggggtctgcaggaccccagggcccgccggggccttcgggagaggaaggcaagagggggcctaacggcgaggccggttccgcgggccctcccggacctccggggctgcgagggtccccggggtcccggggcctgccaggggccgacggcagagccggcgtaatgggtccgcctgggtcacggggcgcgagcgggcccgccggggtgcgcggccctaacggcgatgcagggaggcccggtgagcctggcctcatgggaccgagaggcctgcccggatcacctggaaacatcggccctgccggcaaggaagggcccgttgggctacctggtatcgacgggcgccccggacccatcggtccggccggtgccagaggagagcccggcaacattggattccctggtccaaaaggccccaccggggacccggggaagaacggcgacaagggacatgccgggttagcgggcgcgcgaggcgcccccggacccgacggcaacaacggagcccaaggcccgcctggtccacagggcgtccagggaggaaagggtgaacagggcccacccggccctcccggctttcaagggctgcccgggccatcaggcccggcgggagaagtgggcaaaccgggcgagagggggctgcacggagagttcggactgccaggacctgctggtcctagaggggaacgtggtcctcctggcgagtccggtgctgccggtccaacggggcctatcggcagccgtggcccctcaggcccaccagggccggatgggaataaaggagagcctggagtggtcggggccgtgggcaccgccggcccatcaggccccagcggactgccgggggagcgaggtgccgctggcatccccggcggcaagggcgaaaagggggaacccggcctgagaggggagatcggaaaccctggaagagatggcgccaggggcgctcctggggcggtgggcgcccccggtcctgccggcgccactggggatcgaggggaagcgggcgctgccggacccgcgggtccggccgggcctcgagggagtccgggtgaaaggggggaggtgggacctgccggccctaatgggttcgctggtccagctggagccgcgggccagcctggggcgaagggtgaaagaggggctaagggtcccaagggagaaaatggggtggtgggccccaccgggccagtcggggccgctggtcctgccgggcctaatggtccccctggaccagctggctcccgcggggacggcgggcctccaggcatgacgggattccctggagctgcggggagaaccgggccccctggaccctccggcattagtggaccgcctggcccacccggtccagccggcaaagagggcctgaggggtccaagaggagatcaaggccctgtgggccgcacaggagaggttggagccgtcgggccaccaggttttgcgggggaaaagggcccttccggggaggccggcactgctgggcccccaggcacacctggcccacaaggactgctgggagcacctggcattctcggccttcccggcagcaggggtgaacgcggactgcccggcgtggcgggcgccgttggagaaccaggtccacttgggatcgccggcccgccaggcgcccgcggcccccccggcgctgtcggctctccaggggtgaatggagctcccggagaggcaggaagagacggtaaccctggtaacgacggccctccaggacgggatggacagcctggccataaaggggagcgaggttaccccggtaatatcggccccgtgggggcagccggggcccccggtccacacggccctgtgggccctgctggcaaacatgggaataggggcgagacaggcccaagtggtcccgtgggcccagcaggtgctgtcggacctcgggggccatctggtccccagggcattaggggcgacaagggggaacctggtgaaaaggggccgcggggtctgcccgggcttaaggggcataatggtctgcaggggctgccaggtatcgctgggcaccatggagaccagggcgcacctggaagcgtcggtcccgcaggaccgagggggccagccggtcctagtgggcctgccggaaaggacggtcggacagggcacccgggcaccgttggacctgccggcatcaggggcccccaaggccatcaggggccagccgggcctcctggccctcctgggccgcctgggcccccaggggtgtccgggggcgggtacgattttggatatgatggcgatttctatcgggccgaccagccacggtctgctccttccctcagacccaaagactatgaggtcgacgcaacactgaagtccctgaataaccagattgaaaccttgctgacccccgaaggtagccgcaagaatcccgccagaacttgccgtgatcttaggttgtcccatcctgaatggtctagcggctactactggattgaccctaaccagggttgtactatggacgctattaaggtatactgcgatttttctactggagaaacctgcatcagagcccagcctgaaaacatacctgccaaaaactggtaccgttcctctaaggacaagaaacacgtttggctcggggagactatcaatgctggttcacagttcgagtacaacgtcgaaggcgtcacaagtaaggagatggccacccagttagccttcatgaggctgctggctaactacgcttctcaaaacatcacttaccattgtaaaaactccattgcctacatggacgaagaaactgggaatctgaagaaagctgtgatcttgcaggggtccaacgacgtggagctcgtagcagaaggcaatagcaggtttacctacactgttttggtggacggctgctccaaaaagactaatgaatggggcaaaaccatcatcgagtataagacgaataagccatctaggctaccattcttggacatcgcacccctggacatcggaggggcggatcaggagtttttcgtggatatcggcccggtctgcttcaaa

SEQ ID NO: 32478 - DNA, 4098 bp, synthetic construct
  misc_feature 1..4098: note = Description of Artificial Sequence: Synthetic coding sequence
  source 1..4098: mol_type = other DNA
atgctctcatttgtcgacacgagaacacttttgctgcttgcagtaacgttatgcctggcaacttgccagtccctgcaggaggaaacggtacggaaaggacctgcaggtgatcgcgggcctaggggagaacgcggtccaccaggaccgccgggaagggatggtgaagatggaccgacggggccgcccgggccgccaggacctcctggacctcccggattaggaggcaactttgccgcccagtatgacggtaaaggcgttggcttaggcccaggtccaatgggtttaatgggaccgcgtggtcccccaggtgccgctggagctcctggccctcaaggctttcagggcccagcgggggaacctggtgaaccgggtcagacagggccagccggagctcgtggccctgcgggaccgccgggtaaggctggtgaggacggtcatccaggaaaaccgggcagacctggcgagcggggcgtcgttgggcctcagggcgcccggggtttccctggaacaccaggccttccaggatttaaaggtatcaggggccataacggattagacggtcttaaaggacagccaggcgctccgggagtcaaaggcgaaccgggcgccccgggagaaaacggtacgcctggacaaacgggcgcaagaggccttccgggggagagaggccgagtcggtgctccgggtccggccggcgcgagaggttcagacgggtctgtaggcccggtcggacccgccggaccgattggttcagctggaccgccaggctttccgggagcacctggtccgaaaggagagataggcgcagtcggtaatgccggaccggccgggccggcgggtccaaggggtgaggttgggttgcctggactttcaggccctgtaggaccaccgggtaacccgggggctaatgggttaaccggagcgaaaggagccgcgggtttacctggcgttgctggcgctccgggactaccgggcccacgcggtattccaggccctgtcggtgcggccggggcgactggcgcgagaggtttggtcggggaaccgggacctgccggttctaaaggtgagtctggaaataagggtgagccgggctccgccggcccccagggtcctcctggaccgagtggcgaagagggtaagagaggcccgaacggagaagctggttctgcgggtcctccaggcccaccgggcttgagaggatcgcctgggtcacgcggcctgccgggcgcggatgggcgtgcgggagtaatgggaccgccgggctctagaggggcttccggcccggccggagttagaggcccgaacggagatgctgggcggcctggggaaccgggtctgatggggccgcgaggactccccgggtctccaggtaatatcgggcctgccggaaaggaaggcccggtaggcctgcctggaattgacggaagacctggacctatcggtccggccggcgccagaggcgagcctggtaatattggttttccaggccctaaagggccgacaggggaccctggaaaaaacggcgataaaggacatgcagggttagccggggctcggggtgcccctggcccggacggcaataacggagcacagggccctccgggccctcagggcgttcaagggggcaaaggagaacaaggcccgccgggcccaccaggcttccaggggttgcctggcccgtcaggaccggcgggcgaagttggaaaaccgggagaaagaggcctgcatggggaattcggactaccaggccccgcgggccctcgtggggaacgcggaccaccgggagaatctggggccgcggggccgacaggaccgataggctcacgcggcccgtctggtccgccggggccggatggaaataaaggtgagccgggagttgttggggccgtgggcacggcgggtccttcggggccttctgggcttcctggcgaaagaggtgcagcaggcattcccgggggcaaaggcgaaaaaggcgaaccgggacttcggggcgagattggaaatccaggcagggatggcgcgcgtggggcaccaggcgcagtgggagcgccaggcccggctggagctacaggcgaccgcggcgaggcgggggcggcgggccctgcagggccggctggcccgaggggcagtccaggtgaaaggggcgaggtgggtcccgcgggcccgaacggattcgctggtccggctggtgccgccggccagcctggcgccaagggagaaagaggagctaaaggtcctaagggagaaaatggtgtcgtcggacctacgggccccgtaggtgctgctggtcctgcaggtcctaacggaccgccaggccctgctgggtctaggggagatggaggaccgccgggcatgacgggctttccgggcgcagccggaagaacaggcccaccggggccttcaggtattagcggaccgccgggccctccggggcctgcagggaaagaagggcttcgaggacctagaggagatcagggaccggtcggaagaacgggggaggtaggcgctgtggggccgccaggttttgcgggcgaaaaagggccaagcggggaagccggcacagccggaccgcctgggacaccgggcccgcaaggcctcttaggcgctcccgggattctgggtctgccgggatcacgtggcgaaagaggcctcccaggagtcgcaggcgcagttggtgaaccgggccctctcggaattgctggcccgccgggagcgcgcggcccgccgggcgcggtcggctctcctggtgttaacggtgctccaggtgaagcgggaagagatggcaaccccgggaatgatggcccacctggccgtgacggacagccgggtcacaaaggggaaagaggatatccgggaaacatcggcccggtcggtgctgctggggcgccgggaccgcatggcccagttggccctgcagggaagcacgggaataggggggaaaccgggccatctggaccggtgggcccggcgggtgccgttggtccgcggggacctagtggaccgcagggtattagaggagacaaaggagaaccaggcgagaaagggcctcgcggcttaccgggtctgaaggggcacaacgggctgcagggtctgccgggtattgccgggcatcacggagatcagggagcaccgggttccgttggacctgctgggccgagaggacctgctgggccatcaggcccggccgggaaggacggacgaacaggacatccgggcacagtcgggccagctgggattagaggtccgcaagggcaccagggccccgctggacctccaggcccaccgggcccgccagggccgcccggggtgtccggaggagggtacgattttggctacgacggcgacttttatcgcgcagatcagcctagaagtgcgccgtctttaagacctaaggattatgaagttgatgcgacactgaagtcgcttaacaatcagattgaaactttgttgactccagaagggtcacgtaaaaacccggcgcgtacatgcagagacttacgtttatcacacccggagtggtcgtcaggatactattggatcgatccaaatcagggatgcacaatggatgctatcaaggtctattgtgacttttcgacaggagaaacatgcattcgtgcacaacccgagaacattcctgctaaaaattggtacagatcaagcaaggataaaaagcatgtctggcttggtgagacaataaatgcaggttcccagtttgaatataatgtagagggcgttacatcaaaagaaatggcaacccagctcgccttcatgcggttactggccaactatgcgtctcaaaatatcacgtatcattgtaaaaactccattgcttatatggatgaagagactgggaacttgaaaaaagcagtcattttgcaaggtagcaatgacgtggaactggtagccgaaggcaactctcggttcacgtatacagtgctggtcgatggatgttcgaaaaagaccaatgagtggggaaagaccataattgaatacaagacaaataaaccgagtcgcctgccttttttggatatcgccccgcttgacatcgggggcgcggatcaagaattttttgtcgatataggccccgtatgctttaag

SEQ ID NO: 32479 - DNA, 4098 bp, synthetic construct
  misc_feature 1..4098: note = Description of Artificial Sequence: Synthetic coding sequence
  source 1..4098: mol_type = other DNA
atgttgtcttttgtggacaccagaactttactactcctcgccgtgacgctgtgcctggccacctgtcagtccctgcaggaggagacggtaagaaagggacctgccggcgacaggggccccaggggagagcgaggcccgcctgggcctccgggtcgagatggggaggatggacctacaggccctcccggtccgcccggaccacccggtccccctggacttggtggtaacttcgccgcccagtatgacggaaagggcgtggggttgggccccggacctatgggattaatggggcctcgaggtccccctggggcggctggcgcgcctggccctcagggattccaagggcctgccggggagcccggcgagccgggccagactggccctgccggcgcaaggggacccgccggccctccaggaaaagctggtgaagacggacacccaggtaaacccgggaggcctggcgaacgaggggtcgtggggcctcagggcgcacgaggatttccaggcacacccggcctccctggatttaaagggatcaggggccacaacggattggacggcctcaagggccagccaggtgctcctggagttaaaggtgaacctggtgcacctggggaaaatggcacccctggccagaccggtgcccggggcttgccaggtgaacgtgggcgagtcggcgcaccaggtccagcaggagccaggggctctgatggcagcgtcggcccagtcggtccggccggtccaattggcagtgcagggcctcccgggttccccggagcccccggaccaaagggagaaattggagctgtaggtaatgcaggcccggctggccccgccggccctagaggtgaagtcggacttcctggactgagtggccctgtgggccccccaggaaaccctggcgccaatggactgacaggcgctaagggtgcagccggcctgcccggtgtggccggggctcctggtctccctggccccagggggattcctggccccgtgggcgctgccggcgcaaccggtgccagggggctagtaggagagccaggtcccgccggttcaaaaggggagtcgggtaacaagggcgaaccgggatctgcaggccctcagggccccccaggccccagcggcgaggaggggaagcgaggacctaacggggaggctgggtcagccggcccgcccggtccacccggactgcgtggaagtcctggctcccgaggactcccaggagccgatggacgagccggagttatgggaccccctggcagtagaggtgcctccggacctgctggtgtgaggggacctaacggcgacgctggacgcccgggagagccaggcttgatggggccgagggggcttccaggtagtcccggaaacataggtccagctgggaaagagggaccggtgggactccctggcatcgacggaagacctgggcccataggccctgcaggcgcccgaggcgagcctggaaacattgggtttcctggacctaagggcccgacaggggaccccggaaaaaatggagacaagggccatgctgggctggcaggcgcccggggcgctcctgggccagacgggaacaatggagcccagggccctcccgggcctcagggtgtgcagggcggcaaaggagaacagggacctccgggtccacccggcttccaggggctgccgggaccttccggtccggcaggagaagtcgggaaacctggcgagagaggacttcacggggagtttggccttccaggacccgctggccccagaggggaacgcggtcctcccggtgagagtggggccgcaggcccaaccggcccaattggctccagggggcctagtgggcctcctggccctgacggtaataaaggtgaacctggcgttgtcggcgccgtcggaacagctgggccttctggcccctctggtttgcccggggagagaggtgctgcggggatcccaggaggcaagggagaaaagggggagcctggcctgcgaggagaaatcgggaaccctgggagggatggggctagaggagcacccggcgctgtgggtgcacccgggcccgccggagcaaccggggaccgaggcgaggcaggtgctgccggcccagccggccctgccgggccaaggggatctcctggcgagcgcggagaggtcgggcccgccggccctaacgggttcgccggacctgccggcgccgcgggtcagcctggggcgaaaggggaaaggggggctaaggggccaaagggtgagaatggcgtggtggggccgaccggtccagtcggcgcggcgggcccagccggtcctaatgggcccccaggaccggctggcagccgcggggatgggggtccaccaggcatgactggatttcctggtgcagccgggcgcaccggcccccccggaccgtctggtatctccggccccccaggcccacccggtcctgcaggaaaggagggactgagagggccacgaggtgaccaagggcccgtgggtcgtactggcgaagtaggagccgtaggaccccctggcttcgctggtgagaaggggccatcgggggaggcaggaaccgcaggtcccccaggtactccaggcccacagggcctccttggtgcccccggaatattggggctgcccggctcgcgaggcgaacgtggattacccggcgtagcgggtgctgtaggagagcccggacccctagggatcgcgggcccaccaggcgcacgaggaccgcctggtgcagtgggcagtcccggagtgaacggggcgccgggagaggcgggtagggatggtaatccagggaatgacgggcctcccggccgagacggacagcctgggcataaaggggaacggggttatcctggcaatatcggtccagtcggcgcggccggtgcacctggaccacatggccccgttgggccagctggaaagcatggaaacagaggagagacagggcccagcggaccggtggggccagcaggagcagtgggccccagaggtccatccggcccccagggcatcagaggggacaagggagaacccggcgaaaaagggccaaggggtctacctgggctgaagggccacaacggactgcagggcttgcccggaattgcaggtcaccacggtgatcagggagcacctggttcggtgggcccagctggccctcgaggcccggccgggccctcgggcccggctgggaaggacggccgtacaggccatccagggacagtgggccccgccggcatcagagggcctcagggtcaccaggggcccgcagggcccccagggcctccaggaccgcccggcccacctggggtctctgggggaggctatgattttggttatgacggtgatttctaccgcgcggaccaaccgaggtcagctccatcactgagacccaaagattatgaggttgatgcgacattaaaatcgctgaacaatcagattgagacactgctgacaccagaagggagtaggaagaaccccgcacgaacatgtagggatctccgactgtcccaccccgaatggagctctgggtactattggattgatccaaatcaaggatgtacaatggatgctattaaagtttactgtgacttctcaaccggggaaacatgcatccgagctcagccagaaaacatacctgccaaaaattggtataggtcatctaaggacaagaagcatgtttggctaggggagaccataaacgcagggtcccaatttgaatataatgtagagggcgtgacgagtaaggagatggcaactcagctggcatttatgcgtctactcgcaaattatgctagccagaacatcacataccactgcaagaacagcatcgcctatatggacgaagaaacaggaaacctaaaaaaggccgtgatcctgcagggctccaacgacgtcgaactagtcgcagaaggaaactcgcgcttcacttacaccgtgctcgtcgatgggtgctcaaaaaagacaaacgaatgggggaagacaattattgaatataagaccaacaagccctcccgactgccatttctagacattgcacccctggatatcggcggagccgatcaggaattctttgttgatatcgggcccgtgtgtttcaaa

SEQ ID NO: 32480 - DNA, 4098 bp, synthetic construct
  misc_feature 1..4098: note = Description of Artificial Sequence: Synthetic coding sequence
  source 1..4098: mol_type = other DNA
atgcttagctttgtcgacactagaaccctgctgcttctggccgtgactctctgtcttgccacttgtcagagtctgcaggaggaaactgtgagaaaggggcctgcaggcgaccgaggaccccgcggagagcggggacctcccggtcccccaggcagagatggtgaggatggaccgaccggtcctcctgggccaccaggaccccctggtcccccagggcttggagggaacttcgcagcacaatacgacggtaagggtgtggggcttggaccggggccaatgggactcatgggtcctcgtggtccacccggggcagcaggagcacctggacctcaaggttttcaggggccagcaggtgagccaggggaaccaggtcagactggtccggcgggggcaaggggtccggccggcccgcccggtaaggccggagaagatggacatccaggaaaaccaggacgccctggcgagcggggagtcgtcggaccccaaggtgcacggggcttccctggaactcctgggcttcctgggtttaagggaatcaggggacacaatgggctggacggactcaagggtcagcctggcgcaccgggagtgaaaggagaacctggagcccccggcgaaaatggtaccccaggacaaactggtgctagagggctgcctggagaacggggtcgggtgggagcaccaggcccggcaggtgcaagaggctcagacggctcggtcgggccggtgggacccgcaggcccgattggatcggcaggtcccccaggattcccaggagctcccggtcccaaaggggagataggcgcggtgggcaatgctgggcctgcagggcctgctggcccacgcggagaagtcgggcttccggggctctcgggtccagtgggtccacctggcaaccctggagcaaacgggctgacgggagcaaagggtgccgccggactccccggagtggccggtgcgcctggtctgcctggtcctaggggaatccccggacctgtgggcgcggcaggagcgaccggagcgaggggacttgtgggagaacctggtccagctggatcgaaaggcgaatcggggaacaagggtgagccgggtagcgcaggaccacagggtccccctggcccgtcaggagaagaagggaagcggggtcctaacggggaggcaggtagtgcagggccaccaggtcctcctggcttgagaggttcgcctggatcaagaggccttcccggcgcagatgggagagcaggagtgatgggcccacccgggagccgcggagccagcggacccgccggagtccggggaccaaacggcgatgccggtagaccgggcgagcccggactgatgggccctaggggcctgcctggatcgccgggtaacatcgggcctgccggtaaggaaggtcccgtggggcttccaggtattgatgggcggccaggtccaataggtccggctggtgccaggggcgaacccggaaacatcgggtttcccgggccaaagggtcctacgggggatccaggtaagaatggtgacaagggccacgcaggacttgcgggtgcaagaggggcccctggtcccgatggtaacaacggggcacaaggacctcccgggccccaaggagtccaaggaggaaaaggagaacagggtccaccaggacctcctggatttcagggcctcccaggtccatccggaccggcgggcgaggtaggcaagcctggggaacgtggcctccatggcgagtttgggcttccgggtccggcgggaccccgaggtgagagagggcctcccggagaatcaggcgcagccggtcctactgggccaattggctcaagaggcccgagtggtccgcctggaccggatggaaacaaaggagaaccgggcgttgtgggagcagtgggaaccgcgggcccctcaggacctagtgggctccctggggagcggggtgcagccgggattcctggaggaaagggggaaaagggggaaccgggactgagaggtgaaatcggtaaccctggcagagatggcgcccggggagcgccaggagcagtcggtgcccctggccccgctggagcgaccggcgatcgcggcgaagcaggagccgctggtccagcaggacccgctgggcctcgaggctcgcctggtgaacgcggcgaagtaggacccgcaggacctaatggcttcgcaggcccggcgggggccgcaggacagcctggtgccaaaggcgaaagaggagcaaaaggtccgaagggagaaaatggtgtggtcggaccaacgggccctgttggtgcagcaggacctgcaggacccaacggtccaccgggtccagccgggagcagaggagacggaggtcctccgggaatgaccggattccctggagccgcaggaagaactggacctccgggcccatcaggaatctctggccccccgggaccacctggaccagctgggaaggaaggactgcgcggaccacggggagatcagggacctgtgggtcgtaccggagaggtcggcgccgtgggccctccagggtttgcaggggaaaagggacctagcggagaagcaggtacggcaggcccccctggtacccccggtcctcaggggcttcttggcgcgcctggtattcttggacttccaggttcaaggggagaacgcgggctgccgggagtggctggcgcggtcggcgagccagggcctctcggaatagccggccctcccggagcccgggggccaccgggggccgtgggatcacctggggtgaatggagcccctggggaggcgggaagggatggcaatccaggaaatgatggcccgcccggccgtgatgggcagccaggacataagggagaacgtggctacccgggaaacatcggaccagtgggggcagcaggtgcgcccgggccacacggacctgtcggaccagccggaaagcatggaaacagaggagagactggtccttccggacctgttggaccagcaggtgccgtcggaccacgcgggccctccggacctcaggggattcgaggagacaaaggagagccgggagaaaaggggccccgaggtctgcctggactgaagggccacaacggactgcaaggcctcccaggaattgccggtcatcatggtgaccagggagcccctggatcggtcgggcccgcaggccctcgcgggccggctggcccgtcgggccccgcagggaaggatggtagaaccggccacccaggaaccgtgggacctgccggaattaggggacctcagggtcatcaaggcccagcagggccacccggaccaccaggcccgccaggtccgccaggtgtgagcggcggaggatacgattttgggtacgatggagatttctacagagccgatcaaccgcggagcgctccatcactgcgcccaaaagattacgaggttgatgctacgctgaagtccctgaacaaccaaattgaaacgctcctcaccccagaagggagccgcaagaacccggcacgaacctgccgcgatttgaggcttagccatcccgaatggagctccggctactactggatcgaccctaatcaagggtgcactatggacgcaataaaggtgtactgtgatttttcgaccggtgaaacctgtattcgggcacaacccgagaatatccctgcgaaaaactggtatcggtcctccaaagacaagaaacacgtgtggttgggtgaaaccataaacgcaggttctcaatttgagtacaacgtggaaggggtgacttcgaaggaaatggcgactcaactggcttttatgcgtctgctcgcaaactatgcatcgcaaaacattacctaccattgtaagaactcgattgcttacatggatgaggagactgggaatctgaagaaggcagtgattttgcaaggatccaatgacgttgaactggtggcagaaggcaattcccgatttacttacactgtccttgtggatggatgttccaaaaagacgaatgaatggggtaagacgatcattgaatacaaaaccaacaaaccttcaagacttccattcttggacatcgccccactggacatcggtggagcagaccaagagtttttcgtggacattggcccagtgtgctttaag

SEQ ID NO: 32481 - DNA, 4098 bp, synthetic construct
  misc_feature 1..4098: note = Description of Artificial Sequence: Synthetic coding sequence
  source 1..4098: mol_type = other DNA
atgctcagtttcgtggacacgcggaccctgttactcttagctgtcacactgtgcctcgccacctgtcagtctctacaggaggagaccgttaggaagggtcctgcaggagatagggggcccaggggagaacgtggcccccccgggccacctggccgcgatggtgaagatggtcccacagggccccccgggccccctggcccccctggcccccctgggttgggtggtaattttgcagctcagtatgatgggaagggcgtggggttgggaccaggacccatggggttaatgggccccagggggcccccaggtgcagcaggagctcctggtccgcagggtttccaaggaccagccggagagcctggtgagcccggccagactggaccagctggtgctcgcggacctgcgggacccccaggtaaggctggtgaagacgggcatccaggcaagcccggtaggcctggcgaacgcggcgtagtcggccctcagggggcccgcggatttcctggcacccctgggcttccaggttttaagggcattcggggacacaacggcctggacggcctcaaggggcagccaggcgcaccaggcgttaagggcgagccgggggcacctggggaaaacggaactccaggacagactggggcgaggggtctgcccggcgaaaggggccgggtgggagcacccggcccagccggagcaagaggcagtgatggaagtgtgggacccgtcggacccgccggccccattggatctgctggaccccccggctttcccggcgcccctgggcctaagggagagataggcgcggtggggaatgccggccccgccggccccgccgggccgcggggcgaggttgggcttccaggcctcagtgggccggtgggacccccaggcaatcccggcgcaaatggattgaccggcgctaagggggccgccggacttccaggagtggctggtgcccctggtttacccgggcctaggggaattcccggacctgtcggtgccgccggagccaccggtgctcgcggcctagtgggggagccaggacccgccgggtcaaagggagagagtggaaacaaaggggagccagggtcggctgggccgcagggtccccccggaccttcaggagaagagggcaagcgcggcccaaacggggaagctggctcagctggcccaccagggccccccgggcttcgaggttcgccaggttcccggggtctgcccggagctgacggtcgggccggagtgatgggtccacctgggtcaagaggagcctcaggacccgctggcgtgagaggtccaaatggcgacgccggacgcccaggcgagcctggcctgatggggcctcgcggcctcccaggcagccctggcaatattggccccgctggcaaagagggtcccgtgggacttccaggtattgatggcagacccgggcccattggccctgcaggggccaggggtgaacccggtaatatcggattccccggcccaaaaggccccacgggcgatccagggaaaaatggtgataaaggacatgcaggactggctggagccaggggagctcctgggccagacggcaataacggtgctcaaggtcccccgggccctcagggtgttcagggaggcaaaggcgagcaaggcccacctggcccaccaggattccagggactgcctggacccagtgggcccgcaggcgaggttggtaagcctggtgagagagggctccacggggaatttggacttcctgggccagccgggcctcgcggggagcggggcccaccaggcgagagcggcgccgctggtcccactggcccaataggtagccgcgggccatcgggtcccccaggacccgatggtaataaaggtgaacccggcgtggtgggagctgtgggaactgctggacccagcggcccttccggtttgcctggagaaagaggcgctgccggaatacccggcggaaaaggtgagaagggggagcctggtctccgaggagaaattgggaacccagggcgcgacggggcccgcggtgcgcccggcgcagtgggggcccccggcccagctggggcgacgggcgaccgcggcgaggcgggggccgctggcccagcaggtccagccgggccacgaggcagccctggtgagaggggcgaggtgggccccgcagggccgaacggtttcgctgggcccgccggcgcagctggacagcccggggctaaaggagaaaggggagctaaaggcccaaagggcgagaatggggtggtgggccccaccgggcctgttggagcggctggacctgcgggtcctaacgggcctcccggtccagccggctctcgtggagacgggggaccccccggcatgacaggattccctggggccgcaggccgcaccggcccacctggaccttctgggatttcgggcccccctgggcccccgggcccagccggcaaagagggcctgcgtggacctcgaggcgatcagggacccgtggggcgaaccggggaagttggtgccgtgggacctccaggcttcgcaggcgagaagggtccatctggggaagcgggcactgctggacctccggggactcccggaccgcaggggctcctgggcgcccctgggatactgggtctgcctgggagccgtggtgaacgggggttacctggcgtggcaggagcagttggggagcctggcccactcggcatcgctggacctcctggggcgcgaggcccgcctggggccgtgggtagtccaggcgtcaatggcgcgcctggtgaggctggacgagacggaaatcccggcaatgacgggccacccggaagggacgggcaaccaggtcataagggcgagcgcgggtacccaggtaatattggccctgtcggtgctgcgggcgcacccggaccccacggccccgtggggcccgcaggcaagcacggcaatcgaggtgagactggccccagcggccccgttggcccagccggggcggtgggcccgagaggtccttctggtccacaaggcatccggggagacaagggggaaccaggcgaaaaaggaccgcgaggcctgcccggactcaaggggcacaatggcttgcagggcctgcccggcatcgctggccaccacggcgatcagggcgctccaggatccgtcggtccagccggccctcggggtccggctggaccctccggccccgccggcaaggatggaaggaccggacatcctggtacagttggacccgcaggaattagaggaccccagggtcaccagggccctgcggggccgcccgggcctccaggcccgccgggaccacccggcgtttcaggcggtggctatgacttcggttatgatggtgacttctatcgcgcagatcagccgcgaagtgcacccagtctgcggccaaaggattatgaggtcgacgccaccctgaagagtctgaacaaccaaattgaaacactgttaacgcccgaagggagccgcaaaaatcctgcccgtacatgcagagaccttagattaagccaccctgagtggtcgtccggttactattggattgatcctaaccaggggtgcacgatggacgcgatcaaagtttactgtgatttcagtacaggcgaaacatgtatcagggcgcagccggagaatatccctgccaagaactggtatcgatcatcaaaagacaagaaacacgtgtggctgggcgaaactatcaatgcaggcagtcagtttgaatataacgtggagggcgtgacgagtaaagagatggcgacacagctggcgtttatgcgactgctcgccaactacgcttcccagaacattacatatcactgtaagaactccattgcatacatggatgaggaaaccgggaatctgaaaaaggcggttatcctgcaggggtcaaacgacgtggagcttgtggcggagggaaacagtcgattcacgtataccgtcttagtggatggctgttccaagaagaccaacgagtggggcaagaccattatcgagtataagacaaacaagccatcacgcctccccttcctggacatcgcacccttagacattggcggagcggatcaagaattctttgtagatatcggacccgtgtgttttaaa

SEQ ID NO: 32482 - DNA, 4098 bp, synthetic construct
  misc_feature 1..4098: note = Description of Artificial Sequence: Synthetic coding sequence
  source 1..4098: mol_type = other DNA
atgctgtcctttgtggacacaaggacactgctactgctggctgttactttgtgtttggcaacctgtcagtccctccaggaagaaactgtcagaaaggggccagctggcgatcgcggccccaggggcgagagaggccctccgggtcctcccggccgtgacggagaagatgggccgacagggccccctggaccacccggacctcctgggccccctggactgggaggaaatttcgcagctcaatacgatggcaagggggtaggtttgggaccaggacccatgggcttgatggggccccggggcccccccggggcagccggtgcacctggccctcagggattccagggacctgctggcgagcctggggaacccggccagaccgggccggcgggcgccaggggcccggccggcccacccggcaaggcaggggaggacggacaccctggaaagcctgggcgaccaggggaaaggggagtagttggaccacagggcgcacgtgggttccctggtacacctgggctgcccggatttaagggcatcaggggccacaatggcttagacggcctgaagggccagccgggtgcaccgggggtcaaaggggaacccggcgccccgggtgaaaatggcaccccagggcagacaggcgcccggggcctgcccggagaaagaggacgcgtgggcgcccccgggcccgcaggtgcccgcgggagcgacggatcggtgggtcccgtggggcccgctggccctataggctctgctggcccaccagggtttccgggcgcccctggcccaaagggcgagatcggggccgtgggcaacgccggcccagccggacccgcgggaccaagaggcgaggtggggttgcccggcctctccgggcccgttgggcccccaggaaacccaggggcaaacgggctgaccggtgccaagggtgccgccgggctacctggggtggcgggagccccagggttgcccggtcctaggggtatcccaggccccgtaggggctgccggagccacaggtgctagggggctcgtgggagaacccggaccggcgggttccaagggggagtccggaaacaagggagaacccgggtccgccgggccacaggggccccccggcccaagcggggaggagggaaaacgggggcctaacggcgaggccgggtcagccggcccacctggcccccccgggttacgaggctcacccgggtcgcgaggtctaccaggggccgacggtcgggccggggttatgggcccacccggaagccgaggagcttccggacctgccggagtgcggggaccgaacggcgacgctggtagacctggtgagccagggttgatgggaccacggggcctgccaggaagccctggcaacattgggccggcgggaaaagaaggtcctgtagggctgccgggcatcgacggacggccaggacctataggtccggccggcgctagaggtgaacccggaaacatcggcttccctggtcccaagggccccacgggtgaccccgggaagaatggcgacaaaggccacgccgggctcgccggagcaagaggagcccccgggccagacggtaataatggtgcacaaggtcctcctggaccacagggagtgcagggaggaaagggggagcaaggccctccgggcccgcctggatttcagggcttacccggaccatccggtcccgctggggaagtcggaaagcctggcgagcggggtttacacggcgagttcgggctgccaggacctgccggtccacggggggaaagaggaccaccgggagagtctggcgctgccggccccaccgggccgatcggaagtcgcggcccttcggggccacctggtcccgatgggaacaaaggggagccaggggtggtgggagccgttggtactgcaggccctagtggaccatctggtctgcccggcgagcgtggggctgcaggtatcccgggagggaagggagagaagggtgagcccgggttaaggggagagatagggaaccccggacgcgatggagccaggggcgcaccgggggccgttggagcgcccggacccgccggggccaccggagacaggggggaggccggcgcagcaggccccgctggacccgccggacctagggggagcccaggggaacggggagaagtgggcccagcgggccccaacgggttcgctgggccagcgggggctgcaggccagcccggggcaaaaggcgagcggggtgctaaaggacctaaaggagagaatggcgtggtcggtccaacagggccagttggtgctgctggacctgccggccccaacggcccgccaggaccggcaggttcgcgaggcgatggcgggcctcctgggatgaccgggttccctggtgccgctgggcgaaccggcccccccggaccgtcagggattagtgggccccctggaccccccggtccagcagggaaagaaggcctcaggggccctcgcggcgatcaagggcccgtcggacggaccggagaggtcggcgcggttgggccccccggttttgccggtgagaagggcccctccggcgaggcaggtactgcgggtcctcctggaactcctggccctcaaggactcctgggggcgcccggcatcctcgggctccctggctctagaggggaacgcggattgcctggggtggcaggcgcagtgggggaaccgggccccctgggtatagcaggccctcccggagctagaggaccacctggagctgtgggttcgccaggtgtaaacggagcccctggagaggcggggcgggatggcaatcctggcaacgatggaccacctggtagagacggccagccaggacataagggcgaacggggatatcccggcaacataggccctgtgggagcggcaggcgccccaggaccgcatgggcctgtaggtcccgctggtaaacatggcaacagaggagagaccgggccgtctggccctgtaggaccagctggggctgttggacctagaggacccagcggaccacaaggcatcaggggcgataagggcgagccgggggaaaaaggtccgagaggcctccctggattaaaaggacacaacggcttgcagggcttacctgggattgctggccatcacggcgaccagggtgcacccggatctgtcggaccagccggaccaaggggaccggctgggccttcaggtcccgccgggaaggatggtaggacaggacatcctggcaccgtaggcccggccggcatccgagggcctcaggggcatcagggccccgcgggaccacctgggcctcctggcccgccggggccacccggtgtgagcggggggggctacgactttggatacgatggagacttttacagagctgaccagccgaggtcagctcccagcctccggccaaaagactatgaagtggacgctaccctcaagtctctcaataaccaaatcgagaccctattgactcctgagggcagtagaaaaaaccccgcaaggacctgtcgagacctgcgcctgtctcatccggagtggtctagcggctactactggatcgacccaaaccagggatgcactatggatgcgataaaagtatactgtgacttttcaaccggcgagacatgcatccgtgcccagcctgagaacattcctgccaagaattggtaccggagctctaaggataagaaacacgtttggctgggggaaaccataaacgctggcagtcaatttgaatataacgtggagggggttacgagcaaagaaatggccactcagcttgcctttatgcgcctcttagctaactacgcttcccagaatataacttaccattgcaaaaattcgatcgcctacatggatgaggaaacgggaaacctgaagaaggctgtgattttgcaaggctccaatgatgtggaactagttgctgaggggaactctagatttacctatacagttctggttgacggctgctctaagaaaacgaatgaatgggggaaaaccatcatagagtataagacaaataaaccgtctcggctgccatttctggacatcgccccattagacatcgggggtgctgatcaggaattttttgtggacataggtccagtgtgctttaag

SEQ ID NO: 32483 - DNA, 4098 bp, synthetic construct
  misc_feature 1..4098: note = Description of Artificial Sequence: Synthetic coding sequence
  source 1..4098: mol_type = other DNA
atgctatcctttgttgacacaaggacactactcctccttgctgtcaccttatgcctagcaacctgccagagtctacaggaggagacagtgcggaaggggcctgcaggagatcgtggacccagaggcgagcggggcccccctggacctcctggtcgcgatggagaagatggaccaacaggccctcctgggcctcccgggccgcctggaccgcccggtttgggggggaattttgctgctcaatacgacggcaagggtgtcggtttagggcccgggcccatgggtcttatgggaccccggggccctcccggcgcagcaggtgccccgggcccccagggattccagggccctgcaggagagcccggcgagccaggccagactggacctgcaggagctagaggcccagctggcccgcctgggaaagccggggaggatggccaccccggcaagcctggccggcccggtgagaggggagtggtgggtcctcagggcgctagagggttccctggtactcccgggctaccaggttttaaagggatacgggggcacaatggcttggatgggcttaaaggtcagcccggagcccccggagtcaagggggagcccggcgcccctggggaaaacggcaccccaggtcagactggtgcccggggattgcccggtgagagaggcagggttggtgcacccggtccagcgggcgcaagggggtctgacggctcagtgggccccgttgggccggccgggccaattggcagtgccggccccccgggattcccaggggctcctggaccaaagggcgagattggggcggtcggtaatgcgggccccgccggaccagccgggcctcgtggagaggtaggtcttccaggtctctccggtcctgtcgggccaccaggtaacccaggggcaaacggactgactggcgcaaagggtgcagccggactccctggcgttgcaggggcccccgggctgcctggaccccgagggataccagggcctgtgggggccgccggggctaccggagcccggggattggtgggtgaacccggacccgcggggtctaaaggagagtcaggtaataaaggcgaaccaggcagtgccggacctcagggtcccccagggccatcgggggaggaaggcaagaggggacctaatggtgaggctgggtctgcgggaccccccgggccaccaggtctgcgtggaagccccggcagcagggggctgccgggcgcagacgggcgagctggggtcatgggcccaccaggatctagaggcgcgtctggccctgcaggggtcagggggccaaacggagatgccggcaggcccggtgaacccggattgatgggcccacggggactgcccgggtcgcctggcaatatcggacctgccggtaaggagggtcccgttggcttaccagggattgacggaagacccggacccattggccccgccggcgcacggggggaaccgggaaacattgggtttcccggaccgaaaggccccaccggggatccagggaaaaacggagataaagggcatgcgggcctcgctggtgcccgcggcgcccctgggcctgatggcaataacggagcgcagggtccccctgggcctcagggagtgcaggggggaaaaggggagcagggaccacctggcccacctgggtttcagggcctgcccgggccgagtggtccagcaggggaagtaggcaagcctggggaacgcgggctgcacggcgaattcggtctcccaggacccgcgggtccacgcggcgagcgagggccaccaggagagtctggggcagccggacctacaggccctataggctctaggggcccttccggccctcccggaccagacgggaacaaaggcgagccaggcgtagtgggggccgtgggcactgccggcccatcggggccatcaggtcttcctggtgaacgaggagccgcaggtatcccaggagggaaaggagagaaaggagaaccagggctgcgcggcgaaataggtaatcccgggcgagacggcgcaaggggagcgcccggtgcggttggagctccagggcccgccggtgctaccggggatcgaggcgaggccggagcggcgggacccgccggcccagccggacctaggggcagtcccggagagaggggtgaggtagggcccgctggacccaacggctttgcagggccagctggcgcggctggccagcccggtgctaaaggcgagaggggcgctaagggccctaaaggtgagaacggcgttgtcggacccaccgggccggttggcgcggctggcccagcaggcccaaatggcccgccaggaccagccggctcccgcggtgatggagggcctccaggcatgaccggatttcccggcgctgcaggacgcactgggcccccggggccaagcggaatttctggccctcctggaccgccaggcccagcaggcaaggaaggattgagaggtcccaggggcgaccaggggccagtgggccggaccggggaggtgggtgctgtggggccacctggatttgctggagagaagggccctagcggagaggccggcacggctggtcctccgggaacccctggtccacagggactgttgggagccccagggatcctcggactgcctggatctagaggggagcgcgggctgccaggggtagcgggcgccgtgggcgagccagggccgctggggatcgcaggcccaccgggagctagaggcccaccaggggcggtgggatcgcctggggtaaacggggcccctggcgaggcaggaagggacggtaatcccgggaatgacggacctcctgggcgtgacggacagcccggacataaaggagaacgtggttacccgggcaatattggccccgtgggagcagccggcgcccctgggcctcatggccccgtagggcctgcagggaagcatgggaatagaggtgaaacagggcctagcggacctgtaggccccgccggagcagtggggcccagaggcccgagcggccctcaaggcattaggggcgacaaaggggaacccggggagaaggggccaagaggactgcccggacttaagggtcataatggactgcagggccttccagggatcgcagggcatcacggagaccagggtgcgcctggatcagtgggccccgccggaccccgggggccagcgggtccttccggaccagctggtaaggacggtcggactggccatccagggactgtgggtcccgccgggatccgcggtccccagggccaccagggccccgcaggcccccctggccccccaggtccccctgggccaccgggtgtgtcggggggcggttacgacttcggatacgatggcgatttctatcgcgcggatcaacctcggagtgccccatcactacggccaaaagactacgaggtcgatgcaaccttgaagtctctgaacaatcagattgagactctgttaacacccgaaggctcacggaaaaaccccgctcggacctgccgggatctgcgtctgagtcaccccgagtggagtagcggatactactggatcgacccgaatcaaggctgcaccatggacgctatcaaggtgtattgtgatttttctaccggagaaacctgcatcagagcccagcccgagaacatccctgccaagaattggtacagaagctcaaaggacaagaaacatgtgtggctgggcgagaccataaatgctggcagtcaattcgagtacaatgtggagggagtaactagcaaggagatggctacacagttggcttttatgcgattgctcgcgaactatgctagtcaaaacatcacctaccactgcaagaattctattgcttacatggatgaggagaccggcaatttaaaaaaagccgtcatattacaggggagcaatgacgttgaactcgttgctgaagggaacagccgctttacctacaccgttctcgtggatggctgctctaaaaagacaaacgaatggggaaagaccatcatcgagtacaagacgaacaaaccaagccgacttcccttcctggatattgcccctttggatattggtggggccgatcaggaattctttgtggacattgggccagtgtgttttaaa

SEQ ID NO: 32484 - DNA, 4098 bp, synthetic construct
  misc_feature 1..4098: note = Description of Artificial Sequence: Synthetic coding sequence
  source 1..4098: mol_type = other DNA
atgctgtcctttgtggacacgcgcactcttctcctgcttgccgtcactctttgcctcgctacctgccagtcgctgcaagaggagactgtgcgcaagggaccggccggcgatcgcggacctcgcggcgaacggggtccaccgggacccccgggaagggatggggaggacggacctactggtccccctggaccgccagggcctccgggcccgccgggcctcggaggaaatttcgcggcacaatacgatggaaagggcgtgggcctgggaccgggtccaatgggactgatgggaccacgggggccgccgggggccgctggagcaccgggcccgcagggcttccaaggcccggcaggagagccaggagaaccgggacaaaccgggccggccggagctcgaggtccagcagggccgccaggaaaagccggagaagatggacacccgggtaaaccgggacgccccggagagcgcggtgttgtgggaccgcagggagcccggggctttccggggacccctgggctcccaggcttcaagggaatcagagggcataacggtctggacggactgaagggacagccgggcgcaccgggcgtgaagggcgaacctggggcgcctggtgaaaacggaactcctgggcagaccggagccagaggactgcctggagagagggggcgcgtgggagcgcctgggccggccggtgccagggggtcagacggaagcgtcgggccagtcggtccagccgggccgattggctccgctgggcctcctggatttccgggggcacctggaccgaagggagaaatcggcgcggtcggaaatgcgggcccagcagggccagcgggaccaagaggagaagtgggactccccggtttgtctggaccagtgggaccaccaggcaatccgggggcaaacggactgactggggccaagggagctgcgggcctgccgggcgtcgccggcgcccccggactcccgggtccgagaggaatcccaggtccggtaggcgcagcaggcgcgaccggcgcgcggggtctggtgggggagcctgggccagcaggttcaaagggggaatcgggaaacaagggtgaaccaggatcagccggacctcagggacccccaggtccgagcggagaagaagggaaacgggggccgaacggtgaagctggcagcgccgggccgcccggtccgccgggactgcgcggatcccctgggagtcgcggcctcccaggtgccgacggtagagctggtgtcatgggccccccaggatcccgaggcgcctccggccccgccggggtgcgagggcccaatggagacgcgggtaggccaggcgagccaggtctgatgggtccacggggcctgccaggtagcccgggtaatatcggacctgcagggaaggaaggaccggtcggcctgccaggcatcgacggacgcccgggtccaatcggcccagccggagctcgtggcgaaccgggcaacatcggcttcccgggccccaaaggccctaccggggaccctggaaagaatggagacaaaggacacgcaggactcgctggagcgcgcggagcgccgggccctgatggaaataacggagctcaggggcctcctgggccacaaggtgtgcagggtggaaaaggcgaacaaggacccccaggcccgccgggattccagggactcccgggaccttctggcccggccggagaggtgggaaagccgggagagcggggactccacggcgaattcggcctgccgggtcccgccggacccaggggcgagcgcggaccgcccggagagtcgggcgccgcgggtcccacgggcccgattggaagccgggggccatccggcccacctgggccggacggaaacaaaggagaacctggcgtggtgggcgctgtgggaacggccgggccaagtggaccgtccgggcttccgggtgaaagaggtgccgcaggcatcccgggaggtaaaggcgagaagggagagcctggactcagaggagagatagggaatcctggacgggacggagcgcgaggagctccaggtgctgtcggagctccggggccagcgggggctaccggtgaccgcggagaggcgggcgcagcggggcccgctggaccagcgggtccacgcggctcccctggcgaacggggagaagtgggtccagccggcccgaacggattcgccggtccggcaggtgcggccggacagccgggagctaagggtgaacggggggctaagggcccaaagggcgagaacggagtggtggggcccacgggtccggttggcgccgcagggccagctggtccaaatggacctccagggccggccggctcaagaggcgacggaggaccgcctggaatgactggctttcctggagcagcgggccgcaccggacctccgggccctagcggcatctcaggacctccgggtccaccagggcctgcaggtaaggaggggttgcggggcccgcgcggcgatcaagggcctgtgggaagaacgggcgaggtcggagcagttgggccccccggtttcgctggagaaaagggaccgtctggggaggcgggcactgcgggaccgccggggaccccgggtcctcaggggctgttgggagccccgggcatcctgggtctgccaggctcgcgcggagaacgtggcctcccgggggtggccggagccgtaggagagcctgggccgctgggaatcgccggaccacctggggccagagggccgcccggagccgtgggaagcccaggtgtgaatggggcaccgggagaagcaggaagagacgggaacccgggaaacgacggccctccaggacgggatgggcagcccggacataagggggaacgcggatacccaggcaacatcggtcctgtgggtgcagccggagcccctggcccccacgggcctgttggaccggcgggcaagcacggcaacagaggcgaaaccggaccgtcagggccggtcggaccggccggggccgtcggccctagaggtccctccggaccgcagggtatccgcggcgataagggggagcccggagaaaaaggaccgcgaggtttgcccggcttgaagggacataatggacttcaaggccttccaggaatcgcagggcaccatggagatcagggagcccctggatcggtgggaccagctggaccccggggaccagcgggaccgagcggccccgcggggaaggacgggcgaacgggacacccgggaactgttggacccgcgggtatccggggtcctcaaggccaccaaggaccggccggaccgcctggcccacctggtccaccgggccctccaggcgtctccggtggaggatatgacttcgggtacgacggagacttctaccgagcagatcagccaaggtccgccccgtcactgcgaccaaaggactacgaggtggatgcaactttgaagagcctcaacaatcaaatcgaaactctgctgactccggagggatctcggaaaaaccctgctagaacctgcagggatctgcgcctctcgcacccagagtggtcgtcgggatactactggatcgatccgaaccagggctgcaccatggatgcgatcaaggtgtactgcgacttttcaaccggggaaacctgtatccgggcgcagccggaaaacattccggcaaaaaactggtatcgctcaagcaaggataagaaacacgtgtggttgggagaaaccatcaacgctggatcgcaatttgaatacaacgtggagggggtgacttcgaaagaaatggcaactcagctcgcgttcatgcgcctcttggctaactacgcctcccagaacataacttaccactgtaaaaactcaattgcctacatggatgaagaaaccggtaatctgaagaaggccgtgatcttgcagggctccaatgacgtcgagctcgtcgcagagggaaatagccggttcacttacaccgtactggtggatggatgctcgaagaaaactaacgaatggggaaagactattatcgagtacaaaacgaacaagccatcccggctcccattcctggacatcgccccactggatatcggcggagctgaccaagagttcttcgtcgacattggaccagtgtgtttcaag

SEQ ID NO: 32485 - DNA, 4098 bp, synthetic construct
  misc_feature 1..4098: note = Description of Artificial Sequence: Synthetic coding sequence
  source 1..4098: mol_type = other DNA
atgttgagcttcgtggatacgaggactcttcttctcctcgctgtgacgctgtgcctggctacctgtcagtcactccaggaagagacagttaggaaaggcccagcaggagatagaggcccaaggggagagcgcgggcctccaggccctcctggtcgggatggagaagacggcccaaccgggccccccggcccaccaggaccaccggggccccccgggcttggcgggaactttgcagcacagtacgacggaaaaggcgtgggactgggccctggcccaatgggcctcatggggcctaggggaccccctggcgctgccggcgcacctggcccccaagggttccagggacctgctggcgagcccggggagccagggcaaacaggacctgccggagctcgaggccccgcaggccctccagggaaggccggagaggatggtcatcctggcaaaccgggcaggcccggtgagagaggtgtagtaggcccccagggggctaggggcttccctggcacacctggcctccccgggttcaaaggcattcgtggacataacggtttggatggactgaaaggacaaccaggcgcacctggcgtgaagggtgagcccggtgcacccggtgagaacggtactcctgggcaaaccggtgcacgcggcttaccaggggagcgcggaagggtgggcgcccccggcccagcgggggctcgcggctctgatggcagtgtaggacccgtgggacctgctggtccaatcggcagtgcgggacccccaggctttcctggagctcctggccccaaaggagaaatcggagcggtcggtaacgcaggacctgccggccccgcagggccaaggggcgaggtcggcctgcccggtctgtcaggccctgttggcccccccggtaatcccggcgctaacgggctgaccggggctaagggcgctgctggtctccccggagtggctggggctcccggactgccagggccacggggaattcctggccctgtcggggcagctggggcaaccggagccagggggctcgtcggagagcctggaccggccggctcaaagggggagagcggaaacaaaggcgagcctggatcagccggccctcagggcccccctgggcctagtggcgaggaaggaaaacgaggtccaaacggagaggcaggcagcgctggaccacctggacctcccggacttagaggcagcccaggcagcaggggcctgccaggggccgatggaagagcaggagtgatgggtccaccggggagccggggcgctagtggccccgcaggcgtacgcggccccaatggagacgctgggaggcccggagagcccgggctcatgggcccacgtggactgccagggagtccaggcaacattggccccgctggcaaagaaggacccgttgggctgcccggcatcgacgggaggcctggacctataggcccagctggcgcaaggggagaaccaggcaacattggcttcccgggaccaaagggtccaaccggggaccctgggaaaaacggagacaaaggccatgccggactggctggcgctaggggggcccctggacctgacggaaataacggcgcacaagggccaccaggaccccagggagtgcagggaggtaagggcgaacagggccctcccggcccgcctggtttccagggactccctggaccaagtgggccagcaggcgaggtgggcaaaccgggcgaacgcggcttgcatggagagttcggactaccaggacctgctggtcctagaggagaaagaggcccacctggggagtcaggagcggccgggccaacaggaccgattggatcacgcggccctagcggccccccaggccctgatggtaacaaaggggaaccaggagtggtcggggctgttggaacagcaggccctagtggaccgtcaggtctccctggcgaacggggagctgctgggatcccgggcggtaaaggcgaaaagggggaaccaggcttacgcggggaaataggcaacccgggcagagatggagcccgcggagctcctggagccgtgggagctcctggcccagcaggcgctaccggggacagaggcgaggctggcgctgcagggcccgcagggccagccggaccccgtgggagtccaggggaacgcggagaggtgggcccggctgggccaaacggatttgcgggaccagcaggagcagcaggccagcctggagctaaaggcgaacggggagcaaaaggtccaaaaggggaaaacggtgtggtgggcccaaccggaccggtcggcgcagcaggacctgccgggccaaacggtcctcccggtcctgccggaagcaggggggacggtggtccgcccgggatgaccggctttcctggggcagctggacgaacggggccaccaggcccatccggcatttctggtccgccgggtcccccaggacccgctggaaaggaaggattgagagggcccaggggagaccagggaccagtgggacgcactggagaggtgggcgctgtggggccaccaggattcgcgggtgaaaaaggcccgagcggcgaggccgggacagcaggtccacctggaacacccggcccccaagggctgctgggagcaccgggcatattaggactcccgggatctagaggtgaaagaggacttcctggggtggcaggtgctgtcggggaacccggccctcttggcatagctggaccccctggggcccgcggaccgcctggagcggtgggcagtcccggagttaacggagcccccggagaagcgggccgagatggtaaccccggaaacgacggtcctcctggaagagatggacaaccaggacacaaaggagagcgcggttaccccgggaacatcggacctgtaggcgctgctggagcaccaggacctcatggccctgtgggccctgcagggaagcatggcaaccggggtgaaacaggccctagtggtcccgtaggacccgctggggctgtcggaccacggggtccatcaggtccacagggtattaggggcgataaaggagaacccggggaaaagggcccaagaggcctgccaggcttgaagggccacaacgggttgcagggactacctggaatcgcaggacaccacggtgatcagggagctcctggcagcgtgggtccagcgggaccaagaggaccagcaggacctagcggaccagcaggaaaagatgggaggaccggacatcctggaacggtcggtcctgctgggatccggggccctcaggggcaccaaggacccgctggaccccccggccctcccggccctcccggtccacccggagtgtctggtggtgggtatgattttgggtacgatggggatttctatagagccgatcagccccgcagtgccccgtcgctgagacctaaggactatgaggtggatgctacgcttaagagcttgaacaaccagatcgagaccttactgacacccgagggctccagaaagaacccagcgagaacctgccgtgatcttaggctgtcacatccagagtggagttctggatactactggatcgatccaaaccagggatgtacaatggatgctattaaagtgtattgtgacttctctaccggtgagacttgcatcagagctcaaccagaaaacatccccgcaaaaaattggtacaggagcagtaaggataagaagcacgtctggctcggagagacaataaatgctggcagccagtttgaatacaatgtcgaaggagtgacaagtaaagagatggcgacccagttggcattcatgcggcttctggcaaactacgcatcccaaaacattacataccattgtaaaaactctatcgcttatatggatgaggagaccgggaacctgaaaaaagcagtcatcctgcaaggcagcaacgacgtcgagctggtcgctgaagggaactcccgcttcacttacaccgtcctggtggatggctgtagcaagaaaaccaatgaatggggaaaaaccataatagagtacaaaaccaacaagccttctagacttccatttctggatatcgccccattggacatcggtggagctgatcaggagttctttgtcgacatcggacctgtgtgctttaaa

SEQ ID NO: 32486 - DNA, 4098 bp, synthetic construct
  misc_feature 1..4098: note = Description of Artificial Sequence: Synthetic coding sequence
  source 1..4098: mol_type = other DNA
atgctgtcattcgtggatactcggacgctgctgctgttggctgtgactctctgccttgccacctgccaaagcctccaggaggagactgtgcgcaaaggccctgcgggtgatcggggcccgcgtggtgaacggggaccccccggccctccgggacgggacggagaggatggccctaccggtccaccagggccgccgggtccccccggaccaccaggattgggagggaacttcgcagcccaatacgatgggaaaggagtcggcctcggcccagggcctatgggactcatgggtccaagaggtccccctggcgcagcgggagcgccaggaccacagggattccaaggacctgcgggagaaccgggggagccgggacagactggcccggccggcgccagaggcccagccggcccacccgggaaagcgggagaggacggtcatccaggcaagcctggacgccccggtgagcgtggagtggtgggaccccaaggagcgcggggtttcccgggaacgccgggactgcctggttttaagggaatccgcggccataacggactggatggattgaaagggcaaccgggggcgccgggtgtgaagggcgaaccgggagcaccaggagagaacggcaccccgggtcagaccggagcgaggggacttccaggtgagcggggccgcgtcggtgcgccagggccagcaggggctcgcgggtccgacggcagcgtcggaccagtgggtcctgccggaccaatcggctctgctggaccacccggctttcccggagccccgggaccgaaaggtgaaattggagcggtcggcaatgccggaccagcgggccccgccggcccgcgcggtgaagtgggactgcccggtctgtccggaccggtcggtccaccggggaacccgggagcaaatggactcacgggggctaaaggcgcggcgggattgcctggagtcgctggagccccaggcttgccgggaccacgcggaatccctggaccggtgggagcagccggagctactggcgcccgcggtctggtcggagaacccggacccgccggctccaagggtgaaagcggaaacaagggagagcctgggtcggccggcccgcaagggcctccgggaccgagcggagaagagggcaagcgaggacccaacggagaagccggctcggcagggccaccaggtcccccagggctccgcggttcgccaggcagcagagggctgcccggagcagacggacgggcaggtgtgatgggacccccggggtcacgtggggctagcggccctgcaggcgtgcggggaccgaatggcgacgctggccgccctggcgaacctggactcatgggacctcgagggctcccgggctctccaggaaacattggacccgctggtaaggagggcccggtgggcctcccaggtatcgatgggcgcccaggaccaatcgggcctgcgggcgcgcgcggcgaaccgggcaatataggcttccccggaccgaagggtccaacgggggacccggggaaaaatggcgacaagggacacgctggactcgccggggcccggggtgccccgggccctgacggcaacaacggagcacagggcccgccaggaccccagggagtacagggcgggaagggagagcaaggcccgcctgggcctccgggctttcagggactcccaggaccgagtggaccagcgggggaagtcgggaagccaggcgaacgagggcttcacggcgaattcggactgcctggaccggcgggaccgaggggagagcggggtccgcccggtgaatcgggggccgccggcccgaccggcccgatcggatcgcggggcccatccggaccacctggaccggatgggaacaaaggtgagccaggagtcgtcggcgcggtcggaactgcaggaccatcaggaccatctgggctgccgggagagaggggagcggccggaatccccggaggaaagggtgaaaagggtgaacccgggctgcggggagaaatcggaaatcccggcagggacggagcccgcggagcaccaggcgctgtgggagcccctggaccggctggagcaactggtgatcgcggagaggcgggtgccgcaggcccagcaggacccgctggcccaagagggtccccaggagagcgaggtgaggttggacctgccggtcctaatggatttgctggacccgccggagccgctggtcagccgggagccaaaggggaaagaggagcgaaaggccctaagggcgaaaacggcgtggtcggccctaccgggccagtgggggcagccggacctgcaggacctaacggaccgccggggccagctggatcccggggagacggaggaccccctggtatgaccggcttcccaggagccgccgggcgaactggcccccctggaccctcgggcatcagcggtcccccaggcccgccaggtccagccggcaaggagggccttcgtggcccgagaggggatcaaggtccagttggacgcaccggagaagtcggagctgtcggtccgccaggatttgcaggtgagaagggaccatcgggagaggccggaaccgctggcccgcccgggaccccgggaccacaggggctgctgggagccccgggcatcctcggcctcccgggctcgaggggggaaagaggtttgcctggagtggcgggcgcagtgggggagcccgggccactgggcatcgcgggaccgccaggagcccgcggtcctccgggggccgtgggatcccctggggtgaatggcgccccgggcgaagcgggccgcgatggaaacccaggaaacgacgggcctccggggagggatggacagccggggcataagggcgagcggggctatccgggtaacatcggtccggtgggtgctgcgggagctcctggcccgcacggtcctgtgggtccagccgggaagcatggaaatcggggagaaaccggacccagcggtccagtgggtcccgcaggggccgtcgggccacgcggaccttccgggccgcaggggattcggggagacaagggggagccaggtgagaaaggcccgagaggactgcccggccttaaaggacacaatggcctccagggtctgccgggaatcgcggggcaccatggagatcagggggcaccaggttcagtcggtccggccgggccgcgggggccagcaggaccatccgggccggccggaaaggacggaagaaccggtcacccgggaactgttggcccggcgggcatcaggggcccccaaggacaccagggtccagctggtccccctggtcccccaggaccgccaggtcctccaggagtgagcggaggaggctacgacttcggatacgacggagacttctaccgggcggatcaaccgcgttcagcgccgagtctgcgccctaaggattacgaagttgatgctaccctgaagagcctcaacaatcagatcgagactctgctgactccggaaggatcgagaaagaatcctgcccgcacttgccgcgaccttcgcctctcccatccagaatggtcgtccggatactactggatcgacccgaaccaaggatgcactatggacgcaatcaaggtgtactgtgacttcagcaccggtgaaacctgtatccgggcgcaacctgaaaacattccggccaagaattggtaccgctcgtcaaaggacaagaaacacgtctggctgggggagactatcaacgctgggtcacagttcgagtacaacgtggaaggagtgacgtcgaaggagatggctacccagctggcctttatgaggctgctggccaactacgcctcgcagaatatcacctaccactgcaagaacagcattgcctacatggacgaggaaactggaaacctgaagaaagcagtcatactccagggctctaacgatgtcgaactggtggctgaaggcaattcaagattcacgtataccgtgctggtggatgggtgctcgaaaaagactaatgaatggggaaagaccatcatcgaatacaagactaacaagccatcgcggctgccgtttcttgatattgctccgctggacatcggtggcgctgaccaggaattcttcgttgacatcggaccagtgtgctttaag

SEQ ID NO: 32487 - DNA, 4098 bp, synthetic construct
  misc_feature 1..4098: note = Description of Artificial Sequence: Synthetic coding sequence
  source 1..4098: mol_type = other DNA
atgctcagctttgttgacactaggaccctgctgcttttggctgtgactctttgtctggcaacctgccagtccctgcaggaagaaaccgtgcggaaaggtcctgcgggagatcgggggcctcggggtgaacgcgggccaccaggcccacctggccgggacggagaggacggacctaccggaccacccggccctccggggcctccagggccacccggactcggaggaaatttcgcggcccagtacgacggcaagggtgtgggactgggcccgggaccgatgggactgatgggtcctcggggccccccgggagcagccggggccccaggcccacagggtttccagggtcccgctggcgagcccggtgagccgggccaaaccggaccggctggggctcgcgggccggccggaccgcctggaaaagccggcgaggatggacatccgggcaagccgggacgaccgggcgagcggggagtcgtgggacctcagggtgccagaggattcccaggaacgccaggcctgcccggattcaaggggatcagaggacacaatggcctcgacgggctgaaggggcaacccggagctcccggcgtcaagggggagccgggcgcaccgggggaaaatggtaccccgggacagactggagcccgtggtctgccgggagaacgcggacgcgtgggtgccccgggaccggccggagcccgcggaagcgatggctccgtggggcccgtgggaccggcaggcccaatcggtagcgccggccctccaggtttcccaggggccccagggccgaaaggcgagatcggagctgtgggcaatgcgggccctgccggaccggcggggccacgcggtgaggtgggcctgccaggcctgtccggaccggttggtccgccagggaatccaggggcgaacggtctgaccggagctaagggtgccgctggactgcctggagttgccggagcgcccggactgcctggtcctcgcgggattccgggcccggtgggtgccgccggcgcgacgggtgcccgcggcctggtgggagagcccggcccggccggatcaaagggagaatctggaaacaaaggggagccaggaagcgcgggaccccagggaccgccgggtccatcgggcgaagaaggcaagaggggacctaacggcgaagccggatccgcaggacctcccggtccacctggactccggggctcgccggggtcgagaggactccctggcgcggacggaagggctggagttatggggccgccaggctcccggggagcgtcaggaccggccggcgtgcgcggccctaacggcgacgcaggacgcccaggagaaccagggctcatgggaccccgcggcttgccaggatctcccggtaacattggacccgcaggaaaggaaggcccggtcggattgccgggaatagacggtcggcccggcccgattgggccggctggtgcccgtggcgagccggggaacatcggctttccaggtccaaagggcccgaccggcgatcccggaaagaatggcgataaaggtcatgccggcctggcgggcgcccgtggagcccccggaccggacggaaataacggggcccaagggcccccgggaccgcaaggcgtccaagggggcaaaggggagcagggaccgcctggcccccctggatttcagggcttgccgggaccatcaggtcccgccggagaagtcggaaagccgggggagcgcggactgcacggtgaattcggacttccaggtccggcaggccctagaggcgagagaggtcctcccggagaatcgggagctgccggccctactggaccgatagggtcacgcggcccgtcgggaccgccaggacctgatggaaataagggagaaccgggcgttgtgggcgccgtcggtactgcaggaccatccggcccaagcgggcttccgggcgagcgcggtgcagctggaatcccgggtggaaagggggagaaaggagagcccggtctgcggggagaaattggaaatccaggacgggatggagcccgcggcgcccctggagcggttggcgcccctggtccagcaggcgcaacgggcgacaggggagaagcaggcgctgccgggccggcgggaccagccgggccccggggttccccgggcgaaaggggagaggtaggcccagcgggaccgaacggattcgccggcccagccggcgctgctggtcagcctggagccaagggtgaacggggtgcgaaaggaccgaagggtgaaaacggtgtcgtgggcccgactggccctgtgggcgcggcaggaccggcaggaccgaacggtccgccgggaccggctggtagtcgcggagatggaggcccacccggaatgacgggtttcccgggggccgccggccgcactggcccgcctggaccgagcgggatctcgggacctccaggcccaccagggcctgcgggaaaggagggcctgcgaggaccgcgcggggaccaaggcccagtgggacgcaccggcgaggtgggggcagtcggcccgccgggatttgccggggaaaagggaccgtcaggagaggccggaaccgcgggtcccccaggaaccccaggaccgcaaggactgcttggagcgcccggtatcctcggacttcccggatctcgcggagagagaggcctgccgggggtggcaggagcggtcggcgaaccgggaccgctgggaattgccggccctcctggcgctagagggccgccgggggcggtgggatcaccgggagtgaacggagcgccgggagaagccggacgggacgggaatcctggaaacgatggtccccccggtcgggatggacagccagggcataagggggaaagaggctacccgggaaacatcggaccagtcggggcggcgggagcaccgggaccgcacggtccggtggggcctgctggtaaacacggcaacagaggagaaactggaccgtctggacctgtgggtccggcgggcgcagtgggaccacgggggccgtccggaccacaaggtattcggggggacaagggagagccaggagaaaagggcccacggggactcccgggactcaagggacataacggactgcagggactccctggtatcgcgggacatcatggtgaccagggagcacccggcagcgtgggacccgcagggccgagggggccagcagggccctccgggccagcgggaaaggatggtaggaccggacacccgggcaccgtcgggccggctggaatcagagggccgcagggacaccaggggcccgcaggtccccctggacctcctggaccgcccggtccgccaggagtatccggtggaggctatgactttggctacgacggggacttctaccgcgcggatcagccgcgctcagcaccaagcctgcgccctaaagactatgaagtagacgctaccctgaagagcctcaacaaccaaattgaaactctgctcacgccggagggttcgcggaaaaacccggcccgcacttgtcgagatcttagactgtcgcacccggaatggtcgtcggggtactactggatcgacccaaaccaaggatgcaccatggatgccatcaaggtctactgtgatttctccaccggagaaacgtgcatccgggctcagccagaaaacataccagcgaagaattggtacaggtcctccaaggacaagaaacacgtctggctcggcgagactatcaatgccggcagccagttcgaatacaacgtcgaaggagtgacttcgaaggagatggccactcagctggccttcatgaggttgttggcgaattacgcttcacaaaacatcacctaccactgcaagaacagtatcgcatacatggacgaagaaaccggcaacctgaaaaaggctgtgatcctccagggatcgaacgatgtggagctcgtggccgaaggaaactcgcgattcacctacactgtgctggtggacgggtgcagtaagaaaactaatgagtggggtaagaccatcatcgagtacaagaccaataagccgtcacgcctcccattcttggatatcgcgcctctggatatcggaggagccgaccaagagttcttcgtggacatcgggccggtgtgctttaaa

SEQ ID NO: 32488 - DNA, 4098 bp, synthetic construct
  misc_feature 1..4098: note = Description of Artificial Sequence: Synthetic coding sequence
  source 1..4098: mol_type = other DNA
atgttgtcatttgtggacactcgaaccctgcttctgttggccgtcactttatgccttgcaacatgtcagagtctacaggaagaaacagtgagaaagggacctgccggtgatagaggtccgagaggagaacggggaccgcctggaccgccaggaagggatggagaagatggacctactgggccaccgggaccacctggacccccgggaccaccaggacttggaggaaacttcgcagctcagtacgatgggaagggggtcggtcttggtcctggtcctatgggattaatgggacctcgagggccgcctggagccgctggagctcctggaccgcagggatttcaaggtcccgcaggagaacctggagaaccgggacaaacaggaccggccggagcacgaggacctgctggacctcctggaaaagccggagaggatggtcacccaggaaaaccaggaaggccgggagaacggggagtagttggaccccaaggagccagaggattccctggcactccgggcttgccaggatttaagggcattagaggtcacaacgggttggacggattgaagggacaaccaggcgcgccaggtgtcaagggagaaccaggagcaccaggagaaaacggaactccaggacaaacgggagcacggggcttgcctggtgagcgcggaagagtcggcgcgccaggaccagcgggagctagaggatcggatggatctgtgggtcctgttggacccgctggaccaattgggtcagctggaccgccaggtttcccaggagcacccggacctaaaggtgaaataggcgctgtcggaaatgcaggaccagcgggtccagctggaccacgaggcgaagtaggactgccagggctttctggtccggttggtccaccaggaaatccaggggctaatggtttgacaggcgcaaagggagctgctgggttgccaggagttgcgggagcgccaggtttgccgggtccacgaggcattccaggaccagtaggagctgcaggagcaaccggagcccgcggactggttggagaacctggacccgctggctctaaaggagaatctggaaataagggagagccaggatccgcgggaccgcagggacctccaggaccgtcgggagaggagggtaagcgtggtcctaacggagaagcagggagtgctggaccgccaggaccacctgggctccgcggatcaccgggttctagaggtctgccaggagcagatggacgtgctggagtaatgggtccaccgggatcgagaggggcttcaggtccggcgggtgtgcgaggacctaacggtgatgctgggcggccaggtgagcctggcttaatgggcccaaggggacttccaggatcaccaggtaacattggaccagccggaaaagaaggtccagttggcctccctgggatcgatggacgcccaggaccaattggaccggcgggtgctagaggagagccgggaaatatcggatttccaggaccaaaaggaccaacaggagatccaggaaaaaatggagacaagggtcacgcaggattggctggggcacgtggagcaccaggacccgacggaaataacggcgcccaaggaccgccgggaccacaaggtgtccagggaggtaagggagaacaaggaccaccaggaccacccggattccaaggactcccagggccatcgggacccgcaggtgaggttgggaagccaggagagagaggtcttcatggcgaatttggacttccaggtccggccggacctcgtggcgagcgaggacctcctggcgagtctggagcagctgggccaacaggtccgatcggaagtcgtggtccgagtggccccccaggtccagatggaaataaaggcgaacctggtgttgttggagctgtcggaacggctggaccatcgggtccatcagggttgccaggtgagaggggtgctgctggtataccaggaggaaagggtgagaagggagagcctggtcttaggggagaaatcggtaaccctggacgagatggagctcgtggtgcaccaggagcagtcggagccccaggaccagccggagcaactggggatcggggagaggcaggagctgcggggccagcaggaccagcaggacctcgtggttcgccgggtgagaggggtgaagtggggcctgctggaccaaatggattcgctggtccagctggtgcagcaggacagcctggtgcaaagggtgaaagaggtgcaaaaggaccaaaaggagaaaatggtgtagtcggacctactggaccagttggcgctgctggaccagcggggccgaacggaccaccaggaccagctggatcacgcggagatggaggacccccaggtatgactggatttccaggagctgcgggacgaaccggtccaccaggacccagtgggattagtggtccaccaggaccacctggccccgcaggaaaggagggtctgcgtgggcctagaggtgatcaaggtcccgttggacgaacaggagaagtcggagccgtgggcccaccgggatttgctggtgaaaaaggaccatcaggagaagcgggaacagctggaccgccgggaacaccgggaccccaaggattgcttggagccccaggaattctaggacttcctgggtctcgtggagaaagaggactcccaggagtggctggagctgtcggagagccgggacctttgggaattgctggaccaccaggagcacgaggtccaccaggagctgtcggatccccgggagttaatggagcaccgggagaggctggtcgagatggaaatccgggtaatgatggaccaccaggtcgtgacggccagcccggccacaaaggagaaagaggctatccagggaacatcggaccagtgggtgcagcaggtgcaccgggccctcatggaccagttgggccggcaggaaagcacggaaatcgcggagaaaccggcccatcgggtccagtggggccagcaggtgccgtgggcccgcggggaccttcgggtcctcagggaataaggggggataagggcgagcctggcgagaaaggaccgcgcggattgccaggattaaaaggacataacggtttgcaaggccttccaggaattgctggccatcatggagaccaaggagctccaggaagcgttggaccagcgggtccacgtggacccgcgggtccttctggaccggccggaaaagacggacggacaggccacccaggtacggtcggtccagcaggaattagaggtccgcaaggccatcagggtcctgcaggccctccaggcccgccaggcccaccaggacccccaggagtttccggtgggggatatgacttcggatatgatggagatttctaccgagctgatcagccgcgatcggcaccgtctcttagaccaaaagattacgaagttgacgccactctaaagtctctcaataaccaaattgaaacacttttgactccagagggatcgagaaaaaatccggcgcggacgtgccgtgatctccgtctcagtcatccggaatggtcatcaggttactattggatcgaccctaatcaaggctgcacgatggacgctatcaaggtttattgtgacttcagtacgggagaaacatgcattagagcacagccagaaaatataccggcaaaaaactggtaccgatcttcaaaagataagaagcatgtgtggttaggggaaaccatcaatgctggttctcagttcgaatacaatgttgagggtgttacaagtaaggaaatggcaacacaactggccttcatgaggctgctagctaactacgcttcccaaaatattacttatcattgtaaaaattccatcgcttatatggatgaagaaacaggaaacctcaaaaaggcagttattctacagggtagcaacgatgtagaattagtcgcagaaggaaactcacgatttacgtatactgtccttgtggatggatgttcaaagaagacgaatgaatggggcaaaaccataattgaatataaaacaaataagccctcgagactgccattccttgatattgctccactcgatattggaggggcagaccaggaatttttcgttgacattggacctgtgtgttttaaa

SEQ ID NO: 32489 - DNA, 4098 bp, synthetic construct
  misc_feature 1..4098: note = Description of Artificial Sequence: Synthetic coding sequence
  source 1..4098: mol_type = other DNA
atgctcagcttcgttgacacacggacactgctgttactagcagtgactctttgcctagctacctgccagagtctccaggaggagaccgttaggaaagggcccgcaggggatagaggacctcggggggagcgcgggccccccggacccccaggcagggacggcgaggatgggcccactggaccgcctggtcccccagggccccccggcccccctggtctgggaggtaattttgcagcgcaatatgacggtaagggcgtaggactcgggcctggcccgatggggttgatgggacccaggggacctcccggtgctgccggtgcgccaggcccacagggcttccagggacctgccggagagcccggggagcccggacaaactgggcccgctggcgctaggggacctgcaggaccgccaggaaaagctggcgaggatggacatccaggaaagcctgggaggcccggagaacgcggggtggtgggcccccagggcgcacgtggctttccaggaacaccgggtttacctggatttaagggaattcgcggccataatggccttgacggattgaagggacagccaggagctccaggcgtgaagggcgagcctggggccccgggggaaaacggtacacctggacagactggcgctagagggctgcctggcgaaaggggccgcgtgggcgcaccggggcctgcaggcgcaagaggttctgacgggagtgtcgggcccgtcggccctgctggacctataggttctgctgggcctcctggatttcccggagctcccgggcccaagggcgagattggagcagtgggtaacgccggacctgctggtcccgccgggcccagaggcgaggtcggccttcctggactgagcggccccgttggcccacctggaaacccaggtgctaacggccttactggcgctaagggagcggcaggcttgcctggggtggcaggcgccccagggttgccaggacctcggggaatccccggacctgttggtgcagcaggagcaactggagcacgcggcctcgtgggggagcctggaccggccggcagtaaaggagagtcgggcaacaaaggagaacccggttcagccggccctcagggcccccccggcccttcaggcgaggaaggcaagagaggcccaaacggagaggctgggagtgcgggaccaccaggccccccgggcctcagaggatctcctggctcgcgcggtctgccaggagcggacgggcgcgcgggcgtcatgggccccccaggcagccgaggagctagcggaccggcaggtgtgcggggccctaatggagacgccggccgccccggagaaccgggtctgatgggaccccggggcctccctggatcgcctggcaacattggccctgccggcaaagaggggcccgtaggacttcccggtatcgatggaaggccaggccccattggacccgccggagcgagaggcgagcccggaaatatcggttttcctggccctaagggacctacgggcgatccaggaaagaatggtgacaaaggacacgctgggctcgccggagcgagaggggctcctggacctgacgggaacaatggcgctcagggccccccaggaccacagggggtccagggcggcaaaggcgaacaaggcccaccagggccacccggcttccaggggctgcccggtccaagtggacctgcaggagaagtcggcaagcccggggagagaggattgcacggggagtttggcctgccaggccctgctgggccacgtggagaaagaggcccccccggggagagcggggctgctgggccaacaggacctattgggagtcgcgggccctctgggccccctggaccagacggtaacaaaggcgaaccaggggtggtgggcgccgtagggaccgcaggaccctctgggccttctggcctgccaggtgagcgcggagccgctggaattccaggagggaagggcgaaaagggtgagcccgggttgagaggcgaaatcggcaacccaggtagagacggcgcccgtggcgcccccggagctgtaggcgcacctggacctgccggtgccacgggagacaggggcgaggctggagccgcaggccctgctggaccagccggaccccgcggaagtccgggagagcggggtgaggtggggcctgcagggcccaacggctttgccggcccagctggggccgcagggcaacccggggccaaaggagagcggggggcaaaaggccctaagggagaaaatggagtggtgggtccaacaggcccagtcggcgccgcaggtccagccggaccaaacggacctcctggtcctgctggaagccgcggagatggcgggccaccgggcatgaccggcttcccaggagccgccggcagaaccggacctccgggaccaagtggaatatcaggccccccggggccgccaggtccagctggaaaagaaggcttgcgaggccccaggggcgatcaagggcctgttggaagaacaggggaggtgggagctgtgggacctccaggctttgcgggagaaaaagggcctagcggagaagcaggcaccgccggccctcctggcacaccaggcccacagggcctcctgggggctccaggaattctgggactgccaggctctcggggcgagagaggccttcctggcgtggctggagctgtcggtgaacctggcccacttggcattgcgggcccaccaggggctagggggccccctggagctgtcgggtctcccggagtgaatggcgcccctggagaagctggacgggacgggaacccaggcaacgacggcccacccggcagagatggtcaacctggacacaaaggcgagagaggttacccaggcaatatcggcccagttggcgcagcaggtgcccctggcccacacggcccggtcggacctgcgggaaaacacggaaaccggggcgagaccggcccttcaggcccagtggggccagccggggccgttggaccgagaggcccatcagggccacaaggtatcagaggcgataaaggcgaacctggggagaagggtccgagaggtctccccggtttgaagggtcataacggacttcaaggactccctggtatcgcaggccaccacggggaccaaggagcacctggcagtgtcggtcccgcaggacctaggggaccagcaggcccctcaggccctgctgggaaggacggcagaacagggcaccctggaaccgttggaccagccggcattaggggcccccaaggacaccaaggccctgccggtccacccgggcctcctggacctcccggccctccaggagttagcggtgggggttacgatttcgggtacgacggcgatttttacagggccgatcaacctcgctccgcccccagcctcaggcctaaggattacgaagtcgacgccaccctgaagtccctcaacaaccagatcgaaaccctgcttacccctgaggggagtcgaaagaacccggctcggacatgtagagatctgagattatctcatcccgagtggagtagtggttactactggattgacccgaatcaaggatgcacaatggatgcaattaaagtgtactgcgattttagcactggagagacatgtattagggcacaacccgagaatatccccgcaaagaactggtaccgatcttccaaggacaaaaagcatgtctggctcggcgagactatcaatgctggtagccaattcgagtacaatgtggagggagtcacaagcaaggagatggccacccagttggcctttatgcgcctgcttgctaactacgccagtcagaacattacctatcattgcaaaaactccatcgcttacatggatgaagaaaccggaaacctcaaaaaggccgtcattttgcaaggttcaaatgacgtggagcttgtggccgaaggaaactcgcgcttcacatacaccgtcttggtcgacggctgtagtaaaaaaaccaatgagtggggcaaaactatcatcgagtacaagactaacaaaccttcacggctcccctttttagacatcgcccctctggacatcggaggtgcagatcaagaattctttgtggatattggaccagtgtgctttaaa

SEQ ID NO: 32490 - DNA, 4098 bp, synthetic construct
  misc_feature 1..4098: note = Description of Artificial Sequence: Synthetic coding sequence
  source 1..4098: mol_type = other DNA
atgttgagcttcgttgatactcgcaccctgctgctgcttgcggtgactctttgcctggccacttgtcaatcactgcaggaggaaaccgtaaggaagggccccgccggagatagaggacctcggggcgagcgcggtccacctggtcccccgggacgggatggagaggacgggccgactgggccacctgggcctccagggccgcctggaccccctggtcttggtggcaacttcgctgcccagtacgacgggaagggtgtgggtctgggaccagggccaatgggtctgatgggacctcgaggcccaccaggagcagccggggctccagggccccaagggtttcaagggcctgctggggaaccaggcgaacccggccagactgggcctgcaggagcaagaggtcccgccggtcccccaggtaaagccggtgaagatggacacccaggtaagccagggaggccaggagaacggggcgtcgtggggccgcagggagcccgtggttttcctggcactccagggctgccaggtttcaaaggcattaggggacacaacggacttgacggactgaagggacagccaggagcaccaggcgtgaaaggggaacccggggcacccggcgagaatggaacccctggtcaaaccggtgcacgaggactgcccggcgaaaggggacgggtgggtgcccccggaccagccggcgcaagaggatccgacggttcagtcggccctgtcggacctgcgggaccaattgggtccgctggtccgccgggctttccgggcgcacctgggcccaagggagaaatcggggcggtgggaaatgccgggcccgcgggaccagccggtccacgcggggaggtgggacttcctggactttccggacccgttggacctcctgggaaccctggcgcaaatggattgactggagccaagggtgcagccggcctgcctggagtcgcaggtgcaccaggcctccccggtccaagaggaatccctggaccggtcggcgcagcaggggctactggggcaagagggcttgtgggtgaaccgggacctgccggatcaaaaggtgaatccggcaacaagggcgagccaggctccgctgggccccaaggacccccaggacctagcggagaagagggcaagagaggaccaaatggagaagccggatcggccggaccgcccgggccgcccggactgcgaggctccccgggatctcgcggcctcccaggtgctgatggaagggcaggtgttatgggacctcctggttcaagaggcgcatcgggcccagcaggagtgcgcggccccaatggagatgccggcaggcctggagaaccagggctcatgggccccagaggcctgcccggctcgcccggtaacattggacctgcgggcaaggagggtccagtgggcctcccgggtatcgacggccgacctggtccaatcggccccgcaggtgcacgcggtgagcctggtaacataggattccccggccctaaaggacctactggggatcctggaaagaatggcgataaggggcatgccggattggcaggtgcccgcggtgcacctggccctgatggaaataacggagcccagggtcctcccggcccccaaggcgtgcaaggtggcaagggcgaacagggtcctccggggccgcccgggttccaagggcttcctggcccctcgggcccagcgggagaagtaggaaaacctggagaaagaggtctgcatggtgagtttggtctgcccggaccagcgggtcccagaggagagcggggaccacccggtgaatctggggcggcaggtccaactggacctattggtagccgtggtccctccggacctcccggaccagacggtaacaagggtgaaccaggcgtggtgggtgccgtgggaactgcagggcctagcggaccctccggcctgccgggtgagagaggagccgccggaattcccggcgggaaaggtgaaaaaggtgaacccggactccgaggagaaattggtaacccaggtcgagacggagcacggggggcacctggggcagtgggggcgcccgggccagcgggagcaaccggggatcgtggagaggcaggcgctgcaggtccggcaggcccagcagggccgcgcgggagccccggagagagaggcgaagtcggacccgcaggaccaaacggctttgcaggcccagctggagctgcgggccagcccggtgctaagggggagcggggggcgaagggaccaaagggtgaaaacggagttgtgggacctaccgggccagtcggcgcggccggtccagctggtccaaacggcccgccagggcccgcagggagcagaggagatggaggcccacccggcatgactggctttccaggagctgcgggacggaccggaccaccaggcccatcggggatatcaggccctcctggccctccaggaccagctgggaaagaggggcttcgcggtccccgcggtgatcagggcccggtgggacgcactggcgaagtgggtgcagtgggaccgccaggcttcgcgggggaaaagggaccttccggagaggctggaaccgcgggaccaccaggaacgcctggccctcagggtttgcttggtgcgcccggcatcctgggtctgcctggtagccggggtgaacgtggacttcctggcgtggcaggcgccgtcggagaaccaggaccgcttgggattgccggaccccctggcgcacggggcccgccgggagcagttggtagtcctggtgtgaatggagcacccggtgaagctgggagagacggaaatcccggtaatgatggacctccaggaagggatggtcaaccgggtcacaaaggggaacgtggttacccaggaaacattggccccgtcggcgcagccggcgcaccgggaccacatggaccagtgggcccggccggcaaacatggaaacagaggtgagactggtccatcgggccctgtaggtccagcaggcgcagtcgggcctcggggaccttcgggtcctcagggaatcaggggtgataaaggggagccgggagaaaaagggcctcgaggactcccaggacttaagggtcataatggacttcaaggcctccctggaatcgcaggacatcatggagatcagggggcaccaggctcggtagggcctgcgggtcctcgggggccggctgggccgtccggaccagcaggaaaagatggacgtaccggacaccctgggacggtggggcccgcaggaattagaggtcctcaaggccaccagggaccagcaggtcccccaggaccacccgggcctccgggtccccccggagtgagcgggggcggttacgattttggatacgatggggacttttaccgcgcagaccaaccaaggagcgcaccttcgctgcgtcccaaggattacgaagtcgatgcaactctcaagtcgcttaacaatcaaatagagactctcctgacccccgaaggttcgcgcaagaaccctgcgcgaacttgcagagatcttcgcctgtcacacccagagtggtcaagcggatactactggatcgaccccaaccagggttgcaccatggacgcaattaaggtgtattgtgacttttccaccggggaaacctgtattagggcccaacctgagaatataccagcaaagaactggtacagatcgtccaaggacaagaagcatgtctggcttggagaaaccattaatgcagggtcacaatttgaatacaacgtcgagggtgtcacctcgaaggaaatggcaacccaattggcattcatgagactgctggcaaactacgccagccagaacattacgtaccattgtaagaacagtattgcctacatggatgaagaaaccggaaacctcaagaaagcggtgatcctccaaggttcaaatgacgtggagctcgtggcagaaggtaacagccggtttacctatacggtgcttgtggacggatgttccaaaaagactaacgaatggggtaagacgataattgaatacaagaccaataaaccgtcccgtttgccctttttggatatcgcacccctggacatcgggggagcagatcaagaattcttcgtggatattggccctgtgtgttttaag

SEQ ID NO: 32491 - DNA, 4098 bp, synthetic construct
  misc_feature 1..4098: note = Description of Artificial Sequence: Synthetic coding sequence
  source 1..4098: mol_type = other DNA
atgctaagtttcgtggatacaagaactttattattgctggcggtaactctttgtctggcaacttgtcagtcacttcaggaagagacagtgcgcaaggggcctgctggggataggggaccaaggggggaaagggggccccccgggcccccagggcgagacggggaagacggacccactggaccccctggacctcccggaccacccgggccccctggactgggagggaactttgcggcccagtatgatgggaaaggggtgggactcgggcccgggcctatggggttgatgggaccaagggggcctcctggagcagctggagcccccggaccacagggatttcaggggcctgcgggagaacccggggaacccggacagactggacccgccggagcccgcgggcccgctgggccaccaggaaaagccggggaagatgggcaccccgggaaacccgggcgcccaggggaaaggggagtcgtcgggccccagggagccagggggttccccggaactccaggactccctggattcaaagggataagaggacacaacgggctagatgggttaaaaggacagcctggagcaccaggagtgaaaggggaacctggagctcctggggaaaatggaactccagggcagactggggcccggggattacctggagaacgaggaagggtgggggcccctgggccagccggggcacggggaagtgacggaagtgtgggacccgttgggcctgctgggcccataggaagtgctgggccccctggatttcctggggccccagggcctaagggggaaatcggagccgtcggaaatgcagggcccgccggaccagctgggccgcggggggaggtgggactgccagggttatctggacctgtcggacctcccggaaatccaggggctaatgggctgacaggagcgaagggagcagccggactaccaggggtcgcaggagcacctggactcccaggaccacgcgggataccaggaccagtgggagcagccggggctacaggggctaggggactggtgggggaacctggacccgccggatccaaaggagaatccggaaacaaaggagagcctggatcagcagggcctcagggaccccccgggccttccggggaggaaggaaaacgcgggcccaacggagaagctggaagtgccgggccgccagggccaccagggctgcgaggatcccctggatcacgcgggttgcctggagcagacggaagagctggagtaatgggacctcccggatcacggggggcctctggaccagccggggtacgagggcctaacggagatgccgggcgacccggggaacccgggctcatgggaccccgcggattacccggatctccagggaacatagggcctgcaggaaaggaaggaccagtggggttgcccgggatagatgggaggcctgggcccatcggacctgcaggggcaagaggggaaccagggaacataggattccccgggcctaaagggcctacaggagaccctgggaaaaatggagataagggacatgccggattggccggggctaggggggcccctggacctgatggaaataatggggcacaggggccccctggaccccagggagtgcagggaggaaaaggagaacaggggccccccgggccacccggattccagggactgcccggaccttctggaccagccggggaagtgggaaaacctggggaacgcgggctgcacggagaattcggactgcctgggccagctgggccacgcggggaacgaggaccacccggggaatctggagccgctggacccactggacctatcggatctcggggaccatctggaccacccggacccgatggaaataaaggagaaccaggggtcgtcggagctgtaggaactgcagggcctagtgggccctcagggttacccggagaacggggagcagcaggaattccaggagggaaaggggaaaaaggggagcctggactgagaggggaaataggaaatcccggacgagatggagcccgcggagctcccggagctgttggagcacccggacccgctggagccactggggataggggagaagcaggggcagcagggcctgctggaccagccggacctaggggatcccctggagaaagaggggaagttgggcctgctgggcctaatgggtttgcagggccagccggagcagctggacagcctggagcaaagggggaaagaggagctaaagggcctaaaggagagaatggagtcgtgggacccactgggcccgtcggagcagcaggacccgctgggccaaacggacctcccgggccagccgggtccagaggggatgggggacctcccgggatgacagggtttccaggagccgctggacgtacaggacccccagggccatctggaataagtgggcctccggggcctcccggacccgccgggaaagagggactgcggggacccaggggggatcagggacccgtcgggcggacaggggaagtgggagcagtgggaccacctggatttgcgggagagaaaggaccatccggagaggcggggacagcaggaccacccggaactcccgggccccaggggctcctgggggccccaggaatcctaggactccccggatcccggggggagcggggactcccaggagttgccggagctgtgggggaacccgggcccttagggatcgctggaccacccggagccagggggcccccaggggcagtaggaagtcccggggtgaatggagcccccggggaggctgggcgggatggaaaccctggaaacgatggaccacccgggagagatggacagcccgggcataaaggggaaagaggatatcccggaaatataggacctgtgggagccgctggagcccccgggccccatgggccggtagggcctgctgggaaacatgggaacaggggggagacagggcccagtgggcctgttgggcccgcaggggcagtagggccaagagggccatcgggacctcaggggatcagaggggataaaggggaaccaggggaaaaaggacctagggggttgcccggacttaagggacacaatggacttcagggattacccgggatcgcagggcaccatggggaccaaggggcccctggatctgtcggaccagctgggcccagggggcccgcgggaccatcagggcctgccggaaaagatggacggactgggcaccctgggacagtggggcctgccgggattcggggacctcaagggcaccaggggccagctgggcccccagggccccctgggccccccgggcctccaggggtctcaggaggagggtacgactttgggtatgatggggatttttaccgagctgatcagcctcggtctgcaccctcactccgacctaaagattatgaagtggatgccacactaaaatccctaaataatcagattgaaacactgctaacacccgagggatctcggaaaaatcccgctaggacttgccgcgatctaagactttcccaccccgaatggtcttccggatattactggatcgaccctaatcaggggtgcactatggatgctattaaagtgtattgtgatttttcaactggggaaacttgtatccgggcccagcccgaaaatatcccagctaaaaattggtatagatcctccaaagataaaaaacatgtgtggctgggagagacaataaacgcagggagtcaatttgaatataacgttgaaggggtcacttcaaaagaaatggctactcaattggcatttatgaggctcctggccaactatgctagtcagaacatcacatatcactgcaaaaattctatcgcctacatggatgaagaaacagggaacctcaaaaaagctgtaatactccaggggagtaatgatgtggaactggtagctgaaggaaactcaagattcacatatacagtgctcgttgatggatgctctaaaaagacaaacgaatgggggaaaacaataatagaatataaaacaaataaacctagtcggctcccattcctggatatcgcgcccctggacattggaggagcagatcaggaattctttgtggacattggaccagtttgtttcaaa

SEQ ID NO: 32492 - DNA, 4098 bp, synthetic construct
  misc_feature 1..4098: note = Description of Artificial Sequence: Synthetic coding sequence
  source 1..4098: mol_type = other DNA
atgctatccttcgtcgacacccgtactctgctactgttggctgtcactctgtgtctggccacctgccagtccctccaggaggaaacggtgagaaaagggcccgccggcgatcgaggtcccagaggagagcgtggaccgcccggaccgccaggaagggacggcgaagatggtcccactggccctccaggcccaccagggcctccaggacctcccgggctggggggcaatttcgcagctcagtatgacgggaaaggagttggcttgggtcctggccccatgggtttaatgggacccagggggcctcctggtgcagcaggcgctcctggtcctcaggggttccagggcccagccggggagcctggggaacccggtcagacgggacctgcaggtgcaagaggacccgccggccctcctggcaaggctggcgaagacggtcaccccggaaaacctggaaggcctggtgaacgaggagtggtgggaccccaaggagctcgaggatttcccggtacaccaggtttaccgggttttaagggaatccgtggacacaatggtcttgacggactcaaaggccagccgggagctcctggggtgaagggcgagcctggcgccccaggcgagaatgggacaccaggccagactggcgcaagagggctgcctggcgaacgcgggcgagttggcgcacccggcccggccggtgctagaggttcagatgggtcagtcggccccgtgggcccggcaggtccgatcggatctgctggccctcccgggttccctggagcccctggcccaaaaggcgaaatcggggccgtgggcaatgcagggccagccgggcccgctggcccccgtggggaagtgggtctgcctggcctctccggccccgtgggccctcctggcaatccaggagcaaacgggctgactggcgccaagggagcagccggtctcccaggagtggccggcgccccaggacttcctgggccacggggcattcctggacctgtgggggcagctggtgccaccggggcaagggggcttgtaggggagcccgggcccgcggggtctaaaggggagagtggaaacaagggcgaaccaggctccgccggcccccagggccccccgggcccctcaggagaagaaggcaagcggggccctaacggggaagccggctccgctggtccgcctggaccgccagggttaagggggtcacccgggagtcggggactgccgggagcagacggcagggccggagtaatggggccacccggcagtagaggcgcctccggtcccgccggtgtgagaggaccaaacggtgatgcgggaagacccggtgaacctggattgatggggcctagaggcctgccggggagtcctggcaacattggacctgccggaaaggaagggccagtggggctgccggggatagacgggcggcccgggcccatcgggccagctggcgcacgcggtgagccagggaacatcgggtttccaggacctaaaggaccgacaggggaccctgggaaaaatggggataagggccacgcggggctggcaggggcccgtggcgccccagggcctgatgggaacaatggagcccaaggccctcctgggccccagggcgtgcaggggggtaagggcgagcagggtcccccaggcccacccggatttcagggcttacctggaccgtcagggccggccggtgaggtgggcaaaccaggcgagaggggactccatggagaatttgggctgccaggccctgctggacctcgaggggaaagggggcccccaggcgaatccggagcagccggccctaccgggcccatcggcagccgaggacccagtggaccgccgggccccgatgggaacaaaggagaacccggagtggtgggcgccgtgggcactgctggcccatccgggccatctgggctgcccggggaaagaggagccgccggaatccctggtggcaaaggtgagaagggtgaacctggactccggggagaaatcgggaatcccggcagggacggcgcacggggggctccgggagcagtcggagccccagggcccgccggcgcaacgggcgacagaggcgaggctggtgcggcgggacctgctgggcccgcaggcccaagaggatcccctggggaaaggggtgaagtgggaccagcgggtccaaacggttttgccggccctgctggcgcagccggccagcccggcgctaaaggcgagagaggagcgaaaggacccaagggggaaaacggtgtggttggaccaactggccctgtgggagccgcagggcccgcaggacccaacggaccacctggtcctgccggatctcggggcgatggggggcctcccggaatgactggatttcctggggccgccggcagaaccggtccccccggaccttctggtatctccggaccgcctggcccgccaggccccgcgggtaaagagggtctacgaggaccaagaggcgaccagggcccggtggggagaacaggagaggttggtgctgtcggacctcctggatttgccggcgagaaggggccttctggggaggcgggcacagcggggcccccaggcacgcctggcccacaggggttgctgggagctccgggcatcctgggcctgcctggtagtagaggggagcgagggctgcccggagtcgctggtgctgtgggcgaaccaggccctctgggtatagccggccccccaggcgcccgtgggcctcccggtgccgtgggcagtcctggagtaaatggcgccccaggggaagctggccgagacggaaacccaggcaacgatgggccaccgggccgcgatggccaaccagggcataagggtgagcgcgggtaccctggaaacatagggcccgtaggcgcagccggtgcgcctggaccgcacggtcccgtgggccccgctggcaaacatggtaatcgaggggaaaccgggccaagtggccccgtgggccccgccggcgccgtgggccctcgtgggccctcaggcccccaaggaattagaggtgataagggcgagcccggggagaaggggccgagagggcttcccgggctgaaggggcataacggcctccaggggctccctggaatagcaggccatcatggggatcagggcgcacctgggtcagtcggacccgccgggccccgggggcccgccggcccgtccggacctgccggcaaggacggaagaaccggccatccaggaacagtggggcctgcagggattagggggcctcagggccaccaagggcctgccggccccccaggaccccctggacctccaggccctcccggggtgagcggtggcggatatgactttgggtatgatggcgacttctatcgagccgaccagccccgaagtgccccctctctcagacccaaagattacgaggtagacgctacactgaaatccctgaacaaccagattgagaccctcttgacccccgaagggtcaagaaaaaacccagcacgaacctgcagggatcttcgattgtctcatccagaatggtcctccggctactactggatcgatcctaatcaggggtgcactatggacgccattaaggtgtactgtgacttttctaccggtgagacgtgcattagggctcagcccgaaaatattcccgctaagaactggtaccggtcttctaaggacaaaaagcacgtgtggctgggagagaccatcaacgcaggatctcagttcgagtacaacgtggaaggcgtgacatccaaagagatggccacgcaattggctttcatgagactcctggcgaactatgcatcacagaacataacctatcattgtaagaatagcattgcctatatggacgaggagactgggaatttgaagaaggccgtcatcctgcaggggtctaacgacgtggaactggttgcagaagggaactctcgtttcacctataccgtgcttgtggatggatgctccaagaagacgaacgaatgggggaagaccataattgagtataagactaacaagccctcccgactgcccttcctggacatagcgcctctggacattgggggggctgatcaggaattcttcgtcgacattggccctgtatgtttcaaa

SEQ ID NO: 32493 - DNA, 4098 bp, synthetic construct
  misc_feature 1..4098: note = Description of Artificial Sequence: Synthetic coding sequence
  source 1..4098: mol_type = other DNA
atgctcagctttgtggacacacggaccctgctgttgctggcggttacactgtgcctggcaacatgccagtcactgcaggaggaaactgttcgaaaggggcccgctggagatagaggtccccgcggcgaacgagggccccccgggccccccgggcgagacggagaggacgggcccacagggccccctggcccccctggccccccaggcccgcccggactgggaggcaatttcgccgcgcagtatgatggcaaaggcgtcggcttaggcccaggcccaatggggctcatgggccccagaggccctccgggggcagcgggagctcccggcccgcaagggttccaggggccagctggcgaacctggcgagcctggacaaaccggacctgcgggcgcgcggggcccagccggacctccaggaaaggcaggggaagatggtcaccctgggaagcccggccgccctggagaaagaggggtggtgggcccccagggcgcccgcgggttcccaggcacccctggactgccaggctttaaaggtatccgtggtcacaatggtctggacgggttgaagggacaacctggagcccctggagtgaaaggcgagcctggcgcccctggggaaaatgggactcccggacagactggcgctcgggggcttccgggagagcggggacgggtaggggcacctgggcctgccggcgctagaggtagcgacggaagcgtgggtccagtgggccccgctggccctatcgggtctgcgggtcccccgggcttccccggcgcccccggaccaaaaggagaaataggtgccgtgggaaatgccggaccagccggccccgctggacccaggggagaggtaggtttgcccggcctatcaggcccggtgggcccacccggcaacccgggggcgaacggtctgacgggggctaagggagcagcaggtctgccaggtgttgcgggagcacccggtctgccagggccaagggggatccccggccccgtgggagccgctggcgcgacaggggctagggggttagtgggcgagccagggcctgctgggtccaaaggggagagtggtaacaaaggagaaccgggcagcgccggaccacagggaccccctggaccttccggggaggaaggcaagaggggccctaatggagaggctgggtcggctggtccgccgggcccccccggactgagaggctctcctgggtctcgaggcctgcccggcgcagacggaagggccggtgtgatgggcccacctggctccagaggggctagcggacctgccggcgtaagaggacccaatggcgacgccgggcgcccaggtgaacctgggctgatggggccacgaggcctgcccggaagcccaggcaacatcggtccagcaggaaaggagggcccagtgggcctccccggaatcgatggacgccctggtcccattggtcccgccggggcacgtggggagcctgggaatatcggcttccctggccctaaaggccccacaggcgacccggggaaaaacggagacaagggccatgccggactggctggagccaggggagccccagggccggacggaaataacggggctcaggggcctccaggtccgcagggcgttcaggggggtaaaggggaacagggccctcccggccctccaggattccagggacttccagggccttcagggcccgctggggaagttggcaaaccaggagagcgcgggctgcacggcgagttcggcctgcccgggcccgctgggccacgtggcgagcgagggcctcccggcgagtcgggtgccgcaggaccaactgggcctatcggatcccgaggcccaagcggcccaccaggccctgacgggaacaagggcgagcccggcgtggttggcgcagtgggcacagctgggccttctggaccatccggtctcccgggcgaacgaggcgccgcagggatccccggcggtaaaggagaaaaaggagaacctggactgaggggcgagattggaaatcccggtcgggacggtgcccgcggtgccccaggcgccgtcggtgctcccggcccagccggagccactggtgaccgtggtgaagccggcgccgcagggccagctggccctgccgggccccgaggatctccgggtgaacggggagaggtaggaccagctggacctaacggattcgccggcccggccggagctgccggtcagcccggtgccaaaggagaacgaggggccaagggaccaaaaggtgagaatggagtggttggtcccactgggccagtgggcgcggccggccctgcagggccgaacgggccaccggggccagctggctctcgaggggatggaggtccccctggtatgaccggcttccctggggccgcaggtaggacaggcccccctggtcccagtggcatcagcgggccccccgggccaccaggccctgccggtaaggagggtctcagagggccccgaggagaccagggccccgtgggccggacaggcgaagtgggagccgtcggcccaccagggtttgcgggggagaaaggcccgagtggagaagccggaacagccggtcctccaggaacacctggacctcaaggactgctgggagcccctgggattctgggattaccgggctctcgaggagaacgcggccttccgggtgtggccggcgctgtgggcgagccaggacctcttgggattgctgggcccccgggagctcgtggcccccccggcgcagtgggatctcctggcgtgaatggcgctcctggggaggccggcagagacggaaatcctggtaatgacggaccccctggtcgggacggccagccgggacacaagggggaacggggatatccaggcaacatcggacccgtaggggccgccggcgcccccggtccacacggtcccgtcggtccagcaggaaagcacggaaatagaggcgaaacgggcccctccggacccgtgggtccagccggtgcggtcgggccaagagggccttcagggccccaggggattcgaggcgataaaggggagccgggtgagaaagggccacgtgggttaccaggtcttaaggggcacaatgggttgcagggcctccctggtatcgcagggcaccacggcgatcagggtgctccggggtctgtagggcccgctgggccacggggacccgctggaccatccgggccggctggaaaagacggccgcactgggcaccctgggacagtcggaccggcaggaatccgagggccacaaggtcatcaaggaccggcagggccacctggtcctccagggcccccagggccgcctggcgtgtctgggggcggttacgattttggttacgacggagatttttatagggctgatcaaccgcgcagcgctccttcgctgcggccgaaggactatgaggtggatgctacactgaagagcctgaataatcagattgagacactcctgaccccagagggctctcggaaaaatcctgccaggacctgtagagacctacgtctgtcccacccagagtggtcctccggctattactggatcgatccgaaccaaggctgcacaatggatgctatcaaggtgtattgtgattttagcaccggcgaaacatgtataagagctcaaccggaaaacattccagctaagaactggtaccggtcttctaaggacaaaaagcacgtgtggctcggggagactattaatgcagggagtcagttcgaatacaatgtggagggcgtcacttctaaggaaatggctactcaactggccttcatgcgcctgctggctaattacgcttctcagaacattacctaccactgtaaaaattcgatagcctacatggatgaggaaaccgggaacctgaagaaggcggtgattctccagggctccaatgacgtcgagttggtagcagaagggaactctcgtttcacatatacggtcttggttgatggctgcagcaaaaaaacaaatgaatggggtaagaccatcatagagtacaaaacgaataaaccttctagactacctttcctcgatatcgctccactcgacatcggcggagcagatcaggagttcttcgtcgacataggaccggtgtgctttaag

SEQ ID NO: 32494 - DNA, 4098 bp, synthetic construct
  misc_feature 1..4098: note = Description of Artificial Sequence: Synthetic coding sequence
  source 1..4098: mol_type = other DNA
atgctgtcctttgtagacacccgcactcttttacttctcgctgtgacactgtgtctcgcaacatgccaatcattgcaggaggagaccgtgagaaaaggacctgccggggaccggggacctcgcggagagaggggtccccctggccctcccgggcgggatggcgaggacggtccgacaggcccacctggaccacccggtcctcccggtcctcctggacttgggggcaactttgcggcccagtacgacggtaaaggcgttgggcttggcccgggccctatgggacttatgggcccccgtgggccacccggcgctgccggggcccctggccctcagggatttcaagggcccgcaggggagccgggagaaccaggccagactgggcccgccggcgccaggggcccggccggcccccctgggaaggccggggaagatggccaccccgggaagcccggaaggccaggagagagaggggtcgttgggccacagggtgctagaggcttcccaggcacccccggcctgccagggtttaagggcatccgcggtcataatggtctggatgggttgaaggggcagccaggcgcccctggtgttaagggagagccaggcgcacctggagagaatggtacgcccggccagactggagcgcgagggctgcctggcgagagagggagggtgggagctcccggccccgcaggggcaagaggatcagacggctcagtcgggcccgttggtcctgccggtcccataggaagtgctggccccccaggatttcccggcgcgcctgggcctaaaggggaaatcggcgccgtaggcaatgcggggcctgctggaccagccggacccaggggcgaggttggactcccggggctgtcaggtcctgtcggccctccaggaaaccctggtgctaacggcctgaccggagctaagggagccgccggactgccgggtgtggctggcgctccaggtttgcctgggccccggggcatccccggtcctgtcggggcggcaggagcaacaggcgccaggggactggttggcgaacctggccccgccgggtccaagggtgagtcaggcaataaaggtgaacctggcagcgctgggccccaggggcctcctgggcctagcggagaagagggaaaacgtgggcctaatggcgaggccgggtctgccgggcctcctgggccacccgggctcaggggttccccgggttcccgtgggcttcccggcgccgacggaagagccggcgtgatggggcctcccgggagtcgtggtgccagcgggcctgcgggtgtccgaggtcctaacggagacgctggccgacccggcgagcccggcttgatgggcccccgagggctgcccgggagtcccggcaatatcggaccggcggggaaggagggtccagtgggcctaccgggaatcgacggaagaccaggacctattgggcccgccggagcaagaggtgagccgggaaacatcggctttcccgggccaaaggggcctactggcgatcccggaaagaacggcgataaagggcacgcggggctcgcaggagcgcggggggccccaggacctgatgggaacaatggcgctcaaggcccgccaggcccgcagggagtgcaaggaggtaagggggagcagggtcctcctggcccacccggattccaaggtctccccggccccagtggacccgccggtgaagtcgggaaaccaggcgagcggggcctgcacggcgagttcggacttcctggccccgcgggcccacgaggggagcgtggcccccccggcgagtcgggagctgctgggcctacagggcctatcgggtctagagggcctagtggcccccctgggccagatggaaacaagggagagcctggggtagtgggagccgtagggactgccgggccctccgggcctagcgggttacccggcgaaaggggagccgcggggataccgggggggaaaggagagaagggggagccaggtctgcgcggcgaaattggaaatcccggccgcgatggtgccagaggcgccccaggcgcagtgggagctccaggacctgccggggcgaccggggaccggggcgaagcaggagctgccggcccagcgggacctgcgggcccgcggggctcgcctggagaaaggggcgaagtcggtcccgccggaccaaatggctttgctggacccgccggcgcagctggccaaccgggtgccaagggcgagaggggagctaaggggcctaaaggggagaacggggtggtgggaccgaccggcccagtgggggcagcgggaccagcaggacctaatggccccccaggccccgccggcagcaggggcgacggcggaccaccagggatgacgggcttccctggagccgcaggaaggaccggaccacccggaccaagcggaatctctgggcctcccggcccccctggacctgctggaaaggaaggcctccgggggcctcgtggcgatcagggccctgtgggccggacaggcgaggtaggcgcagtggggcctcccgggtttgcaggcgagaagggccccagcggtgaggcggggaccgccggtccaccagggaccccaggaccgcagggactcctgggggcccctggcatcctggggttgccggggtcacggggagagaggggactccccggcgtggccggggcagtcggtgagcccgggcctctcggaatcgcgggaccgccgggtgctcgggggccgcccggcgcagtcggctcaccaggagtaaatggggcccccggtgaagccggccgggacggaaaccccgggaatgatggtcctccaggacgagatggtcagcctggccacaagggcgagcgaggttatcccggcaacattgggcctgtcggagcggcaggcgcaccaggtccgcacgggcctgtgggtcccgcgggtaagcatgggaatcgcggtgaaacggggccaagtggccccgtgggaccggccggcgcagtcggccccagaggcccgagtgggccccaaggcatccggggcgataagggtgagccgggcgaaaaagggccccggggtctgccgggattaaaggggcacaatggtcttcaaggcttgccaggtatcgccgggcatcatggtgaccagggtgcgcccggttctgtgggaccagccggccctagaggacctgccggtccctccgggccggcaggtaaggacggtcgtacggggcatccgggcacggtgggcccggccggcatccgcggaccgcagggccaccagggtcccgcaggacctccaggcccacccggtcctccagggccccccggcgtgtctggtgggggttatgactttggatacgacggcgatttctatagggcagatcagcctcgctccgccccttccctgaggccaaaagactatgaagtagacgccacgctgaaatccctgaataaccagatcgaaacactgctcactcctgaaggctctcgcaaaaacccggctagaacttgcagggacctacggttatcacatcccgagtggagtagtggttactactggatagatcctaatcaaggctgcacaatggacgcaattaaggtgtattgtgatttctccaccggcgaaacctgcatcagggcacaacccgagaatatcccagctaagaattggtaccgatcttccaaagacaaaaaacacgtgtggctaggagagactataaatgctggaagtcagtttgagtataacgttgagggcgtgacttccaaggagatggccactcagctggcattcatgcgcctgttagccaactacgcatcccagaacatcacctatcactgcaagaactctattgcttatatggacgaagagactggcaacctcaagaaagctgtcattttgcagggtagcaacgatgttgaactggtcgcggaaggcaattcaaggttcacttatactgttctggtcgatggttgctccaagaagaccaatgagtggggtaaaacaattattgagtataagaccaacaaaccttcccgactgccatttctcgatattgctcccctggatattggaggcgccgaccaggagttctttgtcgacatagggcctgtatgtttcaag

SEQ ID NO: 32495 - DNA, 4098 bp, synthetic construct
  misc_feature 1..4098: note = Description of Artificial Sequence: Synthetic coding sequence
  source 1..4098: mol_type = other DNA
atgctgtcgttcgtggatacccgcaccctgctgctgctggccgtcaccctgtgtctggcgacgtgccagtccctgcaggaggaaactgtccggaagggcccggcgggcgaccggggaccaagaggtgaacgcgggcctccgggcccgcccggccgcgacggtgaagatggtcccacgggaccgccaggaccaccaggtccaccgggccccccaggactcggaggaaatttcgccgcgcaatacgacgggaaaggagtgggcctgggccctggtccgatgggactcatgggaccgaggggacccccaggtgcggctggggctcctggaccgcagggattccaaggccctgccggcgagccgggcgaaccggggcagactggaccggccggcgcacggggacccgctggaccacctggtaaagccggtgaggacgggcacccggggaagccgggtaggcccggcgaacgcggagtggtcggaccacagggagctagaggctttccgggcaccccgggcctgccgggcttcaagggtatccgtggacacaacggactggacggtcttaagggccaaccaggggccccaggagtgaagggcgagccaggcgcccctggggagaacggcactccgggtcagactggggcccgcgggttgccgggggagcgaggtcgcgtcggcgcccctggcccggcaggagcacgcggatccgacggatcagtgggacccgttggcccagccgggccgatcggatcggcaggaccgccaggcttccctggagcgccaggtcctaaaggtgaaatcggcgcagtgggaaacgccggtccagcaggtccagctgggccgaggggagaagttgggcttcccggcctttccgggcctgtgggccccccgggtaaccctggtgcaaacggccttaccggcgcgaagggggccgccggcctgcctggggtggccggtgctcccggcctcccaggtccgcgaggcatccccggtccagtgggagcagccggcgctacgggagcgcggggactggtcggagaaccagggcctgcaggttcaaaaggtgaaagcggcaacaagggggaaccaggctcggctggcccgcagggtccgccgggcccgtcgggcgaagagggaaagcggggtcctaatggagaggcaggctcggccggacctccagggcctcccgggctgcggggatcccctggaagcaggggcttgccaggtgccgatggacgggccggagtgatgggtcctcctggttcccgcggagcgagcggaccggctggagtccgcggcccgaacggagacgcgggccgcccgggtgagccgggactgatgggccctcggggcctgcctggaagcccaggtaacattggtcccgcgggaaaggaaggcccagtcggactcccaggcattgatggtagaccagggccgattggacctgccggtgcacgtggggaacccggcaatatcggattcccgggaccgaagggtccgaccggggatcccggcaaaaacggagacaaggggcacgccgggctcgctggagcaaggggagcaccgggaccggacggcaataatggagcccagggtccgccagggccccagggagtgcagggaggcaagggagagcaggggcctccgggaccaccgggatttcagggactcccaggacccagcggacccgcgggtgaggtggggaaaccgggagagcgtgggctccacggggaattcggattgcccgggcccgcaggccctcggggggaacgcggaccgcctggtgaatcaggagctgcgggtccaactggacctattggctcaagagggccgagcggacctcctggtccagatggaaacaagggcgagcctggcgtagttggagcggtcgggaccgcaggtccatcaggcccgtcggggctcccgggcgaaagaggcgccgccggcatccctggcggtaaaggagaaaagggggagcccggtctgcgcggagagatcggaaatccgggacgcgatggcgcgagaggcgctccgggagctgtgggagcgccgggaccggcgggggcaaccggagatcggggcgaggcaggggcagcaggtccggctggacccgccggaccgaggggtagcccaggagaacgcggagaagtaggtcctgcgggacctaacggatttgcaggaccggctggcgcagctggacaacctggagccaaaggcgaacggggagccaagggaccaaagggcgagaatggtgttgtcggcccgactggaccggtgggcgccgctggcccggctggccctaacgggccaccgggtcctgcgggttcgagaggcgacggaggaccgcctggaatgactggatttccgggcgcggccggtcggactggaccgcccggcccctcaggcatctcaggtcccccgggcccgccagggcctgctgggaaggagggactcagaggcccacggggcgaccaaggtccagtgggccggactggcgaggtgggagcagtggggccgccaggattcgctggggagaagggcccgtctggcgaggcgggaaccgctggtccaccagggacccctggcccacaagggctgctgggagcgccaggaattctcggacttcctggatcgcgaggagagcgggggttgccgggagtcgccggagcagtcggcgaaccagggccactgggaatcgccggtccgcccggagcccggggcccaccaggagccgttggatcccccggagtgaacggagccccaggcgaggcgggcagggatggaaaccctggcaatgacggaccccctgggcgggatggccaacccggccataaaggggagcggggttaccccgggaatataggtccggtgggggcggcaggggcaccaggcccgcatgggccggttggaccagcagggaaacatggaaaccgcggcgaaactggaccttccggaccagttggaccggcaggcgcagtgggtccacgcggaccaagcggaccgcagggtatcaggggagacaagggagagcctggagaaaaaggaccgcgcggcctgccaggactgaagggacataacggattgcagggtctgccaggtatcgcggggcaccacggcgaccagggagcaccaggatccgtggggcctgccggcccccgcggtccagcggggccgtcgggccccgctggtaaggacggacgcaccggacaccccggaaccgtcggccctgcgggaataagaggtccgcaaggacaccagggccccgccggcccccctggcccgccggggccgccgggacccccgggagtgtccggaggcggatacgacttcggctacgatggagacttctaccgcgccgaccagcccagatctgccccttccctccggccaaaagattacgaagtggacgctaccctgaaaagcctgaacaaccagatcgagactctcctcactccggaaggatcgcgcaaaaaccctgcgcgcacttgccgagatctgagactgtcccatccggaatggtcctccggatactactggatcgatccgaaccaaggatgtaccatggacgccattaaggtgtactgcgatttctcgactggagaaacctgcatcagagcgcaaccagaaaacatcccggcaaagaattggtacagatcatcaaaggacaagaagcatgtgtggctgggagagactatcaatgcaggttcgcaatttgaatacaatgtcgaaggggtgacttcaaaggaaatggcgactcagctcgcgttcatgcgcctgctggccaattacgcgtcccagaatatcacctaccactgcaaaaactcgatcgcttacatggatgaggaaactggaaatttgaagaaggctgttattctccaagggtcgaacgatgtcgaactcgtcgctgaaggtaatagcagatttacgtataccgtgcttgtggacggctgctcaaaaaagaccaacgaatggggaaagaccatcatcgagtataagacgaacaagccgtcccgactccccttcctcgacatcgctcctctggacatcggtggagccgaccaggagttcttcgtggacatcggtcctgtctgtttcaag

SEQ ID NO: 32496 - DNA, 4098 bp, synthetic construct
  misc_feature 1..4098: note = Description of Artificial Sequence: Synthetic coding sequence
  source 1..4098: mol_type = other DNA
atgctttccttcgtggacacccgcaccctgctgctgcttgcagtcaccctctgcttggcgacctgtcagagcctccaagaagaaaccgtgcgcaagggtccagcaggagacagaggaccccggggagagagaggccctcctggtccgcccggaagggacggagaagatggacccactggcccgccagggccaccaggtccgccggggccaccaggactgggcggaaacttcgcagcccagtacgacggaaagggagtgggacttggaccaggaccgatgggtcttatggggccaagaggaccgccaggtgccgctggagcaccgggaccgcaggggttccaaggaccggctggcgagccgggggaaccagggcaaaccgggcctgcaggtgcgcgggggcccgctggcccacctggtaaggccggagaggacggacatccaggaaaaccgggtcggccgggagagagaggtgtggtcgggccgcagggagctcgaggattcccgggaacgccaggactgccaggattcaagggcatcagagggcacaatggactcgacggcctgaaaggacaaccgggcgcgccgggcgtgaagggcgaaccaggcgcccccggagaaaacggaactcctggccaaaccggtgcccgcggactccctggagaaagaggccgcgtcggggcccccggccctgcaggggcgcgcggtagcgatggttccgttggacctgtggggcctgccggtcctatcggtagcgcgggccctccgggattcccaggggccccggggccgaaaggagaaattggtgccgtgggaaatgctggcccggccggacctgccggtccgcggggcgaagtgggactgccaggcctgtctgggccagtagggccaccgggaaacccgggcgcgaatggcctgacgggagccaagggagcggccggcttgcctggcgtcgcaggagccccaggcttgccaggcccgaggggcatcccggggcctgtcggagcagctggagccaccggcgcccgggggctcgtgggagaaccaggcccagcaggatccaagggcgagtcgggcaacaaaggggaacccggatccgcgggacctcagggaccacccggaccttcaggagaggagggaaagagggggccgaacggagaggccggcagcgccggaccgcctgggccgcccggactgcggggaagcccggggtcgagaggtctgccaggagcggatggacgcgcgggtgtcatgggaccgcccggatcgcgaggagccagtggtccagccggtgtccgtggccccaatggagacgcgggacgccctggtgagccaggactgatgggaccgcggggattgccgggatcacctgggaatataggtccagcagggaaggagggacctgtgggactgcctggaatcgatggtcgccctggaccgatcggtccggctggcgcacgcggggaaccaggcaacatcggtttccctggaccaaagggcccgaccggtgacccgggaaagaatggagacaagggccacgccgggctggctggcgctcgcggcgctcccggtccggacggtaataacggagcacagggacctcccggccctcagggcgtgcagggaggcaagggggaacagggcccgcccggccccccgggatttcaaggactgccgggaccttccggaccagcaggtgaagtgggtaagccaggtgagcggggtctgcatggtgagttcgggctgcccgggccggcaggccccagaggagagaggggtcctccgggggagtccggagcagccggcccgacgggcccaatcggatcgaggggtccaagcggccctccgggaccagatggaaacaagggagaacctggagtcgtgggggccgtcggaactgcgggtccgtccgggccctcaggactccccggcgaacgcggtgccgctggaattccgggaggaaagggagaaaaaggggagccgggactcaggggagaaatcggaaatccaggacgggatggcgccagaggggcacctggggccgtcggtgcgccgggacccgccggagctactggcgacagaggagaagcgggtgcggctgggcccgccggaccagctggcccgcgtggatccccgggagaacggggagaagtggggccagccggccctaacggcttcgcaggcccagccggcgcggcagggcagccgggagctaaaggtgagagaggagcgaagggcccaaagggcgagaacggagttgtcgggccgaccggaccggttggggcagctggaccagcgggaccgaacggacccccgggtccggctggatctcggggagacggcggaccacccggcatgactggctttcctggagccgcaggtcgcaccggaccccccgggccgtccgggatctcaggaccgccaggaccacctggacctgccggaaaggaaggcctccgcgggccgcggggagatcagggcccagtcggacgcaccggagaagtgggagctgtgggacctccgggatttgctggagagaagggaccgtcaggtgaagccggcactgcgggcccaccaggcactccgggaccacagggactccttggagccccggggattcttggcctgcccggaagcaggggggagcgaggcctgccaggcgtggcgggagcagtcggggaaccgggtccgctgggaatcgcgggtccgccaggagcgcggggaccaccgggagccgtcggctcgccgggagtgaatggagcccctggcgaggccggacgggacggtaaccctggaaacgatggaccaccgggtcgcgacggacagccgggacataagggagagcgcggatacccgggcaacattggccctgtgggagcggcgggcgccccaggaccgcacggtccggtgggtcccgcagggaagcacggcaatcgcggagaaaccggaccaagcggtcctgtgggaccggccggcgcagtcgggcctaggggcccttcaggtccgcaaggaatccgcggagataaaggcgaaccgggggaaaaagggccgagaggattgccgggactgaagggacataacggattgcaagggctgccggggatcgcgggacaccacggcgaccagggtgcaccgggatcggtgggaccagccgggcccagggggccggccggaccgtcgggaccggcggggaaggacggccgcactgggcacccaggcaccgtgggccccgccggaatccgggggccgcaaggtcaccaggggcctgctggtccaccgggaccgccgggaccccctggacctccaggcgtttcggggggcggatatgacttcggatacgacggagacttctatcgcgccgatcagccgcgcagcgcaccgtcgctccgcccgaaggattacgaagtggacgctaccctgaagtcgctgaacaaccagatcgaaactctgctgacgcctgagggctcccggaagaatccggcccggacctgccgcgatctgcggctctcacatcctgaatggtcctcgggctactactggatcgatccgaaccaaggttgcacgatggacgccatcaaggtgtactgtgacttctcgactggagaaacttgtatccgtgcccagccagaaaacatcccagccaaaaactggtaccggtcatccaaggataaaaagcacgtgtggctcggcgagactatcaacgctggaagccaattcgagtacaatgtggagggcgtgacctccaaagagatggccactcagctcgcttttatgcggctgctggccaactacgcgtcgcagaacatcacctaccattgcaaaaactcgatcgcctacatggacgaggagactgggaatctcaagaaggcggtgatcctccaaggcagcaatgacgtggagctggtcgcggaaggaaactccagattcacttacactgtgctcgtggacggatgctcaaagaaaaccaatgagtggggaaaaactatcatcgaatacaagaccaacaaaccgagcagactgccgttcctcgatattgcgcctcttgacatcggcggggcggatcaggaatttttcgtggatattggaccggtgtgctttaaa

SEQ ID NO: 32497 - DNA, 4098 bp, synthetic construct
  misc_feature 1..4098: note = Description of Artificial Sequence: Synthetic coding sequence
  source 1..4098: mol_type = other DNA
atgctgagcttcgtggatacccggaccttgctcttgctcgcagtgaccctctgcctggcaacgtgccagtccctccaggaagagactgtgcgcaaagggccggccggagacagaggaccacgcggggagaggggccctcccggaccacccggccgagacggtgaggacggcccaaccggcccgccaggacctccagggcctccgggccccccaggtttgggaggcaactttgctgcccaatacgacggaaagggagtggggctcggtcctggcccgatgggactgatggggcctcggggccctccgggggcagcaggagcaccgggaccgcagggattccagggtccagccggagaaccgggcgaaccaggacagactggaccagcaggagcccgaggcccggccggtcccccgggtaaagccggcgaagatggacatccgggaaagccgggccgcccaggggagcggggtgtggtggggccacaaggggcccgcggtttcccaggcactccggggctcccgggattcaaaggcatcaggggacacaacggactcgatggcttgaaggggcagccgggcgcaccgggagtgaagggggagccgggtgcccctggggaaaatgggaccccagggcagactggagcacgcggactgccgggggaaagaggtcgggtcggagccccgggaccggcaggcgccagagggagcgacggctcggtgggaccggtcgggccagctggaccaattggatcagcaggccctcctgggtttccgggcgctcccggaccgaaaggcgaaattggagctgtgggaaacgcaggcccagccgggccggcgggaccgcgcggggaagtgggactcccgggactttcaggaccagttggcccgcctgggaacccaggtgccaacggccttactggagctaagggagctgctggcctgccgggcgttgcgggtgcgccaggactgccgggacctcggggaatcccgggcccggtcggcgcagcgggagcaaccggggcgagaggcctcgtcggcgaaccgggcccagcagggtcaaagggcgagtccggaaataagggagaacctggatcagcgggcccacagggaccaccgggaccgagcggggaggaaggaaagcggggcccaaacggcgaggcgggatctgcgggtccacctggaccacccggtctgaggggcagcccaggatcgcgcggactgcccggagctgatggacgggctggagtgatgggccctccaggctcccgcggcgcgtcgggacctgcgggagtccggggtccaaacggagacgctggacgcccgggtgaaccaggactcatggggccgcgcggattgccgggttcgcctggaaatatcggccccgctgggaaggagggccccgtgggtttgccaggaatcgatggcaggccgggaccgatagggcctgcaggtgcgcgtggggaaccgggaaacataggtttcccgggaccgaagggccccaccggcgatccgggtaagaacggggacaaaggtcacgcgggtctggctggagcacggggagctcccgggccggacggaaataacggggcgcagggaccgcccggcccacaaggtgtgcagggaggcaagggagaacagggaccgccgggacccccagggttccaggggctgcccggaccgtcgggccctgcgggggaagtcgggaaaccaggtgaacggggtctgcacggcgagtttggactccctggcccggcggggccaaggggcgagcgcggtccccctggcgagtcaggcgctgcaggtccgactggaccgatcggatcgcggggacctagcggcccgcctggtcctgacggcaataaaggagaaccgggtgtcgttggtgccgtgggcaccgccggcccatctggaccttccggcctgccgggagagcgcggcgccgctggaatcccaggaggcaagggggagaagggagagcctggactccggggcgagatcggcaacccgggtagagacggagcccgcggagcccctggagccgtaggtgcacctggcccagcaggtgcaactggagatcgcggggaagccggcgccgcaggccctgcaggaccagcaggcccgaggggatctcccggagaacgaggcgaagtgggtcccgctgggcctaacggattcgccggacctgcaggggccgcgggccagccaggggccaagggagaacgtggagcgaaggggccgaaaggggaaaacggcgtggtcggaccaactggacctgtaggtgcagccggacccgcgggcccgaacggaccaccggggccggccggcagccgtggagacggagggcctcccggaatgactggctttccgggtgccgctggcaggaccggccccccgggtccgtcgggaatctccggaccgcctggccccccgggacctgcaggcaaagagggactgcgaggcccgcggggggaccaaggcccagtgggacgcacgggcgaggtgggagcagtggggccgcctggatttgcgggcgagaagggaccaagcggagaagcaggtaccgcgggtccaccaggcactccaggaccgcaaggactcctgggggctccgggaatcttgggcctgcccggatccagaggtgaacgtggattgccgggcgtcgccggagctgtgggcgaacctggaccactgggcatcgcgggtcccccaggagccagaggacctcctggggccgtggggagccctggagtgaacggagcgccaggcgaagctgggcgcgacggaaatccgggtaacgatggaccaccgggccgagacggacaaccggggcataagggggagagaggataccctgggaacattggacctgtgggagccgccggcgccccaggcccgcacggtccggtgggaccagccggtaagcacggaaaccgcggtgagactggcccgagcggtccagtgggcccggctggagccgtgggccccagggggccatccgggccgcagggaatccggggagataagggcgaaccgggagaaaagggccctcggggactgccaggcctgaagggtcacaacggactgcaaggccttcctggaatcgcgggccatcacggagatcaaggagccccagggtccgtgggccccgccggaccgcggggccctgctggacccagcggaccggcgggaaaggatggacgcaccgggcacccaggaaccgtgggtcctgctggcatcagaggtccgcagggtcatcagggcccggcaggacctccggggccgccgggcccaccggggcctcctggcgtgtcaggaggagggtacgacttcggatacgatggagacttctaccgcgctgatcagcccagatcggcgccatcgctgaggcctaaggactacgaggtggatgccactctcaagtcgttgaataatcagattgagactctcctcacgccggagggcagcagaaagaacccggcaagaacctgccgcgatctccggctgtcccatccggaatggtcgtccggatactactggatcgacccgaatcagggctgcactatggacgccatcaaagtctactgcgacttcagcactggagaaacttgcattagagcacagccggagaatatcccggcgaaaaactggtatagatcgagcaaagacaaaaaacacgtgtggctgggagaaaccatcaatgcgggatcgcagtttgaatacaacgtggagggtgtgactagcaaggagatggcgacgcagttggccttcatgcgcctgctggcgaattacgcctcgcagaacatcacttaccattgcaaaaactcaatcgcgtacatggacgaagaaaccggaaacctgaaaaaggcagtcatcctgcaggggtccaacgatgtcgagctggtggcagaaggcaactcgcgcttcacctacaccgtgttggtcgacgggtgtagcaagaaaaccaacgagtggggaaagactatcatcgagtacaagacgaacaagccatctcggctgcctttcctggacatcgcccccttggatatcgggggtgccgatcaggaattcttcgtcgacattggaccggtgtgcttcaag

SEQ ID NO: 32498 - DNA, 4098 bp, synthetic construct; identical to SEQ ID NO: 32454
  misc_feature 1..4098: note = Description of Artificial Sequence: Synthetic coding sequence
  source 1..4098: mol_type = other DNA

SEQ ID NO: 32499 - DNA, 4098 bp, synthetic construct
  misc_feature 1..4098: note = Description of Artificial Sequence: Synthetic coding sequence
  source 1..4098: mol_type = other DNA
atgctgtctttcgtggacactcggacccttctccttctggccgtcactctgtgtctggcaacctgccaaagtcttcaggaggagacggtgagaaaaggtcccgcaggtgatcgaggtcctagaggcgaacggggaccacctggtccccccggcagggacggggaggatggtccgaccggccccccaggcccaccgggtcctcccgggccccccggccttggagggaactttgctgcgcagtatgatggcaaaggtgtgggactcggacctggccccatggggttgatgggacccaggggacccccaggagcggctggcgctcctggaccccagggttttcaaggcccagccggcgaacctggtgagcccggacaaaccggacctgctggagcccggggaccggctggcccgccaggtaaggcgggcgaagacggacacccgggcaagccaggccggcccggagaacgcggggtcgtcggacctcaaggagcgcggggctttcctgggaccccagggctgccaggctttaaaggtatccggggccacaacggactcgacggattgaaaggccagcctggagctccgggtgtcaagggggagccaggcgctccaggcgaaaatgggacacccggccaaactggcgccaggggactgccgggggagagaggaagggtcggcgctccaggcccagcaggagctcggggctctgacgggtctgtcggtcccgtcggacccgccggacccatcggatcagccggtcctcccgggtttcccggcgcccccgggccaaagggcgaaatcggggccgtaggcaacgctggacccgcaggtccagccggcccccgaggagaggtcgggctgccggggctcagtggccccgtcggaccccccggaaacccaggagccaacggcctgacaggcgccaaaggagccgcaggcctgccaggagtggccggcgctcccggcctgccagggccgcgcggcattcccggccctgtcggtgctgctggagccactggtgcaagaggacttgtaggggaaccaggccctgccggctcaaaaggtgagagtggcaacaagggggaaccaggcagtgccggcccacagggacctcccggaccttcaggcgaagaaggcaaacgcggaccaaacggggaagcgggaagtgcgggacctcccggaccccccgggctgcggggatcccccggcagcagaggtctgccaggcgcggatggtagggcaggggtcatgggacctcctggatctcggggcgcctccggaccagccggagttcggggtcctaatggcgatgccggacggccaggagaacccggtctgatggggccccgggggttgcctgggagcccgggaaacatcgggcccgcgggaaaggaaggtcccgttgggctccctggcattgacggacgacccggtcctataggcccagccggcgctcgaggcgaaccagggaacatcggtttccccgggccaaagggacctacgggggatcctggaaagaacggtgataagggacacgcgggtctcgccggggctaggggagccccagggcctgacggaaacaacggggcccaaggtccgcctggccctcaaggcgtgcagggcgggaagggggaacaggggccccctggaccaccggggtttcaggggttgccaggtccatccggccctgccggagaagtggggaagcccggcgaaaggggcctgcacggggaattcgggctgcccggcccagccggtccacggggcgagcgcggccctccaggcgaatccggcgctgccgggccaacgggtccaatcggatctagaggaccctccggccccccagggcccgacggcaacaaaggcgagccaggggtggttggcgcagtgggtaccgctggcccctctgggccctcaggactccccggagaaaggggggctgccggcattcccggtggaaaaggcgagaaaggcgagcctgggttgcggggagagattggcaatcccggccgggacggcgcccgcggtgctccaggagctgttggcgctcctggacccgctggagctaccggggaccggggtgaggcaggggcagcgggacctgctgggccagccgggccacgagggtcaccgggcgagcgaggcgaagttggacccgctggccctaacgggtttgccgggcctgcgggagcagctggacagccgggcgccaaaggcgaacgcggcgcaaaaggcccaaaaggggagaatggcgtcgtgggccctacaggtccggtcggagctgccggtcccgccggccctaacgggccgcccggccccgccggtagtaggggcgacggcggcccaccagggatgacagggttccccggagccgccgggcgaacaggaccacctggcccaagcggcatttcaggtcctcctggtcccccaggccctgccggcaaggagggcctccgggggccaagaggggatcaaggcccggtggggcgcactggcgaggtgggtgctgttggacctccaggctttgccggtgagaaggggccttcaggggaggctggcactgccggaccaccagggaccccaggtccgcagggcttgctcggcgctccgggcatcctcggcctgccagggagtcgcggagagcgaggactgcccggggtcgctggtgctgtcggggagccaggacctttgggcatagcaggcccacctggggctaggggccccccaggcgcagtgggatcccctggggtaaatggagcgcctggcgaagccggaagagacggtaacccaggcaatgatggacctccgggaagagacggacagcccgggcataagggtgaaagaggatatcctggcaatattggccctgtcggagctgcgggagccccaggtccacacggtcctgtcggccctgcagggaagcatggaaacagaggcgagaccgggccatctgggcctgtggggcccgctggagccgtggggccacgagggccaagtggtcctcagggaatccgcggcgacaagggggagccaggagagaagggcccaagaggcctccctgggttgaaggggcacaacgggctgcagggattgccagggattgccggccatcatggtgatcagggcgcgccaggatctgtgggcccggcggggccaagaggtccggccggccccagtggaccagcaggaaaggacgggaggaccggccaccctggaaccgtcggcccggctggtattcgcggcccacaggggcatcaaggtcccgccggccctcctggaccccccggaccacccgggcctcccggagttagcgggggtggctacgattttggttacgatggagatttttatcgcgcagatcaaccaagatctgccccatcactgcggcctaaagattatgaggtggacgctacactcaaatctcttaataaccagattgagacacttctcacgcccgaaggaagtaggaagaaccccgctcgaacttgtagggatctcaggctgtcacaccctgaatggtctagcgggtactactggatagatcccaatcagggatgtaccatggacgctataaaggtctattgtgacttttcaacgggggagacttgtattcgggctcaaccagagaatatcccggcaaagaactggtacagatcaagcaaggacaagaagcatgtatggctgggggaaactataaacgctggcagtcagttcgagtacaacgtggagggcgtcacctctaaagagatggccacccagttggccttcatgcgactcttggccaactatgccagccagaacattacataccactgcaagaacagtattgcctatatggacgaggagaccggtaacctcaaaaaggccgtgatcctccaggggtctaacgatgtggagctggtggcagagggcaatagtcggtttacctacactgttctggtcgatgggtgcagcaagaagaccaacgagtggggtaagacaatcatcgagtacaaaaccaacaagccctctcgcttgccatttctggatatagcccctctcgacataggcggcgcagatcaggagtttttcgtcgacatcgggcctgtttgtttcaag

SEQ ID NO: 32500 - DNA, 4098 bp, synthetic construct
  misc_feature 1..4098: note = Description of Artificial Sequence: Synthetic coding sequence
  source 1..4098: mol_type = other DNA
atgttgtcattcgtggacacccgcacacttcttctgctcgcggttacgctgtgccttgctacctgtcaatcattgcaggaggaaacagtgagaaagggacccgctggagacaggggccctaggggcgagagaggtccgcccggccccccaggacgcgacggtgaggatggaccgactggcccacctggtccccccggccctccaggaccacctggcctgggaggcaacttcgcggcacagtacgatggcaagggagtcggtctgggtccgggacctatgggcctgatgggacccagaggcccccctggagctgccggagctccaggaccccaaggctttcaaggtccagccggagagccaggcgagcctggccagaccggtccagcaggcgccaggggaccagccggtccgcctggtaaagccggtgaggatggccacccgggcaaacccggtaggcccggtgaaagaggagtagttggaccacagggtgcccgcggcttcccgggtacgcccggattgcctggattcaagggcatcagaggacacaatggactggacggactgaagggacagccgggcgcgccgggagtaaaaggcgagcctggcgcaccgggagaaaacggaaccccgggtcagaccggcgcaagaggcttgccaggtgagagaggccgcgtaggcgcccctggtcccgctggagcgcgcggtagcgacggatcagttggtcctgtcggcccggctggtcctataggatctgcgggaccccccggtttccccggcgcgccaggaccgaagggcgagatcggagcagttggcaatgcaggccctgcgggccccgctggacccaggggcgaggtgggcctgcctggactgagcggtccggttggacctcccggtaatcctggcgcaaatggactcacaggcgctaaaggagctgcgggcctccctggagtagccggcgcccctggactgcccggccccagaggtatacccggcccagttggagccgccggtgcgacaggagctagaggcttggttggcgaacctggacccgctggttccaagggagagagcggaaacaaaggtgaaccgggatcagcgggcccgcaaggaccccctggaccgtctggtgaagagggtaaacgcggtccaaatggagaggcaggctccgcgggtccacccggcccaccgggcctcaggggttctcctggaagtaggggtttgcctggtgcagatggaagggccggagtcatgggtcctcccggaagcagaggcgcctcaggacccgcgggtgttaggggcccaaatggtgacgcaggtagacctggcgagcccggactgatgggacccaggggattgccaggaagccccggcaacatcggtcccgctggcaaagaaggacctgtgggactcccgggcatcgacggccgccccggtccaataggccctgccggcgctagaggtgagcccggaaacataggcttcccaggtccgaagggaccaacaggagaccccggcaaaaacggcgacaagggtcatgcaggccttgctggagctcgcggcgcacctggcccagatggaaataatggcgctcagggtccccccggaccccagggtgttcaaggaggtaaaggagaacagggccccccgggcccaccaggtttccaaggccttcccggaccctcaggtcccgctggagaagtgggaaaaccaggtgagaggggacttcacggcgagttcggccttcctggaccagccggcccgaggggcgaaagaggcccgcccggtgagtccggcgcggcaggtcctactggaccaatcggctcaagaggcccatccggtccaccaggtccagacggcaataaaggtgagcccggtgtagttggcgctgtgggtacagcgggtccatctggccccagcggtctcccgggcgagagaggtgctgcaggaattccgggtggcaagggagagaaaggcgagcccggactcagaggcgagatcggaaaccccggccgcgatggagcaaggggtgctcccggcgcagttggcgccccaggtcctgctggcgcaaccggcgacaggggagaggcaggcgccgctggccccgcgggtcctgctggccctaggggttcccctggtgagcgcggtgaagtcggaccagcgggccccaacggtttcgcaggacctgccggcgctgcgggccagcctggcgcaaaaggcgaaagaggagccaagggacccaagggcgaaaatggagtggtgggcccaaccggtccggtgggcgcggcgggcccagcgggtcctaacggccctccaggccctgcaggatccagaggagacggcggaccccccggtatgactggattcccaggtgcagccggcaggacgggacctccaggcccgagcggtatcagtggtcctccaggccccccgggacccgctggtaaggagggcctgcgcggtcccaggggagaccaaggtcccgttggtcgcacaggcgaagttggcgctgttggccctcccggattcgcaggtgagaagggaccttctggagaggcaggtaccgcgggaccaccgggaacacctggacctcagggtctgctgggtgctcctggcatactgggactgcccggcagtagaggtgagcgcggcctcccgggagttgcgggtgcagtcggtgagccaggccccctcggcatagctggccctccaggtgcccgcggccctcctggtgcggtcggatctcctggagtcaatggcgctccaggagaggcgggaagagacggtaatccaggcaacgacggcccgccgggcagagatggacaaccaggtcataagggcgagagaggttatcccggcaatatcggcccggtgggcgccgccggagctccaggaccccacggtcccgtgggcccggctggaaagcatggtaataggggcgagacgggtccatccggccccgtgggaccagccggcgccgtgggtcccaggggaccgtccggtccccagggaatcaggggagataagggtgagcccggtgaaaagggaccgcgcggtctgccgggacttaagggtcacaatggcctgcagggacttcccggaatagccggccaccatggagaccaaggtgcaccaggaagtgtgggtcccgccggcccgagaggacctgcaggaccctccggacctgctggaaaggatggcagaaccggccatcccggaactgtgggtccggccggtattagaggtcctcaaggacaccaaggtcccgccggtccacccggacctcctggccctccaggtcctcccggcgtgtctggaggtggctacgacttcggatatgacggcgatttctatagggctgatcaacctaggagtgctccttcactgaggcctaaggactacgaggtcgacgccacactgaagtccctcaataaccagatcgagacgctgctgacccccgagggttccaggaaaaaccccgctaggacgtgtcgcgacctgcgcctgtcacatccagagtggtcttcaggctattactggatagaccccaaccagggatgcacaatggatgctatcaaggtatactgcgacttttctactggcgagacttgcatacgcgctcagcctgagaacatccccgccaagaactggtacagatcctctaaggataagaagcatgtatggctgggcgagacaattaatgctggttcccagtttgaatacaacgtggagggtgttactagcaaggaaatggcaacccagttggcttttatgaggttgttggccaattacgccagtcagaacataacttaccactgcaagaactctattgcttatatggacgaagagactggtaaccttaagaaagcggttattctgcagggaagtaacgatgttgagttggtggcggagggtaactctagattcacatatacggtccttgtggacggatgctctaaaaagacgaacgaatggggaaaaacaatcatcgaatataagaccaacaagccctccaggcttcctttcctcgacattgctcctttggatatcggaggtgctgatcaagaattctttgtagacatcggtccggtttgtttcaag

SEQ ID NO: 32501 - DNA, 4098 bp, synthetic construct
  misc_feature 1..4098: note = Description of Artificial Sequence: Synthetic coding sequence
  source 1..4098: mol_type = other DNA
atgctgtcattcgtggatacccgtactctcctcctgttggccgtgaccttgtgcctcgccacctgccagtctcttcaggaagaaacggtcagaaaaggaccggccggtgatagaggcccacgcggggaaagaggtccgccgggccctccaggccgcgatggggaggatggtcctacgggccctcctgggcccccgggtcccccaggaccgcctggtctggggggcaacttcgcggcccagtacgatggcaagggcgtgggcctgggaccagggccaatgggactcatgggaccgagagggcccccaggcgccgctggtgccccgggcccgcaaggatttcagggtccggcgggagagccgggggaaccgggacagactggtcccgcaggtgctcggggtcccgcaggaccgccgggtaaggccggggaagatggacatccgggaaagccaggacgcccgggcgaacgtggggtggttggaccccaaggcgcacgcggattcccgggaacgccgggcctccctggcttcaagggaatccggggacataatggactggacggactcaaggggcaacctggcgcaccgggcgtgaagggggagcctggcgcacctggagaaaacggaactcctggacagaccggagcgcgagggctgccaggcgagagaggacgggtgggagcacctggcccggcgggagcgcggggaagcgatggcagcgtgggccctgtcggtcccgcgggtccgatcggctcggctggaccgccaggattccccggagctcccggcccgaaaggagagatcggcgccgtgggaaacgcaggaccggcggggccggcgggcccgagaggagaagtcggtttgcctgggttgagcggaccagtagggcctccaggaaacccgggagcaaacggcctgaccggtgccaagggggctgcgggactgcccggtgtggctggtgctccaggactcccaggtccacgcggaattcccggtccagtcggagctgcaggtgccaccggcgcgcgcggacttgtaggcgagccgggccctgctgggtcgaagggggagagcggaaataagggtgaacccggttcagcgggcccgcagggacctcctggaccttcaggggaagaaggcaagcgcggaccgaacggtgaagctggttccgcgggacccccaggcccacctggccttcggggttcgccgggctcccgcggactcccgggggccgacggtcgtgcaggggtgatgggccctccgggctcgcgcggagcgagcggacccgccggagtgcggggaccgaacggggatgccggtagacctggagagccaggactgatgggaccccggggccttccggggagccccgggaacattggaccagcaggaaaagaggggccggttggcttgccaggaattgacggtcggcctggaccaatcggaccagccggcgcccgcggagagccgggcaatattggcttcccagggcctaagggaccgactggagatccgggaaagaatggcgataagggacatgcgggactggccggagcacgcggtgctccagggcccgacggaaataacggagcccaggggccgcccggaccgcagggtgtccaggggggaaagggcgagcagggaccgccggggcccccggggttccaagggcttcccggaccgtctggccctgcgggagaggtcggaaagccgggagaaagggggctgcacggggagttcggcctccctggaccggcaggcccccgcggagagagaggacccccgggcgagtccggcgccgccggaccaactggaccgatcggctccagagggccgtccggaccacctggaccggacgggaacaagggcgagccaggggtggtcggagctgtcggaaccgctggaccctcgggaccaagcgggctcccgggagagcgaggggctgccgggattccgggaggcaagggggaaaagggtgaacctggccttaggggtgagatcggaaacccgggccgcgatggcgctcgcggcgcgccgggtgcggttggggcacccggtcctgctggagcaactggcgaccgcggcgaagcgggtgccgccggcccagcaggtccggcaggtccgcggggttcacctggagaacgcggcgaggtgggcccagccgggcctaatggttttgcaggtcccgccggtgcggcgggccagcctggggccaagggggagcgtggagccaaaggaccaaagggcgaaaatggagttgtgggaccaaccggaccggtgggagccgcagggccggcaggaccgaatggaccaccgggaccagcgggaagtaggggtgacggaggtccgcccggaatgactgggttccccggtgcggcaggcagaaccggaccgcctgggccgtcgggaatctcgggcccaccaggtccacctgggccagcgggaaaggaaggactgcggggacccagaggagatcaaggccctgtgggacggactggcgaagtgggagcggtcggccctcctggttttgccggcgaaaaaggcccatccggggaggcggggaccgctggcccgcccgggacccctggtccgcagggactcctgggcgccccaggtatcctggggctgcctggctcccgcggtgaaaggggtctgcctggtgtggctggagcagtcggagaacctggacctctggggatcgccggtccgccgggggcgaggggtccgccgggagccgtgggaagcccgggggtgaacggagcccctggcgaagccgggcgggacggtaatccaggaaatgacggtcctccagggcgagacggacaaccaggacacaagggagaaagaggatacccaggaaacattggcccggtcggagccgccggcgccccgggaccacatggtccagtcggccctgccggcaagcacggaaacagaggagaaactggaccgtcgggaccggttggtcctgctggcgctgtgggaccgcggggaccttccggtccacaaggaatccgcggagacaaaggcgagccaggagagaagggacccaggggattgccggggctcaaaggacataacggactccaaggactgccgggaatcgcaggccaccacggcgaccagggggcccccggcagcgtcggccccgctggaccgaggggcccggcaggtccctcgggaccggcgggaaaagatggaagaactggacacccgggaactgttggaccggccggcattcggggacctcaaggacaccaagggccggccgggccccctggcccaccaggcccaccagggccaccaggcgtgtccggagggggatacgacttcggatacgacggcgatttctaccgggcggaccagccacgctcagccccgtcgctgcgtccgaaggactacgaggtcgacgccacccttaagtccctgaacaaccaaatcgaaacgctcctgaccccagagggatccaggaagaacccggcaagaacctgtcgtgacctccgcctttcacacccggaatggtcgagcgggtactactggattgaccctaaccaaggatgcactatggacgcgatcaaagtgtactgcgatttctccactggagaaacttgtatccgcgcccagccggaaaacatcccggcgaaaaactggtaccggagctcgaaagacaaaaaacacgtctggctgggagaaactatcaacgccgggtcccagttcgaatacaatgtggaaggagtgacctcgaaggaaatggccacccagctcgctttcatgcgactcctggccaactacgcctctcagaacatcacctaccattgcaagaactcaatcgcctatatggacgaggaaaccggaaatctgaagaaggctgtgatactgcagggatcgaatgatgtagaactcgtggccgagggcaactcaaggttcacctatactgtgctggtcgacggttgctcaaagaaaactaatgagtggggtaagaccatcatcgaatacaagacgaataagccgagccgcctgcctttcctggatatcgctccgctggacatcggaggagcggaccaggagttttttgtggacataggcccggtgtgttttaag

SEQ ID NO: 32502 - DNA, 4098 bp, synthetic construct
  misc_feature 1..4098: note = Description of Artificial Sequence: Synthetic coding sequence
  source 1..4098: mol_type = other DNA
atgctctcattcgtggatactcgcacccttctgctccttgcagtgactctttgtctcgcaacctgccagagcctgcaagaggaaactgtcaggaagggtccagccggtgacagaggcccacgaggagaacgagggcctcctggaccgcctggaagagacggggaagatggacctaccggacctccaggtccccccggcccccctggtccccctgggctcggcggtaactttgcagcgcaatacgacggtaagggagtcggtctgggacccggaccgatgggcctgatgggtccacggggaccacctggtgcagccggcgcacctggtccgcaaggtttccagggacctgcgggcgaacctggagaacctggacagaccggtcctgcaggggctcgaggaccagcagggccccctggcaaggcaggtgaggatggtcacccaggaaagcctggcagacccggagaacgaggagtggtgggtcctcaaggtgcacgcggttttcctggcacgcccgggcttcctggatttaagggtatcagagggcataatggcctcgacggcctgaaaggacaaccaggagcaccaggcgtcaagggagaacctggtgcacccggagagaacggaactccagggcagaccggggcacgcggcctgccgggggaacgtggaagagtgggtgcccccggtccggctggagcaaggggtagcgatggatcggtcggaccagtcggcccggcggggccaatagggtccgcaggcccgcctggcttcccaggcgcgcccggccctaagggcgagattggggctgtgggaaacgcaggaccggctggtccggcggggccgcgcggtgaagtcgggttgccaggactctcgggaccagttgggcctccggggaatcctggcgcgaacgggcttacgggtgcaaagggtgccgcaggcttgccaggagtggccggagcaccaggacttcccgggccccggggcattcctggccccgtgggggcggccggggccaccggtgcgcgcggtctggtgggtgagccaggacccgctgggtcgaaaggagagtccggaaacaagggggagccaggctccgcgggcccccagggccccccgggcccttcgggagaagaggggaagcggggacctaatggggaggcgggctcagctgggccacccggcccacccggcttgcggggctcacctggttcaaggggactgcctggggcggatgggagagctggtgtcatgggacccccagggagcagaggggcatcggggcccgctggagttagagggccaaatggagatgcaggtcgccctggtgaaccaggcctcatgggaccaagggggcttcccggatcgcctggcaacatagggcctgccggtaaggaagggcctgtgggccttcctggtattgacgggcgtccgggccccatcggtcccgcgggcgcacgaggcgaacccgggaatattggctttcctggcccaaagggacccaccggagatcctggaaaaaacggtgataagggtcatgctggtctggcaggagcgcgaggtgctccaggccccgatggaaacaacggggcacagggacctcctggacctcagggcgtgcaagggggaaagggagaacaagggccaccaggtccgcccggattccaaggcctgccagggccttctgggcctgcgggggaagtgggcaaacctggcgaacgtgggctccatggtgaattcggcctgcctggcccagccggaccacgcggagaaaggggacccccgggtgaatccggtgccgcgggtcctactggacctattggatcgcgggggccctcgggaccgccagggcctgatggaaacaagggtgaacctggagtggtgggagccgtcggtaccgcaggtcccagtggaccaagtggtctgccgggagaacgcggggcagcaggcatccccggaggtaaaggagagaagggggagcctggcttgagaggagagatcggaaaccctgggagagacggcgcacgcggcgcacccggtgctgtcggggcgccagggccagcgggagcaaccggagatcgaggcgaagcaggagccgcaggcccggcagggcctgctggcccgagaggatcgccaggtgagaggggggaggtgggacctgcagggcctaacggatttgctggaccggcaggagcagccggacaacccggcgctaagggagagcgcggagccaagggacccaagggagagaacggtgtcgtcgggcccactggaccagtgggtgcagcaggaccggcggggcctaatggtccacctggacctgcgggatccaggggtgacggcggccccccggggatgaccgggttcccaggggcagcagggcggacggggccaccagggccgagcggtattagcggacctcccggtcctccaggacctgccggtaaagaaggtttgcgtggcccccggggtgaccagggaccagtggggcggactggcgaagtgggggccgtgggaccacccggattcgcaggggagaaaggaccttccggggaagcgggtaccgcagggccgcccggtacccctggaccacaagggctcctgggcgcaccaggaattcttggcctccctggatcaagaggtgaaagaggacttccaggtgtggcaggcgcagtaggggaaccaggaccactcggaattgcagggccacctggagcacgtggtcctcctggggccgttggtagccccggggtgaacggagctcccggagaggccggacgggatggtaaccccggtaatgacggccctcctggacgtgatggtcaaccaggacataaaggggaaagaggttaccccggcaacatcggtcctgtgggagcagcaggtgcaccgggccctcacggccccgtgggcccagccggtaagcatgggaaccgcggtgaaactggtccttcaggtcctgtcggacctgcaggtgcagtcggtccaagaggtccaagcggtccacaaggaatcagaggcgataagggcgagcccggggaaaagggacctcgtggactgcctggacttaagggccataatggacttcagggactcccgggtattgccgggcaccacggtgatcaaggggcaccgggatcagtcgggccggccggacctagagggccagccggtccctcggggcccgccggtaaggacggacgcaccggacatcctggaaccgtgggccctgcaggaatacgggggccacaaggtcaccaggggccagcaggaccacctggcccgccgggaccgccggggcctccaggtgtgtccggtggaggatatgattttggctacgatggagacttttaccgggcagaccaacctaggagcgccccttcgctgaggccgaaggattacgaggtggatgcaactcttaagagcctcaataaccaaatcgaaactcttctgacccctgaaggttcaaggaaaaatcctgcccgcacctgccgtgatttgcggctgtcacacccagagtggtctagcggatactactggattgaccctaaccagggatgtaccatggatgctattaaggtgtactgtgatttttccactggagaaacttgtattcgggcacagccagagaatatccctgcaaagaattggtatcgctcctcaaaggacaagaaacatgtgtggttgggcgaaaccatcaacgcggggagccagtttgaatacaacgtagaaggggtgacttcgaaggaaatggcaacgcagcttgcatttatgaggctgcttgccaattacgcatcccagaacatcacttaccattgtaaaaactcgattgcgtacatggatgaagaaacggggaatctgaaaaaagccgtgatcctgcaagggtccaacgacgtggaactggtggcggaagggaacagccgtttcacgtacacggtccttgtcgatggctgctctaagaaaactaacgagtggggtaaaactatcattgaatacaagaccaataagccatcgagacttccatttcttgatatcgcgccactggacataggcggagcagaccaagaattctttgtggatattggtcctgtttgttttaag

SEQ ID NO: 32503 - DNA, 4098 bp, synthetic construct
  misc_feature 1..4098: note = Description of Artificial Sequence: Synthetic coding sequence
  source 1..4098: mol_type = other DNA
atgctgtcattcgtggacaccagaactcttctgctgctcgctgtgaccttatgtctggccacttgccagagtcttcaggaagaaacagtaagaaaagggccggccggtgatcgcgggcccagaggcgagagaggacctccagggcctccagggcgggacggggaggacggtcctacgggaccacccggtcctccgggccccccaggtccaccaggcctgggggggaacttcgcggctcagtatgacgggaaaggagtgggactgggcccaggtcctatgggactcatgggcccccggggaccacctggagctgccggggctcctggcccacagggcttccaaggcccagctggcgaacccggagaaccagggcagaccggcccagccggtgcaaggggccctgctggtcccccaggcaaagcaggtgaggacgggcaccccggtaagcctggccgacctggggagagaggggttgtaggacctcaaggcgccagaggatttccaggtacacctggtctgccaggatttaagggaatacgaggccataacgggctggatggcctgaaaggccaacccggggctcccggggtgaaaggggagcccggggctcccggcgagaacggcacccccgggcagacaggagctcggggtctgcctggggagcggggacgagtcggagcacccggtcccgccggtgctagggggtctgatggttccgtggggcctgtgggccccgccggaccaataggctctgccgggccccctggtttccccggcgctccagggcccaagggagagatcggcgccgtcggcaacgccggtcccgctgggccggcgggtccaaggggtgaggtgggtctgcccgggctctcgggcccagtgggtccccctggcaaccccggcgccaacggacttacaggcgcgaaaggggccgcaggcctccccggagtggccggtgcacctggtctgcctgggcctaggggcattccaggacctgtgggagcagccggagcgactggtgctagagggttggtgggtgagccggggcccgctggcagtaagggagagagtggaaacaagggtgagccagggtccgccggaccgcagggtccacccgggcctagtggcgaggaagggaagagggggcctaatggggaagccgggtcagccgggcctcccgggcctccgggcctgagggggtcacctggctcccgcggacttcctggagccgacgggagagcgggggtcatggggccgccagggtcccgcggggcctccggtcctgcaggcgtcagaggccccaatggcgacgctggacgtcctggcgagcctggccttatgggcccacgaggacttcccggcagtcccggaaacatcggtcccgcgggaaaagagggtcctgtcggcctgccaggtattgatggaagacctgggccgatcggtcccgctggtgcacggggtgagcccggcaacatcggcttccccggccctaagggaccaacaggcgatcccggcaagaacggtgacaagggtcatgctggcctggctggggcccggggggcacctggcccagacgggaacaatggcgctcagggcccacccgggcctcaaggtgttcagggcggaaagggcgagcagggcccccccgggccccctgggttccaaggactaccagggcctagtggcccagccggcgaggtggggaaaccgggagaaaggggcttacatggtgaatttggtctccccgggcccgcggggccaaggggcgaaagaggccctcctggcgagagcggcgctgcagggcccaccggaccgattggctccagggggccctctggcccaccaggccccgacggaaataaaggcgaacccggggttgtgggagcagtgggtaccgctggaccttctggcccttctggcctgcccggtgagcggggcgctgctgggataccaggcggtaagggcgagaagggggagcctggactgcgtggagagattggaaatcccggtcgagacggtgctcgtggtgcacccggcgcggtcggcgcgcccggccctgctggtgcaactggggaccgaggcgaagctggcgccgcgggacccgctggccccgccggaccgagaggatcacctggcgagaggggagaggtcggacctgccggaccgaacgggtttgcaggaccagccggtgctgcgggccaacctggtgcaaagggggaacggggagcaaaaggccctaaaggagagaacggtgttgttggccccactggcccagtaggcgcagcaggcccggcgggacccaacggacccccagggccagccggctctcggggggatggagggccacccggaatgacggggtttccgggcgcagcggggagaactgggcctcctggtccctctgggattagtggccctcccggcccccccggacccgctggcaaggagggactacgaggaccacgtggagatcagggacccgttggacgcaccggcgaagtcggtgcggtcgggccccctgggtttgctggggagaaggggccctcaggggaggctggtacggcaggcccccccggaacgcctggcccgcagggcctcctgggagctcccggaatcctgggcctgcctggctccaggggagaaaggggccttccaggggtagccggagcagttggagagccaggaccactgggcatcgcaggacctcctggagctagagggcccccgggcgcagtgggaagccctggcgtgaatggcgcaccaggtgaggctgggagagatggtaatccgggtaacgacggtcccccaggtcgggatggacagcctggccataagggcgagcgtggctacccgggcaatattggacccgtgggagccgccggagcccctggtccccacggaccggtggggccagccgggaaacacggcaacagaggcgagaccggtcccagcgggcctgtcggtcccgctggagccgtgggtcccagaggacccagcgggcctcagggcataaggggtgacaagggggagcctggggagaaaggcccgaggggtttgccaggcctgaaaggacacaatggtctgcaaggcctcccaggaatagctggccatcatggtgaccagggagcccctggatctgttggacccgccggccctcggggaccagcagggccctcaggccctgccggtaaggacggtcgtactggccatccaggtaccgtggggcccgcaggcatccgaggcccacagggacaccagggaccggccggccctccgggcccccctggacctcctggcccccctggggtgtcaggtggcggatatgacttcggttatgacggggacttttaccgggctgaccagcctcgttccgctccctccctgcggcccaaggactacgaggtggatgcgactcttaaaagcttgaacaaccagatcgagactctgttgacccctgagggctccaggaaaaatccagccaggacatgcagagacttaaggctttctcatccggaatggagctcaggctactactggattgaccccaaccaggggtgcactatggatgccataaaagtgtactgcgattttagtaccggcgaaacctgcatcagggcccaaccagaaaacattcccgccaagaactggtatagaagtagtaaggataagaagcacgtgtggctcggcgaaaccattaacgcagggtcccagttcgagtacaacgtcgagggtgtgacaagcaaggaaatggctacacagctggcattcatgagattgttagccaattacgcctcacagaatataacatatcactgcaagaacagcatagcatacatggatgaagaaacaggcaaccttaaaaaggcagtgatcttacagggctccaacgacgtggagcttgtagctgaaggtaacagtcggtttacgtacacggtgcttgtcgacgggtgttcgaagaagacaaatgaatggggcaaaacgatcatagagtataaaaccaacaaacccagcagactgccatttctggacatagcccccttggacataggtggggcagaccaagagttcttcgtcgatattggacccgtgtgctttaag

SEQ ID NO: 32504 - DNA, 4098 bp, synthetic construct
  misc_feature 1..4098: note = Description of Artificial Sequence: Synthetic coding sequence
  source 1..4098: mol_type = other DNA
atgcttagcttcgtggatactagaactctgttgctgctcgccgtgaccctctgtctcgcgacctgccaaagcctccaagaagaaaccgtgcggaaaggcccggcgggagatcggggccccaggggcgaacgcggaccgcctgggccaccggggagggatggcgaggacgggcccactggaccgcctggtccgccaggccccccgggcccccctgggctcggagggaattttgcagcgcagtacgacggaaagggggtgggactcgggccaggaccaatgggtctgatgggccctcgggggcctccgggggctgccggcgcccctggaccgcaggggttccagggtccagctggagagccaggagaaccaggtcagacgggcccggccggggcgcgcgggccagccggtcctcccggaaaggccggagaagatggtcacccgggaaaacccggccggcctggtgagaggggggttgtgggcccgcagggggcccgaggatttccgggcaccccaggtctgccaggattcaagggcattcgcgggcacaacggtctggacggccttaaggggcagccaggtgcaccgggagtgaaaggagaaccgggagcacctggcgaaaacgggaccccgggacagacgggcgccagaggacttccaggggagcggggacgggtgggagcaccggggcctgctggcgcccgcggttccgacggaagcgtgggaccggtaggacctgcaggcccgatcggaagcgcaggacccccgggatttcccggcgccccgggcccgaaaggtgagatcggagcggttggcaacgccggacccgcgggaccagccggccctcgcggcgaggtcggcctgccaggactgtcagggcctgtcggacctccggggaaccccggtgccaacggactgactggagcaaagggtgctgcggggcttccgggagtggctggggctcctggtctgcccggaccgcgtggaatacctggaccggttggagccgctggtgcaacgggtgcgcgaggcctcgtgggcgaacccggaccggcagggtcgaaaggagagtccggcaacaagggagagccagggtccgcgggaccacaaggtcccccggggccgtcaggagaagagggaaaaagaggaccaaacggcgaagcaggatccgccgggccgcccggtccgccgggtctgagaggttcaccgggttcgagaggactgccaggcgcagacgggcgggctggagtcatgggaccacctggtagccggggagcgtcgggtccagccggagtcagaggaccgaacggtgacgcggggaggcctggcgaacctgggcttatgggaccgagagggctgccgggctcaccgggcaacattggaccggctggaaaagaaggaccggtgggcctgcccggcatcgatggccggccaggaccgattggcccagcaggagcccggggggaaccgggcaatattggattcccgggaccgaagggacctaccggcgatccggggaagaacggggataaaggacatgccgggctggctggcgcgcgaggagcgccaggaccagacggaaataacggtgcccaaggtccgcctggaccccaaggcgtgcagggaggcaaaggcgagcagggaccgccaggtcctccagggttccaggggctgcctggtccgagcgggccagcgggtgaggtaggtaagccaggggaacgcggactccatggagagttcggactcccgggcccggcagggccacggggtgagcgcggtccacctggcgaatcaggcgccgctggaccgactggaccaatcggatcgcggggtccgtccggtccccccggtcctgacggaaacaaaggggaaccgggagtggttggggccgttggaaccgctggcccgtctggaccgagcggcttgccgggtgagagaggtgccgcgggaatcccaggaggaaagggagaaaaaggagagcccggactgcgcggtgagattgggaatcccggacgcgatggagcccgtggagctccaggggcggtgggagctcccgggccggcaggggccactggcgaccggggcgaggccggcgcggccggacctgcaggaccggcggggcctcggggcagccccggcgaacgcggtgaggtcggacccgccggccctaatggcttcgcaggaccggccggggctgctggccaaccaggggcgaagggagaacgcggagccaagggccccaagggagagaacggcgtcgttgggcctaccggacctgtgggcgctgctggccccgcagggccaaatggacccccaggcccagcggggtcgcgaggagacggcggtcctccggggatgaccggattcccaggtgccgccgggcgcaccggcccgccaggaccttcgggaatctcgggaccgccggggcctcctggccctgcagggaaggaaggcctccgcggtccgagaggagatcagggcccagtcggccgcactggtgaagtgggagcagtgggtcctcctggattcgccggcgagaaaggtccttcaggagaagctggtactgctgggcccccgggaaccccaggaccccaaggtcttttgggcgctcctggtatcctcgggctgcctggctcgagaggggaaaggggactgccgggagtggccggtgctgtgggcgagccgggaccactcggcatcgcgggcccgccgggagcaagaggaccccccggcgctgtgggatccccaggcgtgaatggagcgccaggcgaggcgggacgcgacgggaacccaggtaacgacggacccccgggtcgggacggtcagcctggacacaagggcgaacggggttacccaggaaatatcggaccggtgggagcagctggggcgccgggtccccacgggccagtggggccggccggaaaacacggcaacagaggcgaaaccggcccgtcggggccagtcggccctgcaggcgccgtcggaccgcggggacctagtggtccgcaaggcatccgcggggataagggtgaaccaggggaaaaggggcctcgtggacttccggggttgaaaggccacaatggtctgcaggggctccccggcatcgctggacatcatggggaccagggagccccaggatccgtcggcccagcgggaccaaggggaccggcaggacctagcggtcccgcaggaaaggatggaagaacgggacacccgggtaccgtcggaccagcaggtatccgcggcccacagggccaccaaggacctgcggggccgccggggccgcccgggcctcccggaccgccaggagtgtcaggcggtgggtacgacttcggatacgacggagacttctaccgcgccgatcagccgcggtccgccccaagcctccgcccaaaggactacgaagtcgacgccaccctgaagtcactgaacaaccagatcgagactctgctgactcctgaagggtcacgcaagaatccagcccggacttgccgcgacttgcgcctgtcccatccagaatggtcctcgggatactactggattgacccgaatcagggatgcaccatggatgcgatcaaggtgtattgtgatttctcgactggagaaacgtgcatccgtgcccaacccgagaacattccagctaagaactggtacagaagctctaaggacaagaagcacgtctggctgggagaaactatcaacgcaggatcacagttcgagtataatgtggaaggagtgaccagcaaggaaatggccactcagctcgcgttcatgaggctcctggcaaactacgcctcgcagaacatcacctaccattgcaagaactcgatcgcctacatggacgaggagactggtaatctgaaaaaggcggtcatcctgcaaggctcgaatgacgtcgagctggtggcagaaggaaactctcgcttcacctacaccgtacttgtggacggctgttccaagaaaactaatgaatggggcaagaccatcatcgagtacaagactaataagccgtcccgattgccgtttctggacatcgcaccactggatatcggaggagcagatcaagagtttttcgtggatatcgggccggtgtgctttaag

SEQ ID NO: 32505 - DNA, 4098 bp, synthetic construct
  misc_feature 1..4098: note = Description of Artificial Sequence: Synthetic coding sequence
  source 1..4098: mol_type = other DNA
atgttgtcatttgtggacacaagaactctgctgctgctggcggtgaccctttgcctggcaacttgccaaagcctgcaggaagagaccgtgcgcaaagggccagctggggataggggccctagaggtgaaaggggccccccaggccctccgggaagagatggcgaggacggacctactggaccacctggaccaccaggacctcctggacccccagggctggggggcaatttcgccgctcagtatgatggaaagggggtgggcctggggccaggtcccatgggactgatggggccccgaggccctccgggagccgcaggcgcaccagggccccagggcttccaggggccagcaggggaacctggagagcctggacagactgggcccgccggtgctcgaggtcctgccggtccccctggtaaagccggagaagacgggcacccgggaaaacccggccggccgggcgaacgcggtgtggtcggccctcagggagctcgaggattccctggcactcctgggctgccagggttcaagggaattaggggccacaacggcttggacggcttgaagggacaaccgggggctccaggggtgaagggagaaccaggtgctcccggtgagaatgggacgcccggccagacgggcgcccggggactgcctggagagcgcgggagggtaggtgcccctggtccagcaggcgctcgaggctctgacggatccgtcggacccgtgggccccgccggaccaattggatccgctgggccccccggcttcccgggagctccaggacctaagggagagattggagctgttggaaacgcaggccctgcgggacccgcaggccccagaggcgaggttggactgccaggcctgtccggacccgtagggccacctggaaatcctggcgccaacggcctcacaggagctaaaggagccgctgggcttccgggggtcgcgggtgcacccgggctccccgggcccagaggcatcccgggtcccgtgggagccgctggcgctacaggggcgcgggggcttgtcggcgagccgggtcctgccggatccaagggtgaaagtggcaacaagggcgagccaggcagtgcgggtccacaagggcctccgggaccatctggggaagaggggaagagaggacccaacggggaggctggcagcgctggaccaccagggccgcctggcctgcgaggaagccccggttctcgcgggttgccaggcgctgacggcagagccggggtcatggggcctccaggatccagaggcgccagtggacctgcaggagtaagagggccaaatggcgacgcaggacggccaggcgaaccgggactgatggggccaagggggttgcctggtagtccagggaatattggaccagcagggaaggaaggccctgtgggtctcccgggaattgatggacggcccggacccattggtcccgctggggcccgaggagagcctggcaatataggattccctggccccaaaggacccaccggagatcccggcaaaaatggcgacaaagggcatgctggactcgccggtgcacgcggcgcaccgggcccagacggcaacaacggcgcccagggccccccaggcccacagggggtccagggcggaaaaggcgagcagggcccccccggccctcctgggtttcagggattgccgggccccagtggccctgccggcgaagtgggcaagcctggtgaacgggggctccacggtgagtttgggttgccagggcccgcagggccaaggggagaacgggggccacctggtgaatccggagcagctgggcccaccggccccattggcagtcgggggccatccggtccccctggaccggatggtaataagggcgagcccggggtagtaggagcagttggcacagctggcccatcaggcccttccgggttgcctggcgaaaggggggccgccggcatccctggtggcaagggggagaaaggggagccagggctgaggggcgagataggcaacccaggtcgggatggtgcccggggtgcaccaggggcggtcggggctccaggacctgcaggggccactggggatagaggggaagccggcgctgcgggcccagccggtcccgccgggcctcgggggagcccaggggagagaggcgaagttgggcccgcagggcccaatggatttgcaggaccggccggagccgccggacagccgggggcaaaaggagaacgaggtgctaaaggccctaagggagagaacggtgtcgtgggcccaaccgggccagtgggcgccgctggaccggccgggcctaatggcccgcccggccctgcgggatcccgaggtgacggtgggccccctggcatgactggatttcctggcgcagccggccgcacggggcccccgggaccttctggtattagcgggcctcctggtccccccggcccggcaggcaaagagggactccggggcccgaggggtgatcaggggcctgttggtaggactggcgaagtaggcgcggtgggaccacccggattcgctggtgagaaggggcccagtggagaggcggggaccgcggggccccctggaacgccaggaccacagggactgcttggcgcccctggcatactgggtttgccaggaagccgcggtgagaggggtctgccaggggtggcgggcgccgtgggagaacctggccccttgggaatcgcaggcccccccggagcccggggtccaccaggggctgtgggctcccccggcgtgaacggcgcgccaggggaggccggtagggacgggaatccaggcaacgatgggccgcccgggagagatggccagcccgggcacaaaggcgagaggggctaccccggtaacatcggacctgtgggcgctgccggcgctccaggacctcacgggcctgtgggacccgccggaaaacacggcaacaggggggaaacaggccctagtggacctgtgggcccggccggcgcagttggccctaggggcccctcaggaccccagggtataagaggagataagggcgagcctggagaaaaagggccccgcgggcttccaggtcttaaggggcataatggcctccagggcctgccaggtattgctgggcaccacggagaccagggcgcccccggtagtgttgggcccgccggacctagggggccagccgggccttcagggcctgccggtaaagacgggcggacagggcaccccggcacagtggggccggccggcatccggggaccgcagggtcaccagggtcctgccggtccccccgggcctccgggacccccaggacctccgggcgtgtccgggggcggttatgactttggctacgacggagatttttaccgggccgatcagcccagaagcgctccttctcttcgacctaaagactacgaggtggacgccacactcaagagcctgaataatcaaatagaaactctgttgactccagagggatctaggaagaacccagcccgcacttgccgcgacctgcggctgagtcacccagaatggagtagtggatactattggatcgatcccaatcaggggtgcacaatggatgctatcaaggtctattgtgattttagtaccggtgagacgtgtattcgggcccaaccggagaacattccagccaaaaattggtaccgctcctccaaggacaagaaacacgtgtggttgggggaaaccatcaacgccggatcccagtttgagtacaacgtcgaaggagtaactagcaaggagatggctacacagcttgcattcatgaggctgttggcgaattatgcaagccagaatataacctatcactgcaaaaactccattgcatacatggacgaagaaaccgggaaccttaaaaaagccgtgatcttgcaaggaagtaacgacgtcgagctggtcgccgagggcaacagccgctttacctacacagtcttggttgatgggtgctctaaaaagacaaatgaatggggaaagacgatcatagagtacaagaccaataagccgagtaggctgccatttctcgatatcgcacctctggatatcggaggggccgaccaagagtttttcgtggatattggtccagtatgcttcaaa

SEQ ID NO: 32506 - DNA, 4098 bp, synthetic construct
  misc_feature 1..4098: note = Description of Artificial Sequence: Synthetic coding sequence
  source 1..4098: mol_type = other DNA
atgctctcttttgttgacacccgcactctcctcctcttggccgtaaccctatgcctggcaacctgccagagtctgcaggaggagactgtgcggaaaggcccggccggtgaccggggcccgcgcggtgagcgggggccacccgggccacccggacgcgatggcgaggatggccccacagggcccccgggtccacctgggccacctggtccgcccgggctgggtggaaattttgctgcccaatacgacggcaagggagtcgggttaggccccggccccatggggcttatggggcctcgcggtcccccgggggccgccggagcaccagggcctcagggtttccagggccccgccggggaaccgggtgaaccggggcagacgggccccgccggcgcccgaggccctgctgggcctcctggtaaggcgggtgaggacgggcaccctggtaagcccggacggcccggggaaagaggggtggttggtccccagggggccaggggcttcccgggtacgcccggtctgcccggcttcaagggcattcggggacacaatggtctggacggactgaaaggccagcctggcgcccccggggtaaaaggagaacctggggcgccaggggagaatggcacccccggtcagacgggagcgcggggcctgccaggcgaaagaggaagggtcggcgctccaggaccagctggtgcccggggctccgatggatcggtgggacctgtgggaccggctggtccgattggtagtgccgggccccctgggtttccaggcgcaccgggacctaagggcgaaataggcgccgtgggaaacgccggccccgctgggcctgctggacctagaggtgaggtgggactgcctggcctatccggccccgtcgggcctcccggtaatcccggggcgaatggcttaaccggagctaaaggtgccgccggcttgcccggcgtcgccggcgcacccggcttacctggccctagaggaatcccaggtcctgtgggggcggcgggcgccactggagctcgggggctggttggagagccagggccggctggctccaaaggggagagcggcaacaagggcgagcccggaagcgccgggcctcagggaccgcccgggccctctggcgaggaaggaaagcgcggacctaacggggaggccggcagcgccggccccccgggaccccccgggctgagaggcagcccaggatctcgcggactgccaggggccgatggaagggcgggcgtgatgggacctcctggcagcaggggcgcaagcggcccagccggcgttcgggggcctaatggggacgcaggaagacctggtgaacctggtctgatgggcccgagagggctcccgggctcgccagggaatatcgggcccgccgggaaggagggtcctgtggggctgccgggtatcgatggtcggccaggtcccattggcccagccggcgccagaggagagcccggaaatatcggcttccccggcccgaaggggcccacgggtgatccaggaaaaaatggcgataagggccacgccggactggccggagcgcggggcgcccctggcccagatggcaataacggggcgcagggtcccccaggtcctcagggcgtgcaaggcggcaagggggagcaaggcccccctggtcctccaggcttccagggcttgcctggcccaagcggtcccgcgggagaagtcgggaaacccggggagcgcggtttgcacggtgagtttggactgccaggacccgccggtccccggggagagcgcggcccaccgggggagtccggcgctgctggcccgacaggcccaataggtagcaggggacccagcggcccgcccggccctgacggcaacaagggggagcctggagttgttggagcggtcggtacggcaggccctagtggtccaagtgggctcccgggagagcgtggagctgcaggcattcctggagggaaaggcgaaaaaggtgagcctggattgcgcggcgaaattgggaatccaggtcgggacggtgcccgtggggccccaggagctgtcggtgcgcccggacccgcaggggctacaggtgatcggggggaagcaggcgcggcagggccagccgggcctgccggccccagaggaagtccgggcgagcgtggggaggtgggaccggctggtccgaacgggtttgccggccctgccggtgctgccggccagccgggcgccaaaggcgagcgaggcgccaaggggcctaaaggcgaaaatggcgtcgtgggcccaaccgggccggtcggggcggctggacctgccgggcctaacggacccccaggccccgcagggtctcggggcgacggaggacctccaggcatgacgggtttcccgggcgccgcgggcaggaccgggccacccggcccttctggcatttctggcccccccgggccacccggacccgctggcaaggaaggcctaaggggccctaggggggatcagggtcccgttggtcgaactggcgaagtgggggctgtcggaccaccaggctttgccggagaaaagggcccctccggagaggcgggaactgccggcccgcccgggactcctgggccccagggtcttctgggtgcaccagggatcctggggttacctgggtcccgcggcgagagaggattaccaggggtggccggcgcagtgggtgagccgggtccgcttggtattgcgggcccacctggcgctcgcggaccaccaggggctgtgggaagccctggggttaatggcgcccccggtgaagccgggcgcgacggtaatcccggtaacgacgggccccccggccgtgacggccagccagggcacaagggtgagagagggtaccccggcaacatcgggcccgtaggcgcagcgggagcccctggcccacatggaccagttggacccgccggcaagcacggaaatcggggggaaaccgggccttcaggcccggtggggccagcaggggcagttgggccgagaggaccgagcggacctcagggtatacggggggacaagggagaacctggtgaaaaggggccccgaggacttcccggcctgaaagggcataatggactccagggccttccaggaattgctggccatcatggagatcagggggcccccggcagtgtgggtcccgccggaccccgggggccagctgggccctctggccctgcgggcaaggacgggaggaccggccatccaggtaccgttggacctgcaggtattagagggccacagggtcatcaaggacccgccggaccccccgggccaccagggcccccggggccacctggcgtcagcggaggaggttacgacttcggttatgatggcgacttctatcgggccgaccagcctcggagcgcccccagcctgcgtcccaaggattacgaggtggatgcaactctcaagtcgctcaataatcagatcgaaaccctcttgacaccagagggctcccgtaagaatcccgccaggacgtgccgtgatctgaggctgagccaccctgaatggagtagtggctactactggatcgatcctaatcagggatgcaccatggatgccatcaaggtttactgtgatttctccacaggtgaaacatgcatccgggcacagccagagaacattccggccaagaattggtaccggagctctaaggacaagaaacacgtgtggctcggagaaacgatcaatgcaggttcacagtttgagtacaacgtagagggagttacttcaaaagagatggccactcaactggccttcatgagactgctagcaaattacgcctcacagaacattacgtatcactgcaagaacagcatcgcatacatggatgaggaaacgggtaatttgaagaaagccgtcatcctccaggggtctaacgatgtggagctggtggctgagggcaacagtcgattcacttacactgtcctggtcgatggttgctcgaagaagactaatgagtggggcaagactataatcgagtacaagacaaataagccaagtcgacttcccttccttgatatagcacctctggacataggcggagctgaccaggagtttttcgtggacatcgggcctgtctgcttcaaa

SEQ ID NO: 32507 - DNA, 4098 bp, synthetic construct
  misc_feature 1..4098: note = Description of Artificial Sequence: Synthetic coding sequence
  source 1..4098: mol_type = other DNA
atgctttccttcgtggatactagaactctcctccttcttgccgttaccctctgcctggccacttgtcagtctttgcaagaggaaaccgtgaggaaggggcccgcaggggatcgtgggcctagaggggagcgcggtccccccggcccacccgggagagacggcgaagatgggccgaccggcccccctggaccacccgggcccccaggccctcccggtctgggtggtaactttgcagcacagtacgacggaaagggggtgggtcttggacctggacctatgggcctgatggggccaaggggacctcctggtgccgccggggcgcctggccctcagggatttcagggccccgccggtgaaccaggtgagcctggacaaaccggaccagctggagccagaggtcctgcggggccacccgggaaagcgggagaggacgggcatcccggtaaacctggtcgtccgggagaacgcggagtggtgggcccccagggtgcacgcggtttcccaggaaccccagggctccctggttttaagggtattcgtggtcacaacggtcttgacggacttaaaggacaacctggagcaccgggagtgaaaggggaacccggggccccaggcgagaatggtactcctggacaaactggcgcgagaggactccctggcgagcgtggcagagtgggtgcacctgggccagcaggcgcacgcggttcggatggatcggtcggaccagtcggaccggctggtcctataggatcggcaggtccacctggattccccggggcacccgggcctaaaggggaaataggtgcagtaggtaacgcaggcccagcgggccctgccggccctagaggcgaagtcggactgccaggattgtctgggcccgtgggacccccgggaaaccctggtgctaacggccttactggtgcaaagggcgcggctgggctgcctggcgtggcaggcgcccccggtctgcctggtcctaggggcattccaggtcctgtgggtgcagctggcgcaactggtgcacgcggccttgtgggagagcctggaccggcaggatccaaaggagaaagcggcaataaaggcgaacctggctcagcagggcctcaaggacctcccgggcctagcggggaagagggtaagagagggccaaacggtgaggcaggctcagcgggaccacctggaccaccgggactgaggggtagccctggaagcaggggtttgcctggtgccgacggtagggctggggttatgggtcccccgggttcaagaggggcatcgggtcctgccggagtccggggacctaacggagatgcaggcagacctggagaaccagggcttatgggccctcgcgggttgcctgggagcccaggtaacattggaccagccggcaaagagggtcctgtgggactcccgggaattgatggcaggccaggccctatcggtccggccggagctcgcggcgaaccgggcaacataggatttccaggaccaaaaggacccactggtgatcctggtaagaacggggacaaggggcatgcaggacttgccggcgcccgaggcgcacctggccctgatggtaataacggggcccaaggccctcctggtccacaaggagtacagggaggtaagggcgagcagggccctccaggaccaccggggttccaaggccttccaggtccatcaggtcccgctggagaagtcgggaagcctggagagcgcgggctgcacggtgagtttggactgcctggacccgcaggcccgcgcggtgaacgaggtcctccaggagaatcgggggcggctgggcctaccggtccaattggttcccgtgggccctccggaccccccggaccagacggcaacaagggagagccaggtgtggtgggagcagtgggtaccgcaggtccatccggacccagcggattgccaggagagcgcggtgcagctggaatcccgggagggaagggcgaaaaaggagagcctgggcttagaggagaaatcggcaatcccggaagagatggcgcacggggggcgcccggcgcggtgggcgctccagggcctgcgggggcaaccggcgacagaggagaagcaggtgccgcaggtcctgctggtcccgccggtccaaggggctcgccaggtgaacgcggtgaagtggggccagcagggcccaatggatttgccggtccggcaggtgcggcaggtcaaccgggggccaagggcgaacggggggcaaaggggcccaagggtgaaaacggggtggtcggacctaccggcccagtcggagccgcgggtcctgcaggtccaaacggccctccggggcccgccggttcgcgtggagacggcgggccgccaggtatgaccggatttccaggtgccgcgggcagaaccggacctcctggaccatcaggaatcagcgggccacctggtccaccaggaccagctggtaaggaaggtctgcgggggccacgaggggaccaaggtcctgtcgggcggactggcgaagttggtgcagtcgggcctccaggttttgcaggagaaaaaggcccatccggtgaggctggaaccgctggtccgcctggcaccccaggaccacaggggcttctcggcgcacctggaatcctggggctgcccggatccagaggtgaaaggggacttccaggcgttgctggcgctgttggagagcctggccctctcggaatcgcaggtccgcccggagctcggggtccgcctggtgcagtgggaagcccaggcgtgaatggtgcaccgggcgaagcagggcgggatggaaatccaggaaacgatgggcctccagggagagacggtcaacctggccacaagggtgaaagaggataccccggtaacatcggtcctgtaggggcggccggcgcgccaggcccgcacggacccgtgggtccagctggaaaacacggaaaccgaggagaaactggcccttcgggtccagtcggacccgcaggagcggtgggtccccgcggtccatcgggaccgcaaggaatccggggtgacaagggggaaccaggagaaaagggcccccggggcctgccggggctcaaggggcataatggtctgcaaggactgccgggaatcgccggtcatcatggcgatcagggagcacctggttccgtggggcctgcagggccgagaggcccggcagggccttctggcccagcaggaaaagacggacggaccggtcatccaggaacggttggacccgccggaattagggggccacagggacatcaagggccggcgggacctcccggaccccctggaccgcctggtccccctggagtgagcggaggagggtacgattttggttacgatggcgatttctatcgagcagatcaacctaggagtgcaccttcattgcgtccaaaggactatgaggtcgacgcaactttgaagtcactcaacaatcaaattgaaaccctgcttactcccgagggatctcgcaagaacccagcccgaacttgtcgtgatctgagactttcccacccggaatggtcgagcggatactactggatagatcctaatcagggttgcacgatggatgcaattaaggtctactgcgatttctccaccggcgaaacgtgcattcgcgcacagcctgaaaacattccagcaaagaattggtaccggtccagcaaggataagaaacacgtctggctgggcgaaaccataaacgcaggctcccagtttgagtacaatgtggaaggtgtgacctcaaaggaaatggccacccagcttgcatttatgagacttcttgcgaattacgcatcccaaaacattacttaccattgcaagaactcgattgcatacatggatgaggaaactggtaaccttaagaaggccgtcatcctccagggttcgaatgacgtggagctcgtggccgagggtaactcgcggttcacctacacggtgctcgtggacggatgttctaaaaagactaatgaatggggaaagacgatcattgaatacaagacgaacaagccatcccgactgccttttcttgatatcgcgcctctcgatattggaggggccgatcaagaattctttgtcgatattggacctgtgtgtttcaaa

SEQ ID NO: 32508 - DNA, 4098 bp, synthetic construct
  misc_feature 1..4098: note = Description of Artificial Sequence: Synthetic coding sequence
  source 1..4098: mol_type = other DNA
atgctgtctttcgtggatacccgaacgctgttgctactagccgtgaccctgtgtctcgccacgtgtcaatctttgcaggaggagaccgtgcgcaaagggccagccggagaccggggcccacgcggcgagagggggcctcctggacctccgggccgcgacggagaagatggacctacaggccctccgggcccacctgggccacctggaccacctggccttggaggcaatttcgccgcacagtacgacggcaagggcgttgggctgggtccaggccctatgggtttgatgggccctcgggggccgcctggtgcagcaggagctccgggccctcagggctttcagggcccagcaggcgagccaggtgagccggggcagacaggtccagccggggctcgaggcccagctggcccccctggcaaggcgggggaggatggacaccccggtaagccgggccgaccaggcgagcggggcgtggtggggcctcagggagctcgtggctttcctgggacacccgggcttccagggtttaagggcattagggggcataatgggctcgacgggttgaaaggacagccaggagcacccggcgtgaagggtgagccaggagcgcccggggaaaacggcacacccggtcaaactggagcacgcgggctgccaggtgagcggggccgcgtgggggcccctggccctgcaggtgctcgaggaagcgatgggtccgttgggcccgtcggtccagctgggccaattggtagtgcgggcccccctggatttcctggggcgcctggacctaaaggagagatcggggccgtgggtaacgcaggtcctgccggccccgccggacctcggggagaggtgggtttgcccgggttaagtgggcctgtgggcccacctgggaatccgggggctaatgggctgactggcgcaaagggcgcggcaggcctcccgggcgtggctggagctccaggcctacctggcccaagaggtatcccaggaccagtcggcgctgctggagcaacaggtgccaggggattggtgggcgaaccgggtccggcagggagtaagggggagtccggcaacaaaggcgagcctggtagcgccggacctcaggggccacctggcccctcaggagaggagggcaagcgaggtccaaatggagaggccggtagcgcaggccccccaggccctccagggcttcggggatcaccaggttcaagaggtctgccgggagcggacgggagagcgggagtgatgggtcctccagggagcaggggcgccagcggccctgcaggcgtgagggggcctaacggggatgcgggccgcccgggtgaacctggactgatggggcctagaggcctccccggatcacccggtaacattgggcccgctggaaaagagggtcccgtaggacttcccggcatagatggcagacccggcccaattgggccggccggagccaggggggagcctgggaatatcggtttccctggaccaaaaggccctaccggcgatccaggaaagaacggggataaaggtcacgccggcctcgccggtgcgcgtggcgctcccggtcctgatggcaataacggtgctcagggtccccctggacctcagggagtccagggcggaaagggcgagcagggcccccctgggccccctggttttcagggcctgccaggaccaagcggacccgccggggaggtgggcaaacccggggaaagagggcttcacggggagttcgggctgccaggacccgccggcccaagaggggagagaggcccgcccggcgaaagcggtgcagccggaccaactggacccatcggcagcagagggccatcaggtccaccgggccctgacgggaataaaggagaaccaggcgtggtgggagctgtcggcactgcgggaccctcaggacccagtggcttgcccggtgaacggggagccgcgggaattcccgggggaaagggtgaaaagggcgaacctggtctgcgtggggaaatcggcaatccagggcgcgatggcgcccgcggagccccaggcgcagtaggtgcccctggaccagcaggggctaccggagacaggggtgaggccggtgcagccggccccgccggtcccgcggggccccgaggcagcccaggagagcgaggggaagtgggaccggccggccccaatggatttgctggacccgctggcgctgcaggacagccaggcgccaagggagaaaggggcgccaaggggcctaagggcgaaaacggagtcgtgggtccaaccgggccagtaggagccgccggacctgccggccccaatgggccgccaggacccgccggatctagaggtgatggaggtccccctggcatgactgggtttccaggcgctgcgggtcgtacaggacctcccggccccagcggcatctcagggccaccggggcccccggggcctgctggaaaggagggcttgcgaggtcctagaggagaccaaggtcccgtgggtaggaccggggaggtcggcgccgtgggccccccgggctttgctggagaaaaggggcccagcggcgaagccggaacagcgggtccccctggaactcccggaccgcaggggctcctcggcgccccaggtattctcgggttgccggggtcgcggggtgagagggggcttccgggcgttgcgggagccgtcggcgaacccggaccactcggcatcgctggcccccccggagctcggggcccacccggggccgtcggatcacccggagtcaacggcgcccccggcgaggccggaagggacgggaatccaggtaatgatgggccaccaggccgggacggccagcccgggcataaaggcgagcgaggctatccagggaatatcgggcctgtgggggccgctggcgcccctggcccccacggccccgtgggccctgccggtaaacacgggaatagaggcgaaaccggaccgtcaggcccagtgggccccgctggtgcagtcggaccacgagggccttccggaccccaagggattagaggggacaagggggaaccaggagagaaggggccgcgcggactgcccggattaaaggggcataatggcctgcagggcctgcctggcattgccggacatcacggggatcagggagcgccggggagcgtcggaccagcaggccctcgggggcccgccggacccagcgggccagctggcaaggatggccgcaccggacacccaggaaccgtgggcccagctggcatacgaggcccacagggtcatcagggtcctgctggcccgccaggcccacctggtccccccggccccccgggagtgagcggagggggatatgattttgggtacgatggcgacttttatcgggccgaccagccacgctctgctcccagcctccgcccaaaggattacgaggtggatgccaccctgaaatcccttaataatcagattgaaaccctgctgactcctgagggctcccggaagaatcccgctcgaacctgccgggacctccggctgtctcatccggaatggagttcaggctattactggatcgatccgaatcaggggtgtacaatggatgctattaaggtatattgtgacttttcaacaggcgaaacttgtatcagagctcagcccgagaatataccagccaagaactggtacagatcttcaaaggataagaaacacgtttggctaggggagaccatcaacgcaggatctcaattcgaatataatgttgagggtgtcacctcaaaggagatggctactcagctggcctttatgaggctgctggcaaactatgcttctcaaaatattacgtatcattgcaagaactcaattgcttacatggatgaggaaacaggtaacctcaagaaagccgtcatactacaggggagtaacgatgtcgagttggtcgctgagggtaattcccggttcacttatacggtcctggtggacgggtgttctaagaaaacaaacgaatgggggaagacaattatcgagtacaagacaaataagccatccaggctcccgtttctggatatagcgcccctcgacatcggcggtgcagatcaggagttcttcgtggatattggacctgtctgcttcaaa

SEQ ID NO: 32509 - DNA, 4098 bp, synthetic construct
  misc_feature 1..4098: note = Description of Artificial Sequence: Synthetic coding sequence
  source 1..4098: mol_type = other DNA
atgctaagcttcgtcgatacaaggacgctcctcctgctggccgtaacactctgcttggctacatgccagtcactgcaagaggagacagttcgaaaagggcctgctggcgatcgggggcccaggggggaaagaggccctccgggcccaccaggccgggacggtgaagacggtccaaccggccccccgggtccgcctggcccacctggtccgccagggctgggcggtaacttcgccgcacagtatgatggaaaaggtgtcgggcttgggcccggccccatggggctgatgggtcctaggggcccgccgggagctgccggcgcccccggaccacagggcttccaggggcccgctggggagcccggcgagccaggccaaactgggccagctggggcgagaggacctgccggcccgcctggcaaggccggagaggacgggcaccccggaaaaccaggccggccaggagaacgtggggtcgtgggtccgcagggtgcacggggattccccggaaccccaggacttcccggtttcaaaggaatccgtgggcacaatggtctcgatggcctaaaggggcaacctggcgctcccggcgtgaaaggagagcctggggctcctggggaaaacggaactccggggcagacgggcgctcggggcttgcccggcgaacgcggcagggtcggcgcccccggacccgcaggagccaggggctccgacgggagtgtcgggccagtcgggcccgccggacccattggaagcgctggccccccaggcttcccaggcgcacctggacctaagggcgagattggcgctgtgggaaacgccggacctgctggacctgcaggaccccgcggcgaggtgggcctgccaggactgtcggggcccgtgggcccccctggcaatccaggagcaaatggtctaaccggggccaagggagcagctggattgcccggagtggcaggtgcccccggacttcccggtccgcggggaataccagggcccgtgggcgccgctggtgccactggggctcgaggtctcgtaggtgagcccgggccggccggaagcaaaggagaatccggaaataagggtgaacctggatctgcaggccctcagggccctcctggtccatcaggggaggaagggaaacggggcccgaatggagaagcaggcagcgcgggaccccccggaccccccggattgcggggcagccctggctcacgaggattgccaggtgctgacggcagagcgggagtaatgggacccccaggtagccgcggtgcatccggccctgccggagtcaggggccctaacggagatgccggccgccctggcgagcctggactgatgggcccccggggtttgcccgggagcccaggaaacatcggaccggccgggaaagaagggcccgttggactgccgggaatagacggtcgcccaggcccaattgggcccgctggagcccggggagaacccggcaacattgggttcccgggacccaaggggcctaccggtgatcctggcaagaatggagacaaggggcatgcgggactggcaggcgctaggggagcgcctggccctgatgggaataatggtgcgcaaggaccaccaggaccccagggggtgcagggagggaagggcgaacagggacctcccggcccaccaggctttcagggcctgcccgggccgagtggacctgcgggagaagtgggcaagcctggtgagcgggggctgcacggagaattcggactccccgggcccgctggccctagaggcgagagggggccccccggggaaagcggtgcggctggccctaccggcccaatcgggtcacgcgggccaagtggcccgccaggccctgacgggaataagggagagcccggggtggtgggggcagtgggaacagccggaccatcaggcccgtcaggcctgccgggcgagcgaggagcagccggaataccagggggcaaaggagaaaaaggtgaacccggcttgagaggagaaatcggcaatccagggagagacggcgcgcgaggcgcacccggcgctgtcggagcccctggacctgcgggagccaccggtgaccggggagaagccggtgctgcgggccctgcaggtccagctggcccccgtggcagccctggagagaggggcgaggtcgggcccgccggacctaacgggtttgcaggacctgccggcgctgcaggtcagcccggagctaaaggggaaaggggtgccaagggtcccaagggtgagaacggcgtcgttggtcccacaggccctgttggtgctgccgggccggcgggccctaatggtcctcccgggcccgctggaagccgaggggacggaggaccaccagggatgacgggcttcccaggcgccgccggacgtactggcccccccggcccctcgggcatttctggaccacctggccccccggggcccgctggaaaggaagggcttcgcggaccgcgtggggatcagggaccggtgggtaggacgggggaagtcggcgcagtgggtcccccgggcttcgccggtgagaaggggccaagcggcgaagccggaactgcggggcccccaggaacgccaggccctcaggggctgttaggtgcgcccgggatcctcgggctcccaggttcgaggggcgagcgcggcttacctggcgtcgcaggggctgtgggagagccgggacctctaggcatagccggcccccctggcgcccggggtcccccgggtgcagtcgggtccccaggcgtcaatggggcaccaggcgaggctgggagagatggcaacccagggaatgacggcccacccggacgggatgggcaacccggtcacaaaggagagagaggctatcccggaaatatcggacccgtgggagcagcaggcgcccctggcccgcacggtcctgtaggccctgccggcaaacatggcaaccgtggggaaacaggcccaagtggcccggttggcccagcgggagccgttggcccccgcggaccaagcgggccgcagggaattcgcggggataagggggagcccggagaaaagggacctcgcggcctgcccggtctgaaaggccacaacggccttcaggggctgcctggcatcgcaggacaccatggggaccaaggggcacctggaagcgtcgggccagccggcccccgaggacccgcagggccttctggtccagctggaaaggatggcagaactgggcacccagggaccgtggggcctgcgggaatcagaggaccacagggtcatcagggacctgcaggcccccctggaccaccagggccgcctggcccccctggagttagcggtggcggctacgacttcggctatgatggggacttctacagagcagaccagcctaggtctgcaccatcattacgaccaaaggattatgaggtggatgccaccctgaaatcactgaataatcagattgagacgctgttgaccccggaaggatcccgcaaaaaccccgctcgtacttgccgggatcttcggttgtcacaccccgaatggagctcaggatattactggatcgaccctaatcagggctgtactatggacgcaataaaagtctactgcgactttagcactggggaaacctgcatcagagcccagcccgaaaacattccagccaaaaactggtaccgttcttccaaggataagaaacacgtgtggttgggggagaccataaacgccgggagtcagtttgaatataacgtagagggggtgacgtccaaggaaatggccacccagctcgcgtttatgagacttctggccaattatgcttctcagaacatcacttatcactgcaaaaatagcattgcatacatggatgaggagacaggaaacctgaaaaaagctgtgatactgcaagggtccaatgacgtggaactggtcgccgaaggtaactccagatttacatacacagttctagtggacggctgtagtaagaaaacgaatgagtgggggaaaacaataatcgagtacaagacaaataagccttcccggctcccatttttagatattgctccactggacattggcggagctgaccaggaatttttcgtggatatagggccggtgtgtttcaaa

SEQ ID NO: 32510 - DNA, 4098 bp, synthetic construct
  misc_feature 1..4098: note = Description of Artificial Sequence: Synthetic coding sequence
  source 1..4098: mol_type = other DNA
atgctttcatttgtggatacccgtacgctcctgttacttgccgtgacattgtgcctcgctacctgccagtccttgcaagaggagactgtccggaagggccctgcgggagatagaggcccacggggggaacgcgggccaccgggtccgcctgggagggatggtgaagatggcccaaccggacccccagggcctcccggccccccaggcccacctggactgggcgggaacttcgcagcccagtacgatggtaagggcgttggcttgggaccaggcccgatgggtttaatggggcctcgaggtccccccggagctgctggggccccaggtcctcaggggttccaggggcccgcgggtgagcctggcgagcccggacagacggggcctgccggcgctcggggacctgctggtccccccggaaaagcaggtgaggacgggcatcccgggaagccgggacggccgggagagcggggtgtcgtgggcccacagggcgccagaggcttcccagggacccctggactcccggggttcaagggaatacggggccacaatgggctggacggcctgaagggccaacctggcgcgccaggagtaaagggggaacctggcgccccaggggagaacggaaccccaggccaaaccggcgcccgggggttgccaggagaacggggccgggtcggtgctcccgggccagccggggctagagggtctgatggcagtgtgggtcccgtgggaccagcgggtcctatcggtagcgcaggcccgcccggtttccctggggccccagggcccaaaggtgagataggcgctgtgggcaacgcaggtcccgccggccccgccggacctcggggggaagtgggcctgcccggcctctctggccccgtggggcctcccggcaaccctggagccaacggattgaccggagctaagggggccgccggcttgcccggagtagctggagcccccggccttccaggccccaggggtatacctggccctgtgggggctgcgggcgccacaggcgcccgaggcctggtgggcgagcctggaccggctgggagcaaaggtgaaagtggcaataagggagagcccggtagtgctggcccccagggccctcctggccccagcggtgaagaaggtaagcgcggcccaaacggcgaagccgggagcgccggcccacctggaccccccggactgcggggctcaccagggagccggggactccctggagcggatgggcgtgccggggtaatgggcccccctgggagtcgaggtgcgagtggacccgccggcgtccgggggcctaacggtgacgccgggcgaccaggggagccgggcctgatgggtccgcggggcctgccgggtagccctggcaacataggcccagcagggaaagaaggaccggttggattgcctgggattgatggccggcccggccccatcgggcccgcgggggctaggggagaaccgggaaacatcggctttccaggcccaaaagggccaactggagatcctggcaagaacggagataagggccatgcaggcctggccggcgctcgaggagccccgggaccagacggaaataatggggctcagggtccgcctgggccccagggagttcagggtggcaagggcgaacaggggccacccggacctcctggattccagggtctgcccggcccatccgggcctgcaggagaggtaggaaaaccaggtgagagaggactgcatggcgagttcggccttcccgggcccgcagggcctagaggcgagcgtggtccccctggcgaatcaggggcggccggtcccaccggtccaataggatctagaggcccgtctggccctccgggtccagatgggaataaaggagaaccaggagttgtcggagcagttgggaccgcaggccctagcggccctagcggcttgcccggggaacgtggggctgccggcattcctgggggtaaaggagagaagggtgaacccggattgcggggcgagatcggcaatcccggccgcgacggggcacggggcgccccgggggcagtcggagcccctggtcctgccggcgcgaccggggacagaggagaagcaggagccgccggtcccgccggtccagccgggccaagagggtcccctggcgaaaggggtgaagtggggccggccgggcctaacggattcgcgggaccagccggcgcagctggtcagcccggggctaaaggggagagaggagctaagggacctaaaggcgagaacggggtggtcggtccaaccggcccagtgggtgccgcaggaccagccgggcctaacggcccccccgggcctgccggaagcagaggtgacggcggccctcccggaatgacgggtttccctggggccgctggacgcacaggaccaccgggaccttctgggattagcggccctcccggccccccaggtcctgcagggaaggaaggacttcggggtccccggggagaccagggtcctgtcggcagaacaggagaagttggggccgtaggccccccagggttcgcaggtgaaaaagggccgagtggcgaggccggaaccgcagggccaccaggcacacctgggccacagggcctcttgggagccccaggcatcctgggtctgcccggatctagaggagagcgaggcctgcccggcgtggcgggagccgtcggtgagcccggcccactcggcattgctggaccacccggggccagggggcctcccggggccgtggggtctcccggtgtcaacggcgcccctggggaagcaggaagagacggcaaccctggaaatgatggccctcctggccgagacggacagcctggccacaagggggaaagaggctatcccggtaatatcggacccgtgggcgccgccggcgcccctggacctcatgggcccgtcgggcccgccgggaagcatggaaaccgcggagagaccggcccctccggaccagtgggcccagccggtgctgtcggccccagaggtccgagcggaccccagggaatacggggagacaagggagagcccggggaaaaggggcctcgtggcctcccaggattaaaaggccacaacggccttcaaggacttcctggcatcgccggacaccacggggaccagggagctcctggttcagttggcccagccggtccaagaggccccgctggaccaagcggacccgccgggaaggatgggaggaccggtcatcccggcaccgtggggccagcaggaatccgcgggccacagggccatcaaggccccgccggaccccctgggccgccaggtcctcccggccctcctggtgtttctggcggaggctatgattttggctatgacggggatttctaccgggccgaccaaccccgttccgcaccatccctccgtcctaaagattacgaggtcgatgcgacgctgaagagcctcaacaatcaaatcgagacgctgctcacacccgagggatcccgaaaaaatcccgctagaacttgccgtgatctgcgcctgagccaccccgaatggtcatccggttattattggatagaccctaaccagggttgcacaatggatgcgattaaggtatactgtgatttcagtaccggtgaaacctgtataagagcgcagccagaaaatatcccagccaaaaattggtaccggtcaagtaaagataagaaacatgtgtggctgggggagactattaatgcagggtcacagtttgaatataatgtggaaggagtgacgtcgaaggagatggctacccagcttgcattcatgcgtctgttggccaattatgcatcgcaaaacataacctaccactgcaaaaattccatcgcctacatggacgaggagacagggaatctgaaaaaggccgttatcctccaagggtcaaatgatgtggaattggtcgctgagggaaactcaagattcacttacactgtgcttgttgacggttgcagcaaaaagacaaatgagtggggcaagaccatcatcgagtacaaaactaataagccctcccgcctaccttttcttgacatcgcaccactagatatcggcggcgcggaccaagaattcttcgtggatatcggacccgtgtgcttcaaa

SEQ ID NO: 32511 - DNA, 4098 bp, synthetic construct
  misc_feature 1..4098: note = Description of Artificial Sequence: Synthetic coding sequence
  source 1..4098: mol_type = other DNA
atgctgtcctttgtggacaccaggactctgttgctcctcgccgtcactctgtgcctcgccacctgtcaatcgctccaagaagagactgtgcgcaaggggcctgctggagatcgcggcccgcgcggggagcgcggccccccgggcccaccaggtcgcgatggcgaggacggaccaactggaccgccgggtccaccgggcccgccgggccctcctggactggggggtaatttcgcagctcaatacgatggaaaaggcgttggactcggacctggtccaatgggactgatgggaccgcggggaccacccggtgccgcaggagctccgggaccgcagggatttcagggacctgctggcgagccgggtgaaccaggccagacgggtccggccggtgcaagggggccggcgggtcctcccggaaaagcaggtgaggatggacatccgggcaagcccgggcgccccggagaacgcggagtggtgggacctcagggtgccaggggattcccgggaactccggggctgccaggcttcaagggtattcgaggacacaacggcctcgacggactgaagggacaacccggggccccgggcgtcaagggtgagccgggtgcgccgggagagaacggcaccccgggccaaaccggagctcgcggactgcccggggaacgcggccgggtcggagctccgggaccggccggagcacggggaagcgatggctcagtcggtccggtgggaccagccggaccaatcggatcggcagggccaccgggcttccccggggccccaggtccaaagggtgagattggtgcggtggggaacgccggccccgccggcccggcaggaccacggggagaggttggcctgcccggactctccggaccagtgggacctcccggtaacccgggagccaatgggctcactggggccaaaggggccgcaggcctcccgggggtggcaggcgcccctggcctgccgggacctagaggaatcccgggcccagtgggggcggccggagcgaccggagccagagggctggtcggcgaaccaggacctgccggatcgaagggcgaatcgggaaataagggagagccgggcagcgcgggaccgcaggggccaccgggacccagcggagaagagggaaagcgcggccccaatggcgaggccgggtcggcgggaccaccgggcccgcccggactgcgggggagcccgggatcacggggccttccgggagccgatggcagagccggagtgatgggacctccgggaagccggggcgcttcaggaccggcgggagttcgcgggcctaacggagacgcaggacgcccaggggaacccggcctcatggggccgcgtggactgcctggttccccgggcaatatcggacccgccggaaaggaggggccggtcgggctgcctggcatcgacggaaggccaggcccaattggaccagcaggtgcccggggagagcctggtaatatcggattccctggacctaagggacctaccggggacccgggaaaaaacggagataaagggcacgcaggactggcaggtgcgcggggagccccgggacccgacggcaacaacggggcgcaggggccgccggggccacagggagtccaaggaggaaagggtgaacagggaccgccggggcctccgggattccagggattgccaggcccgtccggcccggccggggaagtgggaaagccgggtgagcggggcctccacggggaattcggacttcctggcccagccggcccccggggagagaggggaccaccgggggagtcgggagctgccggacctaccggtcctattggttccaggggcccgtctggaccgcctggacctgacggaaacaagggtgaaccgggcgtcgtgggagccgtgggaactgctggaccatcggggccgtccggactgcccggcgaacgcggtgccgccggaatcccgggaggcaagggggaaaaaggagaaccggggctgaggggcgagatcggaaatccgggtagagatggagcccggggggccccgggagccgtgggagctccgggaccggcgggagcaactggcgaccgtggggaagccggggcggcaggcccagcaggaccggccggaccgcgcggatctcccggagaacggggcgaggtggggccggctggtcctaacggcttcgctggcccggccggtgcggctgggcagccaggggctaagggcgaacgcggcgcaaaaggaccgaaaggcgaaaacggagtcgtcggtccgaccggaccggtcggagccgccggcccggcgggacccaacggaccgccaggaccggcgggatcgcgcggcgacggcggcccaccgggcatgaccgggtttccgggcgcggcgggccggactggccccccggggccgtcaggaatttcgggccctccgggaccaccgggacccgccggtaaggagggccttcgcggaccgcggggggatcaggggcctgttggtcgcaccggagaagtgggcgccgttggaccgcctggttttgctggagagaaggggccgtcgggagaagcgggaactgcagggcctcctggtacccccggaccgcagggactcttgggagctccgggcattctcggtctgcctggttcacgcggagaacgcggactccccggagtggcgggtgcggtcggagagccgggacctctgggaattgccgggccaccaggtgccagaggaccgccgggggccgtggggtcgccgggagtgaacggggcgccaggagaagccggacgggacggaaatccaggcaatgacgggcccccgggacgcgacggccagcccggacacaagggcgagagaggctacccgggcaatatcggtccggtcggagcagcaggtgcgccgggcccacatggaccggtgggcccagcgggaaagcacgggaatcgtggagagacggggccgtccggccccgtgggacctgccggcgcggtgggaccacggggaccgtccggtccccaaggtatccgcggtgacaagggggagccaggggagaagggacccagaggactgcctggtctgaaaggacacaatggtctgcaaggtctgccaggaatcgcaggacatcatggagatcagggagctccgggctcggtgggtcctgccggaccccgcggaccggccggtccatcaggaccagcaggaaaagacggacggacgggtcatccaggcaccgtgggccctgctggaattaggggaccgcagggacatcaggggccggcgggtccgcctggcccgccaggtccgccgggaccgccgggagtgtcggggggaggatacgatttcggttacgatggcgatttctaccgggcggatcaacctcggagcgcgccgagcctgcggccaaaggactacgaggtcgatgccactcttaaatcgttgaacaatcaaatcgaaaccctgttgaccccggaaggcagccgaaagaaccctgcacgcacttgccgcgacctgcggctctcccacccggaatggtcatcgggctactactggattgaccctaaccaggggtgcacgatggacgctatcaaagtgtattgtgacttcagcactggcgaaacctgtatccgcgcacaaccagagaacatcccagctaagaactggtaccggagcagcaaggacaaaaagcatgtgtggctgggagagactatcaacgcgggttcccagttcgaatacaatgtggagggagtgacctcaaaggagatggcgactcagctggcgttcatgcgtctgctcgccaactacgcgtcgcagaacataacctaccactgtaaaaacagcatcgcgtatatggacgaggaaactggaaacctcaagaaggctgtcatcttgcaaggatccaatgatgtggaattggtcgccgagggcaattcgagattcacctacaccgttctggtggacggatgctccaagaaaaccaacgaatggggcaaaaccatcattgaatacaaaactaacaaaccttcacgcctgccctttctggatatcgccccactcgatataggaggagctgaccaagagttcttcgtggatatcggacctgtgtgctttaag

SEQ ID NO: 32512 - DNA, 4098 bp, synthetic construct
  misc_feature 1..4098: note = Description of Artificial Sequence: Synthetic coding sequence
  source 1..4098: mol_type = other DNA
atgttgtcgtttgttgatacccgcactcttcttcttctcgcggtcactctgtgtctggccacttgccaatcgctgcaggaggaaactgtccgcaagggcccggcaggggaccgtggtccgagaggggaacgtggccctcccggccctcctggtcgtgacggtgaagatggtccaaccggaccacccggcccgcccgggccaccaggcccgcccggtcttggagggaatttcgcagcgcaatacgatgggaagggtgtcgggctcgggccgggtccgatggggctcatgggcccaagaggccctcctggggccgcgggggcacccggtccacaggggtttcaggggcccgccggcgagccaggcgagcctggccaaaccgggcctgcgggcgccagagggccggccggtcctccaggtaaggccggagaggacggtcatcccggcaagccaggccgtcccggagagcggggcgtggtgggtccacagggagcaaggggatttccaggaaccccaggacttcccggttttaagggaattagaggtcacaacggactggacgggcttaagggtcaacccggagcacccggagtcaaaggggaacctggggcgcctggagagaacggcaccccggggcagaccggcgcgagggggctccctggagagaggggacgcgtgggagctcccgggcctgccggcgcacgagggagcgatggatccgtgggaccagtcggacccgcgggcccgatcggttccgctggtccaccaggcttccccggcgctcctggccctaaaggggaaatcggagccgtgggaaacgccggtcctgcggggcccgctgggcctcggggtgaagtcggactccccggtctttcgggaccggtggggccacccggtaatcctggtgcaaatggacttactggagcaaaaggagctgctgggcttcctggagtggctggagcaccgggactccctggaccgcgcggcataccaggtccagtgggggccgcaggagccaccggggcaagagggctggtcggtgagccaggccccgctggttccaagggagaatcgggaaacaaaggtgaaccgggatcggcaggaccccaaggtccaccgggaccttcgggtgaagaaggaaaacgcggacctaacggtgaggcaggttccgctggaccgcctggtcccccaggcctcaggggatctccgggctctaggggacttccaggagcggatggtcgcgcaggcgtgatgggaccgccagggtcgagaggagcatccgggcctgcaggagtgcgaggcccaaacggagatgcaggacgccctggcgagccaggactgatggggccacgggggcttccaggatcacctggcaatataggaccagctgggaaagaaggacccgtggggctcccaggtatagacggacggcccggtcctataggcccagctggcgccagaggcgaacctggaaacataggttttcccggacccaaagggccaaccggtgatccgggaaaaaacggtgacaagggacatgcaggtcttgcaggagcccgaggtgcaccgggtcctgatgggaacaacggggcgcagggcccacctggaccacaaggggtccaaggtggcaaaggagaacaaggacctccggggccgccaggcttccagggattgcctggcccttccggccctgcgggcgaagtgggcaagcctggagaacgtggcctgcacggagaatttggacttcctggtccggcgggcccgagaggagagagaggcccgccgggagagtcgggagctgcgggcccaactgggccgatcggttcacggggtcctagcggccctccaggtcctgacggtaacaagggggagcctggcgtcgtcggagccgtcggcaccgcgggtccatcaggaccttcgggactccccggcgagaggggggcagcaggaatccctggcgggaaaggggaaaagggggaacctggactgagaggggaaattggtaacccgggacgagatggtgccaggggcgcgccaggagccgtcggtgcccctggtccggcaggcgcaactggtgacaggggagaagccggggcagccggaccggcaggtccggcagggcctcgggggtcgccaggagaacggggcgaggttggccctgctggtccaaatggtttcgcaggccctgctggagctgcagggcagcctggcgcgaagggagaaaggggggcaaaaggacccaagggagagaacggagtcgtgggccctaccgggccagtgggagccgccgggccggctggaccaaatggtccccccggccctgccggctcgagaggagacggcggacccccaggtatgactggcttccctggagcagccggcagaaccgggcctccaggaccctccggaatcagcggccccccaggaccaccaggtcctgcaggtaaggagggccttagaggtccccgcggagatcagggtccagttggcagaactggagaagtgggagcagtcggtccccctggttttgccggagagaaagggccatcaggagaggcaggcactgctggtcctcccggtacccccgggcctcagggtttgctgggagcgcctgggattctgggccttcctggtagcaggggtgaaagggggcttcccggagtcgcaggcgcagtgggagagcctggtcctctgggtattgccggaccacctggtgctcggggtcccccaggtgcagtgggatcgcctggggtgaacggggcccctggtgaagcagggagagatggaaatccaggtaacgatggacctccaggcagagatggacaacctggtcacaagggagagcggggttatcctgggaatattggacccgtgggtgccgccggggcacctggccctcatggacctgtgggcccagccgggaagcacggaaaccggggagagacgggcccctcaggaccggttggaccggctggtgcggtgggtcctcgtgggccatctgggccacagggaatccgaggggataaaggagaaccaggggagaagggccctcggggactcccgggattgaagggacataatgggctgcaaggtctgcctggcattgcagggcatcatggggatcagggtgcacctggttcggtggggccagcaggccctcgaggtcccgcaggaccatccggcccagccggcaaagacggccgcaccggacatccgggtaccgtgggacccgcgggaattaggggtccccaaggtcaccaaggtccagccgggccgcctgggcctccgggaccccccgggccccccggcgtgagcggaggtggttacgatttcggatacgatggagacttttaccgggcagatcaacctagatccgcgccatcactcagacccaaggactacgaagtggacgcgactctgaagtccttgaacaaccaaatcgagacgcttctcacccccgaaggttcccggaagaatccagcgcgaacttgcagagatctgcgcctttcacatcctgaatggagttccggatactactggattgaccctaatcagggctgcaccatggatgcaattaaggtttactgtgatttttcaaccggcgaaacctgtatccgcgcgcagccagaaaacatccctgcaaagaactggtaccgatcatccaaggataagaagcacgtgtggctgggagaaaccattaatgcaggcagccagttcgaatacaacgtcgaaggtgtgacgtcgaaggaaatggccactcagctggcattcatgcgtctcctggcaaactacgcgtcgcagaacatcacctaccattgtaagaactcgattgcatacatggacgaagaaaccggaaatctgaagaaggcagtgatactgcaaggaagcaacgacgtggaactcgtggcagaaggtaactcgcgttttacctacaccgtgttggtggacggctgttcgaagaaaactaatgagtggggcaaaactatcatagaatacaagaccaacaagccatcgcgcctgccattcctggatattgcccctcttgatatcgggggagcagaccaagagttttttgtggatatcggtcctgtgtgttttaag

SEQ ID NO: 32513 - DNA, 4098 bp, synthetic construct
  misc_feature 1..4098: note = Description of Artificial Sequence: Synthetic coding sequence
  source 1..4098: mol_type = other DNA
atgctgagcttcgtggacactcgaacgcttcttctccttgcggtgaccctctgcctggctacttgtcagtcacttcaggaggaaaccgtgaggaagggacccgcaggggatcgcggaccccgcggggagcgcggaccacccggacctcctggtcgggatggagaggatggtccgacgggaccccctggacctcccgggccaccgggccctcctggacttggcggtaactttgccgcacaatacgatgggaagggtgtgggactcggtccgggacctatgggcctcatgggtccccgcggtcctcctggtgctgcaggggcaccaggtccacaggggtttcaggggcccgccggtgagcccggtgaaccaggtcagaccggccctgcaggcgcaaggggacctgctggtccacccgggaaggcaggtgaagatgggcaccctggaaagccaggtcgcccaggagagcgcggtgtggtcggcccacaaggagcaagaggatttccgggtacccctggcctgcctggatttaagggaatccgaggccataatgggctcgatgggcttaaaggccaacccggggcccccggtgtcaaaggcgagcctggagcaccaggagagaatggtactcccggacagacgggcgcccgcggcctcccaggtgagagaggacgtgttggagctcctggacctgccggagccagaggttctgatggatcagtgggtcctgttggccctgcggggcctatcgggtcggcaggccctcctggtttccctggagcacctggtcctaagggggaaatcggtgctgtgggtaacgcaggtccggccgggcccgctggcccccgtggagaagtggggctgcccgggctcagcgggccggttggtccgccggggaatccaggagcgaacgggttgaccggtgcaaaaggggcagccggccttccaggcgtggcaggggcgccgggtctgcctgggccaagaggcattcctgggcctgtcggtgccgccggagcaactggcgcccgtgggctcgtgggggaaccaggaccagcaggatcaaagggcgagtccggaaacaaaggagagcctggttccgcaggccctcaaggtcccccagggccttccggggaggaaggcaagagaggacccaatggtgaggcaggctcggccggcccgccgggccctccgggacttcggggaagcccaggctcgaggggtctgcccggtgccgacggacgagccggagtgatgggaccacccgggtcacgcggcgcgtcaggaccagccggagtgaggggaccgaatggtgacgcaggacgccctggtgaaccaggactgatgggacctagaggtttgccgggctcccccggaaacatcggtccagccgggaaggaaggacctgtgggactgccgggaatagacggacggcccggacccattggtcctgcgggggcgagaggagaaccgggtaatatcggtttccctggtccaaagggtccaaccggtgatccaggaaaaaacggtgataagggacacgccggacttgcaggtgccaggggcgctcccgggcccgatggaaataacggggcacaaggaccacccggtccacaaggtgtccaggggggaaagggagaacagggcccaccaggaccaccaggattccaaggactgcctggtccgtcaggtccggcaggtgaagtgggaaaacctggggaacgcgggcttcatggagagtttggcctgccaggaccggccgggccgaggggggaacgaggtccaccgggagaatccggagcagcaggacctactgggcccattggatcccggggaccctcaggacccccaggccctgatgggaataaaggggaaccaggtgtcgtgggtgcagtcgggactgcaggaccttcgggcccttctggactcccaggcgagcggggcgcagccggtatccccggtggtaaaggcgaaaaaggagaacctgggctgcgaggcgaaattggcaaccctggacgcgacggagccaggggggcacctggggccgtgggcgcacccggccccgcaggcgcaaccggcgacagaggagaagcaggagcagccggaccggctggcccggcaggtccccgtggctcgcctggagaacgcggcgaagttggtcctgcaggccctaacggattcgccggtcccgctggggccgcaggacaacctggtgcaaagggcgagcgtggagcaaaaggcccaaaaggcgaaaacggcgtcgtgggtcctactggtcctgtcggagcagcgggtccggcggggcctaacggaccacctggtccagccggttcgcgtggagatggaggcccgccaggcatgactgggttcccaggtgcagcaggtcgtaccggacctccaggacctagcggcattagcggaccccctggtcctcctggccctgctggcaaagaaggactgcggggtccacgcggggatcagggtccggttggtagaacgggagaagtaggggcagtgggtccccccggttttgcaggggagaaggggccctcgggagaggcagggaccgccgggcctccgggaaccccaggaccccaaggcctcctcggcgcaccaggaatactgggattgcccggatcccgtggagagcggggcctcccaggggtcgccggagcagtgggcgaacctggcccactcggaattgcaggacctcccggcgccagagggccgcctggagcagtcggcagcccaggtgtgaacggagcgccgggagaagccggacgggatggaaatcctggaaatgatgggccccccggccgggatggtcaaccaggacataagggagaacgcggatacccgggaaatatcggtcccgtgggagcagctggagcgcccgggccccatgggccagtggggcctgctggtaagcacgggaatcgcggcgaaaccggacccagcgggccagtcggtcccgccggggcagtcggacccagaggtccttccggcccacagggtattaggggagacaaaggtgaacccggggaaaaaggaccacgcggactgccggggctgaaaggtcataacggccttcaaggacttccaggcatagcgggacatcacggagatcaaggcgcacctggatccgtggggcccgcgggtccaagagggccagcggggccttcaggcccagcaggtaaggacggaaggactggacatcccggtactgtcggacctgctggcattagaggacctcaaggtcatcaaggaccagcggggccgccaggcccacctggaccaccaggccccccaggagtctcgggaggcggctacgattttggttacgacggagacttttacagggccgatcagccacgatccgcaccttcgcttagacccaaggactacgaggtcgacgcaaccttgaaatcattgaacaatcagattgagactctcctgactccagaaggttcgagaaagaacccggcacggacctgtagggacctccgtctgtcacacccagaatggtcaagcggttattactggattgacccaaaccagggctgtaccatggacgcaatcaaggtctactgcgatttttccactggggaaacctgtattcgggcacaaccggagaatattccagcaaagaactggtaccgctcttccaaggataagaagcatgtgtggctgggggagactataaacgctggttcgcagtttgagtacaacgtggaaggagtgacttctaaggagatggccactcaacttgccttcatgaggcttctcgcaaactatgcgtctcagaacatcacctaccactgcaagaatagcatagcatacatggacgaagagactggtaatcttaagaaggcagtgatactgcagggatccaacgatgttgaacttgtggcagaaggtaattccagatttacctacaccgtgctggttgatggatgctccaaaaagacgaacgagtgggggaaaaccatcattgagtacaaaaccaataaaccatcgcgtctgccattccttgatatcgcaccactcgatataggaggagctgatcaggagttttttgtcgacatcggaccagtctgttttaag

SEQ ID NO: 32514 - DNA, 4098 bp, synthetic construct
  misc_feature 1..4098: note = Description of Artificial Sequence: Synthetic coding sequence
  source 1..4098: mol_type = other DNA
atgctctctttcgtggacacccggaccctccttctgctggccgtaaccctttgcctcgcaacttgtcaatcactgcaggaggaaaccgtgaggaagggtcccgcaggagacaggggacctaggggagaaagaggaccacctgggccgccagggagggacggtgaagatggaccgaccggacctcctgggccgcctggcccacctggcccgcctggacttggagggaattttgctgctcaatacgatggtaaaggcgtggggctgggacctggaccgatgggattgatgggtccacgcggtcctccaggagctgccggagcaccaggccctcagggatttcagggacccgctggcgagcctggagaaccaggtcagactggtccagctggggcgagaggtcctgctggaccccccggaaaggccggggaagatggccatccggggaagccagggcgaccaggagaacgaggcgtcgtgggacctcagggcgcaagaggatttcccgggactcctggccttccgggctttaagggcattagaggccataatggactcgacggactcaaagggcagccgggagcaccaggtgtcaagggcgaacctggagcaccaggggagaacggaacccctggccaaaccggtgcgcgtggacttccaggcgagcgcggcagagtgggggcaccagggcctgctggcgccagaggctcggacggtagcgtcgggccagtcggtccggccggcccaatcggttcggcaggaccgccaggctttccgggagcacctggacccaaaggtgagattggggctgttggtaacgccggcccagccggacccgccggaccacggggagaagtggggctccccggtctgtcaggaccagtgggcccgcccggtaatcctggtgcgaatggccttaccggagcaaagggagccgcaggtttgcccggggtggccggcgctcccggccttcccggccctcggggaatccccggccctgtcggtgcagcaggtgcaaccggcgcgcgaggtcttgttggtgagccaggaccggctggctcaaagggcgaatctgggaacaagggagaacccggtagcgcaggtccacagggaccacccggaccttccggtgaagagggcaagcggggtccaaacggagaggcagggtcggcagggccacctggacctccagggttgcgtggatcacctggcagcagaggactgccgggggcagatggacgtgccggagtaatgggccctccagggtcccggggagcttcggggcctgcaggggtccgcgggcctaacggtgacgccggcagacccggcgaacctggtctgatgggaccgaggggactgcccggatcccccgggaacattggtcccgctggaaaagaaggacctgtgggactcccagggattgatggacggcccggtcctattgggccagccggagcacgcggtgaacctgggaacataggtttccctggacctaaaggcccaaccggtgatcccgggaagaatggcgataagggacacgcaggcctggcgggagcacgcggcgctcctggtccagatggcaataatggcgcacaaggcccaccagggccgcaaggtgtgcagggaggaaagggggaacaagggccgcctggacctcctggttttcaggggcttcctggaccctctggcccagcaggtgaagtcggtaagcctggggagcgcggtctgcatggagaatttggactgccaggtccggccggtccacgaggtgagaggggtccacctggggaatcaggtgcagcaggccctactggcccaattggtagccgcgggccttcgggtccaccaggaccagatggtaacaagggggaacccggggtggtcggagccgtgggtactgcaggtccgtcaggaccgagcggtttgccaggagaacgtggggccgcaggcatccctggtggcaagggcgagaagggcgagcccggactgcgaggtgaaataggcaatccaggacgcgacggggccagaggtgcacctggcgccgttggtgcgcctggaccagctggagcaaccggggatagaggagaagcaggcgcggcggggcccgcaggaccagccggtccaagaggatcccccggtgaacggggcgaagtgggtcccgccggaccgaacgggtttgcaggacccgccggtgcggccggacagcccggggcaaagggggagagaggtgcaaaaggccccaagggcgaaaacggggtggttggccctacgggtcctgtcggcgcggccggtcctgcaggcccaaatggaccccctggacccgcgggttcccggggcgatggaggaccaccaggaatgaccggattccctggagctgcagggcgaactggtcccccaggtccatcggggatatcgggcccacctggtcccccggggcctgccgggaaagagggactccgaggaccacgtggagatcaaggacccgtgggaagaactggggaagtgggggctgtaggacctccaggctttgcaggggaaaagggaccttcgggagaagcaggtacggccgggccaccagggacccccgggccacaaggtctgctcggggcacccggtatacttggccttccaggttcccgaggcgaaaggggactgcctggggtggcaggtgccgtgggtgaaccgggtccccttggaattgcgggaccgccaggagcgaggggaccgcctggagccgtgggctcccctggagtgaacggtgcaccgggagaggctgggcgtgatgggaatcccgggaacgatggtccccccggtagagacggccaacctggacataaaggagagagagggtaccctggaaatatcggtccggtgggggcagcgggtgcgccgggacctcatggacccgtggggcctgctggtaaacacggtaatagaggagagactggaccaagcggacctgtgggccctgccggtgctgtgggcccgagaggccctagtggtccccaggggatccggggtgataaaggggagcctggcgaaaaggggccgcgcggactcccaggacttaaaggacacaatggtctgcaaggtctgcctggtatagcgggtcatcacggagatcagggcgcaccgggatcggtgggtccggcaggtcctcgcggtccggcaggcccttcaggtcctgccggtaaggacggtcggacgggacatccagggactgttggaccggcgggaatccgtggcccccaagggcatcagggacctgcaggaccccctggcccaccaggcccgccaggacctcccggcgtctcgggagggggatacgattttggctacgatggcgacttctatcgggcagatcaacctagatccgccccttcgctcaggcccaaggattacgaagtggacgcaactctgaaaagcctcaacaatcaaattgaaactcttctcactcccgagggatcacggaagaacccggcaagaacgtgcagagacttgagactttcacatcccgagtggagctcgggatactactggattgatccaaatcaaggatgtaccatggatgcaatcaaagtgtactgtgacttctccactggagaaacctgtattagggcacaaccagaaaacatccctgcaaaaaactggtaccggtcctccaaagataagaagcacgtgtggctgggagagactattaacgctggctcacaattcgaatacaacgtcgaaggcgtgaccagcaaggagatggccacccaactggcatttatgagactgcttgcaaactacgcgtcccagaacatcacttatcactgtaagaactcgattgcatacatggatgaagaaacgggtaaccttaagaaggcagtgattctgcagggatccaacgacgtggagcttgtggcagaaggaaacagccgctttacctacacggtcctcgtggatggctgctcgaaaaagactaacgagtggggaaagaccatcattgaatacaagaccaacaagccaagccgcctgccattcttggatatcgcacctctggacattggaggcgcggaccaagagttttttgtagacatcgggccagtgtgtttcaag

SEQ ID NO: 32515 - DNA, 4098 bp, synthetic construct
  misc_feature 1..4098: note = Description of Artificial Sequence: Synthetic coding sequence
  source 1..4098: mol_type = other DNA
atgttatcatttgtagacacaagaacgctgctgctcttggcggttactctttgtctggctacatgtcaaagcttgcaggaggagactgtgcgaaagggaccagcaggagacaggggaccgcgcggtgagcgcgggcctccaggccctcccggaagggatggagaggatggccccactgggccgcctggccctccagggccccccggccctcctggcctaggcgggaatttcgcggcgcaatatgatggcaagggggttggactcggcccagggcctatggggctgatggggccccgagggcctccgggcgccgccggggcacctggtccacagggcttccagggtcctgcaggcgagccaggggagcccggccaaacagggccagcaggggccagagggcctgcaggtccccctggcaaagccggggaggatggacaccccggtaagcctggacggcccggagagcgtggagtcgtgggcccgcaaggtgcgcggggcttccccggtacccccggtctgcccgggttcaagggcatacgggggcataacgggctggacggactgaaaggacagcctggtgcccccggagttaaaggagagccgggagcacccggggagaatggaacacccggccagacgggagctcgtgggctgcccggagagagaggcagagtgggcgcaccgggtcctgcgggagctcgagggtccgacggatctgtgggacctgtgggccctgccggtcccataggatccgcgggcccccctgggttccccggcgctccaggtcccaaaggcgaaatcggagccgtgggcaacgctggacctgccggtccagccggtcccagaggggaggtgggactgcccggccttagtggacccgtaggacccccgggcaatcctggtgctaacggtctcactggagcgaagggggctgctggcttacccggcgttgccggcgcccctgggctgcctggccctagggggattccaggtccagtgggggcggccggtgctaccggagcccgcggcctggttggggagccggggccagctggttctaagggagagtccggaaataagggggagcctgggtcagctggtccgcaaggcccacctggtccctccggggaggagggaaaacggggccctaatggcgaggcaggcagcgccgggccccctgggccccccggcctgcggggcagccccggatccagaggtctgcctggggccgacggaagggctggtgtcatgggaccaccgggcagccggggagcatctggaccagctggcgtccggggcccaaacggtgatgccggcaggcctggcgaacctggcttaatggggcctcgtggactccccggctcgccgggcaacatcggtccagccggcaaagaggggccagtagggctccccggcatcgatgggaggcctggtccaatcggtccagcgggcgctaggggagagcctggcaacattggcttccctggaccaaaaggcccaaccggggaccccggtaagaacggggacaaaggacatgcgggccttgcaggcgcaaggggtgctccggggccagacggcaacaacggagcccagggtccaccaggtcctcagggtgtgcaaggcggtaagggagagcagggaccccccggccccccaggatttcaggggctcccaggacctagtggccccgctggcgaggtaggtaagcctggcgagcgaggcctgcacggagagtttggactacctgggccagcgggaccgcgaggcgagagaggacctccaggggaatcaggagcagctggcccaactgggccaattggttcacgcggaccatctggtccaccaggacccgacggaaacaagggagaacccggcgtggtaggagctgttggaaccgctggtccatctggcccctccggcctaccaggagaacgcggcgcagcaggcatccccggagggaaaggcgagaagggagagcccggcctacgaggggaaatagggaacccagggagagacggcgcccggggagctcccggagcggtgggggcacctggacctgcgggggctaccggtgaccgcggcgaagctggggcggcggggcctgctggacccgctggtcctagggggagtcctggagagaggggcgaagttgggccagccggtcctaatgggtttgccggccccgctggcgcagcaggccaaccaggggcaaaaggcgaacggggggcgaagggacccaaaggcgagaatggtgtggtcggcccaactggccctgtcggcgccgccggaccagcggggccgaacggccctcctggccccgcaggaagccgcggtgacggaggaccaccaggtatgacagggtttccaggcgcagctggcaggacgggtccccccggtccaagtgggatctccggaccgcccgggcccccaggtcccgccgggaaggaggggttacgtgggccaagaggggaccaaggcccagtgggaaggaccggcgaagtgggcgctgtgggacctcccggcttcgcaggagagaaggggccatcaggtgaggcaggaaccgccggccctccagggacaccaggaccgcagggtctcctaggcgctccaggcatcctggggctgccaggcagccgtggcgagcgggggctccctggagtcgcgggagcagtgggagagcctggccctctgggtatagccggccctcccggagcacggggaccgcccggcgcagtaggctccccaggagtgaacggagcacccggcgaggccggacgggacggaaatcccggcaatgatgggcctcccgggcgggacggtcagcccggccacaagggggagagaggatacccggggaacatcgggcccgtcggcgccgccggcgctcccggtccacatggccctgttggcccagctggcaagcacggcaaccgaggcgaaacagggccttcgggccccgtgggaccagccggcgctgtgggccctagaggtccttccgggccacagggaatccgaggagataagggagaacctggtgaaaaaggaccaaggggactgcccggccttaaaggacataacggactccagggactaccaggaatagctggacatcatggggatcaaggcgctcccggcagtgttggcccagccgggccgcgcggaccagctggcccttccggcccagccgggaaagatggccggaccggccaccccggcaccgtgggtcctgccggcattcggggcccccagggacatcagggccccgccggcccaccaggcccgccaggcccccccgggcctccaggggttagtgggggtggatatgactttgggtacgatggcgacttctacagggccgaccaaccccggtcagccccctctctccggccaaaagattacgaagtggatgcaacactgaagtctctgaacaaccagattgaaacgcttctcacgcccgaaggatctcgaaaaaatccggcgcgcacctgccgcgatctgagactctctcacccggaatggtcatcgggatactactggattgacccaaatcagggttgtaccatggacgccatcaaggtgtattgcgacttttccactggggaaacatgcattagggcccaacccgaaaacatccctgccaagaattggtataggtcatctaaggacaagaaacatgtctggctaggtgaaaccattaacgcgggaagtcagtttgaatataacgtggagggggtgacaagtaaggagatggcaacccagctggcctttatgcgactgctggcgaactatgccagccagaatattacatatcactgcaaaaatagcattgcttatatggacgaagaaacaggaaatctgaagaaagccgtgattctgcaaggctccaacgatgtcgagctagtcgccgaggggaactctagattcacctacactgtgttggtcgatggatgctctaagaaaactaacgagtggggaaaaacaattatcgaatataagactaataaaccttcccggctccccttcctggatatcgccccgctggatatcggtggggcggatcaagagttcttcgtggatattggccctgtgtgcttcaag

SEQ ID NO: 32516 - DNA, 4098 bp, synthetic construct
  misc_feature 1..4098: note = Description of Artificial Sequence: Synthetic coding sequence
  source 1..4098: mol_type = other DNA
atgctgtcgttcgtggacactcgcactctcctcctgctcgccgtcaccctgtgtctcgcaacctgccagtccctgcaggaagagactgtacgaaaaggacctgctggagatcgcggaccacgcggagaacggggaccgccaggtccgcctggtcgggacggcgaagatggaccaacggggccaccaggtccaccgggccctccaggccctccggggctcggaggcaattttgccgcccagtatgacggcaagggagtgggactcggaccgggcccgatgggtcttatggggcccagagggcctccaggtgcggcaggggctcccggtcctcaaggattccagggccctgcaggggagccgggcgagccggggcaaaccggaccggccggggcccgtggacccgccggccctcctggcaaggccggagaggacggtcacccgggaaagccgggtcggccaggagagaggggcgtggtgggaccgcagggagcgcggggtttccccggaaccccagggttgccggggtttaaggggatccggggacataacggcctcgatggactcaaggggcaacctggggcgcctggagtcaagggagaacccggcgcgcccggagaaaatgggacccctggtcagactggagcacggggactcccgggggaaaggggacgcgtgggtgcaccaggtcctgcaggcgcccgcggcagcgacggctccgtcggccctgtggggccggcgggacccatcggatcggccggacctccgggttttccgggagcgcctgggccgaaaggcgaaatcggagccgtgggaaacgccggccccgcgggacctgccggtccccgaggcgaagtgggactcccaggtctttcgggacctgttggccctccgggaaatccgggcgctaacggcctgaccggcgccaaaggtgcggcggggctgccaggagttgcaggagcccccggactgccaggccctagggggattcccggacccgtgggtgccgccggagcaaccggcgctaggggcttggtcggagaacctgggccagccgggtccaagggagagtcgggaaacaagggggaaccgggctcagctggcccacagggacctcccggcccatcgggagaagagggaaagcgcggccctaacggcgaggccggctcggcaggtcctccaggtccccctggactccgcggatcccccggatcccggggacttccaggtgccgacggacgagcgggggtcatgggccccccggggtcaaggggagcgtccgggccggccggcgtgcgcggacctaacggcgacgcaggaaggccaggagagcctggactcatgggaccgcgcgggctccctggatcgccaggaaacatcggcccagctggaaaggaaggaccagtgggcctgcctggaatagatggacgccccggcccaatcgggccagcaggagccagaggggagccagggaacatcggatttcctggacctaagggcccgactggcgatccgggcaaaaacggagataagggacatgccggactggccggggcaagaggagctccaggaccagacggcaataatggcgcccagggacctccagggccccagggagtgcagggcggaaagggagagcaaggaccaccgggaccacctggtttccagggactgccaggaccaagcggaccagccggggaggtcggcaaaccgggcgagagaggtttgcacggcgagttcgggctgccgggacctgcagggccgcgcggagagcgcggccctcccggcgaatcaggtgcagctggacctacgggaccgatcggaagcagaggtccgtccggcccccctggacctgacggcaataaaggtgagcccggagtggtgggcgcggtcggaactgcaggaccctctggaccgtccggccttccgggggaacggggcgccgccggaatccctgggggaaagggagaaaaaggagagccgggactgcgcggcgagatcggaaacccagggcgggatggcgcacggggagcaccgggagcagtcggtgccccgggtccggcaggtgcaaccggtgaccgaggcgaggctggtgcggccggccctgccggtccagctggtccaagaggctcacctggcgagcgaggtgaagttggccccgccggaccaaacgggtttgctggacccgcgggagctgccggacaacctggagcaaagggcgaacgcggtgcaaagggacccaagggagagaacggagtggttgggcccaccgggcctgtgggagccgctgggccggcgggcccaaatggtcccccggggcctgcgggtagccgcggcgatggaggaccgcctgggatgactggcttcccgggagcggcgggtcggactgggccgccgggcccgagcggaatctccggtcctccgggcccaccaggaccagcgggaaaggaagggctgagaggaccgcgtggcgaccaaggccccgtggggcgtaccggggaagtcggagcggtgggcccgcctggtttcgctggagagaagggaccttccggtgaggctgggactgcgggaccaccaggcactcctggtcctcagggactgttgggtgccccaggaatcttgggtttgccggggagcaggggagaacgcggactccctggagtggcaggggcggtgggagagccggggcctctgggaatcgcgggaccccctggagcgcgcggtccgcccggagccgtcgggtcgccgggagtcaatggcgctcccggcgaagcaggcagagacggaaacccgggaaatgacggaccgccaggacgggatggacagcctggccataagggtgagcggggctacccgggcaacattggaccggtgggggctgctggagccccggggccgcatggcccggtaggaccggcgggaaagcacggaaaccgcggagagactggaccgagtggaccggtcggtcccgcgggcgccgtcggaccccgtgggccctcgggacctcaagggattcgaggagacaagggcgaaccaggtgagaagggaccacggggcctgccgggcctgaagggacacaacgggcttcagggattgcctggaatcgcgggccaccacggtgatcagggagctccgggatcggtggggccagcaggtccacgcggaccggcgggtccttccggacctgcaggaaaggatgggaggactggacacccgggaaccgtggggccagcgggaattcggggcccgcaaggacaccagggcccagccggacctcctggacccccgggacccccgggtccccccggtgtttccggagggggctacgacttcggatatgatggcgacttctaccgcgccgaccaaccgcgcagcgccccttcgcttcggcctaaggactacgaagtcgacgcaactctgaagtcgctgaacaatcagatcgaaactctgctgaccccggaaggctcgcgcaaaaatccggccaggacttgccgggatctcagactgtcgcatccagaatggtcatcgggctactactggattgatccgaaccagggatgcacgatggacgcaattaaggtgtactgtgacttctctaccggggaaacgtgtatccgcgcacagccggaaaacatcccggccaagaattggtaccggtcatcaaaagacaaaaaacatgtctggctgggagaaaccatcaacgccggatcacaattcgaatacaacgtggaaggggtgacttcaaaggagatggcgacccaactggctttcatgaggctcctcgccaattacgcaagtcagaatatcacctaccactgcaagaacagcatcgcatacatggacgaagaaacgggaaatctgaagaaagcggtgattctgcagggatctaacgatgtggaactggtggcggagggaaactcacgcttcacctacacggtgcttgtcgacgggtgctccaaaaagaccaacgaatggggtaagactatcatcgaatacaaaacgaataaaccctcccgcctccccttcctggacatcgcgcctctggatatcggaggagccgatcaagagtttttcgtggacatcggaccggtgtgcttcaaa

SEQ ID NO: 32517 - DNA, 4098 bp, synthetic construct
  misc_feature 1..4098: note = Description of Artificial Sequence: Synthetic coding sequence
  source 1..4098: mol_type = other DNA
atgctctcgtttgtggacactcgcaccctgctgctgctggccgtgactctctgtctcgcgacctgccaatcactgcaggaagaaaccgtgcgcaagggccctgctggagacagaggaccccgcggtgagcggggaccgcctggcccaccgggacgcgatggcgaagatgggccaactggaccacctggtccaccaggacctccgggtccgcctggtctgggcggcaacttcgcggcccagtacgatggaaaaggagtgggactgggcccgggtccaatggggttgatggggcccagaggcccgccgggtgcagcgggagctccgggacctcagggattccaaggcccggcaggggagccaggcgaacctgggcagactggtcctgcaggagctcgtggccctgccggaccaccaggtaaagccggagaagatggtcacccgggtaagcctggaaggcccggtgagaggggggtggtcgggccgcagggtgcacggggattcccgggaactcccggattgccaggattcaaagggattagaggccataacggactcgatggcctgaaggggcagccgggagctcctggcgtgaagggtgaaccaggagcccctggcgaaaacggaacgccggggcagactggggcgcgcggactgccaggagagcgcgggcgggtcggggccccgggccccgcgggagcacgggggagcgatggtagcgtcggtcctgtgggcccggctggaccaatcggatcagccggtcctcctggatttcctggagcgccagggccgaagggagagatcggagcagtgggaaacgcaggaccagcgggcccagcgggcccccgtggagaagtgggtctgccggggctgtcgggacctgttggtcccccagggaacccgggagccaacggactgactggagcgaagggggctgctggcctgcccggagtggccggtgcccccggcctgccaggaccccggggaatcccggggccagtgggagctgccggcgccaccggagcccgcggactggttggggagccaggaccggccggatccaagggggagtccggaaacaagggtgaaccgggttcagctggaccgcaaggaccgccaggaccttcgggagaagaaggcaagagaggacccaacggtgaggcaggttccgctggcccgcctgggccgccaggtctgcgcggctcgcccggatcccggggacttccaggcgctgatggacgagccggagtgatggggccacctggaagcaggggagcgtccggcccagccggcgtgagaggtccgaatggagatgccggacgaccgggggaaccgggcctcatgggaccgagaggactcccagggtccccgggtaacatcggccctgcaggtaaggaaggacccgtgggcttgccgggcatcgacgggaggcccggcccaatcggtccagcaggggcacggggggagccggggaacatcggattcccgggccctaaaggacctactggggacccgggaaagaatggggacaaaggacacgctggattggccggagcgcgtggggccccgggaccggatggaaataacggtgcccaggggccgcccgggccgcaaggcgtccaaggaggcaaaggggagcaaggcccgcccggcccacctggcttccaaggcctgccggggccgtctggcccggccggcgaagtgggcaagcccggcgaacgcgggcttcacggagaattcggtctgccaggtcctgcaggcccccggggagagcgggggcctccaggcgagagcggcgcggccgggcctactggacccatcggttcgcgcggtccaagcggaccgccgggacccgatggaaacaaaggcgaaccaggagtggtgggcgcggtgggaaccgctggaccgtcgggaccgagcgggcttccgggtgagcgcggtgccgcgggaatccctggaggtaagggtgaaaagggagagccgggactgcgcggagaaatcggtaaccctggtcgggacggggccaggggcgcaccgggcgcagtgggagccccaggaccggctggagccactggcgaccgcggcgaggcgggagcagccggcccagcaggtccagccggacctcgcgggtcaccaggagaaaggggtgaagtagggcccgcaggacccaatgggttcgctggccccgcaggtgcagccggtcaaccgggggccaagggcgagaggggagccaaggggccaaaaggagaaaatggcgtggtagggccaactggtccagtcggagccgctggacctgcgggaccgaacggcccgcctggtccagctgggtcgcgcggggatggcgggccgccgggcatgaccgggtttccgggagccgctggtcggactggccctccaggaccgtctggaatctccggaccacccggtccgcctggccctgcggggaaagaggggctgagagggccacgtggcgaccagggacctgtcggtcgaaccggggaggtcggagccgtggggcctcctggtttcgcaggagaaaaggggccctccggagaggcaggaaccgcgggtccaccaggcaccccgggaccgcagggattgctcggagccccgggcattttggggcttccgggatcgagaggagaaagagggctgcctggcgttgctggagcagtcggggagccgggaccgcttggcatcgctggaccaccaggcgcgcgcggcccaccgggtgcagttggatcgccaggagtgaatggtgccccgggcgaagcgggacgggacggaaacccgggaaatgacggacctccggggcgggacggtcagccgggacacaagggagaacggggctacccaggcaatattggacccgtgggagcggccggagcccccggcccgcatgggccggtcggccccgccggcaagcacggaaaccgcggggaaacgggaccatcgggtccggtaggtccagcaggagctgtggggccgcgaggtccctcaggtccgcagggtatccgaggcgacaaaggtgagccgggggagaaaggcccgcgcggtttgcctggcctcaaaggtcataacggactgcagggcctcccgggaatcgcgggacaccatggggaccagggagcacctggatcagtgggaccagcaggccctcgcgggcccgcaggcccttccggtccggcgggaaaggatggacgcaccggccaccctgggaccgtgggtccagctggaatcaggggcccacagggacatcaggggcccgcgggtccgccgggtccacctggaccaccgggccctccgggggtttccggaggggggtacgactttggttacgacggagacttctaccgcgccgaccaaccgaggtcggcgccgagcctgaggccgaaggattacgaggtcgacgccaccctgaaatcccttaacaatcagatcgaaaccctgctgacccctgagggatcgagaaagaacccggcgcggacctgccgggacctgcggctcagtcatccagaatggtcaagcggctactactggatcgatccgaatcaaggatgtactatggacgccatcaaagtctactgcgacttcagcaccggagaaacctgcatcagagcccagccagagaatatacccgcgaagaactggtaccgctcgtcgaaggataagaagcacgtgtggctcggagagacgatcaatgccgggtcacaattcgaatacaatgtcgagggcgtgacttcaaaagaaatggcgacgcaactcgcttttatgagacttctggccaactacgcgtcccagaacatcacctatcactgcaagaattctatcgcctacatggatgaggaaaccgggaacctgaagaaggctgtgattctccagggaagcaacgacgtcgagctcgtggctgagggaaacagccggttcacttatacggtcctcgtggacggatgctccaaaaagactaatgaatggggtaagactatcatcgaatacaagaccaacaagccatccagactcccgttcctggatattgccccgctggacattggcggcgcggaccaggagtttttcgtcgacatcggtcctgtgtgtttcaag

SEQ ID NO: 32518 - DNA, 4098 bp, synthetic construct
  misc_feature 1..4098: note = Description of Artificial Sequence: Synthetic coding sequence
  source 1..4098: mol_type = other DNA
atgttgtcatttgtcgacacacggactctgctgctgctggcagtaacactgtgtctagccacttgccagtctcttcaggaggaaaccgtgcggaagggccccgctggggacagggggccacgaggagagcgaggcccaccgggtcctcctggaagggacggcgaggatggacctaccgggccccctggcccacccgggcctcctggcccaccgggcctgggcggcaatttcgccgctcagtatgatggcaaaggggttggcttgggacccgggcctatggggcttatgggaccgaggggaccccccggggctgctggcgctcctgggccgcaagggtttcagggacctgccggcgaacctggagaacccgggcaaacaggtccagcaggcgctagagggcccgctggtcccccggggaaagccggtgaagacggccatcccggtaagcccggaagacccggcgagcgaggtgttgtcggaccccagggcgcaaggggcttcccaggaactcccgggctgccggggtttaaagggatccgaggacataatgggctggatggactgaaagggcagccaggcgctcctggagtcaaaggtgagcccggagcacccggtgaaaacggcactcccggccagaccggggcaagagggttgccgggtgagcgtggacgagtcggcgcaccagggcccgcaggagctagaggctctgacggaagtgtggggccagttggcccggccgggccaataggcagcgctggacctcctggcttccctggagccccgggacctaagggggagattggcgccgtgggaaacgctggccccgcaggacccgccggcccccggggagaggtaggcctcccaggcctttccggcccagtcggccccccaggaaatccaggggccaatggcctgacaggcgcaaaaggtgccgccgggctgcccggcgtggcaggggctcccggactccctggacctagaggcatccccgggcctgtcggtgccgctggggccactggcgcccgggggctggtgggcgagcctggcccagccggcagcaagggggagtcaggcaacaagggagagcccggaagcgccgggccacagggtcctcccggaccctccggggaagaagggaagagaggtcccaatggcgaggcaggaagcgcaggtcctccagggccacccggtctgcgagggtcaccaggaagccggggcctgcctggtgctgatgggagagccggggttatggggccacctggttctcgtggtgcaagtggaccagcgggcgtgcgcggccccaatggcgatgctgggcggccaggtgagcccggtctgatgggcccgagagggctcccgggatcgccaggtaacatcgggcctgctggaaaagaaggtccggtcgggctgcccggaatcgacggaagacctgggccgattggtcctgccggagctcgaggtgagcctggcaatatcgggttcccggggccgaaggggccaactggggaccctggaaagaacggtgacaaggggcacgcggggcttgctggagctcgtggggccccaggccctgacggaaacaacggagcccaaggtccaccggggccccagggagtgcaaggcggcaaaggtgagcagggccctcccggcccacctggattccaaggcctaccaggcccatccggcccagctggcgaggtgggtaaacccggtgagcggggtctgcacggcgagtttggtcttcccgggccggctggaccccggggcgagcgaggaccgcccggtgagagcggggcagccgggcctaccggacctattggctctagagggccaagtgggccaccagggcctgacggcaacaagggagaaccaggggttgtcggcgctgtgggcacggccggtcctagtggcccaagcggactgcccggtgagcgcggcgccgctggcatccccggcggaaaaggggagaagggagaacccggtctgcggggagaaataggcaacccgggtcgtgatggcgccaggggagcgccaggtgccgtgggagcccccggaccagcgggagctacaggagaccggggtgaagctggcgccgcaggaccagccggtcctgccggaccgcggggtagtcctggagaaagaggcgaagtgggtccagccggccctaacgggtttgctgggcccgccggggcagctggacagccaggcgcaaaaggagagaggggcgccaagggccccaagggcgaaaatggcgtggtcggaccgactggaccggttggtgcagcggggcccgcaggacccaatggacccccaggccctgccggctctcggggcgacggcgggcctcccggaatgactgggtttccgggcgcagccggtcggacaggcccaccgggtccgagcggtatatcgggacctcctggccctcccggcccggctgggaaggaaggccttcgcggcccgcgaggcgatcaggggcctgtcgggcgtactggcgaagtcggagcagtggggccacccgggttcgccggggagaagggtccatctggtgaagccgggacagcaggcccgccagggacccccggcccccagggcctgttgggagcaccagggatacttggcctgcccggctcccgcggtgaacgaggactgcccggtgttgctggagccgtgggtgagccgggccctctgggaatcgccgggcctccgggagcgcgcggccctcccggagctgtggggtcccccggtgtcaacggcgccccaggagaagcgggccgcgacggaaatccgggaaatgacggcccaccgggacgtgatggacagcctggacataaaggcgaaagggggtatcctgggaatatcggacccgtaggggctgctggggcacccgggccgcacgggccagtgggacctgccggaaagcacggtaatcgcggggaaaccggcccaagcggaccagtggggcctgccggtgcagtgggaccgaggggaccatctgggcctcagggaattcgaggagataagggcgagccaggagagaagggtcctcgcggcctgcccgggctgaagggacataacgggttacaaggacttcctgggatcgcaggacaccatggggatcagggtgcaccagggtccgtcggccccgcaggtccacggggtccagccgggccctccggacctgccggcaaggatggacgaacaggacaccctgggacggtgggaccagccggaattagagggcctcagggccaccaggggcccgccggtccaccgggccctcccggccccccaggaccccccggcgtcagcggaggcgggtatgattttggttacgacggcgatttctatagggccgatcagcctcgtagcgccccgagcctgcgcccaaaggattacgaggtggatgccacactaaaaagcctaaacaaccagatcgaaaccctgttaactccagaagggtctcgaaagaatccggctaggacctgccgcgacctgcgcctgtctcacccagaatggagctccggttactattggattgatcctaaccagggatgcaccatggatgcgataaaagtctactgtgatttctccaccggagagacttgtattcgtgcccagccagagaacattcctgcaaagaactggtacaggagctctaaggacaaaaagcacgtctggctgggcgagaccattaatgccggatcacaatttgagtataacgtagagggcgtcaccagcaaagagatggcaactcaactggcgtttatgaggcttctggccaactacgcctctcagaatatcacatatcattgcaaaaattctatagcttatatggacgaggaaactggaaacctgaaaaaggcggtgattctccaggggtctaatgacgtggaattagttgcagagggaaactcgaggtttacctataccgtactcgttgatggctgttctaaaaagaccaacgagtggggaaagacaataatcgaatacaaaaccaacaaaccatcaaggctgccattcctcgacattgcccctctcgacattggaggtgctgatcaggagttttttgtggatatcggacctgtgtgttttaaa

SEQ ID NO: 32519 - DNA, 4098 bp, synthetic construct
  misc_feature 1..4098: note = Description of Artificial Sequence: Synthetic coding sequence
  source 1..4098: mol_type = other DNA
atgcttagtttcgtggacactcgtaccctgctcctcctggctgttacgctatgtcttgctacctgtcagtctttgcaggaagagactgttaggaagggacctgctggggaccggggaccgagaggtgagagaggccctcccggccctccaggccgcgacggcgaggacggtcccactggccctcccggcccacccggccctccggggcctcccgggctgggcggtaactttgcagcacaatacgatggtaagggtgtcggtcttgggcctggccccatggggctcatgggcccccgcggccccccaggtgcagctggtgcccccggaccgcaaggttttcagggacccgcgggtgagcccggcgagcccggccagaccggccccgcaggagctcggggccctgctggacctcccggtaaggctggtgaggacggccatcccgggaagccaggcagacccggtgagaggggcgtcgtcggaccgcagggagcccgcggcttccctgggacacccggtctgcccggcttcaaaggcatccgcggtcacaacggtttggatggcctcaagggccaaccgggcgcccctggggtcaagggtgaacccggcgctccgggtgagaacggtacacctggccagaccggcgcccgtggcctcccaggtgagcggggacgcgtcggggctcccggacctgcaggtgcccgcggctcggatggttccgtcggcccagtggggccggccggcccaatcggctccgcaggacctccaggatttcccggtgctcctggtcccaagggtgagatcggtgctgtcggcaatgccggtcccgctggccccgctggtccgcgtggtgaggtgggtctcccgggattgtcgggacctgtcggtcctcccggtaaccctggtgccaacggcctcaccggggctaagggcgccgctggtttgcccggcgtcgccggtgcccctggtctccccggcccccggggaatcccgggcccggtcggtgctgctggcgctactggagcgcgcggtttggtcggtgagcccggcccggctggctcgaagggggagtccggtaacaagggcgaacctggctctgctggaccccaaggcccaccaggtcctagtggcgaggaaggtaagcggggaccgaacggtgaggccggtagcgcgggtcctccaggaccccctggtcttcgtggttccccgggttctcgaggcctcccgggggctgatggccgtgcaggcgtcatggggcctcctggcagtagaggggcctccggacccgccggtgtccgtggtcccaatggcgatgccggccgcccaggcgagccggggctgatgggaccccgcggtctgccgggtagcccaggcaacatcggacctgctggaaaagagggccccgtcggtctacccggtatcgacggacgtcccggtcccatcggcccagccggagccagaggtgagcccggaaacatcggcttccctggccccaagggtcctactggtgacccgggaaagaacggtgataagggtcacgctggcctcgccggtgcccgtggcgctcctggccccgatggcaacaatggtgcccagggtccccctggtccccaaggtgtgcagggtggcaagggtgaacagggtccccccgggccgcctggattccagggactccctggcccgtccggccccgccggggaggtcggtaagcccggcgagcgcggtctccacggcgagttcgggctgcccggacccgcaggccctcgtggtgagcgtgggccccctggcgagagcggagccgccggcccgaccggccctatcggctcccgcggtccttctggccctccgggaccagatggtaacaagggagaacccggagttgtgggagccgtgggcacggcgggtcctagtggaccctcgggattgcctggtgagcgtggagccgctggcatcccgggcggtaagggagagaagggcgaacctggcctccgtggcgaaattggcaaccctggacgcgacggtgctcgtggagcgccgggtgctgtgggagctcctgggcccgcgggagccacaggggatcgtggagaagccggagctgcgggccccgctggtcctgccggtccgcggggaagcccgggtgagcgtggtgaggttggccccgcgggcccgaatgggttcgctggccccgccggcgctgctgggcagcccggcgctaagggggagcggggtgccaagggtcccaagggcgaaaacggggtcgtcggccctaccggccccgtcggtgcagcgggcccggctggtccgaacggtcctcccggaccagctgggtcacgcggtgatggtggaccccccggcatgaccggctttcctggcgctgcagggcgtaccggacccccgggccctagcggaatctccggacctcccggacctcccggccccgccgggaaggagggtttgcgcggtccccgtggggaccaaggtccagtggggcgtaccggtgaggtcggcgccgttggtccccccggattcgcaggggagaagggcccctcgggtgaggccggcaccgcgggacctccgggaactccaggcccccaaggtctgttgggagccccgggaatcctggggcttcccggttcccggggcgagcgtggcttgcccggagtcgcgggtgcggttggcgagccaggcccgctgggcatcgccggcccgcccggcgcacgcgggccgccgggagctgtgggctcccctggagtgaatggggctcctggagaggctggccgcgatggcaaccctggtaatgacggacccccgggccgtgatggacagccgggccacaagggtgagcgtggctacccaggcaacatcggtcccgttggtgcagctggtgctcccggtccacacggtccagtgggaccagcgggcaagcacggcaatcggggtgagactggcccgtccggcccggtgggtcctgccggcgctgtcggtccccgtggaccttctggtccccaaggtatcagaggtgataagggagaaccgggcgagaagggccctcgcggcctcccaggcctaaagggtcacaacggcctccagggactccctggtatcgccgggcatcacggtgaccagggtgcacctggatcggttgggccggcagggccccgcggacccgctggcccttctggtcccgcgggcaaggatggccgcactggccatcccggcactgtgggcccggcgggtattcgtgggcctcagggccaccagggccccgccggccctccgggcccccccggcccccccggcccacccggtgttagcggtggcggctacgacttcggctacgacggcgatttctacagagccgaccagccccgtagtgctccctccctgcgtcccaaggattacgaggtcgacgccacgcttaagagtcttaacaaccagatcgagactctgctcacccccgaaggttcccgtaagaaccctgcccggacctgtagagatttgcggctttctcaccccgagtggtcctcgggttactactggatcgatcctaaccagggatgcaccatggatgctatcaaggtgtattgcgacttctctaccggagagacgtgcatccgcgcgcagcccgaaaacatccccgctaagaactggtaccgttcgagtaaggacaagaagcacgtgtggctcggcgaaacgattaacgctgggagccagtttgaatataacgttgagggcgtcacatccaaggaaatggccacgcagcttgcatttatgcgcctccttgccaactacgcctcgcagaacatcacgtatcactgcaagaattccatcgcctacatggacgaagagaccggcaacctcaagaaagcggtgatactccagggatccaacgatgtggagctcgttgccgagggcaatagtcggttcacatacacggtccttgttgacgggtgtagtaagaagaccaacgaatggggcaagacaatcatcgagtacaaaacaaacaagccctctcggctgccattcctggacatcgctcccctggacatcggcggtgccgaccaggagttcttcgttgatatcggccccgtctgtttcaag

SEQ ID NO: 32520 - DNA, 4098 bp, synthetic construct
  misc_feature 1..4098: note = Description of Artificial Sequence: Synthetic coding sequence
  source 1..4098: mol_type = other DNA
atgctctctttcgtcgatacccggaccctcctgcttctggcagtgaccctttgccttgcaacctgccagtcacttcaagaggaaactgtcaggaaaggtcccgcaggcgaccgaggcccacgcggtgaacgcggtccaccaggccccccgggtagagatggcgaagatggtccaaccggaccaccgggccccccgggaccgcctggacctccaggattgggaggtaactttgccgcacaatacgatggcaaaggagtcggactcgggcccggacctatgggtcttatggggccacgtggaccgcctggtgcagcaggagccccgggcccacagggatttcaaggtcctgctggagaaccaggagaacctggccaaactggtcctgcaggggcacgcgggcctgcgggtccgccaggtaaggctggggaagatggtcatcccgggaagcctggtcgtccaggagagagaggggtcgttggtccacaaggagcccgcggattcccaggaactccaggactgcctggttttaagggcattagaggtcataacggtcttgatggcctgaagggtcagcctggagcacccggagtgaagggcgaaccaggagcaccaggggaaaacggcactcccggtcaaaccggcgcccgaggattgcccggagagagaggtagggtgggagccccaggtcctgcaggagcgcggggctcagacgggtcagtcggacccgtgggaccggccggaccgataggaagcgcgggtcctccaggtttccctggagctcccggacctaagggagaaattggtgctgtgggaaacgctggacctgcaggccctgccggtcctagaggcgaagtgggactccctggtctttcgggtcctgtggggcctcccggtaaccctggtgcaaacggactgactggcgcaaagggggcagccggtctgccgggggtcgccggagcgccgggccttccaggaccccgggggatcccaggcccagtgggcgcagcaggggcaacgggtgccagaggcttggtgggcgaacccggcccggctggatcgaagggcgagtcggggaataagggcgagccaggatcggcgggtcctcaagggcctcctggcccatcgggtgaggaaggaaagcgtggcccaaatggtgaagccggcagcgccggtccccctggtccgcctggcctgcggggcagccctgggtcgcgcggattgcctggtgcggatggacgcgcaggtgtgatgggtccacctgggagccggggtgccagcgggccggcaggagtgcggggacctaacggagacgcagggcgaccaggcgaacctggcctcatggggccccgtggacttccgggatcgcctgggaatattggaccggccgggaaggaagggcccgtgggactcccaggaattgacggtagacccggcccgataggccctgcaggagctaggggtgagcccgggaatatcgggttcccgggaccgaaaggtccaactggtgatccgggcaagaacggagacaaggggcatgcaggacttgcaggagcaagaggggcaccgggacccgatggaaacaatggggcacagggaccaccaggcccacaaggtgtgcagggcggcaagggcgagcagggaccccccggaccacccgggttccagggccttcccgggccttcggggcccgcgggagaagtaggaaagcctggggaacgaggcctgcacggtgagttcggattgcccggtccagcaggtccacgcggtgagcgaggacctcccggtgaatccggtgccgcagggccgacgggacctattggttcaagaggcccatcaggccctcctggcccggacgggaacaaaggagaaccgggggtggtgggcgcggtgggaactgcaggtccaagcggaccttctggactgcctggagaaagaggagccgcgggcattccaggcggaaaaggcgaaaagggagagcccgggctgagaggagagatcggaaatcctgggagggacggggcacgtggggcacctggcgccgtgggagcaccaggcccggcgggagctactggagacagaggtgaagccggtgcggcaggtcccgctggcccggcgggccctcgggggtcgcctggtgaacgtggggaggtcggccctgccggacctaatggattcgcaggaccagctggtgctgccgggcagccaggagcaaaaggtgagagaggggccaagggtcccaaaggagaaaacggagtcgtgggaccgaccggtccagtgggtgccgccggaccagcgggccccaacggacccccaggcccagctggttcacgaggtgatggcggcccacccggtatgactggttttccgggtgcggcaggaagaacgggcccccctggacctagcggaatctccggacctcctggtccccccggtcctgctggcaaggaagggctcagaggtcctcggggagatcaggggcctgtgggccgcaccggagaagtgggtgcagttgggccaccaggatttgcaggagagaagggtcctagcggtgaagcaggtactgcgggtccaccgggcacccctggtccccaagggctcctgggagcaccgggtattctggggctgcccggatcccggggtgaaagaggcctgcctggtgttgcaggtgcagtcggggagcccgggccgcttggaattgcaggcccaccaggtgctagagggccacctggggctgtcggatcccctggagttaacggggcaccaggagaagcggggagggatggtaatcctgggaatgacggtcctccgggacgtgacggtcagccaggacataaaggagagcgtggataccctgggaacatcggcccggtcggggcagctggtgcacctggtccccatggtcctgtagggccggcagggaagcacggcaaccgtggcgaaaccggacctagcggtccggtgggtccagcgggcgcagtcggacctagaggaccgtcagggccccaaggcatcaggggagataaaggtgaaccgggagaaaagggaccacgggggctccctggtttgaaggggcataatggcctgcaggggctcccaggtatagcaggccaccacggggatcaaggagcgccaggctcagttggacccgctgggccgcggggtccagcaggcccatctggacccgcaggaaaggatggaagaactggtcaccctggaactgtcggcccggccggtatcaggggaccccagggacaccaaggtcccgccggaccccctgggcctcccgggccaccaggcccgccaggagtgtccggaggtggttacgatttcggctacgatggtgacttttaccgagccgatcaaccacgcagcgcaccgagcctccgcccaaaagattacgaggtggacgcaaccctgaagtcccttaacaatcaaattgaaacgcttcttactccagaaggatccaggaagaacccagctcgtacctgtagggacctccgactttcccatccagaatggagctcgggttactactggatcgacccaaatcagggctgtaccatggatgcgattaaagtgtactgtgatttttcgaccggggaaacctgtatcagagcacaacctgagaacattcctgctaagaactggtaccgtagtagcaaggacaaaaagcatgtctggctgggtgaaactatcaacgcaggctcgcagtttgaatacaacgtggagggggtgacttccaaagaaatggcaacccaacttgcatttatgcggctgctggcaaactacgcgtcacagaacattacctatcattgcaagaattccattgcttacatggatgaggaaaccgggaaccttaagaaggcagtgatacttcagggttcgaacgatgtggagctggtcgccgaagggaattcgaggtttacttacaccgtgctcgtcgatggttgttcaaagaaaaccaatgagtggggaaagaccattatcgagtataagacgaataagccttccagactgccttttcttgatattgcacctctggacatcggcggagcggatcaagagttttttgtggacattggtcccgtgtgtttcaaa

SEQ ID NO: 32521 - DNA, 4098 bp, synthetic construct
  misc_feature 1..4098: note = Description of Artificial Sequence: Synthetic coding sequence
  source 1..4098: mol_type = other DNA
atgctctcatttgtggatactcggacccttctgctgctggctgtgaccctgtgtctggccacctgtcaaagcctccaagaagaaaccgtgagaaagggtcctgcgggtgatagaggtcctcggggagaacgtggacctccgggtccgccaggacgagacggtgaggatggacccaccggtcctcccgggccccctggtcctcccggtcccccgggtctgggaggaaacttcgcagcccaatacgacggtaaaggagtgggacttggtcccggccctatgggactcatgggtccacggggaccgcccggggcagcgggggcacctggccctcagggctttcaaggacctgccggcgagccaggggaacctgggcaaactggcccggctggagctaggggtcccgccggccctcctggaaaggcaggagaagatggacacccggggaagcctggccgacccggggaacgcggagtggtgggaccacaaggtgcacgcggctttcccggtacgcccggcctcccagggtttaaaggtatcagaggtcacaatgggctggatggtcttaagggacagcctggagccccaggtgtcaagggcgagcccggcgccccaggtgaaaatgggactccgggccaaaccggcgcccggggactgcctggcgaaaggggcagggtgggtgcacctggcccagctggagctcgcggatctgacggatcggtgggacccgttggcccagcggggccaattggttcggcaggtcccccaggctttcccggagccccagggccaaagggtgaaattggagcagtgggaaacgcgggcccggcaggacctgcgggaccgcgaggagaagtgggacttccaggcctttccgggccagtcggaccgccgggaaatccgggagctaatgggctcactggtgcaaagggtgcagcaggtctgccaggcgtggcaggggcaccgggccttcctggcccacgcgggatccccggacctgtgggtgccgcaggtgccacgggtgcacgcggtcttgttggcgaacctggcccggcaggttcaaaaggcgaatcagggaataaaggggaaccaggttccgcgggtccacaaggtcctcctggtccatccggtgaagaaggaaagcgcggccctaacggagaagcaggatccgcaggtccgccgggacctccaggcttgaggggctcccccgggtcgagagggcttccaggggcagatgggcgggcaggcgtgatgggaccccccggatcaaggggtgcctcggggccggctggggtgcgtggacctaatggtgacgccggacgaccaggagagccaggtcttatgggacccagaggcctgccaggatccccaggtaatatcggaccggcggggaaggagggacccgtcggtttgccaggtatcgatgggaggcctggcccgatcggacccgcgggtgcgaggggcgaaccagggaacatcgggttcccaggccctaagggacctacgggagatccaggaaagaacggggataaagggcatgcaggactcgccggcgcaagaggtgcaccaggtcctgatggcaataacggagcacaagggccgccagggccacaaggagtgcagggcggcaagggggaacagggtccacccggtccacctgggtttcaagggctccctggtccatcaggtccagcaggtgaagtcgggaagccaggtgaacgtggcttgcatggtgaatttggactgccgggaccagccggaccacgtggagagagagggccacctggagaatctggagccgcaggccccactggacccattggctcccgtgggccgtcgggaccgcctggtccggatgggaacaaaggagaacctggtgtcgtcggtgcagtgggaaccgcgggaccatccggaccctcaggacttcccggagaaaggggtgccgccggtatacccgggggtaagggcgagaagggtgagcccggtctgagaggggaaataggcaacccgggccgtgacggggccagaggcgctcctggagccgtgggcgcccccggacctgctggtgccactggagacagaggtgaggccggagcggctggtccggccggccctgccggacctcgggggtcccccggagagaggggtgaagtgggacccgcgggaccaaacggattcgctgggcctgctggggcagcaggacagcctggtgcaaaaggagagagaggtgccaaaggtccaaaaggcgaaaatggcgttgtggggcctaccggaccagtgggcgcagcgggtcctgccggtccgaacggcccaccgggtccagcgggttcgagaggagatggcgggcctccaggtatgacgggattccctggagcagcgggacgaaccggtcctccgggccctagcggcatttctgggccaccggggcctcctggacctgcaggcaaagaaggactcagagggccccggggagatcagggtcctgtgggtcgtactggagaggtcggggcagtgggaccacccggttttgcaggagagaaaggtccttcgggggaggcagggactgcggggccaccgggtactccaggaccgcagggacttctcggagcaccagggatcctgggattgcctggatcgagaggagaaagaggtctgcctggcgtagccggagcagtcggagaaccgggaccgttggggatcgccgggcctcccggtgcgagaggaccgccaggcgcagtcggctccccaggagtgaacggagctccgggggaagccgggcgcgatggaaaccctggaaacgacggccctccaggtagagatggacaaccaggacacaagggggagcgggggtatcctggtaacattgggcctgtcggagccgcgggtgcgcccgggcctcatggtcctgtgggaccagcgggaaagcatggtaaccggggagaaaccggcccaagcggcccggtggggcccgccggtgcggtaggaccaaggggaccctccggacctcagggaattaggggagataagggcgaaccgggtgagaaaggcccccgcggtctgcccggcctcaagggacataacggccttcaggggcttccaggtattgcaggccaccatggcgatcaaggggcccccgggtccgtcggacctgcagggcctcgcggaccggctggcccttcgggaccggctggtaaggacggacggacgggacatcctggtactgtcggacctgcggggattcgaggaccgcaaggacaccagggacctgctgggcccccaggaccacctggacctcctggtcctccaggagtgtcgggtggtggatacgatttcggttacgatggcgacttttacagagcagatcagcctagaagcgcccctagcttgcgcccaaaggattacgaagtggacgctacccttaagtccctcaataaccagattgaaactctcctgactcctgagggaagccggaagaaccccgcacggacttgtcgcgacctgagactgtcacatcctgaatggtcaagcggttactactggattgatcccaaccagggctgtaccatggatgcgattaaggtgtactgcgacttcagcactggggaaacttgcatcagagcccaacctgagaacatcccggcaaagaattggtacaggagctcgaaggataagaaacacgtctggctgggagagacgattaatgcgggaagccaattcgaatacaatgtcgaaggtgtgacttcgaaagaaatggcgacccagcttgcatttatgcgcctgcttgctaactacgcgtcccaaaacataacctaccattgcaagaactcgattgcctacatggatgaggagacgggtaacctgaagaaggcagttatactccagggctcaaacgacgtggagcttgtggcagaagggaatagccggtttacctacactgtgcttgtcgacggttgttcgaagaaaaccaatgagtggggaaagaccatcatcgagtataagaccaacaaaccttcgcgtctgccttttctggatattgcacctcttgacattggcggtgcggaccaagagttctttgtggacattggtcctgtttgttttaag

SEQ ID NO: 32522 - DNA, 4098 bp, synthetic construct
  misc_feature 1..4098: note = Description of Artificial Sequence: Synthetic coding sequence
  source 1..4098: mol_type = other DNA
atgctttcattcgttgatactaggactcttttgctgttggctgtcactttgtgtctggctacttgccaaagcctgcaagaagagactgttaggaaaggtccagctggggaccgcgggcctcgtggcgagcgtggaccaccaggtccgccgggccgtgatggtgaagatggtcctacaggtcctcctgggcctcctggaccaccaggtccacccggattaggcggtaatttcgcagcacaatatgatggtaagggtgtgggtctaggacccggtccaatgggactaatgggtcccagggggcctccaggagctgccggggctcctggtccacaggggtttcaggggcctgctggagagcccggggagccaggacagacaggtcctgctggcgccaggggaccagcaggaccgccaggaaaggcaggagaagacggccaccctgggaagcctggaagacctggtgaaagaggagttgttggccctcagggggctcgtggttttccaggaaccccaggtctgccaggtttcaaagggattagaggtcataatggtctcgacggtttaaaaggtcagcccggtgcgcctggagtaaaaggtgagcctggggcgcctggagagaatggaactcctggacagactggcgctcgtggtcttccgggagaaagagggagggtcggagcgccaggccctgcaggggcccgcggcagtgacggtagtgtggggccggtcggaccggcaggccctattggttcagcaggaccccctgggttccctggagcaccagggccgaagggggagattggggccgtggggaacgccgggccagcggggcccgcaggtcctaggggagaagttggtttaccaggtttgagtggccctgtgggtcctccgggaaatccaggtgccaatggacttaccggtgctaagggagccgctgggcttcctggggtagcaggcgctccaggtctacccggaccaaggggaattcctggtccggtgggagcagctggtgctacaggtgcaaggggtttggtgggtgaacctggacctgccggatccaaaggagagtccggaaacaagggggaacccggatcagctggacctcagggacctcctgggccatcaggtgaagagggtaagcgaggtcctaacggtgaggcaggttcggcaggaccacctggtccccccggacttcgcggctctcccggttctcgtggattaccaggcgcagatggtagggccggcgttatgggaccaccaggctccagaggagcctctggtccagcaggtgtacgaggtccaaacggtgatgccgggaggcccggtgagccaggtctaatggggccacgaggactaccaggtagtccggggaacataggaccagctggtaaggaggggcccgttgggctgccgggcatcgatggaaggccaggcccaattggacctgcaggtgctaggggtgaacctggcaatatcggctttccaggtccaaagggccccacgggagatcctggtaaaaatggagataagggtcacgccggacttgcaggggcaaggggcgctccaggtcctgatggaaataatggagcgcaggggcctccaggaccacaaggtgtgcagggtggtaaaggagaacagggacctcctggtccgcccgggtttcaaggtttacccggaccttccggccctgccggtgaagtgggcaagccaggcgaaagaggtcttcacggggagttcggtcttcccggaccagcagggccccgtggagaacgtggccctcccggcgaatcaggcgctgctggacccaccggtcctattggaagtcgtggaccgtccggacccccaggacctgatggaaataaaggcgagccaggggttgttggggcagttggtaccgccggtccttctggaccctctggtcttcctggagagcgaggtgcggctggaatccctggaggaaaaggagagaaaggagagcctggtcttaggggagagattggaaacccaggtagagatggtgctagaggcgctccaggggcggtgggtgccccaggtcctgcaggggcaactggtgacaggggcgaagctggagccgctgggcctgctggtcccgcaggcccacgaggtagcccaggtgaaaggggtgaagtaggaccagctgggcctaatggtttcgctggtcccgctggggctgctgggcaacccggagctaagggggaaagaggtgcaaagggacctaagggtgaaaacggtgtcgttggacctacggggcctgttggtgcagcaggaccagccggtcctaacgggccacctggacctgctggtagcaggggagacggcggcccacctggtatgacaggttttccgggtgctgcgggaaggaccggtccccctggtccaagcggaatctccggcccacctggtcctcccggcccagctgggaaggagggcctgcgggggccacgcggtgatcagggtcctgtgggccgaacaggtgaagttggagccgttgggccacctggtttcgccggagagaaggggcccagtggagaggcaggcacagccgggccgcctggtacacctggaccacagggactgctcggcgccccaggaattttggggttgccgggttctcgtggggagagaggtctcccaggagttgctggagctgttggagaaccaggacctttagggatcgctggcccaccaggtgctcgaggtccaccaggggcagttggttcccctggagtaaacggagctcctggtgaggccggaagagatggcaaccctggaaatgacggtcctccaggacgagacgggcaaccggggcataagggggaaagaggatacccaggtaatatcggacccgttggcgcagccggagctcctggacctcatggtccagtcggtcccgcgggaaagcacggaaacagaggggagactggcccttcaggacctgtaggcccagctggtgctgttggaccaagaggaccatcaggtcctcaggggattcggggtgataaaggggagcccggagagaaaggaccaaggggcttgcccggactgaagggacacaatgggcttcaaggcctcccgggcattgctggacatcatggtgatcaaggtgcgcctgggtctgttgggccggctggtcccaggggtcctgccggccctagcggtccagcaggtaaggacggccggacaggtcatcctggtaccgttggtccggcaggaatcaggggaccacagggacatcagggtccagccgggccacctggacccccagggccacctggtccacctggggtaagcggtggaggatatgattttggttacgatggagacttttacagggcagaccaacctaggtccgccccaagtttgagacctaaagactacgaggtggacgcaactcttaagtctctcaacaatcagattgagacacttttaacccccgaaggttctaggaagaatcccgctaggacgtgcagagatcttagactgagtcaccccgaatggtcgagtggatattattggattgatccaaaccaaggttgcaccatggacgctattaaggtttattgcgacttttctaccggtgaaacttgtattcgggcccagcctgagaatatccctgctaagaattggtataggtctagtaaggataaaaagcatgtgtggctcggagaaaccatcaacgctggttcacagttcgagtacaatgttgaaggtgttacttcaaaggagatggctacccagttggcttttatgaggcttctcgctaattatgcatcccaaaatatcacctaccattgtaaaaactccattgcttatatggatgaggaaactggcaacttaaagaaggctgttatcctgcagggttcaaacgacgttgagctcgttgcagaagggaacagtcgcttcacatacacagttctagtggacggatgttcaaagaagactaatgaatggggaaaaacaattatcgagtacaaaaccaataaaccttcccgtcttcctttcttggatattgcccctctcgacatcgggggtgcagatcaggagttctttgttgatataggccctgtatgtttcaaa

SEQ ID NO: 32523 - DNA, 4098 bp, synthetic construct
  misc_feature 1..4098: note = Description of Artificial Sequence: Synthetic coding sequence
  source 1..4098: mol_type = other DNA
atgctttccttcgtcgacactaggaccctcctgcttttggccgttactctttgtctcgccacctgccaatcgctgcaggaagaaactgtgagaaaaggtccagcaggtgataggggaccacgcggggaacgaggtccccctggtccccctggccgtgatggagaggacggtcccactggaccaccggggccacccggacctcccggtccaccagggctgggagggaacttcgctgcacaatacgatggaaagggagtcggactcggaccagggcctatgggactcatgggacccagaggccctcccggagccgcaggtgcacccgggcctcagggtttccagggccccgcaggtgaacctggggagcccggtcagaccggaccggcaggggcaagaggcccagcgggccccccgggtaaggcaggagaggacgggcatccaggaaaacccggccgacccggtgaacggggtgtcgtcggaccacaaggtgcaagaggattcccgggaaccccaggacttccgggttttaagggaattcgcggccataacggactggacggcttgaagggccaacctggagcgccaggagtgaagggagaaccaggcgcaccaggtgaaaacgggaccccaggtcagacgggagcaagaggccttccaggagagcgagggcgcgtgggcgcgcccggacccgcaggcgcaagaggttccgatgggtcagtgggtcctgtgggcccggcagggcccatcggatctgcaggaccacctggatttccgggggcaccaggccctaagggagagatcggagcagtgggcaacgcaggccctgcgggccccgcgggacctcggggtgaggtgggtctgcctggactttccggaccagttgggcccccaggaaaccctggagcgaacggactcacgggcgcgaagggtgccgcaggattgccaggagtcgcaggagcacctggacttccgggaccgcgcggtatacccggtcctgtcggagctgccggcgcgaccggtgccagaggcctggttggggaacccggcccggccgggtcgaagggggaatcgggcaataagggagagccgggttcggcagggccacaaggtccacctggtccttcgggagaagaaggaaagagggggccaaacggcgaggcaggttccgcggggcccccaggcccccctggtctgagggggtcaccaggctccagaggattgcctggggcagatggcagagcgggtgtaatggggccgcctggtagccgtggcgcgtcaggacccgctggggtgcggggacctaatggtgatgccgggcgtccaggagagcctgggttgatgggtcctcgcgggctccctgggtcgcccggtaacattggccctgctggtaaagaaggacctgtgggactgcccggcattgatggtcggcctggacctataggaccggctggggcacgtggagagccgggcaatattggatttcctggtcccaagggacctaccggtgatccaggtaaaaacggagacaaggggcatgcaggtctggccggtgcacggggagcacctggcccggatggaaacaatggagcacagggccctccgggaccccaaggagtccaaggtgggaagggagagcaaggccctccaggaccgccaggcttccagggcttgccaggacccagcggccccgcaggcgaagtgggaaagccaggggaacggggactgcacggagagtttggcctgccgggacccgccgggcctcgcggtgaaaggggcccccctggagaatcaggagcggcaggacctaccggccctattggctcgcgtggaccgagcggcccacctggcccagacggtaacaaaggagaacctggagtggtcggcgcagtcggaactgctggcccatcaggcccctccggcctccctggtgagcggggtgcagccggaattccaggtggaaaaggggagaagggggaaccaggtttgcgaggagagatcggtaaccctggacgcgatggagcgcgtggggctcccggtgcagtcggcgcaccggggccggcaggtgcaacgggcgaccgcggggaagctggtgctgcaggacccgccggtccagccgggccccgggggagcccaggggaacgaggagaagtgggccccgctggtcctaacggttttgccgggccagccggcgcagcaggccagcctggcgcaaagggagaaaggggagcaaaaggtccgaagggcgaaaatggagtcgtcgggccaaccggtcctgtaggagcagccggacccgcgggaccaaatggtccaccaggtcccgctggttcgagaggagatggtggtccgccaggaatgacgggctttcctggtgccgcaggtaggaccggacccccaggtccttccggcatttcgggtcctcccggaccgccagggccggcgggtaaggaaggacttcggggccctcgcggtgaccaaggtccggtcggcagaactggcgaggtgggggctgtgggacctcctggcttcgcaggagaaaagggcccttcaggagaagcaggcactgcaggcccaccaggaaccccgggacctcagggccttctgggtgcaccaggaattcttggtctgccagggtcgcggggcgaaaggggtttgccaggagtggcaggcgccgtgggtgaacctggacctcttggaatagcaggtcctcctggtgctcggggccctccaggcgccgtcgggagccctggagtgaatggtgctcccggggaggcaggtcgggatggtaatcctggtaacgatggtccacccggtagagacggtcaacctggccataaaggagaaagaggataccccggcaacattggtcctgtgggagccgcgggtgcgccgggaccacacgggccggtcgggcccgctggtaagcacggaaacagaggggagactgggccttcaggtccggtaggcccggcaggcgcagtgggcccccgaggaccaagcggcccgcaggggatccgcggggataagggagaacccggagaaaaaggacctcgaggactgccaggcctgaagggacataacgggttgcagggcctccccggaatcgcgggtcatcacggcgaccagggcgcccctggtagcgtaggtccggcaggccctcgaggacctgctggtccttcaggtcctgcgggtaaagatgggagaactggacatcctgggaccgttgggcccgctggaatccgaggtcctcaaggacatcagggaccggccggaccacctggtccccccggtcctccagggcctcctggagtgagcggcggaggttatgatttcggctatgatggtgacttttaccgagcagaccaacctaggtccgctccgagcttgcgcccgaaggactacgaggtggacgcaaccctgaaaagcctgaataaccaaattgaaaccctccttactccagaggggtccagaaagaaccccgcacggacttgcagagatctcagactctcccacccagaatggtcctccgggtactactggattgatccaaatcaagggtgtactatggatgccattaaggtgtactgtgacttttctacgggtgaaacctgtatacgcgcccaaccagagaacatccccgcaaagaactggtaccgcagcagtaaggacaaaaagcacgtctggcttggagaaaccattaatgcaggttcgcaatttgaatacaacgtcgaaggagtcacttcaaaggaaatggccactcaactcgcgttcatgcgccttcttgccaattacgcaagccagaatatcacttaccattgcaagaactcaatagcctacatggatgaagaaaccggaaacctgaaaaaggccgtcatcctgcagggttcgaatgatgtcgaacttgttgcagaaggtaactcgagatttacttacaccgtgctggtggatggctgttccaagaaaaccaacgagtggggaaagactatcattgaatacaagaccaataagccttccagactgccatttctggatatcgccccacttgatatcggaggtgcggatcaagagttttttgtggacattggaccagtgtgtttcaaa

SEQ ID NO: 32524 - DNA, 4098 bp, synthetic construct
  misc_feature 1..4098: note = Description of Artificial Sequence: Synthetic coding sequence
  source 1..4098: mol_type = other DNA
atgctgtcattcgtcgacaccagaaccctgttgctgctggccgtgactttgtgcctcgctacttgccaatccctacaggaggaaacagtacgcaagggcccagcaggtgacagagggcccagaggtgagcgtgggcctcccgggccgcctgggcgtgacggtgaggacggacccacagggccacctggaccccctggaccacctggcccgccaggtcttggcggaaacttcgcagcgcagtatgacggcaagggggtcggactggggccgggtccgatggggctcatgggccccagagggccacccggcgccgccggagcccctggaccccaggggttccagggccctgctggcgagccgggagaaccagggcagaccggaccggctggagctagaggcccagccggaccgcctggaaaggccggggaagatggacacccaggtaagccgggcaggcctggcgaaagaggggtcgtcggtccacagggggcccgtggattcccaggtacaccaggacttcctggatttaagggaattcgaggtcacaatgggcttgacggactgaaaggacagcccggcgctcctggcgtgaagggagagccgggggctccaggagaaaatggaacccctggacagactggggcaagaggcctgccaggagagcggggcagggttggcgctcctggtcctgccggagcccgaggaagtgatggatcagtggggccagttggacctgcaggtcccatcggatccgcaggacctcccggtttccccggggcacctggccccaaaggtgagataggggccgtgggcaatgcaggaccggcaggcccagccggcccaaggggtgaggtaggtctacctgggttgagtgggcctgtgggcccacctggcaatccaggcgccaacggcttaacgggcgctaagggggctgccggtctcccaggcgtcgcaggggcgcccggactgccagggccccggggaatccccgggccagtaggcgctgccggcgcaacaggggcacgcggactggttggtgaaccgggtcctgccggatccaagggtgaatccgggaacaagggggagcccggatccgcaggccctcagggccctccaggaccatctggggaggagggaaagagaggacctaatggagaggcagggagcgcagggcccccagggcctccaggcttgcggggctcaccaggatcaagaggtttgcctggcgctgacggacgagcaggtgtgatgggacccccagggtcccggggcgccagtgggcctgccggagtccgcggacctaatggtgacgccgggcgtccaggggaaccgggcctcatgggaccgcggggtctgcctggctctccaggaaatatcggacctgccggcaaagagggaccagtcggattacccggcatcgacggaaggcccggcccgatcggccccgcaggtgcccggggcgaacccggaaatataggcttccctggccctaagggcccgacaggcgatcctggcaaaaatggtgacaaagggcacgccggtctagcaggggcgcgaggagcccctggtccagacgggaacaatggagcccagggaccaccgggacctcagggagtgcagggaggaaaaggggagcaggggccacccgggccacccgggttccagggcctgcctggaccatctggccccgccggcgaggttggtaaacccggcgaacgagggcttcatggcgaattcggacttcccgggccggccggcccacgtggagagagaggacccccaggcgagtccggcgcggctgggcctaccggtccaatcgggtcaaggggacccagtggaccacccggaccagacggtaacaaaggtgaaccgggcgtggtcggcgccgttggcactgcaggtcctagcggcccaagtgggcttcctggagaaaggggtgctgcgggaatacctggcgggaaaggcgagaaaggcgagccagggctcagaggggaaatcggtaacccaggccgcgatggggctcgaggtgctcccggtgccgtcggagccccagggcctgccggcgccaccggagataggggtgaagctggtgcggcgggtcccgcaggtccggctggaccccgcggtagcccaggagagagaggcgaggtcggaccagcgggcccaaatggcttcgctgggccagcgggagctgccggccagccgggcgcaaagggtgagaggggggccaaaggaccaaagggcgagaacggtgtggttggacccaccgggcccgtcggtgccgccggcccagcgggtcctaatggcccccctggacctgccggctccagaggtgatggcgggccccccggcatgaccggattcccaggggcagcaggacgcactggaccccctggtccctccggtatctctggaccccccgggccgccaggaccagcgggcaaggagggcctccgggggccacgaggtgaccagggacctgtcggtaggaccggagaagtcggtgccgtgggtcctcccggattcgccggcgaaaagggcccttcgggagaagcaggcacggccggccccccaggaacaccaggtccacagggcctgctgggggcacccggaattttagggctgccaggcagccggggagaacgtgggctccctggcgttgctggcgctgttggcgagcctggaccactgggaatagctgggccaccaggtgccaggggacctcctggagccgtaggttctcccggagtgaatggagcccctggtgaggccggccgcgatgggaacccggggaacgacggcccccctggccgcgatgggcagcccgggcataagggcgagcgcggctacccgggtaatatcggtcctgtgggtgcagcaggagctccaggaccacacgggccagtcgggccggcagggaaacacggaaatcgcggagagactgggcccagcggcccagtcgggcctgccggggccgtggggccacggggacctagcggaccccagggcatcagaggcgacaagggggagcctggagaaaagggccctcgcggcttacccgggttgaaaggtcacaatgggctgcagggactgcccggcattgctggtcaccatggtgaccagggcgcacctggttcagtcgggccggcaggcccccgcggccccgcgggtccatccggaccagcaggcaaagatggacggacgggccaccccggtaccgtcggcccagccggtatccggggcccccagggccaccagggccccgccggtccacccggaccaccaggacccccaggcccgcccggagtgtctggcgggggatacgactttggctacgacggagacttttatcgcgcagatcaaccaaggagcgcccctagtctgagaccaaaggactacgaagtggatgcaactttgaaatccttgaacaaccagatcgagacactgctaacgcccgaggggagtcgcaagaaccccgcccggacttgccgagacctgcgtttgagccatccagagtggtcatctggatactactggattgatcccaatcagggttgcaccatggacgcaatcaaagtgtactgtgatttcagtactggcgagacatgtatacgcgcgcaaccagaaaacattccggctaagaattggtatagaagtagtaaggataaaaagcacgtgtggcttggggagaccataaatgctgggtcccaattcgagtacaacgtggagggagtgacaagcaaggagatggccacccagctggcttttatgcgcctgctggccaactacgcaagccagaacatcacgtatcactgcaagaattcaatcgcttatatggacgaagagacaggaaatctgaagaaagccgtcattctccagggctcaaacgacgtagagctagtcgctgagggcaactcaagatttacctatactgttctcgttgacggctgctccaagaaaacaaatgaatgggggaagactattatagaatacaagacgaataaacctagcagactccccttcttggatatcgcaccactagatattggcggtgccgatcaagaattcttcgtcgacatcgggccagtgtgtttcaaa

SEQ ID NO: 32525 - DNA, 4098 bp, synthetic construct
  misc_feature 1..4098: note = Description of Artificial Sequence: Synthetic coding sequence
  source 1..4098: mol_type = other DNA
atgctatctttcgtggatacgagaactctgctgctgcttgcggtaacgctgtgtctggcgacgtgccagtcactgcaggaagagactgtcaggaaaggcccagccggtgaccggggcccccgtggcgagcgtggccccccaggaccccctgggagggacggcgaagatggacccactgggccccccggacccccaggacctcccggcccccctggactggggggaaatttcgcagcccaatacgacggcaaaggggtggggctgggccccgggccaatggggctgatggggcccagaggtcctcccggcgccgcaggtgcacctgggcctcagggcttccaggggccggcaggcgagccaggtgaaccaggccagaccgggcctgcgggagcccggggccccgccggaccacctgggaaggctggggaagatgggcacccagggaagcctgggagaccaggtgagcgcggcgtggtgggccctcaaggcgcccgagggttccccggcactccaggcctgccaggctttaagggcattagagggcacaatgggctggatggtcttaagggtcagcccggggcacccggggttaagggagagcccggggcccccggggagaacggaacaccaggccagaccggggccagaggactgcccggcgagcgcggacgggtaggagccccggggcccgcaggcgcacgaggctcggatggctctgttggacctgttgggcccgccgggcccatcgggtccgctgggcctccaggattcccaggggcacctggacccaagggagagataggcgccgtcggcaacgcaggtccagcaggtcccgcaggccctcgaggggaagtgggattgccaggactttccggccctgtgggaccccccggaaatccaggcgccaacggcctgaccggcgcgaagggcgccgctggcctaccaggggtagctggtgctccaggactgccgggcccaaggggaatccccgggcccgtgggtgctgccggcgcaacaggcgcacggggacttgtgggagaaccgggtcccgcaggaagcaaaggcgagtctggcaacaagggagagccaggctctgccggcccacaggggcctcctggaccttcgggcgaggaggggaaacgcggacccaatggcgaagccgggagtgcgggcccccctggacccccagggttacggggtagcccgggttctagagggctgcccggcgccgatgggagggctggcgtcatgggtccaccaggctcaagaggcgccagcgggcctgccggcgtcagggggcctaatggcgacgcgggccgccccggggaacctggcctgatggggccacgcggcctgcccgggagcccaggaaacattggacctgcaggcaaagaaggacctgtgggtctgcccgggatcgatggccgacccggtcccatcggacccgccggtgctaggggggaaccgggaaacattggcttccccgggcccaagggccctactggggatcccggaaaaaacggggacaagggccacgcaggactcgccggtgccagaggcgcacccggccccgacggtaataatggcgctcagggacctccaggcccacagggggtccagggcgggaagggcgagcaaggccctcctggaccccccgggttccagggtttaccgggcccatccgggcctgccggggaagtcggcaagccaggggagcgcggtctgcacggcgaatttgggctgcccggacccgccggaccccgaggggagaggggtccaccaggggaaagcggagctgcgggacccacaggaccaatcgggtccaggggacccagcgggccacctggtccggacggcaataaaggagagcctggcgtcgtcggtgccgtgggtactgcagggccatcaggtccgtcgggtcttcctggagaacgaggcgccgccggcattcctggcggtaagggagagaaaggtgagcctggactacgcggggagattgggaatcctgggagagatggggctcgcggggccccaggagctgttggggctcccggtccagcgggcgctaccggagaccgaggtgaggcaggggctgccgggccagccggacccgccggtcctagggggtcccccggggagaggggcgaggttggccctgccggacctaacgggttcgccggccctgctggggccgcgggacagcctggagccaaaggcgagcgcggagctaagggcccaaagggtgaaaacggcgttgtgggtcctaccggtcccgtgggcgctgccgggcccgctgggcccaatggacctcccgggccagcaggaagccggggggacggtggcccccccggcatgactggtttccccggcgcagctggccggacaggtcctccgggtccttcggggatttcgggtccccctggaccacctggacctgccggaaaggaaggtctcagaggccccaggggcgaccagggcccagtgggccgtacaggtgaggtgggggccgtaggcccacccggatttgccggagaaaaaggcccaagtggggaggctggcacagcaggcccacccgggacgcccggtccccagggacttcttggtgcccctggtattctggggcttcccggtagtcgcggggaaagaggtttaccaggtgtggccggtgctgtcggcgagcccggacctctggggatcgctgggcctcccggtgcacgcggcccaccaggcgccgtgggcagccctggggtcaatggggcaccaggagaagcaggacgagatggaaatccaggcaacgatggtcccccagggcgtgatggccagcctggacacaagggtgagcgcggttacccaggtaatatcggacccgtgggggcggctggagcccccgggccccatgggcctgttggacccgccgggaaacatgggaaccgtggcgagacaggtccctcaggccccgttgggcctgccggcgccgttggccctagagggccatctggtccacagggcatcaggggggacaaaggcgagcccggagaaaagggcccccggggactgccggggctgaaaggccacaatggactgcaagggctgcctggtatagccggtcatcatggagaccagggagcccctgggtctgtcgggcctgcagggccacgcggccccgccggccctagcggacctgcggggaaagatgggaggactggccaccccggcacggttggccctgccggtattcggggtccgcagggccaccaaggccccgcagggcctccggggccgccaggaccaccgggtcctccaggcgtttctggggggggctacgactttggatacgacggcgacttctaccgtgccgaccagccaagatcagcaccttcccttcggcccaaagactatgaagttgatgccacattgaagagtctgaacaatcagatcgaaacactcttgacaccagagggcagtagaaagaatccagctagaacctgcagagacctgcggctcagccatcccgagtggtcatccgggtattattggattgatcccaaccagggatgcaccatggacgccattaaagtttactgcgatttttcaaccggagaaacctgtattcgcgcacagcccgaaaacatccctgctaaaaactggtaccgctctagcaaggacaagaaacatgtttggctgggagaaacaatcaatgccgggagccaattcgagtacaacgtagaaggagtgactagtaaggagatggcgactcagttagctttcatgaggcttctggctaactatgcctctcagaacatcacgtaccattgtaagaattccattgcgtacatggacgaggagaccggcaacctgaagaaggccgtcattctgcaggggagtaacgatgtggagttggtcgcagaagggaactctagatttacctacacagtcctcgtggatgggtgttcaaagaagacaaacgaatggggtaagactataatagaatataaaacaaacaagcccagccgcctgccgttcctcgacatcgccccactggacattggcggcgccgaccaggagttctttgttgacatcgggccggtgtgtttcaag

SEQ ID NO: 32526 - DNA, 4098 bp, synthetic construct
  misc_feature 1..4098: note = Description of Artificial Sequence: Synthetic coding sequence
  source 1..4098: mol_type = other DNA
atgctcagttttgtcgataccaggactttgcttctactagcggttaccttatgtctcgctacttgtcaatcactgcaagaggagactgtgagaaaaggccccgccggcgaccgaggtcctcgaggtgagagaggacccccaggcccccctgggagggatggcgaggacgggcctacaggcccgcccggcccccccggcccccccggaccccctggcctagggggcaactttgcagcccagtacgatgggaaaggagttggcctgggccccggacccatggggcttatggggccacgtgggccaccgggcgccgcaggagccccgggcccacagggctttcaaggcccggccggagagccaggcgagccaggtcaaaccggacctgccggggctcgggggcccgctggaccacctggaaaggccggggaggacggtcaccctggcaagccaggtaggcccggtgagcgtggcgtggtcgggcctcaaggagcaagagggttcccaggcacacccgggctgccaggatttaagggaatcaggggacataatggcttggacggactgaaagggcagcctggggctcccggtgtaaagggggagccaggtgcacccggcgaaaatggtacgcccggacagaccggagccaggggcttaccaggcgaaagaggccgagtgggggcacctggcccagccggtgcccgcggctctgatggctccgtgggccctgttggacctgccggtccgattggatcagccggacctcctggtttcccaggagctccaggccccaaaggcgaaataggagccgttggcaacgcaggccccgcaggacccgcaggcccacgcggggaggttggtttacctggtctgagtggccctgtgggacccccgggcaatcccggcgccaacggcctgaccggagctaaaggggccgccggcctgccgggagttgccggagcccccgggctcccaggaccccgtggcataccaggtccagtaggagcggccggcgccaccggagcccgcggtctcgtgggagaaccgggacccgcaggttccaaaggtgagtcaggcaataagggagagccgggcagcgctgggccacagggacctccaggacccagcggagaagaaggcaaacgtggacccaatggagaggctggtagtgccggaccccctgggccaccgggtctgaggggctctccaggcagcagggggcttccaggggccgacggtagggctggcgttatgggcccccccggatctaggggggctagtggaccggcgggagtgcgagggccaaatggcgatgcaggccgacctggtgagcctgggctgatgggacctcgcggcctgcctggctcccccggcaacataggccccgctggtaaagagggccccgtggggttgcccggtattgatggtaggccagggcctattggtccggccggcgcccgaggggagcccgggaacattgggttccccggtcccaaaggccccaccggcgaccctggaaagaatggagataagggccatgcaggactggccggtgccaggggtgcccccggccccgatggcaataacggcgcacaggggcctccaggcccacagggagtgcagggtgggaagggagaacaagggccccccggcccacccgggttccaggggctccctggaccaagtggaccagccggcgaagtagggaaacctggggaacgcgggctgcacggtgaattcggactgcccggtcctgcggggccccggggtgaaagaggtccccctggggagtcgggtgcagccggtccaaccggaccaatcggctcacggggtccctcaggccctcctggcccagacggcaataaaggagaacctggtgtggtcggagctgtagggaccgccggtcccagtggcccttcagggctgccaggggagagaggcgccgccggaataccagggggtaagggcgaaaagggggaaccggggctgcgcggagagattggcaaccctgggagagatggcgctcggggggctcctggggctgtaggcgccccggggccagcaggggccaccggggaccgaggcgaagcgggtgccgccggtcctgctggccctgccggcccacggggaagcccaggagaacgtggagaggttggccccgcaggtcctaacggttttgctggccccgccggcgcagcaggacagccaggtgctaagggggagcggggcgctaagggtcccaaaggtgaaaacggggttgtgggccccaccgggccggtgggagctgcaggacctgccgggcccaacggcccgcctgggccggcaggatcccgcggggatggtgggccacctggaatgaccggctttcctggagccgcgggtcgcaccggcccccctggaccttcaggtatctctggtcccccaggtcctcctgggccggccggcaaggagggtctcaggggcccacgaggagatcagggaccagttggaaggacaggggaagtgggggctgttgggccacccggattcgctggagaaaagggcccttccggcgaagctgggactgctgggccgcccgggacaccgggcccgcaggggctgctgggcgcccctggtatcctcggacttcctggcagcaggggcgaacgcggccttcctggagttgctggagcagtgggcgaacctggtcctcttgggattgccgggccaccgggcgcccgaggcccccctggagccgtagggtcccctggagtgaatggcgctcccggagaggctggccgcgatggaaacccaggaaatgacggcccaccaggcagagatggccagcccggccataagggcgaaagaggttaccccggcaacatcggccctgtgggggctgccggcgcccccgggccccatggaccagtcgggccagccggcaagcacggaaatcggggggagaccggtcccagcggcccagtaggtccagccggcgcagtggggccaaggggacccagcggccctcaaggtatcaggggggataaaggagaaccaggcgagaaaggcccccgcggcctgccaggcttgaaagggcataacggcctgcagggcctccccggaatcgctggtcaccatggggaccaaggcgccccggggtccgtgggccccgccggccccagagggcctgccggaccaagcggtcccgcgggtaaagatggccggacaggacaccctggaaccgtaggaccggcaggtatacgcgggcctcaaggtcatcaggggcccgctgggccaccgggaccacctgggccacccggacctccaggggtgagtggtggcgggtatgactttggatatgacggggatttctaccgggctgaccagcctcgctcagccccctctctgagacctaaggactatgaggtggatgctacactgaagtccctgaataatcagattgaaactctgttgacccccgagggaagtcggaaaaatccggctcgaacatgtagggatttgaggttgtcacatcctgagtggtcctccgggtactactggatcgacccaaaccagggatgcaccatggacgccataaaggtgtactgcgacttctctactggggagacatgtataagggctcaacctgagaatatccctgcaaagaactggtatagatcgagcaaggacaagaagcatgtctggttgggcgaaaccataaacgccgggtcccagttcgagtacaatgtggagggagtaacgtccaaggaaatggcaactcaactggcgtttatgaggttactggcaaattacgcttcccagaacattacataccactgcaagaactccatagcatatatggatgaggaaacaggaaatctgaagaaggcagtgatcctccagggatcaaacgacgtagaactggttgcggagggcaatagtcggttcacctatacggtcttggtggatggctgttccaagaagacgaatgagtgggggaaaactatcatagaatacaagaccaataaaccatctagactgccatttctagacattgcccccctggacatcgggggcgctgatcaggagttttttgttgatattggccctgtgtgttttaaa

SEQ ID NO: 32527 - DNA, 4098 bp, synthetic construct
  misc_feature 1..4098: note = Description of Artificial Sequence: Synthetic coding sequence
  source 1..4098: mol_type = other DNA
atgctgtcctttgtcgacactcgtacgctgctgcttcttgcggtgactctgtgtctggccacctgtcaatcgctgcaggaggagacggtgcggaagggtccagctggtgatcgcggccctaggggagaacgcggaccgcctggacctccgggtcgcgacggcgaggacgggcctaccgggcctcctggtcctcccggcccccctggtccacctggactgggaggcaactttgcagctcagtacgatggtaagggagtgggtctgggacctggtccaatgggacttatgggacccagaggcccaccaggcgccgccggtgcacctgggccgcagggatttcaagggccagcaggtgagcctggcgagcccggacagaccgggcctgccggtgcaagaggaccagcgggaccaccgggaaaagcaggagaggacggccatccaggaaaacccgggcggcccggcgaacgcggcgtggtgggcccgcaaggggcaagagggtttccgggtaccccaggactccccggttttaagggaatcagaggccacaatgggcttgatgggcttaagggacagcccggcgcccccggggttaagggagaaccgggagcacctggcgaaaacggtacccctggacaaaccggagctcgtggtctgcctggcgaacgcggccgggtgggagcgccaggaccagctggggctcgaggaagcgatggctccgtgggtcccgtcggcccagcaggccctattgggtcggcaggcccgcctggatttcctggagctcccggacctaagggtgaaattggagcggtcggcaatgctggtccagcaggaccggcaggaccacgcggcgaggtggggctgcccgggttgagcggaccagtgggaccgccaggtaaccctggggcaaacggccttacgggggccaaaggagcagccggtctgcctggggtggcaggcgcacctggcctccctggacctcgtggcattcctgggccagtcggggcagctggagcaactggtgccagaggacttgtcggagaacctggaccagcaggttccaagggagaatcaggaaataagggcgaaccaggatccgccggcccacaaggtcctcctggaccatcaggcgaagaaggaaagagaggtcctaacggagaagctggcagcgcgggacctcctggaccccccggtttgagaggctcacctgggtcgagagggctcccgggagctgatggacgtgccggcgttatgggaccgccaggatcgagaggagcgagcggtcctgctggagtgaggggaccaaacggggacgcggggcgtcctggtgaaccgggtctgatgggacctcgaggccttcctggatcaccgggcaacatcggaccagcaggtaaggaaggaccagtggggctgccaggcatcgatggtcgcccggggcccatcggtccagcgggcgcacgcggcgaacccggcaacattgggtttcctggtccaaaaggacctaccggcgatcccggtaagaacggagataaagggcacgcaggtctggcgggagccagaggtgcccctggaccagatggcaacaatggtgcccaggggccaccaggacctcaaggcgtgcaaggaggcaaaggtgaacaaggacctccgggcccacctggatttcagggactccccggaccctcgggaccagcaggagaagtcgggaagccgggagaacgagggttgcacggagaattcggtttgccgggacctgccggaccaaggggtgagcgtgggccaccaggagagagcggagcagcaggcccaaccggacccattgggtcccggggacctagcggtccacccggccctgacggcaacaagggtgaaccaggagttgtcggagctgtgggtactgcaggtccttccggcccgagcgggcttcctggtgaacgcggagcagcgggtattcctggcggaaagggagaaaagggtgagcctgggctgcgtggcgaaattggaaatccaggacgagatggagcacggggtgccccaggagcagtgggtgcacctggacccgctggtgcaactggcgataggggagaagcgggcgccgcaggccctgccggcccagcgggaccacgaggttcacctggtgaaaggggtgaggtgggtccagccggaccaaacggattcgctggtcctgctggagccgcaggacagcccggagccaaaggcgagcgtggtgcgaagggacccaagggagaaaacggggtcgtgggtcctaccggccccgtgggcgcagcaggtccagcaggccctaacggccctcccggtcctgccggatctcgcggagatggtggaccaccaggcatgactggatttcccggtgccgccggaagaaccggcccaccaggcccttccggcatatcaggaccacccggtccaccagggccggcgggaaaggagggtctgcggggacctcggggagatcaagggcctgtcggtaggactggtgaggtgggggcggtggggccgccgggatttgcgggggagaagggcccttcgggcgaagccggtactgcagggccacctggtacccctggtccacaaggactgcttggagcgcctggtatacttggactgcctggttcgcggggggagcggggccttccgggtgttgcaggggcagtgggagaacctggacctttgggtattgcaggtccgccaggcgcaagaggaccccccggagccgtgggatcgcctggagtcaacggcgcaccaggtgaagcagggagggacggaaatcccggtaacgatggtcctcccggacgagatggccagcctggtcataagggcgaacgcggataccccggtaacataggacctgtcggagcagcaggggcacctggccctcatgggcccgtggggcctgctgggaagcacggcaaccgaggtgaaaccgggccttctgggccggtgggtccagcgggcgcagtggggcctcggggtccctccggaccgcaaggtatcaggggcgacaaaggtgaacccggagaaaaaggaccgcgtgggctgcctggattgaaaggtcataatgggctccaaggattgcccggaatagccggacatcacggcgaccaaggggcgcctggttcagtgggccctgccgggccacggggcccggcaggtccttcgggtccagcaggaaaggatggacgaaccggtcatccaggtaccgttggcccagcaggtatacggggtccacaaggacatcagggcccagcaggaccacccggcccacccggacctccgggaccacccggtgtgtcggggggtggatacgatttcgggtacgacggcgacttctacagagcggatcagccacggtccgctccctcccttagaccaaaggactacgaagttgacgcaactctgaagtcccttaacaaccaaattgaaactctcctcactccagaaggctcccggaagaacccggcacggacgtgcagagatcttaggctctcgcatcctgagtggagctcgggatactattggattgatcctaaccagggctgtacgatggatgccattaaggtgtactgtgatttttccactggcgaaacttgcataagagcacaaccggaaaacattccggcaaagaattggtaccggtcgtccaaagacaagaaacatgtgtggttgggagagactatcaatgccggtagccaattcgaatacaatgtggaaggagtgacctcgaaggagatggcgacccagctcgcattcatgcgcttgcttgccaattacgcctcccaaaacattacttatcactgtaaaaactcgatcgcatacatggatgaagagacgggtaaccttaagaaggcagtcattctgcaagggtcaaacgacgtcgagcttgtcgcagagggtaattcgaggttcacttacaccgtgctggtcgatggttgttcgaaaaagactaatgagtggggcaagacgattattgaatacaagaccaataagccctcacgccttccttttcttgacattgcacctctggatataggtggtgcggatcaggaattctttgtggacatagggcctgtctgcttcaag

SEQ ID NO: 32528 - DNA, 1434 bp, synthetic construct
  misc_feature 1..1434: note = Description of Artificial Sequence: Synthetic coding sequence
  source 1..1434: mol_type = other DNA
atggacaggagtttgggatggcagggcaacagtgtccccgaagatagaaccgaggccggcattaaacgattcctagaggataccactgatgatggcgaattgtcaaaattcgtcaaggacttttctggaaacgcgtcctgtcaccccccggaggctaaaacctgggccagtaggccgcaggtgccagagccccggcctcaggcgccagacctctacgacgacgatcttgaattccgcccacctagtcggccacagtcatctgacaatcagcagtatttttgtgcacctgctccactttcaccttcggcccggcctaggtcaccttggggcaaactggatccctatgattcaagtgaagacgacaaagaatacgtgggcttcgccacgctgccaaatcaagtccatcgtaagagcgtgaagaagggcttcgattttacactcatggtggccggggaaagtggcctgggaaaatctactctcgttaattctttgtttctgactgacctgtaccgagacagaaaactgctcggggccgaggagaggattatgcagacagtggaaattacaaagcacgcggtggacatagaggaaaagggggtgaggttgcgtttgactatcgtcgatactcctgggttcggcgacgcagtcaataacactgaatgttggaaacccgttgctgaatatattgaccaacagttcgagcagtattttagagacgaatccggactgaacaggaagaacatccaggataacagagtgcattgttgcctctatttcattagtccctttggccatggactgcggcccctagatgttgaattcatgaaagcccttcaccagagggtaaacatcgtgcctattttggctaaagcagacactctaactccaccagaggtcgatcataaaaagaggaagattagagaggagattgagcactttggcatcaagatctaccagttcccagattgcgatagcgatgaagatgaggatttcaagctgcaggatcaggcattgaaagagagtattccttttgcagtgataggttccaacaccgtggtagaggctcgcggaaggcgggtgaggggtaggctgtacccttggggtatagtggaagtcgaaaacccaggccactgcgactttgtcaagctcagaacaatgctggttcgtacccacatgcaggaccttaaagacgtaacgcgggaaactcattacgagaactacagagcgcagtgcatccagtcaatgacaaggctcgtggtcaaagaacgaaacagaaacaaactcactagggagtctggtacggattttccaattcccgcagtgccccccggtacagaccccgaaaccgaaaaactcatccgggagaaggatgaagaactgagacggatgcaggagatgctccacaaaatccagaaacagatgaaagaaaactat

SEQ ID NO: 32529 - DNA, 1434 bp, synthetic construct
  misc_feature 1..1434: note = Description of Artificial Sequence: Synthetic coding sequence
  source 1..1434: mol_type = other DNA
atggaccggtccttgggctggcaggggaacagcgtgcctgaagaccggaccgaggccgggatcaagaggttcctggaagacactacagacgatggcgagcttagcaagttcgtcaaggacttctcagggaatgcgagttgccaccctcccgaggcaaaaacatgggcttcaaggccccaggtgcctgagcctcgcccacaagcccccgatctgtatgatgacgatcttgagttccggccaccctcaaggccgcagagctcagataaccagcagtacttctgcgcccccgcccccctgagtccctctgctcgtcccagatccccttgggggaagctggacccatacgattcctcagaagacgacaaggaatacgtcggatttgcaactctgcccaaccaggtacatcggaagagtgtcaaaaaagggtttgatttcaccctgatggtcgcaggggaatctggactgggcaaatccacactcgttaattccctcttcctgacggacttgtatagagacagaaagctgctgggcgcagaggaacggatcatgcagaccgttgagatcactaaacacgctgtcgacattgaggagaagggggtaagacttcgtctgactattgtggacactcctggtttcggcgacgccgtaaataatacagagtgctggaagcccgtggcggaatacattgatcaacagtttgagcaatatttccgggacgaatcgggcctcaaccggaaaaatatccaggacaatcgtgtgcactgttgcctgtatttcatctctcctttcggacatggtctgagaccactggatgtagagttcatgaaggctttacaccagagggtaaacatcgtccccatcctggccaaagctgacactcttacgcctcctgaagttgaccacaagaagcgcaaaattagagaagagatcgagcattttggtattaagatttatcagttccctgattgcgatagtgacgaggatgaagatttcaagttgcaggaccaggccctaaaggaaagtatacccttcgcagtcattgggtctaacacagtcgtagaggccaggggaagaagagtccggggacgcctttacccctgggggatcgtcgaagtagagaaccctggacactgcgattttgtaaagctgaggacaatgctagttcgcacccacatgcaggacctgaaagatgtcaccagagagacccactacgagaattatcgggcccagtgcatccagtccatgactcgacttgtagtgaaggaaaggaacaggaacaagctgacacgagaaagtggaaccgattttcctatccccgccgttccacccggtacagatcctgaaacagaaaagcttattcgcgaaaaagacgaggagctcagacgtatgcaggagatgctgcacaagattcagaagcagatgaaggagaattac

SEQ ID NO: 32530 - DNA, 1434 bp, synthetic construct
  misc_feature 1..1434: note = Description of Artificial Sequence: Synthetic coding sequence
  source 1..1434: mol_type = other DNA
atggaccgaagcctgggctggcagggcaactccgtgcccgaagacagaacagaagcaggaattaaaagattcctagaggacactactgatgacggggaactctcgaagtttgtgaaggactttagcgggaacgctagttgtcatccacctgaagcaaagacctgggcctccagaccacaagtgcctgagccccggcctcaggcgcctgatttatatgatgatgatcttgagtttaggcctcctagtcgccctcagtcttctgacaaccaacagtatttctgcgcccccgcacccctgagtcccagtgctagaccccgatccccatggggaaagctggatccatatgacagtagtgaggacgataaggagtacgtcggtttcgctacgcttcccaatcaggtgcaccgcaagagcgtaaagaagggcttcgactttacactaatggttgccggggaaagcggtctagggaaatccaccctagtgaactctcttttcctaaccgatctgtaccgggacagaaagctgctcggagccgaggaacgtattatgcagaccgtggagatcacaaaacacgccgtggacatagaagaaaaaggcgtgcggctccggctgacaattgtcgacacaccggggttcggcgatgctgtgaataacactgagtgctggaagcccgtcgccgagtacatcgaccagcaattcgaacagtacttcagggatgaaagcgggctcaaccgcaaaaacattcaggataaccgggtgcactgttgcctctactttatctcaccgttcggtcatgggctgagacccttggacgtcgagtttatgaaggctctacaccagcgggtcaacatcgtgcccatcttggcaaaggccgatacgcttaccccccccgaggtggatcacaaaaaaagaaagattcgagaggagattgaacattttggaatcaagatttatcagttccccgattgtgacagcgatgaggacgaagacttcaaactccaagaccaagccttaaaggagagcattcccttcgccgtgattggcagcaacacggtggtggaagccaggggaagacgcgttaggggcaggctatacccttggggtatagtggaggtcgaaaatccaggccactgcgatttcgtcaagcttcggaccatgctagtccgcacccatatgcaagacctcaaggacgtgactagagaaacgcactacgagaattaccgcgcccagtgcattcagtcgatgacaaggctggtggtgaaggaaaggaacaggaataaactcacacgagagtcaggtacagactttccaattcccgcagtgccaccagggaccgaccccgaaactgagaagctgatccgtgaaaaggacgaggagctgaggcggatgcaagagatgcttcacaaaatccagaagcaaatgaaagaaaactat

SEQ ID NO: 32531 - DNA, 1434 bp, synthetic construct
  misc_feature 1..1434: note = Description of Artificial Sequence: Synthetic coding sequence
  source 1..1434: mol_type = other DNA
atggatcggtcgctggggtggcagggcaactcggtgcctgaggatagaaccgaagcaggaattaagagattcctcgaagatactaccgatgatggcgaactgtcaaaattcgtgaaggacttttcgggtaacgctagctgtcaccctccggaagcaaaaacctgggcctcgcgtcctcaagtgcctgaaccaagaccccaggcacccgatctctacgatgatgatcttgagttcagacctcctagccgtccacaatcgtccgataaccagcagtacttttgtgcaccagccccgctctccccttccgccagacctcgttcaccttggggaaaacttgatccatacgattccagcgaagatgacaaggaatacgtgggctttgcaactctgcctaaccaggtgcaccggaagtccgtcaagaagggttttgattttaccctgatggtggcaggtgaaagcggacttggaaagagcactctcgtcaactcgctctttctcaccgacctgtaccgtgatagaaaattgctgggcgccgaggagcgcatcatgcaaaccgtggagattaccaagcatgcagtcgatatcgaggaaaagggagtgcggttgcggcttactatcgtcgacacccctggattcggcgacgctgtgaacaacacggagtgctggaagccagtggccgagtacatcgaccagcagtttgaacagtactttcgtgatgaatcagggctcaatcgtaagaacatacaagataatagggtgcattgttgtttgtactttatctcgccctttggtcatggattgcgacctttggatgtggaattcatgaaagcacttcaccagcgtgttaacatagtcccaatcctggcgaaggccgatacccttaccccaccagaagttgaccataagaagcgcaaaattcgggaagagattgaacatttcggaattaagatttaccaatttccggattgtgattctgatgaagatgaggactttaagctgcaggatcaagcactcaaggaatcgatcccatttgcagtcatcggatccaacactgtcgtggaagcaagaggtcgacgcgtgagaggacgcctttacccatgggggattgtcgaggtggaaaacccagggcattgtgactttgtcaagctcagaaccatgcttgtccggacccacatgcaggatctgaaggacgtgaccagagagactcattacgaaaactaccgagcccaatgcattcagtccatgactcgcttggtcgtgaaggagcgtaacaggaataaacttactagggaatcagggaccgactttcctattcctgcagtgcccccaggaaccgatccagaaaccgagaagttgattcgggagaaagatgaggaactgcgccgaatgcaagagatgctgcataagatacagaagcagatgaaagaaaactac

SEQ ID NO: 32532 - DNA, 1434 bp, synthetic construct
  misc_feature 1..1434: note = Description of Artificial Sequence: Synthetic coding sequence
  source 1..1434: mol_type = other DNA
atggatagatccctgggatggcagggcaactccgttcctgaagacaggaccgaggcgggtataaagaggttcctggaggatacgacagatgacggggaactgtccaaatttgtaaaagacttcagcggtaatgctagttgccatccaccagaggcgaagacctgggccagccgcccacaagttccagaaccccggccacaggctcctgatctgtatgacgatgacctggagttccgccccccgtcccgtcctcagagttccgacaaccagcagtacttttgcgccccagcacctctttccccatccgcccgccctagatctccgtggggtaagctcgatccttacgatagttcagaggacgacaaagaatatgtgggctttgctacgctgcctaatcaagtccataggaagtctgtcaagaagggctttgacttcactttaatggtggccggtgaatctggtctagggaagtccaccttagttaatagcttattcttaaccgacctgtatcgagaccgtaaactcctgggggctgaagagcgcatcatgcaaactgtagagataaccaagcatgctgttgacattgaagagaaaggggtaaggctgcggcttaccatagtagacactccaggcttcggggacgctgttaataatactgaatgctggaagcccgtggcggaatacatagaccagcagtttgagcaatattttcgggacgaaagcggactgaacaggaagaacatccaagacaatagagtccattgctgtctgtattttatcagcccctttggccacggactgaggccgctcgacgtggagtttatgaaggccttacaccagcgagtaaacatcgtgccgatcctcgccaaagccgacacattgactcctcctgaggtagaccacaaaaaacgaaaaattcgtgaagaaattgagcacttcggaatcaaaatttaccagtttcccgactgtgatagcgacgaggacgaggactttaagctacaggaccaggcgcttaaggagagcatcccttttgcagtaatagggagtaatactgtggtggaagcaagaggacgcagggttagagggagactctatccatggggcattgtcgaggtggagaatcccggacattgtgactttgtgaaacttcggacaatgctggttagaactcatatgcaggatctgaaggacgtaaccagagaaactcactatgagaactaccgcgctcagtgcatccagtcaatgacccggctggtggtaaaggagcggaaccggaacaaactgacccgggagtcagggaccgactttccgattcctgcagtcccacctgggaccgatcctgaaaccgaaaagctgatccgcgaaaaggatgaggagttgaggaggatgcaggagatgctgcacaaaatacagaaacagatgaaggagaattac

SEQ ID NO: 32533 - DNA, 1434 bp, synthetic construct
  misc_feature 1..1434: note = Description of Artificial Sequence: Synthetic coding sequence
  source 1..1434: mol_type = other DNA
atggaccggtctcttggatggcagggaaactctgtgccggaggatcgaacggaggcgggcattaaaaggttcctcgaagacactacagatgacggagaattgtctaaatttgtgaaggatttcagcgggaatgcttcgtgccacccgccggaggctaaaacatgggcgagtcgccctcaggtccctgaacccagacctcaggcccctgatctctatgatgacgacctcgaattcagacccccttcacgcccacagtctagcgacaatcaacagtacttttgtgctcccgccccacttagcccgagtgctagacctcgatcaccatgggggaaacttgacccatatgactcctccgaggacgataaagagtacgtcggcttcgctacactgcctaatcaggttcatcgaaagtctgtgaaaaagggctttgatttcactttgatggttgccggcgaatctgggctcggcaagtccacactggttaattcgctgtttctcacagacctgtatagggaccggaagttgcttggcgccgaagaaagaataatgcagacagttgagattaccaagcatgcagtggatatagaagaaaaaggtgtccggctccggctcacgattgttgacactcccggttttggcgatgcagtgaacaatactgaatgttggaaaccagtcgccgagtacattgatcagcagttcgaacagtatttcagagatgaatcaggccttaataggaagaatattcaggataacagggtccattgttgcctctactttattagcccgttcggccacggcttaagacccctggatgtcgaatttatgaaagccctgcatcagcgtgtgaatatagtaccaatactcgcgaaggcagatacactgactccccccgaggttgaccataagaaacgcaaaatccgggaagagatcgagcacttcggaattaagatctatcagtttccggactgcgactccgacgaggatgaagacttcaagctccaggatcaagccctcaaggaaagtataccttttgccgttatcggctctaacactgtcgttgaagcccgcggccgccgggtgcgtgggcggctgtacccttggggaatcgtggaggtggagaaccccggacactgcgactttgttaagctcaggacaatgttggtgcgaactcacatgcaggacctcaaggacgtgacgagagagacccattacgaaaattatcgggctcagtgtatacagagcatgactagactcgtggtgaaggagcggaatcggaacaagttaacccgggaaagcgggaccgatttccccatcccagcggtgcctcccggaactgatcctgagacagagaaactgattcgtgagaaggacgaggaactcaggaggatgcaggagatgctgcacaaaattcagaagcagatgaaagagaattat

SEQ ID NO: 32534 - DNA, 1434 bp, synthetic construct
  misc_feature 1..1434: note = Description of Artificial Sequence: Synthetic coding sequence
  source 1..1434: mol_type = other DNA
atggaccgatccctgggatggcagggaaatagcgtgcccgaggaccggactgaggccggaatcaagcgctttcttgaggacacaacagacgatggcgagttgagcaagttcgtcaaggacttttctggaaatgcaagttgtcaccccccggaggctaaaacttgggccagcagaccacaggtgcctgagccccgaccccaggcccccgatctctacgacgacgacttggagttcaggcctcctagccgcccccagtcgagcgacaatcagcaatacttctgcgccccagcccctctgagcccatccgctcgaccacgttccccctggggaaagctggacccttatgactcctcggaagatgacaaggaatatgtgggcttcgctaccctgccaaatcaggtgcataggaagtccgtgaaaaagggattcgatttcacactgatggtggcaggagagagtggccttggcaagtccaccctcgtgaattccctgtttttgaccgacctttatagagaccgcaagctactgggcgcagaagaaaggattatgcagacagtggaaattaccaagcacgcggtcgacatcgaggagaaaggcgtacgtctgagactcacaattgtggacacccctggtttcggcgacgccgtgaacaacacggagtgttggaagccggttgccgagtatatagaccagcagtttgagcaatatttccgagacgaaagtggactaaatcgaaagaacattcaagacaaccgtgttcattgctgtttatatttcatatccccattcgggcatgggctgcgcccccttgatgttgagtttatgaaggcccttcatcagcgagttaacatagtccccatactggcgaaagcggacactctgactccacccgaggtggatcataagaaaaggaagatcagggaagagattgaacacttcggtataaagatttatcagtttcccgattgtgacagcgacgaggatgaagactttaagttgcaggatcaagctctgaaagaaagtatccctttcgcggtcattggaagcaacacagttgtagaagctagaggaagaagagtccgagggagactctatccttggggaatcgtggaggtggagaatcccggccactgtgattttgtgaaactccgaactatgttggtacggactcacatgcaggacctgaaggacgtcacaagagaaactcactacgaaaactatagagcgcagtgcattcaaagcatgactaggctagtggtgaaagaaagaaaccgaaacaaacttacgagggagagcggtacagattttcccatccctgcagtgcctccaggaacggaccccgagaccgagaaacttatccgagagaaagacgaggaactgaggagaatgcaagagatgctccacaagatccagaagcagatgaaagaaaactac
